(19) United States
(12) Patent Application Publication
(10) Pub. No.: US 2009/0018031 A1
(43) Pub. Date: Jan. 15, 2009

(54) Transcriptional regulatory elements of biological pathways tools, and methods

(75) Inventors: Nathan Trinklein, Redwood City, CA (US); Shelley Force Aldred, Hayward, CA (US)

Correspondence Address: WILSON SONSINI GOODRICH & ROSATI, 650 PAGE MILL ROAD, PALO ALTO, CA, 94304-1050, US

(73) Assignee: SwitchGear Genomics, Menlo Park, CA (US)

(21) Appl. No.: 11/999,792

(22) Filed: Dec. 6, 2007

Related U.S. Application Data
(60) Provisional application No. 60/873,871, filed on Dec. 7, 2006.
(60) Provisional application No. 60/873,853, filed on Dec. 7, 2006.
(60) Provisional application No. 60/873,737, filed on Dec. 7, 2006.
(60) Provisional application No. 60/873,739, filed on Dec. 7, 2006.
(60) Provisional application No. 60/873,882, filed on Dec. 7, 2006.
(60) Provisional application No. 60/873,883, filed on Dec. 7, 2006.
(60) Provisional application No. 60/873,738, filed on Dec. 7, 2006.
(60) Provisional application No. 60/958,616, filed on Jul. 6, 2007.

(51) Int. Cl. C40B 30/06; C40B 40/06; C40B 40/02; C40B 60/00

(52) U.S. Cl. 506/10; 506/16; 506/14; 506/33

(57) ABSTRACT

The present invention provides compositions, kits, assemblies, libraries, arrays, and high throughput methods for large scale structural and functional characterization of gene expression regulatory elements in a genome of an organism, especially in a human genome, that are part of a common pathway. In one aspect of the invention, an array of expression constructs is provided, each of the expression constructs comprising: a nucleic acid segment operably linked with a reporter sequence in an expression vector such that expression of the reporter sequence is under the transcriptional control of the nucleic acid segment. The present invention can have a wide variety of applications such as in personalized medicine, pharmacogenomics, and correlation of polymorphisms with phenotypic traits.

### CROSS-REFERENCE

[0001] This application claims the benefit of U.S. Provisional Application No. 60/873,871, filed Dec. 7, 2006; U.S. Provisional Application No. 60/873,853, filed Dec. 7, 2006; U.S. Provisional Application No. 60/873,737, filed Dec. 7, 2006; U.S. Provisional Application No. 60/873,739, filed Dec. 7, 2006; U.S. Provisional Application No. 60/873,882, filed Dec. 7, 2006; U.S. Provisional Application No. 60/873,883, filed Dec. 7, 2006; U.S. Provisional Application No. 60/873,738, filed Dec. 7, 2006; and U.S. Provisional Application No. 60/958,616, filed Jul. 6, 2007, which are incorporated herein by reference in their entirety.

### SEQUENCE LISTING

[0002] A CD containing a formal sequence listing was filed in this application and the contents of the CD are expressly incorporated herein in their entirety by reference.

### BACKGROUND OF THE INVENTION

[0003] The regulation of human gene expression is a critical, highly coordinated, and complex process. Gene regulation plays a crucial role in virtually every biological process from coordinating cell division to responding to extracellular stimuli and directing transcription during development (Ahituv et al. 2004; Blais and Dynlacht 2004; Pirkkala et al. 2001). While knowledge of regulation at the level of individual genes is progressing, global characterization of gene regulation currently represents one of the major challenges and fundamental goals for biomedical research. An initial step in achieving this goal is the comprehensive identification of transcriptional regulatory elements in the human genome. Towards this end, the ENCODE (Encyclopedia of DNA Elements) project began in 2004 as a collective effort of many labs to identify the functional elements in 1% of the human genome (The ENCODE Project Consortium 2004).

[0004] Promoters are the best-characterized transcriptional regulatory sequences in complex genomes because of their predictable location immediately upstream of transcription start sites (TSS). They are often described as having two separate segments: core and extended promoter regions. The core promoter is generally within 50 bp of the TSS, where the pre-initiation complex forms and the general transcription machinery assembles. The extended promoter can contain specific regulatory sequences that control spatial and temporal expression of the downstream gene (reviewed in (Butler and Kadonaga 2002)).

[0005] Several technologies currently exist to study the functional regions of the human genome. Expression microarrays enable researchers to measure the steady state level of all the genes in the genome under different conditions. Another technique that combines chromatin immunoprecipitation and genomic microarrays (ChIP-chip) can determine the binding sites of a transcription factor across the genome. Sequencing the genomes of many different individuals and even different species can also show which sequences in the genome are under selective constraint. Additionally, assays of epigenetic modifications such as DNA-methylation status add more information to regulatory element studies. All of these experimental approaches produce valuable observations, but they do not directly measure the function of DNA regulatory elements especially in the context of specific biological pathways. The present invention provides innovative solutions that directly measure the function of regulatory elements in the context of gene regulation of specific biological pathways. The present invention enables the characterization of regulatory elements in specific biological pathways and uses of the information generated in the functional studies for research, diagnosis, prevention and treatment of diseases or conditions.

### SUMMARY OF THE INVENTION

[0006] The invention relates to methods, compositions and devices, e.g., for functional and structural characterization of genes. In one aspect the invention, a library is provided. In some embodiments the library comprises of a plurality of different expression constructs, each member of the library comprising a different nucleic acid segment from a genome, where the segment comprises transcription regulatory sequences operably linked with a heterologous reporter sequence in an expression vector such that expression of the reporter sequence is under transcriptional control of the transcription regulatory sequences, and where a plurality comprising at least 20% of the transcription regulatory sequences of said expression constructs in said library are part of a common pathway.

[0007] In some embodiments the transcription regulatory sequences that are part of a common pathway in the library control the expression of genes involved in the same biological process. In some embodiments, the transcription regulatory sequences that are part of a common pathway in the library are all bound by the same transcription factor protein, complex of transcription factor proteins, other nucleic acid binding proteins, or other small molecule. In some embodiments, the transcription regulatory sequences that are part of a common pathway in the library control the expression of genes whose transcript levels or proteins levels change upon treatment or exposure to the same stimulus. In some embodiments, the transcription regulatory sequences that are part of a common pathway in the library contain the same DNA sequence motif or collection of DNA sequence motifs wherein a sequence motif is string of 2 or more nucleotides. In some embodiments, the transcription regulatory sequences that are part of a common pathway in the library control the expression of genes whose sequences, transcripts or proteins are connected via metabolic transformations and/or physical protein-protein, protein-DNA and protein-compound interactions.

[0008] In some embodiments, the common pathway is selected from the group consisting of oncology, membrane, vascular, neuronal, signaling and nuclear receptor pathway. In some embodiments, the common pathway is an oncology pathway. In some embodiments, the oncology pathway is selected from the group consisting of hypoxia pathway, DNA-damage pathway, apoptosis pathway, cell cycle pathway, and p53 pathway. In some embodiments, a plurality of transcription regulatory sequences in an oncology pathway are differently selected from the group consisting of hypoxia pathway, DNA-damage pathway, apoptosis pathway, cell cycle pathway, and p53 pathway. In some embodiments, the regulatory elements in an oncology pathway are selected from the group consisting of SEQ ID NO: 1-3836.

[0009] In some embodiments, the common pathway is a membrane pathway. In some embodiments, the membrane pathway is selected from the group consisting of transport protein pathways, G-protein coupled receptor pathways, ion channel pathways, and cell adhesion protein pathways. In some embodiments, a plurality of transcription regulatory sequences in a membrane pathway are differently selected from the group consisting of transport protein pathways, G-protein coupled receptor pathways, ion channel pathways, and cell adhesion protein pathways. In some embodiments, the regulatory elements in a membrane pathway are selected from the group consisting of SEQ ID NO: 3837-12716.

[0010] In some embodiments the common pathway is a nuclear receptor pathway. In some embodiments, the nuclear receptor pathway is selected from the group consisting of glucocorticoid receptor pathway, peroxisome proliferator-activated receptor pathway, estrogen receptor pathway, androgen receptor pathway, cytochrome P450 pathway, and transporter pathways. In some embodiments, a plurality of transcription regulatory sequences in a nuclear pathway are differently selected from the group consisting of glucocorticoid receptor pathway, peroxisome proliferator-activated receptor pathway, estrogen receptor pathway, androgen receptor pathway, cytochrome P450 pathway, and transporter pathways. In some embodiments, the regulatory elements in a nuclear receptor pathway are selected from the group consisting of SEQ ID NO: 12717-13994.

[0011] In some embodiments, the library comprises at least ten, at least 50, at least 100, at least 200, or at least 1000 expression constructs. In some embodiments, the segments in the library have an average length of at least 200 nucleotides. In some embodiments, the average length of the nucleic acid segments in the library is between 200 nucleotides and 3000 nucleotides. In some embodiments, each nucleic acid segment in the library comprises at least 200 nucleotides upstream of a transcriptional start site.

[0012] In some embodiments, the reporter sequences encode the same reporter molecule. In some embodiments, the reporter sequence encodes a light-emitting reporter molecule, a fluorescent reporter molecule or a colorimetric molecule. In some embodiments, each reporter sequence comprises a pre-determined, unique nucleotide barcode and/or a reporter that reports a visible signal.

[0013] In some embodiments, the library comprises a different nucleic acid segment from a genome, where the genome is a mammalian genome. In some embodiments, the genome is a human genome. In some embodiments, the genome is a mouse genome.

[0014] In some embodiments, the library comprises at least 10 different expression constructs, where about 50% of the transcription regulatory sequences of the expression constructs in the library are part of a common pathway.

[0015] In some embodiments, the invention provides a library of isolated nucleic acid molecules, each member of the library comprising a different, pre-determined nucleic acid segment from a genome, where the segment comprises transcription regulatory sequences, and where a plurality comprising at least 20% of the transcription regulatory sequences in the library are part of a common pathway. In some embodiments, the library comprises at least 10 different pre-determined nucleic acid segments from a genome, where about 50% of the transcription regulatory sequences of the library are part of a common pathway.

[0016] In some embodiments, the invention provides a library of cells, where each cell in the library of cells comprises a different member of a library of expression constructs, where each member of the library of expression constructs comprises a different nucleic acid segment from a genome, where the segment comprises transcription regulatory sequences, operably linked with a heterologous reporter sequence in an expression vector such that expression of the reporter sequence is under transcriptional control of the transcription regulatory sequences, and where a plurality comprising at least 20% of the transcription regulatory sequences of the expression constructs in said library are part of a common pathway. In some embodiments, the cells are human cells. In some embodiments, the cells are non-human cells. In some embodiments, the library of cells comprises at least at least 10 different expression constructs where about 50% of the transcription regulatory sequences of the expression constructs in the library are part of a common pathway.

[0017] In one aspect of the invention, a device is provided. In some embodiments, the device comprises a plurality of receptacles, each receptacle containing a different member of a library of expression constructs, each expression construct comprising a different, nucleic acid segment from a genome, where the segment comprises transcription regulatory sequences, operably linked with a heterologous reporter sequence in an expression vector such that expression of the reporter sequence is under transcriptional control of the transcription regulatory sequences, where a plurality comprising at least 20% of the transcription regulatory sequences of said expression constructs in said library are part of a common pathway and where each member has a known location among the receptacles.

[0018] In some embodiments the library in the device has a diversity of at least 10 different nucleic acid segments. In some embodiments, each nucleic acid segment in the device is naturally linked in the genome with a sequence expressed as a cDNA. In some embodiment, the average length of the nucleic acid segments in the library is at least 200 nucleotides. In some embodiments, the constructs are in the form of a dried nucleic acid or are in solution. In some embodiments, the constructs are in a stabilized transfection matrix.

[0019] In some embodiments, the device comprises a microtiter plate. In some embodiment, the microtiter plate is a 96-well plate, a 384-well plate or a 1536 well plate.

[0020] In some embodiments, the device comprises at least at least 10 different expression constructs where about 50% of the transcription regulatory sequences of the expression constructs in the library are part of a common pathway.

[0021] In some embodiments, the invention provides a device comprising a solid substrate comprising a surface and nucleic acid molecules immobilized to the surface, each at a different known location, where each molecule comprises a nucleotide sequence of at least 10 nucleotides from a genomic segment comprising transcription regulatory sequences and where a plurality comprising at least 20% of the transcription regulatory sequences in the device are part of a common pathway.

[0022] In some embodiments the device comprises transcription regulatory sequences from at least 10 different genomic segments. In some embodiments, the device comprises at least 10 different transcription regulatory sequences from genomic segments where about 50% of the transcription regulatory sequences in the device are part of a common pathway. In some embodiments, each nucleic acid segment in the device is naturally linked in the genome with a sequence expressed as a cDNA. In some embodiments, the nucleic acid segments in the device are no more than 60 nucleotides long. In some embodiments, each genomic segment in the device is represented by a set comprising a plurality of molecules, each molecule in the set comprising a different nucleotide sequence from the genomic segment.

[0023] In one aspect of the invention, methods are provided. In some embodiments, the invention provides for a method that comprises: (a) providing a device comprising a plurality of receptacles, each receptacle containing a different member of a library of cells, where each cell in the library of cells comprises a different member of the library of expression constructs, each expression construct comprising a different nucleic acid segment from a genome, where the segment comprises transcription regulatory sequences, operably linked with a heterologous reporter sequence in an expression vector such that expression of the reporter sequence is under transcriptional control of the transcription regulatory sequences; where a plurality comprising at least 20% of the transcription regulatory sequences in the device are part of a common pathway and where each member of the library of cells has a known location among the receptacles; (b) culturing the cells; and (c) measuring the level of expression of the reporter sequence in each receptacle. In some embodiments of the methods of the invention, the library has a diversity of at least 10 different nucleic acid segments. In some embodiments, each nucleic acid segment is naturally linked in the genome with a sequence expressed as a RNA molecule. In some embodiments, the average length of the nucleic acid segments in the library is at least 200 nucleotides.

[0024] In some embodiments, the method in step (a) above further comprises: (i) providing a device comprising at least one plate comprising a plurality of receptacles, each receptacle containing a different member of the library of expression constructs, where each member of the library of expression constructs has a known location among the receptacles; (ii) delivering cells to each of the receptacles; and (iii) transfecting the cells with the expression constructs.

[0025] In some embodiments, the method further comprises: (d) perturbing the cells in each receptacle; (e) measuring the level of expression of the reporter sequence in each receptacle; and (f) determining whether the level of expression in any receptacle changed after perturbing the cells. In some embodiments, perturbing comprises contacting the cells in each receptacle with a test compound, exposing the cells to different environmental conditions, or genetically modifying the cells either permanently or transiently such as by inducing mutation, overexpressing a transcript for example by transfecting with a cDNA or decreasing expression of a transcript by siRNA. In some embodiments, perturbing comprises contacting the cells in each receptacle with a test compound. In some embodiments, the method further comprises identifying a compound that alters transcription of one or more polynucleotides.

[0026] In some embodiments, the cells in the library of cells comprise cells associated with a condition. In some embodiments, each cell in the library of cells comprises a DNA polymorphism, DNA mutation or DNA epigenetic change. In some embodiments, the DNA polymorphism is selected for the group consisting of SNP, STR, VTR, RFLP, deletions, and insertions. In some embodiments, the DNA mutation is selected from the group consisting of point mutations, deletions, and insertions. In some embodiments, the DNA epigenetic change is selected for the group consisting of chemical modifications and chromatin structure. In some embodiments the DNA epigenetic change is a chemical modification. In some embodiments, the chemical modification is DNA methylation.

[0027] In some embodiments, the cells in the library of cells are obtained from an individual. In some embodiments, the transcriptional activity of a regulatory element is determined in the genome of said individual. In some embodiments, the transcriptional activity of a regulatory element is correlated with a disease condition.

[0028] In some embodiments, the invention provides a method to determine the functional effect of a DNA polymorphism, DNA mutation or DNA epigenetic change in the transcriptional activity of a polynucleotide. The method comprises: (a) providing a first library of cells where the first library comprises cells comprising said DNA polymorphism, DNA mutation or DNA epigenetic change; (b) providing a second library of cells where the second library comprises cells not comprising the DNA polymorphism, DNA mutation or DNA epigenetic change; (c) providing a device comprising a plurality of receptacles, each receptacle containing a different member of the first library of cells or the second library of cells, where each cell in the first and second library of cells comprises a different member of the library of expression constructs, each expression construct comprising a different nucleic acid segment from a genome, where the segment comprises transcription regulatory sequences, operably linked with a heterologous reporter sequence in an expression vector such that expression of the reporter sequence is under transcriptional control of the transcription regulatory sequences; where a plurality comprising at least 20% of the transcription regulatory sequences in the device are part of a common pathway and where each member of the library of cells has a known location among the receptacles; (d) culturing the cells; (e) measuring the level of expression of the reporter sequence in each receptacle; (f) comparing the level of expression of the reporter sequence to each transcription regulatory sequence between the first library of cells and the second library of cells thereby determining the effect of said DNA polymorphism, DNA mutation or DNA epigenetic change in the transcriptions of a polynucleotide.

[0029] In some embodiments, the DNA polymorphism is selected for the group consisting of SNP, STR, VTR, RFLP deletions and insertions. In some embodiments, the DNA mutation is selected from the group consisting of point mutations, deletions, and insertions. In some embodiments, the DNA epigenetic change is selected for the group consisting of chemical modifications and chromatin structure. In some embodiments, the DNA epigenetic change is a chemical modification. In some embodiments, the chemical modification is DNA methylation.

[0030] In one aspect the invention provides a business method comprising commercializing the compositions, devices of methods described herein.

### INCORPORATION BY REFERENCE

[0031] All publications and patent applications mentioned in this specification are herein incorporated by reference to the same extent as if each individual publication or patent application was specifically and individually indicated to be incorporated by reference.

### BRIEF DESCRIPTION OF THE DRAWINGS

[0032] The novel features of the invention are set forth with particularity in the appended claims. A better understanding of the features and advantages of the present invention will be obtained by reference to the following detailed description that sets forth illustrative embodiments, in which the principles of the invention are utilized, and the accompanying drawings of which:

[0033] FIG. 1 schematically illustrates an embodiment of the invention for identifying, isolating and functionally analyzing regulatory elements in a common pathway.

[0034] FIG. 2 schematically illustrates an embodiment of the method for detecting transcriptional activity of a plurality of regulatory elements in a high throughput manner.

[0035] FIG. 3 schematically illustrates another embodiment of the method for detecting transcriptional activity of a plurality of regulatory elements in a large scale, high throughput manner.

[0036] FIG. 4 schematically illustrates an embodiment of the method for large scale, high throughput determination of methylation status of regulatory elements from a common biological pathway.

### DETAILED DESCRIPTION OF THE INVENTION

[0037] The present invention relates to the functional measure of gene regulatory elements of specific biological pathways. The present invention relates to high throughput methods for structural and functional characterization of gene expression regulatory elements relevant to biological pathways in a genome of an organism, preferably a mammalian genome, and more preferably a human genome. The inventive methods can be utilized as a high-throughput and easy-to-use system for characterization of the regulatory elements relevant to biological pathways on a large scale, preferably on a genome-wide scale. Compositions, assemblies, libraries, arrays and kits are also provided to allow one to measure the activity of the regulatory elements relevant to biological pathways in the genome in multiple experimental conditions in an efficient and economic way. In some embodiments, promoter microarrays and promoter functional macroarrays are provided for determining transcription factor binding and promoter activity on the same DNA fragment. Such functional libraries or arrays of the regulatory elements can have a wide variety of applications in research, diagnosis, prevention and treatment of diseases or conditions.

[0038] In one aspect, by using the invention, the activity of a large number of different regulatory elements can be assessed or determined across diverse cell types or through a differentiation time-course to find tissue-specific and ubiquitous promoters. The activity of the regulatory elements can be detected or determined under different conditions, such as before and after the addition of a siRNA, cDNA, or other compound or drug to identify promoters that are up-regulated or down-regulated in response to a specific treatment. Effects of transcription factors binding to the regulatory element can also be assessed efficiently. The collection of these regulatory elements can be further analyzed for a sequence motif that is functionally relevant, for status of DNA methylation or other epigenetic modifications.

[0039] In another aspect, the functional arrays provided by the present invention enables researchers to directly measure the functional activity of promoter fragments relevant to biological pathways that the previous approaches do not. In addition, the spotted promoter arrays or oligo-based promoter arrays also enable chromatin immunoprecipitation and methylation studies to be performed on the exact same promoter fragments and with an integrated computational platform. The integration of multiple types of independent data related to promoter function provides a profoundly new capability in the study of genome-wide transcriptional regulation and specific pathway analysis. This process and methodology allow, for the first time, the simultaneous study of promoter activity, transcription factor binding, and DNA methylation on a large number of regulatory elements relevant to biological pathways throughout the human genome. In addition, this process and methodology allow for identification of compounds or conditions that alter the transcriptional activity of one or more polynucleotides related to a biological pathway.

[0040] While not wishing to be bound by theory, it is believed that functional assays are important because although experimental tools like expression microarrays and chromatin immunoprecipitation produce valuable observations, they do not explain the mechanism or measure the direct function of the DNA regulatory elements themselves. Functional data from promoters can show that increased promoter activity and thus increased rates of transcription initiation result in high transcript levels detected in a microarray experiment rather than post-transcriptional mechanisms that stabilize the transcript. Furthermore, the promoter functional assay localizes the activity of interest to a specific DNA fragment and enables the discovery of the exact functional motifs contained in that region.

[0041] It is also believed that any one experimental platform alone is not sufficient to fully describe a biological system. A gene may be highly expressed as measured by a microarray based on nucleic acid hybridization, but it cannot be determined why. A transcription factor may bind near a particular gene in the genome, but the functional consequences of binding cannot be determined. A stretch of sequence may be highly conserved, but the reason natural selection has acted to preserve this sequence is unknown. A promoter may be methylated in one cell type and unmethylated in another, but the functional consequences of this difference is not immediately clear. In addition, a promoter may show increased activity in a cell-based functional assay upon the addition of a compound, but one can only make guesses as to why its activity changed without other lines of experimental evidence. Each experimental approach also has its own inherent biases and unique issues related to that particular approach. Thus, the inventors believe that it is only when researchers integrate the information gathered from many diverse techniques they are able to gain a full picture of a biological system, independent of the limitations specific to any one experiment.

[0042] The present invention provides an innovative methodology and products to facilitate an integrated approach to regulatory element network analysis relevant to specific biological pathways and use the information generated therefrom for researching the molecular genetic mechanisms of predisposition, onset and/or development of diseases, for development of effective measures for diagnosis, prevention and treatment of diseases.

### I. DEFINITIONS

[0043] As used herein, the term “nucleic acid” refers to single-stranded and/or double-stranded polynucleotides such as deoxyribonucleic acid (DNA), and ribonucleic acid (RNA) as well as analogs or derivatives of either RNA or DNA. Also included in the term “nucleic acid” are single-stranded and/or double-stranded polynucleotides as normally found in nature (“natural nucleic acids”), e.g., methylated nucleic acid or unmethylated nucleic acid. Also included in the term “nucleic acid” are analogs of nucleic acids such as peptide nucleic acid (PNA), phosphorothioate DNA, and other such analogs and derivatives or combinations thereof. Thus, the term also should be understood to include, as equivalents, derivatives, variants and analogs of either RNA or DNA made from nucleotide analogs, single (sense or antisense) and double-stranded polynucleotides, including double-stranded RNA. Deoxyribonucleotides include deoxyadenosine, deoxycytidine, deoxyguanosine and deoxythymidine. For RNA, the uracil base is uridine.

[0044] As used herein, the term “polynucleotide” refers to an oligomer or polymer containing at least two linked nucleotides or nucleotide derivatives, including a deoxyribonucleic acid (DNA), a ribonucleic acid (RNA), and a DNA or RNA derivative containing, for example, a nucleotide analog or a “backbone” bond other than a phosphodiester bond, for example, a phosphotriester bond, a phosphoramidate bond, a phosphorothioate bond, a thioester bond, or a peptide bond (peptide nucleic acid). The term “oligonucleotide” also is used herein essentially synonymously with “polynucleotide,” although those in the art recognize that oligonucleotides, for example, PCR primers, generally are less than about fifty to one hundred nucleotides in length.

[0045] Nucleotide analogs contained in a polynucleotide can be, for example, mass modified nucleotides, which allows for mass differentiation of polynucleotides; nucleotides containing a detectable label such as a fluorescent, radioactive, luminescent or chemiluminescent label, which allows for detection of a polynucleotide; or nucleotides containing a reactive group such as biotin or a thiol group, which facilitates immobilization of a polynucleotide to a solid support. A polynucleotide also can contain one or more backbone bonds that are selectively cleavable, for example, chemically, enzymatically or photolytically. For example, a polynucleotide can include one or more deoxyribonucleotides, followed by one or more ribonucleotides, which can be followed by one or more deoxyribonucleotides, such a sequence being cleavable at the ribonucleotide sequence by base hydrolysis. A polynucleotide also can contain one or more bonds that are relatively resistant to cleavage, for example, a chimeric oligonucleotide primer, which can include nucleotides linked by peptide nucleic acid bonds and at least one nucleotide at the 3′ end, which is linked by a phosphodiester bond or other suitable bond, and is capable of being extended by a polymerase. Peptide nucleic acid sequences can be prepared using well known methods (see, for example, Weiler et al. Nucleic acids Res. 25: 2792-2799 (1997)).

[0046] As used herein, to hybridize under conditions of a specified stringency is used to describe the stability of hybrids formed between two single-stranded DNA fragments and refers to the conditions of ionic strength and temperature at which such hybrids are washed, following annealing under conditions of stringency less than or equal to that of the washing step. Typically high, medium and low stringency encompass the following conditions or equivalent conditions thereto:
[0047] 1) high stringency: 0.1×SSPE or SSC, 0.1% SDS, 65° C.;
[0048] 2) medium stringency: 0.2×SSPE or SSC, 0.1% SDS, 50° C.;
[0049] 3) low stringency: 1.0×SSPE or SSC, 0.1% SDS, 50° C.

[0050] Equivalent conditions refer to conditions that select for substantially the same percentage of mismatch in the resulting hybrids. Additions of ingredients, such as formamide, Ficoll, and Denhardt's solution affect parameters such as the temperature under which the hybridization should be conducted and the rate of the reaction. Thus, hybridization in 5×SSC, in 20% formamide at 42° C. is substantially the same as the conditions recited above hybridization under conditions of low stringency. The recipes for SSPE, SSC and Denhardt's and the preparation of deionized formamide are described, for example, in Sambrook et al. (1989) Molecular Cloning, A Laboratory Manual, Cold Spring Harbor Laboratory Press, Chapter 8; see, Sambrook et al., vol. 3, p. B.13, see, also, numerous catalogs that describe commonly used laboratory solutions). It is understood that equivalent stringencies can be achieved using alternative buffers, salts and temperatures.

[0051] The term “substantially” identical or homologous or similar varies with the context as understood by those skilled in the relevant art and generally means at least 70%, preferably means at least 80%, more preferably at least 90%, and most preferably at least 95% identity.

[0052] The term “fragment,” “segment,” or “DNA segment” refers to a portion of a larger DNA polynucleotide or DNA. A polynucleotide, for example, can be broken up, or fragmented into, a plurality of segments. Various methods of fragmenting nucleic acids are well known in the art. These methods may be, for example, either chemical or physical in nature. Chemical fragmentation may include partial degradation with a DNAse; partial depurination with acid; the use of restriction enzymes; intron-encoded endonucleases; DNA-based cleavage methods, such as triplex and hybrid formation methods, that rely on the specific hybridization of a nucleic acid segment to localize a cleaveage agent to a specific location in the nucleic acid molecule; or other enzymes or compounds which cleave DNA at known or unknown locations. Physical fragmentation methods may involve subjecting the DNA to a high shear rate. High shear rates may be produced, for example, by moving DNA through a chamber or channel with pits or spikes, or forcing the DNA sample through a restricted size flow passage, e.g., an aperture having a cross sectional dimension in the micron or submicron scale. Other physical methods include sonication and nebulization. Combinations of physical and chemical fragmentation methods may likewise be employed such as fragmentation by heat and ion-mediated hydrolysis. See for example, Sambrook et al., “Molecular Cloning: A Laboratory Manual,” 3rd Ed. Cold Spring Harbor Laboratory Press, Cold Spring Harbor, N.Y. (2001) (“Sambrook et al.”) which is incorporated herein by reference in its entirety for all purposes. These methods can be optimized to digest a nucleic acid into fragments of a selected size range. Useful size ranges may be from 100, 200, 400, 700 or 1000 to 500, 800, 1500, 2000, 4000 or 10,000 base pairs. However, larger size ranges such as 4000, 10,000 or 20,000 to 10,000, 20,000 or 500,000 base pairs may also be useful.

[0053] Methods of ligation will be known to those of skill in the art and are described, for example in Sambrook et al. and the New England BioLabs catalog, both of which are incorporated herein in their entireties by reference for all purposes. Methods include using T4 DNA ligase, which catalyzes the formation of a phosphodiester bond between juxtaposed 5 phosphate and 3′hydroxyl termini in duplex DNA or RNA with blunt or and sticky ends; Taq DNA ligase, which catalyzes the formation of a phosphodiester bond between juxtaposed 5′phosphate and 3′hydroxyl termini of two adjacent oligonucleotides that are hybridized to a complementary target DNA; E. coli DNA ligase, which catalyzes the formation of a phosphodiester bond between juxtaposed 5′-phosphate and 3′-hydroxyl termini in duplex DNA containing cohesive ends; and T4 RNA ligase which catalyzes ligation of a 5′ phosphoryl-terminated nucleic acid donor to a 3′hydroxyl-terminated nucleic acid acceptor through the formation of a 3′->5′ phosphodiester bond, substrates include single-stranded RNA and DNA as well as dinucleoside pyrophosphates; or any other methods described in the art.

[0054] “Genome” designates or denotes the complete, single-copy set of genetic instructions for an organism as coded into the DNA of the organism. A genome may be multi-chromosomal such that the DNA is distributed among a plurality of individual chromosomes. For example, in human there are 22 pairs of chromosomes plus a gender associated XX or XY pair.

[0055] “Polymorphism” refers to the occurrence of two or more genetically determined alternative sequences or alleles in a population. A polymorphic marker or site is the locus at which divergence occurs. Preferred markers have at least two alleles, each occurring at a frequency of preferably greater than 1%, and more preferably greater than 10% or 20% of a selected population. A polymorphism may comprise one or more base changes, an insertion, a repeat, or a deletion. A polymorphic locus may be as small as one base pair. Polymorphic markers include single nucleotide polymorphisms (SNP's), restriction fragment length polymorphisms (RFLP's), variable number of tandem repeats (VNTR's), hypervariable regions, minisatellites, dinucleotide repeats, trinucleotide repeats, tetranucleotide repeats, simple sequence repeats, and insertion elements such as Alu. The first identified allelic form is arbitrarily designated as the reference form and other allelic forms are designated as alternative or variant alleles. The allelic form occurring most frequently in a selected population is sometimes referred to as the wildtype form. Diploid organisms may be homozygous or heterozygous for allelic forms. A diallelic polymorphism has two forms. A triallelic polymorphism has three forms. A polymorphism between two nucleic acids can occur naturally, or be caused by exposure to or contact with chemicals, enzymes, or other agents, or exposure to agents that cause damage to nucleic acids, for example, ultraviolet radiation, mutagens or carcinogens.

[0056] Single nucleotide polymorphisms (SNPs) are positions at which two alternative bases occur in the human population, and are the most common type of human genetic variation. The site is usually preceded by and followed by highly conserved sequences of the allele (e.g., sequences that vary in less than 1/100 or 1/1000 members of the populations). It is estimated that there are as many as 3×106 SNPs in the human genome. Variations that occur at a rate of at least 10% are referred to as common SNPs.

[0057] A single nucleotide polymorphism usually arises due to substitution of one nucleotide for another at the polymorphic site. A transition is the replacement of one purine by another purine or one pyrimidine by another pyrimidine. A transversion is the replacement of a purine by a pyrimidine or vice versa. Single nucleotide polymorphisms can also arise from a deletion of a nucleotide or an insertion of a nucleotide relative to a reference allele.

[0058] The term genotyping refers to the determination of the genetic information an individual carries at one or more positions in the genome. For example, genotyping may comprise the determination of which allele or alleles an individual carries for a single polymorphism or the determination of which allele or alleles an individual carries for a plurality of polymorphisms.

[0059] As used herein, “profiling” refers to detection and/or identification of a plurality of components, generally 3 or more, such as 4, 5, 6, 7, 8, 10, 50, 100, 500, 1000; 10⁴, 105, 10⁶, 10⁷, or more, in a sample. A profile can include the identified loci to which components of a sample detectably bind or are otherwise located. The profile can be detected, e.g., in a multi-well plate, or as a pattern on a solid surface, in which case the profile can be presented as a visual image. The profile can be in the form of a list or database or other such compendium.

[0060] As used herein, an image refers to a collection of data points representative of a profile. An image can be a visual, graphical, tabular, matrix or other depiction of such data. It can be stored in a database.

[0061] As used herein, a database refers to a collection of data items.

[0062] As used herein, in an addressable collection of components of interest, such as a library of transcription regulatory elements (with pre-determined sequences), expression vectors encoding transcription regulatory elements, and cells containing expression vectors encoding transcription regulatory elements, each member of the collection is labeled and/or is positionally located to permit identification of each of member of the components. The addressable collection is typically an array or other encoded (such as bio-barcoded with unique nucleic acid tags) collection in which each locus contains a single, unique component and is identifiable. The collection can be in the liquid phase if other discrete identifiers, such as chemical, electronic, colored, fluorescent or other tags are included.

[0063] As used herein, an address refers to a unique identifier whereby an addressed entity can be identified. An addressed moiety is one that can be identified by virtue of its address. Addressing can be effected by position on a surface or by other identifier, such as a tag encoded with a bar code or other symbology, a chemical tag, an electronic, such RF tag, a color-coded tag or other such identifier.

[0064] As used herein, a nucleotide barcode refers to a specific type of address, more specifically, predesigned, predetermined and unique nucleotide sequence tag which can be used to uniquely identify each member in a collection of transcription regulatory elements, expression vectors encoding transcription regulatory elements, and cells containing expression vectors encoding transcription regulatory elements. Such a nucleic acid barcode may be 3-200, 5-200, 8-100, or 10-50 nucleotides in length, and discrete and tailorable hybridization and melting properties. Barcodes are heterologous to the molecules they tag.

[0065] An “array” comprises a support, preferably solid, comprising a plurality of different, known locations at which an item can be placed. Arrays include, for example, microtiter plates with addressable wells and chips comprising bound molecules at addressable locations. Members of the array may be identified by virtue of an identifiable or detectable label, such as by color, fluorescence, electronic signal (i.e., RF, microwave or other frequency that does not substantially alter the interaction of the molecules of interest), bar code (such as bio-barcode with unique nucleic acid tags) or other symbology, chemical or other such label. For example, the members of the array may be positioned in a container such as a well of a multi-well plate (such as a microtiter plate with 96, 384, or 1536 loci) or a vial, or immobilized to discrete identifiable loci on the surface of a solid phase or directly or indirectly linked to or otherwise associated with the identifiable label, such as affixed to a microsphere or other particulate support (herein referred to as beads) and suspended in solution or spread out on a surface. A microarray, which is used by those of skill in the art, generally is a positionally addressable array, such as an array on a solid support, in which the loci of the array are at high density. Examples of hybridization arrays, also described as “microarrays” or colloquially “chips” have been generally described in the art, for example, U.S. Pat. Nos. 5,143,854, 5,445,934, 5,744,305, 5,677,195, 5,800,992, 6,040,193, 5,424,186 and Fodor et al., Science, 251:767-777 (1991).

[0066] Arrays may generally be produced using a variety of techniques, such as mechanical synthesis methods or light directed synthesis methods, that incorporate a combination of photolithographic methods and solid phase synthesis methods. Techniques for the synthesis of these arrays using mechanical synthesis methods are described in, e.g., U.S. Pat. Nos. 5,384,261, and 6,040,193, which are incorporated herein by reference in their entirety for all purposes. Although a planar array surface is preferred, the array may be fabricated on a surface of virtually any shape or even a multiplicity of surfaces. Arrays may be nucleic acids on beads, gels, polymeric surfaces, fibers such as fiber optics, glass or any other appropriate substrate. (See U.S. Pat. Nos. 5,770,358, 5,789,162, 5,708,153, 6,040,193 and 5,800,992.)

[0067] As used herein, a support (also referred to as a matrix support, a matrix, an insoluble support or solid support) refers to any solid or semisolid or insoluble support to which an item, e.g., a molecule of interest, typically a biological molecule, organic molecule or biospecific ligand can be linked or contacted. Such materials include any materials that are used as affinity matrices or supports for chemical and biological molecule syntheses and analyses, such as, but are not limited to: polystyrene, polycarbonate, polypropylene, nylon, glass, dextran, chitin, sand, pumice, agarose, polysaccharides, dendrimers, buckyballs, polyacrylamide, silicon, rubber, and other materials used as supports for solid phase syntheses, affinity separations and purifications, hybridization reactions, immunoassays and other such applications. The matrix herein can be particulate or can be a be in the form of a continuous surface, such as a microtiter dish or well, a glass slide, a silicon chip, a nitrocellulose sheet, nylon mesh, or other such materials.

[0068] As used herein, matrix or support particles refer to matrix materials that are in the form of discrete particles. The particles have any shape and dimensions, but typically have at least one dimension that is 100 μm or less, 50 μm or less and typically have a size that is 100 mm³ or less, 50 mm³ or less, 10 mm³ or less, and 1 mm³ or less, 100 μm³ or less and may be order of cubic microns. Such particles are collectively called “beads.” They are often, but not necessarily, spherical. Such reference, however, does not constrain the geometry of the matrix, which can be any shape, including random shapes, needles, fibers, and elongated. Roughly spherical “beads”, particularly microspheres that can be used in the liquid phase, are also contemplated. The “beads” can include additional components, such as magnetic or paramagnetic particles (see, e.g., Dyna beads (Dynal, Oslo, Norway)) for separation using magnets, as long as the additional components do not interfere with the methods and analyses herein.

[0069] As used herein, a “library” is a collection of items. In certain embodiments the library is “addressable,” i.e., members of the library comprise an identifying tag or are physically located at a different, discrete, known locations, such as contained within different wells of a multi-well plate or different containers.

[0070] As used herein, “array library” refers to the collections of addressable elements or components created by physical separation of the mixed library into a number of discrete collections.

[0071] As used herein, biological sample refers to any sample obtained from a living or viral source and includes any cell type or tissue of a subject from which nucleic acid or protein or other macromolecule can be obtained. Biological samples include, but are not limited to, cell lysates, cells, body fluids, such as blood, plasma, serum, cerebrospinal fluid, synovial fluid, urine and sweat, tissue and organ samples from animals and plants, such as humans, non-human mammals such as monkeys, dogs, pigs, horses, cats, rabbits, rats, and mice, and other vertebrates such as birds and fish. Also included are soil and water samples and other environmental samples, viruses, bacteria, fungi algae, protozoa and components thereof. The methods herein can be practiced using biological samples and in some embodiments, such as for profiling, can also be used for testing any sample.

[0072] As used herein, “a reporter gene construct” is a nucleic acid molecule that includes a nucleic acid encoding a reporter operatively linked to a transcriptional control sequence. Transcription of the reporter gene is controlled by these sequences. The activity of at least one or more of these control sequences is directly or indirectly regulated by transcription factors and other proteins or biomolecules. The transcriptional control sequences include the promoter and other regulatory regions, such as enhancer sequences, that modulate the activity of the promoter, or control sequences that modulate the activity or efficiency of the RNA polymerase that recognizes the promoter, or control sequences are recognized by effector molecules. Such sequences are herein collectively referred to as transcriptional regulatory elements or sequences.

[0073] As used herein, “reporter” or “reporter moiety” refers to any moiety that allows for the detection of a molecule of interest, such as a protein expressed by a cell, or a biological particle. Typical reporter moieties include, include, for example, light emitting proteins such as luciferase, fluorescent proteins, such as red, blue and green fluorescent proteins (see, e.g., U.S. Pat. No. 6,232,107, which provides GFPs from Renilla species and other species), the lacZ gene from E. coli, alkaline phosphatase, secreted embryonic alkaline phosphatase (SEAP), chloramphenicol acetyl transferase (CAT), hormones and cytokines and other such well-known genes. For expression in cells, nucleic acid encoding the reporter moiety can be expressed as a fusion protein with a protein of interest or under to the control of a promoter of interest. The expression of these reporter genes can also be monitored by measuring levels of mRNA transcribed from these genes.

[0074] “Operatively linked” or “operably linked” refers to a functional arrangement of elements wherein the activity of one element (e.g., a promoter) results on an action on the other element (e.g., a nucleotide sequence). Thus, a given promoter that is operably linked to a coding sequence (e.g., a reporter gene) is capable of effecting the expression of the coding sequence when the proper enzymes are present. The promoter or other control elements need not be contiguous with the coding sequence, so long as they function to direct the expression thereof. For example, intervening untranslated yet transcribed sequences can be present between the promoter sequence and the coding sequence and the promoter sequence can still be considered “operably linked” to the coding sequence.

[0075] As used herein, regulatory molecule refers to a polymer of deoxyribonucleic acid (DNA) or ribonucleic acid (RNA), or an oligonucleotide mimetic, or a polypeptide or other molecule that is capable of enhancing or inhibiting expression of a gene.

[0076] As used herein, the terms “transcription regulatory region” or “transcription regulatory sequence” mean a nucleotide sequence that influences expression, positively or negatively, of an operatively linked gene. Regulatory regions include sequences of nucleotides that confer inducible (i.e., require a substance or stimulus for increased transcription) expression of a gene. When an inducer is present, or at increased concentration, gene expression increases. Regulatory regions also include sequences that confer repression of gene expression (i.e., a substance or stimulus decreases transcription). When a repressor is present or at increased concentration, gene expression decreases. Regulatory regions are known to influence, modulate or control many in vivo biological activities including cell proliferation, cell growth and death, cell differentiation and immune-modulation. Regulatory regions typically bind one or more trans-acting proteins which results in either increased or decreased transcription of the gene. In certain embodiments, the regulatory regions are cis-acting.

[0077] Particular examples of gene regulatory regions are promoters and enhancers. Promoters are sequences located around the transcription start site, typically positioned 5′ of the transcription start site. Enhancers are known to influence gene expression when positioned 5′ or 3′ of the gene, or when positioned in or a part of an exon or an intron. Enhancers also can function at a significant distance from the gene, for example, at a distance from about 3 Kb, 5 Kb, 7 Kb, 10 Kb, 15 Kb or more.

[0078] As used herein, a promoter region refers to the portion of DNA of a gene that controls transcription of the DNA to which it is operatively linked. The promoter region includes specific sequences of DNA that are sufficient for RNA polymerase recognition, binding and transcription initiation. This portion of the promoter region is referred to as the core promoter. In addition, the promoter region includes sequences that modulate this recognition, binding and transcription initiation activity of the RNA polymerase. These sequences can be cis acting or can be responsive to trans acting factors. Promoters, depending upon the nature of the regulation, can be constitutive or regulated.

[0079] Regulatory regions also include, in addition to promoter regions, sequences that facilitate translation, transcript stability, splicing signals for introns, maintenance of the correct reading frame of the gene to permit in-frame translation of mRNA, leader sequences and fusion partner sequences, internal ribosome binding sites (IRES) elements for the creation of multigene, or polycistronic, messages, polyadenylation signals to provide proper polyadenylation of the transcript of a gene of interest and stop codons and can be optionally included in an expression vector.

[0080] As used herein, a composition refers to any mixture. It can be a solution, a suspension, liquid, powder, a paste, aqueous, non-aqueous or any combination thereof.

[0081] As used herein, a combination refers to any association between among two or more items. The combination can be two or more separate items, such as two compositions or two collections, can be a mixture thereof, such as a single mixture of the two or more items, or any variation thereof.

[0082] As used herein, a kit refers to a packaged combination, optionally including instructions and/or reagents for their use.

[0083] As used herein, two nucleic acid segments are “heterologous” with respect to each other if their sequences are not found in the same genome or are not normally linked to one another within 10000 nucleotides in the same genome.

[0084] As used herein, a nucleic acid molecule is “isolated” if it is removed from its natural milieu in a genome and/or cell.

[0085] A nucleic acid molecule is “pure” or “purified” if it is the predominant biomolecular species in a mixture.

### II. BIOLOGICAL PATHWAYS

[0086] In one aspect, the present invention relates to the functional measure of the regulation of genes of a common pathway. Genes belong to a common pathway when they share one or more attributes in common in a gene ontology, a collection that assigns defined characteristics to a set of genes. The ontology administered by the Gene Ontology (“GO”) Consortium is particularly useful in this regard. Genes belonging to common pathways can be identified by searching a gene ontology, such as GO, for genes sharing one or more attributes. The common attribute could be, for example, a common structural feature, a common location, a common biological process or a common molecular function.

[0087] The wealth of information that exists in published, peer-reviewed literature concerning the function of human genes and proteins has been organized and curated using a coordinated system of controlled vocabulary that is administered by the Gene Ontology (GO) Consortium (http://www.geneontology.org/). The GO project has developed three structured controlled vocabularies (ontologies) that describe gene products in terms of their associated biological processes, cellular components and molecular functions in a species-independent manner. There are three separate aspects to this effort: first, the development and maintenance of the ontologies themselves; second, the annotation of gene products, which entails making associations between the ontologies and the genes and gene products in the collaborating databases; and third, development of tools that facilitate the creation, maintenance and use of ontologies. Of the approximately 40,000 transcribed units in the human genome, approximately 20,000 of those code for annotated proteins, and approximately 14,000 of those proteins have a functional annotation in the GO database. The functional annotations contained in the GO database are organized in a hierarchical manner, and it is possible to access this information from the GO database and search for all of the genes in the human genome that are annotated to be involved in the same biological process, reside in the same cellular component, or perform the same molecular function.

[0088] In some embodiments, transcription regulatory sequences in a common pathway are regulatory elements that control the expression of genes involved in the same biological process or molecular function as annotated by a gene ontology. One example of this is transcription regulatory sequences that control the expression of genes involved in the response to DNA damage.

[0089] In some embodiments, transcription regulatory sequences in a common pathway are regulatory elements that are all bound by the same transcription factor protein, complex of transcription factor proteins, other nucleic acid binding proteins, or other molecule. These interactions may occur in a living cell (in vivo) or in a solution of purified molecules (in vitro). For instance, all of the regulatory elements bound by the hypoxia inducible transcription factor protein.

[0090] In some embodiments, transcription regulatory sequences in a common pathway are regulatory elements that control the expression of genes whose transcript levels or proteins levels change upon treatment or exposure to the same stimulus and are thus co-regulated. For example all of the regulatory elements whose transcripts are induced or repressed upon treatment to UV radiation.

[0091] In some embodiments, transcription regulatory sequences in a common pathway are regulatory elements that contain similar sequence features. These features may be a DNA sequence motif, collection of DNA sequence motifs, or enrichment of higher order sequence features that are distinguishable from a background model of random genomic sequences. As used herein, a sequence motif is a string of 2 or more nucleic acid bases (A, T, C, or G). A DNA sequence motif can either be defined by a consensus sequence or a probability matrix where the identity of each base at each position of a motif is defined as a probability.

[0092] In some embodiments, transcription regulatory sequences in a common pathway could be regulatory elements that control the expression of genes whose sequences, transcripts or proteins are connected via metabolic transformations and/or physical protein-protein, protein-DNA and protein-compound interactions. Enzymes catalyze these reactions, and often require dietary minerals, vitamins and other cofactors in order to function properly. Because of the many chemicals that may be involved, pathways can be quite elaborate.

[0093] In some embodiments, the members of the pathway share a common structural or functional attribute. For example, the proteins could share a common sequence motif, such as a zinc finger or a transmembrane region.

[0094] In some embodiments, the genes in a common pathway belong to the same signal transduction pathway. Typically, in biology signal transduction refers to any process by which a cell converts one kind of signal or stimulus into another, most often involving ordered sequences of biochemical reactions inside the cell that are carried out by enzymes, activated by second messengers resulting in what is thought of as a signal transduction pathway. Usually, signal transduction involves the binding of extracellular signaling molecules (or ligands) to cell-surface receptors that face outwards from the plasma membrane and trigger events inside the cell. Additionally, intracellular signaling cascades can be triggered through cell-substratum interactions, as in the case of integrins which bind ligands found within the extracellular matrix. Steroids represent another example of extracellular signaling molecules that may cross the plasma membrane due to their lipophilic or hydrophobic nature. Many steroids, but not all, have receptors within the cytoplasm and usually act by stimulating the binding of their receptors to the promoter region of steroid responsive genes. Within multicellular organisms there are a diverse number of small molecules and polypeptides that serve to coordinate a cell's individual biological activity within the context of the organism as a whole. Examples of these molecules include hormones (e.g. melatonin), growth factors (e.g. epidermal growth factor), extra-cellular matrix components (e.g. fibronectin), cytokines (e.g. interferon-gamma), chemokines (e.g. RANTES), neurotransmitters (e.g. acetylcholine), and neurotrophins (e.g. nerve growth factor).

[0095] In addition to many of the regular signal transduction stimuli listed above, in complex organisms, there are also examples of additional environmental stimuli that initiate signal transduction processes. Environmental stimuli may also be molecular in nature or more physical, such as, light striking cells in the retina of the eye, odorants binding to odorant receptors in the nasal epithelium, bitter and sweet tastes stimulating taste receptors in the taste buds, UV light altering DNA in a cell, and hypoxia activating a series of events in cells. Certain microbial molecules e.g. viral nucleotides, bacterial lipopolysaccharides, or protein antigens are able to elicit an immune system response against invading pathogens, mediated via signal transduction processes.

[0096] Activation of genes, alterations in metabolism, the continued proliferation and death of the cell, and the stimulation or suppression of locomotion, are some of the cellular responses to extracellular stimulation that require signal transduction. Gene activation leads to further cellular effects, since the protein products of many of the responding genes include enzymes and transcription factors themselves. Transcription factors produced as a result of a signal transduction cascade can in turn activate yet more genes. Therefore an initial stimulus can trigger the expression of an entire cohort of genes, and this in turn can lead to the activation of any number of complex physiological events. These events include, for example, the increased uptake of glucose from the blood stream stimulated by insulin and the migration of neutrophils to sites of infection stimulated by bacterial products.

[0097] Most mammalian cells require stimulation to control not only cell division, but also survival. In the absence of growth factor stimulation, programmed cell death ensues in most cells. Such requirements for extra-cellular stimulation are necessary for controlling cell behavior in both the context of unicellular and multi-cellular organisms. Signal transduction pathways are so central to biological processes that it is not surprising that a large number of diseases have been attributed to their dysregulation.

[0098] a. Oncology Pathway

[0099] In some embodiments, the invention provides methods and compositions including transcription regulatory sequences that are part of an oncology pathway. Transcription regulatory sequences in an oncology pathway are those that control the expression of genes involve in the development of hyperplasia, neoplasia and/or cancer. Examples of oncology pathways include, but are not limited to, hypoxia, DNA damage, apoptosis, cell cycle, and p53 pathway.

[0100] In some embodiments, the invention allows for the determination of the transcriptional regulatory activity of a plurality of different nucleic acid segments that are part of an oncology pathway under a variety of conditions. In some embodiments, the methods described herein allow for the determination of the base present at a polymorphism of a transcriptional regulatory element in the genome of an individual and whether that polymorphism is associated with a change in the function of that element and/or other regulatory element(s) in the genome. In some embodiments, the methods described herein allow for the determination of transcriptional activity of a plurality of transcriptional regulatory elements that are part of an oncology pathway in the genome of an individual.

[0101] The methods and compositions described herein enable a better understanding, diagnosing and treatment of a disease or condition associated with aberrant transcriptional activity of an oncology regulatory element, such as Acute Lymphoblastic Leukemia, Acute Myeloid Leukemia, Adrenocortical Carcinomas, AIDS-Related Cancers, AIDS-Related Lymphomas, Anal Cancers, Astrocytomas, Bladder Cancers, Brain Tumors, Bone Cancers, Melanomas, Breast Cancers, Non-Hodgkin's, CNS and other Lymphomas, Cervical Cancer, Cancers of Unknown Primary causes, Colon and Rectal Cancer, Pancreatic Cancer, Endometrial Cancer, Esophageal Cancer, Eye Cancers, Germ Cell Cancers, Gliomas, Gastric Cancers, Head and Neck Cancers, Prostate Cancer, Kaposi's Sarcoma, Kidney (Renal Cell) Cancers, Skin Cancer, Leukemia, Laryngeal Cancers, Lip and Oral Cancers, Ovarian Cancers, Soft Tissue Cancers, Testicular Cancer, Thyroid Cancer, Uterine Cancer, Vaginal Cancer, Lung Cancer and other oncology diseases/disorders in general.

[0102] In some embodiments, the invention provides methods and compositions including transcription regulatory sequences that are part of a hypoxia pathway. The methods described herein enable a better understanding, diagnosing and treatment of a disease or condition associated with aberrant transcriptional activity of a hypoxia-related regulatory element, such as cancer, anemia, erythropoiesis, rheumatoid arthritis, DVT, chronic inflammatory bowel disease, ischemias, chronic bronchitis, psoriasis, cystic fibrosis and other inflammatory, pulmonary or vasculapathic diseases in general.

[0103] b. Membrane Pathway

[0104] In some embodiments, the invention provides methods and compositions including transcription regulatory sequences that are part of a membrane pathway. Examples of membrane pathways include, but are not limited to, transport proteins, G-coupled receptors, ion channels, cell adhesion proteins and receptors pathways.

[0105] In some embodiments, the invention allows for the determination of transcriptional regulatory activity of a plurality of different nucleic acid segments that are part of a membrane pathway under a variety of conditions. In some embodiments, the methods described herein allow for the determination of the base present at a polymorphism of a transcriptional regulatory element in the genome of an individual and whether that polymorphism is associated with a change in the function of that element and/or other regulatory element(s) in the genome. In some embodiments, the methods described herein allow for the determination of transcriptional activity of a plurality of transcriptional regulatory elements that are part of a membrane pathway in the genome of an individual.

[0106] The methods described herein enable a better understanding, diagnosing, and treatment of a disease or condition associated with aberrant transcriptional activity of a regulatory element in a membrane pathway, such as altered drug responses or metabolism, abnormal changes in signaling pathways, changes in responses to external or internal stimuli such as small molecules, hormones, toxins, infection, environmental changes, and other membrane- or signaling-associated diseases/disorders in general.

[0107] c. Nuclear Receptor Pathways

[0108] In some embodiments, the invention provides methods and compositions including transcription regulatory sequences that are part of a nuclear receptor pathway. Examples of regulatory elements in a nuclear receptor pathway include, but are not limited to, DNA elements that are regulated by the glucocorticoid receptor protein, estrogen receptor protein, peroxisome proliferator-activated receptor protein, androgen receptor protein and transporter protein pathways, including ABC and SLC transporters.

[0109] In some embodiments, the invention allows for the determination of transcriptional regulatory activity of a plurality of different nucleic acid segments that are part of a nuclear receptor pathway under a variety of conditions. In some embodiments, the methods described herein allow for the determination of the base present at a polymorphism of a transcriptional regulatory element in the genome of an individual and whether that polymorphism is associated with a change in the function of that element and/or other regulatory element(s) in the genome. In some embodiments, the methods described herein allow for the determination of transcriptional activity of a plurality of transcriptional regulatory elements that are part of a nuclear receptor pathway in the genome of an individual.

[0110] The methods described herein enable a better understanding, diagnosing, and treatment of a disease or condition associated with aberrant transcriptional activity of a regulatory element in a nuclear receptor pathway, such as cancer, diabetes, lipid metabolism, aberrant hormone response, rheumatoid arthritis, chronic inflammation, pulmonary or cardiovascular diseases in general.

[0111] d. Neuronal Pathway;

[0112] In some embodiments, the invention provides methods and compositions including transcription regulatory sequences that are part of a neuronal pathway. Examples of regulatory elements in a neuronal pathway include, but not limited to, regulatory elements involved in regulation of genes expressed in neurons such as neurotransmitters and cell adhesion proteins.

[0113] In some embodiments, the invention allows for the determination of transcriptional regulatory activity of a plurality of different nucleic acid segments that are part of a neuronal pathway under a variety of conditions. In some embodiments, the methods described herein allow for the determination of the base present at a polymorphism of a transcriptional regulatory element in the genome of an individual and whether that polymorphism is associated with a change in the function of that element and/or other regulatory element(s) in the genome. In some embodiments, the methods described herein allow for the determination of transcriptional activity of a plurality of transcriptional regulatory elements that are part of a neuronal pathway in the genome of an individual.

[0114] The methods described herein enable a better understanding, diagnosing, and treatment of a disease or condition associated with aberrant transcriptional activity of a neuronal regulatory element, such as Alzheimer's, Parkinson's, stroke, dystonias, phobias, depression, amyotrophic lateral sclerosis (ALS), multiple sclerosis, dyslexia, tourette's, phantom limbs, Meniere's Disease, encephelopathic diseases, migraines, narcolepsy, paralysis disorders, autism, cerebral palsy, corticobasal degeneration, comas, cerebral atrophy, Creutzfeldt-Jakob Disease, epilepsy, Huntington's, brain tumors, AIDS dementia, Gaucher's disease, Bell's palsy, aphasias and other neurological diseases/disorders in general.

[0115] e. Vascular Pathway

[0116] In some embodiments, the invention provides methods and compositions including transcription regulatory sequences that are part of a vascular pathway. Examples of regulatory elements in a vascular pathway include, but not limited to, regulatory elements involved in angiogenesis, lipid metabolism, and inflammation.

[0117] In some embodiments, the invention allows for the determination of transcriptional regulatory activity of a plurality of different nucleic acid segments that are part of a vascular pathway under a variety of conditions. In some embodiments, the methods described herein for the determination of the base present at a polymorphism of a transcriptional regulatory element in the genome of an individual and whether that polymorphism is associated with a change in the function of that element and/or other regulatory element(s) in the genome. In some embodiments, the methods described herein allow for the determination of transcriptional activity of a plurality of transcriptional regulatory elements that are part of a vascular pathway in the genome of an individual.

[0118] The methods described herein enable a better understanding, diagnosing, and treatment of a disease or condition associated with aberrant transcriptional activity of a vascular regulatory element, such as Acrocyanosis, Angina, Arteriovenous Disorders, Atherosclerosis, Atrial Disorders, Cardiac Disorders, Cavernous Malformations, Congestive Heart Disease, Fistula Buerger's Disease, Coronary Artery Diseases, Central Venous Insufficiency, Deep Vein Thrombosis (DVT), Erythromelalgia, Gangrene, Heart Attacks, Hemorrhagic Diseases, Ischemic Diseases, Klippel-Trenaunay Syndrome, Lymphedema and Lipedema, Peripheral Vascular/Arterial Disease, Raynaud's Disease, Stroke, Thrombosis, Thrombophlebitis/Phlebitis, Varicose and Spider Veins, Vascular Birthmark, Vasculitis and other vascular diseases/disorders in general.

[0119] f. Transcription Factors Pathway

[0120] In some embodiments, the invention provides methods and compositions including transcription regulatory sequences that are part of a transcription factor pathway. Examples of regulatory elements in a transcription factor pathway include, but are not limited to, regulatory elements of genes that code for proteins that regulate the expression of other genes either by direct DNA binding or indirect interactions with other transcriptional regulators.

[0121] In some embodiments, the invention allow for the determination of transcriptional regulatory activity of a plurality of different nucleic acid segments that are part of a transcription factor pathway under a variety of conditions. In some embodiments, the methods described herein allow for the determination of the base present at a polymorphism of a transcriptional regulatory element in the genome of an individual and whether that polymorphism is associated with a change in the function of that element and/or other regulatory element(s) in the genome. In some embodiments, the methods described herein allow for the determination of transcriptional activity of a plurality of transcriptional regulatory elements that are part of a neuronal pathway in the genome of an individual.

[0122] The methods described herein enable a better understanding, diagnosing, and treatment of a disease or condition associated with aberrant transcriptional activity of a transcription factor gene regulatory element, such as cancer, heart disease, obesity, abnormal immune response, inflammation, neurological disorders, drug response, and drug metabolism.

[0123] g. Signaling Pathway

[0124] In some embodiments, the invention provides methods and compositions including transcription regulatory sequences that are part of a signaling pathway. Examples of regulatory elements in a signaling pathway include, but are not limited to, regulatory elements of genes involved in cell-to-cell signaling, hormones, hormone receptors, cAMP response, and cytokines.

[0125] In some embodiments, the invention allows for the determination of transcriptional regulatory activity of a plurality of different nucleic acid segments that are part of a signaling pathway under a variety of conditions. In some embodiments, the methods described herein allow for the determination of the base present at a polymorphism of a transcriptional regulatory element in the genome of an individual and whether that polymorphism is associated with a change in the function of that element and/or other regulatory element(s) in the genome. In some embodiments, the methods described herein allow for the determination of transcriptional activity of a plurality of transcriptional regulatory elements that are part of a signaling pathway in the genome of an individual.

[0126] h. Enzymatic Pathway

[0127] In some embodiments, the invention provides methods and compositions including transcription regulatory sequences that are part of an enzymatic pathway. Examples of regulatory elements in a enzymatic pathway include, but are not limited to, regulatory elements of genes involved in glycolysis, anaerobic respiration, Krebs cycle/Citric acid cycle, Oxidative phosphorylation, fatty acid oxidation (β-oxidation), gluconeogenesis, HMG-CoA reductase pathway, pentose phosphate pathway, porphyrin synthesis (or heme synthesis) pathway, urea cycle, photosynthesis (plants, algae, cyanobacteria) and chemosynthesis (some bacteria).

[0128] In some embodiments, the invention allows for the determination of transcriptional regulatory activity of a plurality of different nucleic acid segments that are part of a enzymatic pathway under a variety of conditions. In some embodiments, the methods described herein allow for the determination of the base present at a polymorphism of a transcriptional regulatory element in the genome of an individual and whether that polymorphism is associated with a change in the function of that element and/or other regulatory element(s) in the genome. In some embodiments, the methods described herein allow for the determination of transcriptional activity of a plurality of transcriptional regulatory elements that are part of an enzymatic pathway in the genome of an individual.

[0129] The methods described herein enable a better understanding, diagnosing, and treatment of a disease or condition associated with aberrant transcriptional activity of a signaling regulatory element, such as Diabetes, Oncology diseases, Glycogen storage diseases, Obesity, Fatty Oxidation disorders, Mitochondrial disorders, Starvation, Dehydration, Channelopathies (disorders that affect ion channels and organelle membranes), Myoadenylate Deaminase deficiency, Carnitine disorders, Galactosemias, Fucosidosis, Rickets, Tyrosinemias, Lysosomal Storage disease, Hyponatermia, Hyperlipidemia, Hypercalcemia, Iodine deficiency, Anemia, Wernicke's Disease, vitamin deficiencies, Wolman Disease and other metabolic diseases/disorders in general

### III. LIBRARIES OF TRANSCRIPTION REGULATORY ELEMENTS

[0130] In one aspect, this invention provides a library of genomic nucleic acid segments comprising transcription regulatory elements relevant to biological pathways in a genome of an organism. The libraries of this invention are characterized by, among other things, the length of the segments that populate the library and the high percentage of segments in which the transcriptional regulatory elements naturally control the transcription of genes with biological function (e.g. genes that play a biological role in an organism). In one embodiment, the human genomic segments of this invention can be selected using the method that is described in FIG. 1, and more fully described in the examples. In particular, the transcription regulatory sequences or the libraries of this invention can be selected from those described in United States patent publication 2007/0161031 (Trinklein et al. Jul. 12, 2007).

[0131] Each genomic nucleic acid segment selected for the library can be operatively linked in nature with a sequence in the genome that aligns with a known cDNA molecule. The library comprises a low percentage of segments (e.g., less than 30%, 25%, 20%, 15%, 10%, 5%, 2%, or 1%) that are linked to cDNA alignment artifacts. These artifacts result from inaccuracies of the alignment algorithm or from genomic DNA contamination of the original cDNA libraries that were sequenced. These artifacts are identified as intronless (ungapped) alignments represented by a small number of independent cDNAs from existing cDNA libraries, as pseudogenes and as single exon genes. More specifically, a library of genetic sequences, such a GenBank, contains a number of molecules reported as cDNAs. When these sequences are aligned against the sequence of the genome, certain locations of the genome are mapped by many reported cDNAs, so that the alignment cannot be considered random: One can be highly confident that these locations represent biologically relevant cDNAs and that the up-stream sequences are active transcription regulatory sequences. Other locations in the genome are mapped by few reported cDNAs or none. If the cDNA sequences are unspliced (that is they contain no introns) and the number of cDNAs mapping to a location in the genome is no more than what one would expect under a random model, then these alignments are considered artifacts.

[0132] The segments of the libraries of this invention also function well in regulating transcription because, among other things, they contain sequences involved in regulation of transcription. In some embodiments, the libraries of this invention include segments having an average length of at least 10, 20, 30, 50, 60, 70, 80, 90, 100, 200, 300, 400, 500, or 600 nucleotides. In some embodiments, the libraries of this invention include segments having an average length of at least 600 nucleotides. In certain embodiments, the average length of segments in the library is between 700 nucleotides and 1200 nucleotides. In some embodiments, the average length can be between 800 nucleotides and 1100 nucleotides or between 950 nucleotides and 1050 nucleotides. Furthermore, the segments in the library can have a range of different lengths. For example, in one embodiment, at least 90% of the segments have lengths ranging from 200 to 1300 nucleotides or between 700 nucleotides and 1300 nucleotides. In another embodiment no more than 5% of the nucleic acid segments are naturally linked to cDNA alignment artifacts. Each segment contains a start site for transcription.

[0133] In some embodiments, most of the genomic sequence of the segments is up-stream of the transcriptional start site, typically at least 500 base pairs. The segments typically have at least one nucleotide beyond the transcriptional start site and a majority have approximately 100 nucleotides downstream of the transcriptional start site.

[0134] The present invention also provides a library of transcription regulatory elements, e.g., a library of transcriptional promoters, preferably with diversity of at least 5, 10, 20, 30, 40, 50, optionally at least 80, 120, 160, 200, 400, 500, 600, 800, 1000, 1500, 2000, 3000, 5000, 8000, or 10,000. Examples of transcriptional promoters include, but are not limited to, at least 2, optionally at least 5, 10, 20, 50, 100, 200, 500, 1000, 5000, 10000, or 25000 nucleotides selected from the group consisting of SEQ ID NO: 1-3836, or fragments thereof, such as fragments of SEQ ID NO: 1-3836 of about 100-1800, about 300-1500, about 500-1400, about 600-1300, about 700-1200, or about 800-1000 nucleotide in length, or nucleic acids having sequences with at least 70%, 75%, 80%, 85%, 90%, 95%, or 98% homology thereto. Examples of transcriptional promoters include, but are not limited to, at least 2, optionally at least 5, 10, 20, 50, 100, 200, 500, 1000, 5000, 10000, or 25000 nucleotides selected from the group consisting of SEQ ID NO: 3837-12716, or fragments thereof, such as fragments of SEQ ID NO: 3837-12716 of about 100-1800, about 300-1500, about 500-1400, about 600-1300, about 700-1200, or about 800-1000 nucleotide in length, or nucleic acids having sequences with at least 70%, 75%, 80%, 85%, 90%, 95%, or 98% homology thereto. Examples of transcriptional promoters include, but are not limited to, at least 2, optionally at least 5, 10, 20, 50, 100, 200, 500, 1000, 5000, 10000, or 25000 nucleotides selected from the group consisting of SEQ ID NO: 12717-13994, or fragments thereof, such as fragments of SEQ ID NO: 12717-13994 of about 100-1800, about 300-1500, about 500-1400, about 600-1300, about 700-1200, or about 800-1000 nucleotide in length, or nucleic acids having sequences with at least 70%, 75%, 80%, 85%, 90%, 95%, or 98% homology thereto.

[0135] The present invention also provides a library of transcription regulatory elements in which at least 5%, 10%, 20%, 30%, 40%, 50%, 60%, 70%, 80%, 90%, 99% or 100% of the regulatory elements are part of a common pathway.

[0136] In some embodiments, the invention provides a library of transcription regulatory elements in which at least 5%, 10%, 20%, 30%, 40%, 50%, 60%, 70%, 80%, 90%, 99% or 100% of the regulatory elements are part of an oncology pathway. In some embodiments, the invention provides a library of transcription regulatory elements in which at least 5%, 10%, 20%, 30%, 40%, 50%, 60%, 70%, 80%, 90%, 99% or 100% of the regulatory elements are part of a hypoxia pathway. In some embodiments, the invention provides a library of transcription regulatory elements in which at least 5%, 10%, 20%, 30%, 40%, 50%, 60%, 70%, 80%, 90%, 99% or 100% of the regulatory elements are part of a DNA-damage pathway. In some embodiments, the invention provides a library of transcription regulatory elements in which at least 5%, 10%, 20%, 30%, 40%, 50%, 60%, 70%, 80%, 90%, 99% or 100% of the regulatory elements are part of an apoptosis pathway. In some embodiments, the invention provides a library of transcription regulatory elements in which at least 5%, 10%, 20%, 30%, 40%, 50%, 60%, 70%, 80%, 90%, 99% or 100% of the regulatory elements are part of a cell cycle pathway. In some embodiments, the invention provides a library of transcription regulatory elements in which at least 5%, 10%, 20%, 30%, 40%, 50%, 60%, 70%, 80%, 90%, 99% or 100% of the regulatory elements are part of a p53 pathway. In some embodiments, the inventions provides a library of transcription regulatory elements in which at least 5%, 10%, 20%, 30%, 40%, 50%, 60%, 70%, 80%, 90%, 99% or 100% of the regulatory elements are differently selected from the group consisting of hypoxia pathway, DNA-damage pathway, apoptosis pathway, cell cycle pathway, and p53 pathway

[0137] In some embodiments, the invention provides a library of transcription regulatory elements in which at least 5%, 10%, 20%, 30%, 40%, 50%, 60%, 70%, 80%, 90%, 99% or 100% of the regulatory elements are part of a membrane bound pathway.

[0138] In some embodiments, the invention provides a library of transcription regulatory elements in which at least 5%, 10%, 20%, 30%, 40%, 50%, 60%, 70%, 80%, 90%, 99% or 100% of the regulatory elements are part of a nuclear receptor pathway. In some embodiments, the invention provides a library of transcription regulatory elements in which at least 5%, 10%, 20%, 30%, 40%, 50%, 60%, 70%, 80%, 90%, 99% or 100% of the regulatory elements are part of a glucocorticoid receptor pathway. In some embodiments, the invention provides a library of transcription regulatory elements in which at least 5%, 10%, 20%, 30%, 40%, 50%, 60%, 70%, 80%, 90%, 99% or 100% of the regulatory elements are part of a peroxisome proliferator-activated receptor pathway. In some embodiments, the invention provides a library of transcription regulatory elements in which at least 5%, 10%, 20%, 30%, 40%, 50%, 60%, 70%, 80%, 90%, 99% or 100% of the regulatory elements are part of an estrogen receptor pathway. In some embodiments, the invention provides a library of transcription regulatory elements in which at least 5%, 10%, 20%, 30%, 40%, 50%, 60%, 70%, 80%, 90%, 99% or 100% of the regulatory elements are part of an androgen receptor pathway. In some embodiments, the invention provides a library of transcription regulatory elements in which at least 5%, 10%, 20%, 30%, 40%, 50%, 60%, 70%, 80%, 90%, 99% or 100% of the regulatory elements are part of a cytochrome P450 receptor pathway. In some embodiments, the invention provides a library of transcription regulatory elements in which at least 5%, 10%, 20%, 30%, 40%, 50%, 60%, 70%, 80%, 90%, 99% or 100% of the regulatory elements are part of a transporter receptor pathway. In some embodiments, the invention provides a library of transcription regulatory elements in which at least 5%, 10%, 20%, 30%, 40%, 50%, 60%, 70%, 80%, 90%, 99% or 100% of the regulatory elements are differently selected from the group consisting of glucocorticoid receptor pathway, peroxisome proliferator-activated receptor pathway, estrogen receptor pathway, androgen receptor pathway, cytochrome P450 pathway, and transporter pathways

[0139] In some embodiments, the invention provides a library of transcription regulatory elements in which at least 5%, 10%, 20%, 30%, 40%, 50%, 60%, 70%, 80%, 90%, 99% or 100% of the regulatory elements are part of a vascular pathway. In some embodiments, the invention provides a library of transcription regulatory elements in which at least 5%, 10%, 20%, 30%, 40%, 50%, 60%, 70%, 80%, 90%, 99% or 100% of the regulatory elements are part of a neuronal pathway. In some embodiments, the invention provides a library of transcription regulatory elements in which at least 5%, 10%, 20%, 30%, 40%, 50%, 60%, 70%, 80%, 90%, 99% or 100% of the regulatory elements are part of a transcription factor pathway. In some embodiments, the invention provides a library of transcription regulatory elements in which at least 5%, 10%, 20%, 30%, 40%, 50%, 60%, 70%, 80%, 90%, 99% or 100% of the regulatory elements are part of a signaling pathway.

[0140] The present invention also provides a library of transcription regulatory elements in which the library represents at least 5%, 10%, 20%, 30%, 40%, 50%, 60%, 70%, 80%, 90%, 99% or 100% of all the regulatory elements that are part of a common pathway in the genome. In some embodiments, the invention provides a library of transcription regulatory elements in which the library represents at least 5%, 10%, 20%, 30%, 40%, 50%, 60%, 70%, 80%, 90%, 99% or 100% of all the regulatory elements that are part of an oncology pathway in the genome. In some embodiments, the invention provides a library of transcription regulatory elements in which the library represents at least 5%, 10%, 20%, 30%, 40%, 50%, 60%, 70%, 80%, 90%, 99% or 100% of all the regulatory elements that are part of a hypoxia pathway in the genome. In some embodiments, the invention provides a library of transcription regulatory elements in which the library represents at least 5%, 10%, 20%, 30%, 40%, 50%, 60%, 70%, 80%, 90%, 99% or 100% of all the regulatory elements that are part of a DNA-damage pathway in the genome. In some embodiments, the invention provides a library of transcription regulatory elements in which the library represents at least 5%, 10%, 20%, 30%, 40%, 50%, 60%, 70%, 80%, 90%, 99% or 100% of all the regulatory elements that are part of an apoptosis pathway in the genome. In some embodiments, the invention provides a library of transcription regulatory elements in which the library represents at least 5%, 10%, 20%, 30%, 40%, 50%, 60%, 70%, 80%, 90%, 99% or 100% of all the regulatory elements are part of a cell cycle pathway in the genome. In some embodiments, the invention provides a library of transcription regulatory elements in which the library represents at least 5%, 10%, 20%, 30%, 40%, 50%, 60%, 70%, 80%, 90%, 99% or 100% of all the regulatory elements that are part of a p53 pathway in the genome.

[0141] In some embodiments, the invention provides a library of transcription regulatory elements in which the library represents at least 5%, 10%, 20%, 30%, 40%, 50%, 60%, 70%, 80%, 90%, 99% or 100% of all the regulatory elements that are part of a membrane bound pathway in the genome.

[0142] In some embodiments, the invention provides a library of transcription regulatory elements in which the library represents at least 5%, 10%, 20%, 30%, 40%, 50%, 60%, 70%, 80%, 90%, 99% or 100% of all the regulatory elements are part of a nuclear receptor pathway in the genome. In some embodiments, the invention provides a library of transcription regulatory elements in which the library represents at least 5%, 10%, 20%, 30%, 40%, 50%, 60%, 70%, 80%, 90%, 99% or 100% of all the regulatory elements that are part of a glucocorticoid receptor pathway in the genome. In some embodiments, the invention provides a library of transcription regulatory elements in which the library represents at least 5%, 10%, 20%, 30%, 40%, 50%, 60%, 70%, 80%, 90%, 99% or 100% of all the regulatory elements that are part of a peroxisome proliferator-activated receptor pathway in the genome. In some embodiments, the invention provides a library of transcription regulatory elements in which the library represents at least 5%, 10%, 20%, 30%, 40%, 50%, 60%, 70%, 80%, 90%, 99% or 100% of all the regulatory elements that are part of a estrogen receptor pathway in the genome. In some embodiments, the invention provides a library of transcription regulatory elements in which the library represents at least 5%, 10%, 20%, 30%, 40%, 50%, 60%, 70%, 80%, 90%, 99% or 100% of all the regulatory elements that are part of an androgen receptor pathway in the genome. In some embodiments, the invention provides a library of transcription regulatory elements in which the library represents at least 5%, 10%, 20%, 30%, 40%, 50%, 60%, 70%, 80%, 90%, 99% or 100% of all the regulatory elements that are part of a cytochrome P450 receptor pathway in the genome. In some embodiments, the invention provides a library of transcription regulatory elements in which the library represents at least 5%, 10%, 20%, 30%, 40%, 50%, 60%, 70%, 80%, 90%, 99% or 100% of all the regulatory elements that are part of a transporter receptor pathway in the genome.

[0143] The present invention also provides a library of transcription regulatory elements in which the library represents at least 5%, 10%, 20%, 30%, 40%, 50%, 60%, 70%, 80%, 90%, 99% or 100% of all the regulatory elements that are part of a neuronal pathway in the genome. The present invention also provides a library of transcription regulatory elements in which the library represents at least 5%, 10%, 20%, 30%, 40%, 50%, 60%, 70%, 80%, 90%, 99% or 100% of all the regulatory elements that are part of a signaling pathway in the genome. The present invention also provides a library of transcription regulatory elements in which the library represents at least 5%, 10%, 20%, 30%, 40%, 50%, 60%, 70%, 80%, 90%, 99% or 100% of all the regulatory elements that are part of a vascular pathway in the genome. The present invention also provides a library of transcription regulatory elements in which the library represents at least 5%, 10%, 20%, 30%, 40%, 50%, 60%, 70%, 80%, 90%, 99% or 100% of all the regulatory elements that are part of a transcription factor pathway in the genome.

[0144] The gene expression regulatory elements include, but are not limited to, transcriptional promoters, enhancers, insulators, silencers, suppressors, and inducers. In preferred embodiments, the regulator element is a transcriptional promoter. Each of the regulatory elements can be characterized in terms of its genomic location, sequence, variation, mutation, polymorphism, transcriptional regulatory activity in different cell or tissue type, and binding affinity with other regulatory factors, such as transcription factors.

[0145] In some embodiments, the library of regulatory elements is a library of promoters. The present invention also provides a library of promoters in which at least 5%, 10%, 20%, 30%, 40%, 50%, 60%, 70%, 80%, 90%, 99% or 100% of the promoters are part of a common pathway.

[0146] In some embodiments, the invention provides a library of promoters in which at least 5%, 10%, 20%, 30%, 40%, 50%, 60%, 70%, 80%, 90%, 99% or 100% of the promoters are part of an oncology pathway. Examples of the transcriptional promoters include, but are not limited to, nucleotides selected from the group consisting of SEQ ID NO: 1-3836, or fragments thereof, such as fragments of SEQ ID NO: 1-3836 of about 100-1800, about 300-1500, about 500-1400, about 600-1300, about 700-1200, or about 800-1000 nucleotide in length, or nucleic acids having sequences with at least 70%, 75%, 80%, 85%, 90%, 95%, or 98% homology thereto. In some embodiments, the invention provides a library of promoters in which at least 5%, 10%, 20%, 30%, 40%, 50%, 60%, 70%, 80%, 90%, 99% or 100% of the promoters are part of a hypoxia pathway. In some embodiments, the invention provides a library of promoters in which at least 5%, 10%, 20%, 30%, 40%, 50%, 60%, 70%, 80%, 90%, 99% or 100% of the promoters are part of a DNA-damage pathway. In some embodiments, the invention provides a library of promoters in which at least 5%, 10%, 20%, 30%, 40%, 50%, 60%, 70%, 80%, 90%, 99% or 100% of the promoters are part of an apoptosis pathway. In some embodiments, the invention provides a library of promoters in which at least 5%, 10%, 20%, 30%, 40%, 50%, 60%, 70%, 80%, 90%, 99% or 100% of the promoters are part of a cell cycle pathway. In some embodiments, the invention provides a library of promoters in which at least 5%, 10%, 20%, 30%, 40%, 50%, 60%, 70%, 80%, 90%, 99% or 100% of the promoters are part of a p53 pathway.

[0147] In some embodiments, the invention provides a library of promoters in which at least 5%, 10%, 20%, 30%, 40%, 50%, 60%, 70%, 80%, 90%, 99% or 100% of the promoters are part of a membrane bound pathway. Examples of the transcriptional promoters include, but are not limited to, nucleotides selected from the group consisting of SEQ ID NO: 3837-12716, or fragments thereof, such as fragments of SEQ ID NO: 3837-12716 of about 100-1800, about 300-1500, about 500-1400, about 600-1300, about 700-1200, or about 800-1000 nucleotide in length, or nucleic acids having sequences with at least 70%, 75%, 80%, 85%, 90%, 95%, or 98% homology thereto.

[0148] In some embodiments, the invention provides a library of promoters in which at least 5%, 10%, 20%, 30%, 40%, 50%, 60%, 70%, 80%, 90%, 99% or 100% of the promoters are part of a nuclear receptor pathway. Examples of the transcriptional promoters include, but are not limited to, nucleotides selected from the group consisting of SEQ ID NO: 12717-13994, or fragments thereof, such as fragments of SEQ ID NO: 12717-13994 of about 100-1800, about 300-1500, about 500-1400, about 600-1300, about 700-1200, or about 800-1000 nucleotide in length, or nucleic acids having sequences with at least 70%, 75%, 80%, 85%, 90%, 95%, or 98% homology thereto. In some embodiments, the invention provides a library of promoters in which at least 5%, 10%, 20%, 30%, 40%, 50%, 60%, 70%, 80%, 90%, 99% or 100% of the promoters are part of a glucocorticoid receptor pathway. In some embodiments, the invention provides a library of promoters in which at least 5%, 10%, 20%, 30%, 40%, 50%, 60%, 70%, 80%, 90%, 99% or 100% of the promoters are part of a peroxisome proliferator-activated receptor pathway. In some embodiments, the invention provides a library of promoters in which at least 5%, 10%, 20%, 30%, 40%, 50%, 60%, 70%, 80%, 90%, 99% or 100% of the promoters are part of an estrogen receptor pathway. In some embodiments, the invention provides a library of promoters in which at least 5%, 10%, 20%, 30%, 40%, 50%, 60%, 70%, 80%, 90%, 99% or 100% of the promoters are part of an androgen receptor pathway. In some embodiments, the invention provides a library of promoters in which at least 5%, 10%, 20%, 30%, 40%, 50%, 60%, 70%, 80%, 90%, 99% or 100% of the promoters are part of a cytochrome P450 receptor pathway. In some embodiments, the invention provides a library of promoters in which at least 5%, 10%, 20%, 30%, 40%, 50%, 60%, 70%, 80%, 90%, 99% or 100% of the promoters are part of a transporter receptor pathway.

[0149] The present invention also provides a library of promoters in which the library represents at least 5%, 10%, 20%, 30%, 40%, 50%, 60%, 70%, 80%, 90%, 99% or 100% of all the promoters that are part of a common pathway in the genome.

[0150] In some embodiments, the invention provides a library of promoters in which the library represents at least 5%, 10%, 20%, 30%, 40%, 50%, 60%, 70%, 80%, 90%, 99% or 100% of all the promoters that are part of an oncology pathway in the genome. Examples of the transcriptional promoters include, but are not limited to, nucleotides selected from the group consisting of SEQ ID NO: 1-3836, or fragments thereof, such as fragments of SEQ ID NO: 1-3836 of about 100-1800, about 300-1500, about 500-1400, about 600-1300, about 700-1200, or about 800-1000 nucleotide in length, or nucleic acids having sequences with at least 70%, 75%, 80%, 85%, 90%, 95%, or 98% homology thereto. In some embodiments, the invention provides a library of promoters in which the library represents at least 5%, 10%, 20%, 30%, 40%, 50%, 60%, 70%, 80%, 90%, 99% or 100% of all the promoters that are part of a hypoxia pathway in the genome. In some embodiments, the invention provides a library of promoters in which the library represents at least 5%, 10%, 20%, 30%, 40%, 50%, 60%, 70%, 80%, 90%, 99% or 100% of all the promoters that are part of a DNA-damage pathway in the genome. In some embodiments, the invention provides a library of promoters in which the library represents at least 5%, 10%, 20%, 30%, 40%, 50%, 60%, 70%, 80%, 90%, 99% or 100% of all promoters that are part of an apoptosis pathway in the genome. In some embodiments, the invention provides a library promoters in which the library represents at least 5%, 10%, 20%, 30%, 40%, 50%, 60%, 70%, 80%, 90%, 99% or 100% of all the promoters are part of a cell cycle pathway in the genome. In some embodiments, the invention provides a library of promoters in which the library represents at least 5%, 10%, 20%, 30%, 40%, 50%, 60%, 70%, 80%, 90%, 99% or 100% of all the regulatory elements that are part of a p53 pathway in the genome.

[0151] In some embodiments, the invention provides a library of promoters in which the library represents at least 5%, 10%, 20%, 30%, 40%, 50%, 60%, 70%, 80%, 90%, 99% or 100% of all the promoters that are part of a membrane bound pathway in the genome. Examples of the transcriptional promoters include, but are not limited to, nucleotides selected from the group consisting of SEQ ID NO: 3837-12716, or fragments thereof, such as fragments of SEQ ID NO: 3837-12716 of about 100-1800, about 300-1500, about 500-1400, about 600-1300, about 700-1200, or about 800-1000 nucleotide in length, or nucleic acids having sequences with at least 70%, 75%, 80%, 85%, 90%, 95%, or 98% homology thereto.

[0152] In some embodiments, the invention provides a library of promoters in which the library represents at least 5%, 10%, 20%, 30%, 40%, 50%, 60%, 70%, 80%, 90%, 99% or 100% of all the promoters are part of a nuclear receptor pathway in the genome. Examples of the transcriptional promoters include, but are not limited to, nucleotides selected from the group consisting of SEQ ID NO: 12717-13994, or fragments thereof, such as fragments of SEQ ID NO: 12717-13994 of about 100-1800, about 300-1500, about 500-1400, about 600-1300, about 700-1200, or about 800-1000 nucleotide in length, or nucleic acids having sequences with at least 70%, 75%, 80%, 85%, 90%, 95%, or 98% homology thereto. In some embodiments, the invention provides a library of promoters in which the library represents at least 5%, 10%, 20%, 30%, 40%, 50%, 60%, 70%, 80%, 90%, 99% or 100% of all the promoters that are part of a glucocorticoid receptor pathway in the genome. In some embodiments, the invention provides a library of promoters in which the library represents at least 5%, 10%, 20%, 30%, 40%, 50%, 60%, 70%, 80%, 90%, 99% or 100% of all the promoters that are part of a peroxisome proliferator-activated receptor pathway in the genome. In some embodiments, the invention provides a library of promoters in which the library represents at least 5%, 10%, 20%, 30%, 40%, 50%, 60%, 70%, 80%, 90%, 99% or 100% of all the promoters that are part of a estrogen receptor pathway in the genome. In some embodiments, the invention provides a library of promoters elements in which the library represents at least 5%, 10%, 20%, 30%, 40%, 50%, 60%, 70%, 80%, 90%, 99% or 100% of all the promoters that are part of an androgen receptor pathway in the genome. In some embodiments, the invention provides a library of promoters in which the library represents at least 5%, 10%, 20%, 30%, 40%, 50%, 60%, 70%, 80%, 90%, 99% or 100% of all the promoters that are part of a cytochrome P450 receptor pathway in the genome. In some embodiments, the invention provides a library of promoters in which the library represents at least 5%, 10%, 20%, 30%, 40%, 50%, 60%, 70%, 80%, 90%, 99% or 100% of all the promoters that are part of a transporter receptor pathway in the genome:

[0153] Information on the structure and function of the gene expression regulatory elements relevant to biological pathways in a genome of an organism can have a wide variety of applications, including but not limited to diagnosis and treatment of diseases in a personalized manner (also known as “personalized medicine”) by association with phenotype such as onset, development of disease, disease resistance, disease susceptibility or drug response. Identification and characterization of the regulatory elements relevant to biological pathways in a genome of an organism in terms of cell- or tissue-specificity can also aid in the design of transgenic expression constructs for gene therapy with enhanced therapeutic efficacy and reduced side effects. Identification and characterization of the regulatory elements in terms of cell- or tissue-specificity can also aid in the development of function genetic markers for diagnosis, prevention and treatment of diseases. “Disease” includes but is not limited to any condition, trait or characteristic of an organism that it is desirable to change. For example, the condition may be physical, physiological or psychological and may be symptomatic or asymptomatic.

[0154] The regulatory element library may exist in an in silico form and a physical form. The in silico form is a database of sequences from the human genome representing transcriptional promoters (with size ranges as described above) and related genomic information such as the gene model and transcript it is associated with. The physical form of the regulatory element library may be a set of a plurality of individual nucleic acid fragments of the regulatory element, or plasmids each of which contains a unique promoter fragment from the human genome that is cloned upstream of a reporter gene cassette.

[0155] The physical form of the regulatory element library may be represented in several ways. One form may be as an archived library of plasmids that are frozen in small E. coli cultures. These frozen cultures can be stored indefinitely and expanded in liquid culture to produce more of the plasmids. Another form of the library may be purified plasmid DNAs that can be immediately ready for transfection. Based on the library of gene expression regulatory elements, preferably a library of transcriptional promoters, a wide variety of tools or kits can be built, such as plasmid functional macroarrays and spotted promoter microarrays, which are described below.

[0156] The regulatory element library includes a panel of plasmids, each made up of a common vector/plasmid backbone with a unique insert representing a single regulatory element from the human genome. The regulatory element fragment may be cloned immediately 5′ to a reporter gene cassette. This library can be a starting point from which two types of arrays: a plasmid functional macroarray and a spotted regulatory element microarray are built.

[0157] The plurality of different nucleic acid segments are preferably DNA segments derived from the region immediately 5′ of the transcription start site of different genes, expanding a region from about +100 to about −3000 bp, optionally about +50 to about −2000, about +20 to about −1800, about +20 to about −1500, about +10 to about −1500, about +10 to about −1200, about +20 to about −1000, about +20 to about −900, about +20 to about −800, about +20 to about −700, about +20 to about −600, about +20 to about −500, about +20 to about −400, or about +20 to about −300, relative to a transcription start site (TSS). The diversity of the plurality of different nucleic acid segments can be at least 50, optionally at least about 80, 120, 160, 200, 400, 500, 600, 800, 1000, 1500, 2000, 3000, 5000, 8000, or 10,000. Examples of transcriptional promoters include, but are not limited to, at least 2, optionally at least 5, 10, 20, 50, 100, 200, 500, 1000, 5000, 10000, or 25000 nucleotides selected from the group consisting of SEQ ID NO: 1-3836, or fragments thereof, such as fragments of SEQ ID NO: 1-3836 of about 100-1800, about 300-1500, about 500-1400, about 600-1300, about 700-1200, or about 800-1000 nucleotide in length, or nucleic acids having sequences with at least 70%, 75%, 80%, 85%, 90%, 95%, or 98% homology thereto. Examples of transcriptional promoters include, but are not limited to, at least 2, optionally at least 5, 10, 20, 50, 100, 200, 500, 1000, 5000, 10000, or 25000 nucleotides selected from the group consisting of SEQ ID NO: 3837-12716, or fragments thereof, such as fragments of SEQ ID NO: 3837-12716 of about 100-1800, about 300-1500, about 500-1400, about 600-1300, about 700-1200, or about 800-1000 nucleotide in length, or nucleic acids having sequences with at least 70%, 75%, 80%, 85%, 90%, 95%, or 98% homology thereto. Examples of transcriptional promoters include, but are not limited to, at least 2, optionally at least 5, 10, 20, 50, 100, 200, 500, 1000, 5000, 10000, or 25000 nucleotides selected from the group consisting of SEQ ID NO: 12717-13994, or fragments thereof, such as fragments of SEQ ID NO: 12717-13994 of about 100-1800, about 300-1500, about 500-1400, about 600-1300, about 700-1200, or about 800-1000 nucleotide in length, or nucleic acids having sequences with at least 70%, 75%, 80%, 85%, 90%, 95%, or 98% homology thereto.

[0158] The plurality of different DNA segments can be derived from the 5′ untranscribed region of different genes by using a computer-aided method for predicting putative transcriptional regulatory elements, such as promoters. The computer-aided method comprises: aligning a library of cDNA sequences for different genes with the genome sequence of an organism; defining the transcription start sites for each of the different genes; and selecting a segment in the genome that comprises a sequence 5′ from the transcription start site, the selected segment constituting a member of the plurality of different DNA segments.

[0159] The methods of the present invention for selecting putative gene expression regulatory elements relevant to biological pathways in a genome of an organism can be implemented in various configurations in any computing systems, including but not limited to supercomputers, personal computers, personal digital assistants (PDAs), networked computers, distributed computers on the internet or other microprocessor systems. The methods and systems described herein above are amenable to execution on various types of executable mediums other than a memory device such as a random access memory (RAM). Other types of executable mediums can be used, including but not limited to, a computer readable storage medium which can be any memory device, compact disc, zip disk or floppy disk.

[0160] FIG. 1 schematically illustrates an embodiment of the methodology disclosed herein. The flow chart in FIG. 1 illustrates a process for identifying, isolating and functionally analyzing a large number of regulatory elements, such as human transcriptional promoters that are part of a common pathway in a genome of an organism. The genes that are involved in a common pathway are identified by the methods provided in the present invention as detailed below. In one embodiment, the transcriptional promoters are identified throughout the human genome by using a computer-aided method provided in U.S. application Ser. No. 11/636,385, filed Dec. 7, 2006 entitled “Functional arrays for high throughput characterization of gene expression regulatory elements”. The promoter sequences are isolated from the genome and cloned into an expression vector containing a reporter to build a library of expression vectors containing a library of promoters which are transfected or otherwise introduced into tissue culture cells. Optionally, the promoter sequences are amplified. Transcriptional activation of the promoters results in expression of the reporter. Activity of the reporter is then assayed and serves as a quantitative indicator of the functional activity of the promoters. Oligo microarrays or “spotted” microarrays using the same promoter sequences can be used for a wide variety of other applications such as to study binding of transcription factors at all of the promoters on the array (e.g. used in conjunction with chromatin immunoprecipitation (CHIP), resulting in a CHIP-chip), and to measure the status of DNA methylation of the promoters. This methodology described herein can integrate promoter reporter activity, transcription factor binding, and epigenetic status, which should give the most complete measure of regulatory element function in a cell-based system.

### IV. LIBRARIES OF EXPRESSION CONSTRUCTS

[0161] In another embodiment, this invention provides libraries of expression constructions comprising genomic segments as described herein relevant to a biological pathway. In some embodiments, the library comprises a collection of members that are part of a common pathway, each of which contains a different nucleic acid segment from the genome. The expression constructs are recombinant nucleic acid molecules comprising a nucleic acid segment of this invention operably linked with a heterologous reporter sequence. A nucleotide sequence is operably linked with an expression control sequence when the nucleotide sequence is under the transcriptional regulatory control of the expression control sequence. The reporter sequence is heterologous to the genomic segment in that it is not naturally under the transcriptional regulatory control of the genomic segment sequence in the genome from which the nucleic acid segment comes. This recombinant nucleic acid molecule is further comprised within a vector that can be used to either infect or transiently or stably transfect cells and that may be capable of replicating inside a cell.

[0162] It should be noted that other than transcriptional promoters, libraries and arrays can be built for other types of regulatory elements following a similar principle to that for promoters. The vectors used in each case may be slightly different, however each preferably still contains a reporter cassette or construct. Different types of regulatory elements may be cloned in different positions relative to the reporter cassette.

[0163] a. Reporter Sequences

[0164] This invention contemplates a number of different reporter sequences that may be under the control of the transcriptional regulatory elements of genomic segments as described herein relevant to a biological pathway.

[0165] In one embodiment, the reporter sequence encodes a reporter protein, such as a light emitting protein (e.g., luciferase, a flouorescent protein (e.g., red, blue and green fluorescent proteins), alkaline phosphatase, secreted embryonic alkaline phosphatase (SEAP), chloramphenicol acetyl transferase (CAT), hormones and cytokines. In libraries using proteins that emit a detectable signal it may be useful, but not essential, for all of the reporter proteins to emit the same signal. This simplifies detection during high-throughput methods.

[0166] Alternatively, the expression constructs in the library may contain different reporter sequences which emit different detectable signals. For example, the reporter sequence in each of the constructs can be a unique, pre-determined nucleotide barcode. This allows assaying a large number of the nucleic acid segments in the same batch or receptacle of cells. In an embodiment, in each construct a unique promoter sequence is cloned upstream of a unique barcode reporter sequence yielding a unique promoter/barcode reporter combination. The active promoter can drive the production of a transcript containing the unique barcode sequence. Thus, in a library of expression constructs, each promoter's activity produces a unique transcript whose level can be measured. Since each reporter is unique, the library of expression constructs can be transfected into one large pool of cells (as opposed to separate wells) and all of the RNAs may be harvested as a pool. The levels of each of the barcoded transcripts can be detected using a microarray with the complementary barcode sequences. So the amount of fluorescence on each array spot corresponds to the strength of the promoter that drove the nucleotide barcode's transcription.

[0167] Optionally, the expression constructs in the library may contain a first reporter sequence and a second reporter sequence. The first reporter sequence and a second reporter sequence are preferred to be different. For example, the first reporter sequence may encode the same reporter protein (e.g., luciferase or GFP), and the second reporter sequence may be a unique nucleotide barcode. In this way, transcription can yield a hybrid transcript of a reporter protein coding region and a unique barcode sequence. Such a construct could be used either in a receptacle-by-receptacle approach for reading out the signal emitted by the reporter protein (e.g., luminescence) and/or in a pooled approach by reading out the barcodes.

[0168] By using the unique, molecular barcode for each member of the library, a large library (e.g. a library with diversity of at least 100, 150, 200, 500, 1000, 2000, or 25,000) can be assayed in a single receptacle (such as a vial or a well in a plate) rather than in thousands of individual receptacles. This approach is more efficient and economic as it can reduce costs at all levels: reagents, plasticware, and labor.

[0169] b. Vectors

[0170] The expression construct may be any vector that facilitates expression of the reporter sequence in the construct in a host cell. Any suitable vector can be used. There are many known in the art. Examples of vectors that can be used include, for example, plasmids or modified viruses. The vector is typically compatible with a given host cell into which the vector is introduced to facilitate replication of the vector and expression of the encoded reporter. Examples of specific vectors that may be useful in the practice of the present invention include, but are not limited to, E. coli bacteriophages, for example, lambda derivatives, or plasmids, for example, pBR322 derivatives or pUC plasmid derivatives; phage DNAs, e.g., the numerous derivatives of phage 1, e.g., NM989, and other phage DNA, e.g., M13 and filamentous single stranded phage DNA; yeast vectors such as the 2μ plasmid or derivatives thereof; vectors useful in eukaryotic cells, for example, vectors useful in insect cells, such as baculovirus vectors, vectors useful in mammalian cells such as retroviral vectors, adenoviral vectors, adenovirus viral vectors, adeno-associated viral vectors, SV40 viral vectors, herpes simplex viral vectors and vaccinia viral vectors; vectors derived from combinations of plasmids and phage DNAs, plasmids that have been modified to employ phage DNA or other expression control sequences; and the like.

### V. RECOMBINANT CELLS

[0171] In another aspect this invention provides recombinant cells comprising the expression libraries of this invention. Two different embodiments are contemplated in particular.

[0172] In a first embodiment each cell or group of cells comprises a different member of the expression library. Such a library of cells is particularly useful with the arrays of this invention. Typically, the library is indexed. For example, each different cell harboring a different expression vector can be maintained in a separate container that indicates the identity of the genomic segment within. The index also can indicate the particular gene or genes that is/are under the transcriptional regulatory control of the sequences naturally in the genome.

[0173] In a second embodiment, a culture of cells is transfected with a library of expression constructs so that all of the members of the library exist in at least one cell and each cell has at least one member of the expression library. The second embodiment is particularly useful with libraries in which the reporter sequences are unique sequences that can be detected independently.

[0174] As used herein the term cells and grammatical equivalents herein in meant any cell, preferably any prokaryotic or eukaryotic cell.

[0175] Suitable prokaryotic cells include, but are not limited to, bacteria such as E. coli, various Bacillus species, and the extremophile bacteria such as thermopiles, etc.

[0176] Suitable eukaryotic cells include, but are not limited to, fungi such as yeast and filamentous fingi, including species of Aspergillus, Trichoderma, and Neurospora; plant cells including those of corn, sorghum, tobacco, canola, soybean, cotton, tomato, potato, alfalfa, sunflower, etc.; and animal cells, including fish, birds and mammals. Suitable fish cells include, but are not limited to, those from species of salmon, trout, tulapia, tuna, carp, flounder, halibut, swordfish, cod and zebrafish. Suitable bird cells include, but are not limited to, those of chickens, ducks, quail, pheasants and turkeys, and other jungle foul or game birds. Suitable mammalian cells include, but are not limited to, cells from horses, cows, buffalo, deer, sheep, rabbits, rodents such as mice, rats, hamsters and guinea pigs, goats, pigs, primates, marine mammals including dolphins and whales, as well as cell lines, such as human cell lines of any tissue or stem cell type, and stem cells, including pluripotent and non-pluripotent, and non-human zygotes.

[0177] Useful cell types include primary and transformed mammalian cell lines. Suitable cells also include those cell types implicated in a wide variety of disease conditions, even while in a non-diseased state. Accordingly, suitable cell types include, but are not limited to, tumor cells of all types (e.g. melanoma, myeloid leukemia, carcinomas of the lung, breast, ovaries, colon, kidney, prostate, pancreas and testes), cardiomyocytes, dendritic cells, endothelial cells, epithelial cells, lymphocytes (T-cell and B cell), mast cells, eosinophils, vascular intimal cells, macrophages, natural killer cells, erythrocytes, hepatocytes, leukocytes including mononuclear leukocytes, stem cells such as haemopoetic, neural, skin, lung, kidney, liver and myocyte stem cells (for use in screening for differentiation and de-differentiation factors), osteoclasts, chondrocytes and other connective tissue cells, keratinocytes, melanocytes, liver cells, kidney cells, and adipocytes. In some embodiments, the cells used with the methods described herein are primary disease state cells, such as primary tumor cells. Suitable cells also include known research cell lines, including, but not limited to, Jurkat T cells, NIH3T3 cells, CHO, COS, etc. See the ATCC cell line catalog, hereby expressly incorporated by reference.

[0178] In some embodiment the cells used in the present invention are taken from an individual. In some embodiment the individual is a mammal, and in other embodiments the individual is human.

[0179] Exogenous DNA may be introduced to cells by lipofection, electroporation, or infection. Libraries in such cells may be maintained in growing cultures in appropriate growth media or as frozen cultures supplemented with Dimethyl Sulfoxide and stored in liquid Nitrogen.

### VI. FUNCTIONAL ARRAYS

[0180] In another aspect, this invention provides devices comprising a plurality of receptacles. In some embodiments, each receptacle contains a different member of expression library of this invention. In some embodiments, each receptacle contains all the members in the library. The receptacle can be any receptacle that that can holds the members of the expression library of this invention. For instance the receptacle can be a well, a vial or a tube. The receptacle can be a particle, a shallow microstructure, or a distinct location in a support. In some embodiments, the invention contemplates multiwell plates in a variety of formats and array layouts. In some embodiments, it is contemplated that a library of expression vectors can be contained within the wells of one or more 96-well, 384-well or 1536-well microtiter plates. However, it is worth noting that there are a number of standard formats well known in the art all of which can be used with the methods and compositions described herein.

[0181] In some embodiment, an array of diverse, different transcriptional regulatory elements is provided. In some embodiments, an array of different transcriptional promoters is provided. The diversity of the array is preferably at least at least 50, optionally at least 80, 120, 160, 200, 400, 500, 600, 800, 1000, 1500, 2000, 3000, 5000, 8000, 10,000, or 25,000. Also provided are a library of expression vectors each of which comprises a different gene expression regulatory element, preferably operably linked with a reporter sequence such that expression of the reporter sequence is under transcriptional control of each of the gene expression regulatory element.

[0182] For the plasmid functional array, each member of the promoter library may be transfected separately into E. coli. Each E. coli stock may be grown up to make >100 μg of each plasmid and then the plasmid DNAs are purified from the rest of the parts of the bacterial cells. In some embodiments, small aliquots of each plasmid or a mixture of plasmids (with appropriate transfection reagents) may be arrayed, e.g., in a 96-well, 384-well, or 1536-well format. This array of plasmids can be used for a number of different applications. Its primary use is preferably in the transfection of living cells. In some embodiments, a culture of cells is transfected with a library of plasmids so that all of the members of the library exist in at least one cell and/or each cell has at least one member of the expression library. In some embodiments, a culture of cells is transfected with a library of plasmids so that different members of the library exist in each cell or group of cells. Once the plasmids are delivered to living cells, the amount of activity detected from the reporter gene product reflects the transcriptional activity provided by the promoter fragment. Thus, the plasmid macroarray enables the high-throughput study of promoter function in living cells. Promoter functional assays may be conducted in a variety of cell types, in response to a change in the cellular environment, in response to an alteration in a gene sequence or function, or in the presence of a small molecule or protein sequence of interest.

[0183] In some embodiment, a highly diverse array of expression vectors is provided which comprise at least 10, 50, 100, 200, 400, 500, 600, 800, 1000, 1500, 2000, 3000, 5000, 8000, 10,000, or 25,000 different gene expression regulatory elements in the expression vectors. In some embodiment, a highly diverse array of expression vectors is provided which comprise at least 200 different gene expression regulatory elements in the expression vectors.

[0184] a. Arrays with “Naked” Nucleic Acids

[0185] In one embodiment, this invention contemplates arrays in which the receptacles contain expression vectors outside of a cellular environment. In some, arrays are contemplated in which each receptacle contains an expression vector of this invention in dried form. In some, arrays are contemplated in which each receptacle contains a library of expression vector of this invention in dried form. Such devices can be stored and shipped easily and are ready for use. In other embodiments the receptacles contain a solution comprising a nucleic acid. In other embodiments the receptacles contain a solution comprising a library of nucleic acid. In another embodiment, the solution can contain all the elements necessary for transfecting cells.

[0186] b. Arrays with Recombinant Cells

[0187] In one aspect the invention provides for arrays in which each receptacle comprises a recombinant cell or a group of recombinant cells. In some embodiments each receptacle comprises a recombinant cell or a group of recombinant cells containing an expression vector of this invention. In some embodiments each receptacle comprises a recombinant cell or a group of recombinant cells containing a library of expression vectors of this invention. These arrays are useful for carrying out high-throughput screening assays.

[0188] To generate such arrays, DNA may be mixed with serum-free media and a transfection reagent (such as a lipofection reagent), incubated, and added to a group of cells. After an incubation time, the exogenous DNA will be present in the cells. Alternate methods for delivery include electroporation and infection.

### VII. FUNCTIONAL ARRAYS

### Nucleic Acid Probe Arrays

[0189] In another aspect this invention provides DNA arrays in which the probes attached to a solid substrate comprise sequences from the nucleic acid segment libraries of this invention. Methods of making nucleic acid arrays are well known in the art. See, for example, U.S. Pat. Nos. 5,807,522 and 6,110,426 (Brown and Shalon); 6,054,270 and 6,054,270 (Southern); and 6,040,193; 5,744,305; 5,871,928; 6,610,482; 6,261,776; 6,291,183 (Affymetrix).

[0190] Methods and techniques applicable to array synthesis also have been described in U.S. Pat. Nos. 5,143,854, 5,242,974, 5,252,743, 5,324,633, 5,384,261, 5,424,186, 5,451,683, 5,482,867, 5,491,074, 5,527,681, 5,550,215, 5,571,639, 5,578,832, 5,593,839, 5,599,695, 5,624,711, 5,631,734, 5,795,716, 5,831,070, 5,837,832, 5,856,101, 5,858,659, 5,936,324, 5,968,740, 5,974,164, 5,981,185, 5,981,956, 6,025,601, 6,033,860, 6,040,193, and 6,090,555. All of the above patents incorporated herein by reference in their entireties for all purposes.

[0191] The sequence of the probe can comprise the entire sequence of a genomic segment of this invention. Alternatively, a transcription regulatory sequence of this invention can be represented by one or more probes comprising a sequence of at least 21 nucleotides from a transcription regulatory sequence. The sequence can be between 21 and 35 nucleotides long, between 36 and 45 nucleotides long, between 46 and 55 nucleotides longs between 56-65 nucleotides long, or longer. In certain embodiments, a transcriptional regulatory sequence is represented by 2, 3, 4, 5, 6, 7, 8, 9 or 10 probes comprising overlapping and/or non-overlapping nucleotides sequences from the transcriptional regulatory sequence. The probes of this invention can be single stranded or double stranded.

[0192] To construct a spotted regulatory sequence microarray, small aliquots of plasmid DNA representing each member of the regulatory sequence library may be used. Because each plasmid in the library is made up of the same vector backbone with a unique regulatory element insert, primers to the vector sequence flanking the regulatory sequence insert can be designed to allow PCR amplification of the unique insert in each vector using the same set of primers for the entire library. An individual PCR reaction is then conducted for each member of the library generating a large amount of PCR product representing the unique regulatory sequence fragment. Being amplified from a plasmid template, the PCR reaction should be very robust and consistent across all regulatory sequences, which may not the case if they were amplified from genomic DNA. These purified PCR products are then used to make a spotted microarray on a glass slide either by contact print or ink-jet deposition where each feature represents a unique regulatory sequence fragment.

[0193] The arrays of this invention can be used for a number of different experimental purposes. One application is in conjunction with chromatin immunoprecipitation (ChIP). Chromatin immunoprecipitation involves cross-linking proteins to DNA in a living cell, shearing up the chromatin/DNA complex, and immunoprecipitating with an antibody to a protein of interest. The challenge is to identify the DNA sequences that are bound to the protein of interest. One option is to hybridize the ChIP DNA to a microarray to identify the targets that are enriched ChIP. Many researchers already hybridize such experimental outputs to tiled-oligo microarrays to identify binding sites across the genome. However, such experiments are prohibitively expensive for many labs. The spotted promoter microarrays or promoter-specific oligo-based microarrays provided in the present invention meet the demands of researchers conducting CHIP experiments to study promoters specifically and are looking for a less expensive alternative to tiled oligo arrays.

[0194] Another application of this spotted regulatory sequence microarray or regulatory sequence-specific oligo-based microarray is for conducting genome-wide assays of regulatory sequence DNA-methylation status, e.g. promoter DNA methylation status. In some embodiments the regulatory sequence methylation status is measured using the method for determining methylation status of regulatory elements in a high throughput manner as described above. In some embodiments the regulatory sequence methylation status is measured using a number of different techniques that exist for differentially labeling hypo-methylated and hyper-methylated DNA sequences. The results of this differential labeling at regulatory sequences can be visualized on the spotted promoter microarray or promoter-specific oligo-based microarray to determine which promoters are under or over-methylated. In some embodiments, the effect of the DNA-methylation status of one or more segments in the genome of a cell on the transcription of one or more of the regulatory sequences in the library is measured.

[0195] Another application of this spotted regulatory sequence microarray or regulatory sequence-specific oligo-based microarray is for conducting genome-wide assays of DNA polymorphism. The effect of a DNA polymorphism is a regulatory sequence on its transcription or the transcription of other regulatory elements can be measured using the methods described herein. In some embodiments, the effect of a DNA polymorphism in one or more segments in the genome of a cell on the transcription of one or more of the regulatory sequences in the library is measured.

[0196] Another application is to of this spotted regulatory sequence microarray or regulatory sequence-specific oligo-based microarray is for conducting genome-wide assays of a DNA polymorphism. The effect of a DNA polymorphism in a regulatory sequence on its transcription or the transcription of other regulatory elements can be measured using the methods described herein. In some embodiments, the effect of a DNA polymorphism in one or more segments in the genome of a cell on the transcription of one or more of the regulatory sequences in the library is measured.

[0197] Another application is to of this spotted regulatory sequence microarray or regulatory sequence-specific oligo-based microarray is for conducting genome-wide assays of a DNA mutation. The effect of a DNA mutation in a regulatory sequence on its transcription or the transcription of other regulatory elements can be measured using the methods described herein. In some embodiments, the effect of a DNA mutation in one or more segments in the genome of a cell on the transcription of one or more of the regulatory sequences in the library is measured.

[0198] Another application of this spotted regulatory sequence microarray or regulatory sequence-specific oligo-based microarray is for determining transcriptional activity of a plurality of transcriptional regulatory elements in the genome of an individual.

[0199] Yet another application of this spotted regulatory sequence microarray or regulatory sequence-specific oligo-based microarray is for determining transcriptional regulatory activity of a plurality of different nucleic acid segments under a variety of conditions and for screening the affect of a small molecule on response elements in a biological pathway.

[0200] In general, any technique that results in differential labeling of one type of sequence over another can be applied to a spotted regulatory sequence microarray or regulatory sequence-specific oligo-based microarray including DNA-hypersensitivity, histone-modifications, and more. Compared to other oligo-based regulatory sequence arrays developed by others in the field, one of the benefits for using this spotted regulatory sequence microarray or regulatory sequence-specific oligo-based microarray for such an assay is that the fragments on the array are the exact same fragments that may be tested for functional activity using the plasmid functional macroarray system.

### VIII. KITS

[0201] In an embodiment, a kit is provided for a functional macroarray of transcription regulatory sequences. The kit includes: transfection-ready set of transcription regulatory sequences plasmids, e.g., promoter plasmids. In some embodiments the set of transcription regulatory sequences plasmids are arrayed in a support, e.g., 96 or 384 wells. The kit may further include: reporter assay substrates; reagents for induction or repression of a particular biological pathway (cytokines or other purified proteins, small molecules, cDNAs, siRNAs, etc.), and/or data analysis software.

[0202] In addition, kits are provided which comprise reagents and instructions for performing methods of the present invention, or for performing tests or assays utilizing any of the compositions, libraries, arrays, or assemblies of articles of the present invention. The kits may further comprise buffers, restriction enzymes, adaptors, primers, a ligase, a polymerase, dNTPS and instructions necessary for use of the kits, optionally including troubleshooting information.

[0203] In another embodiment, a kit is provided for a CHIP assay. The kit includes: a spotted transcription regulatory sequences microarray or transcription regulatory sequences plasmids-specific oligo-based microarray; and one or more ChIP-grade antibody. The kit may further include: DNA amplification and labeling reagents; and/or data analysis software.

[0204] In yet another embodiment, a kit is provided for a DNA-methylation assay, comprising: a transcription regulatory sequences or promoter-specific oligo-based microarray; and enzyme sets for methylation assay. The kit may further include: DNA amplification and labeling reagents; and/or data analysis software.

[0205] In still another embodiment, an assembly of articles is provided for a comprehensive transcription regulatory sequences analysis, comprising: a plasmid functional macroarray kit; a promoter microarray kit for CHIP; and a DNA-methylation assay kit. The assembly may further include: analysis software for data integration.

### IX. METHODS OF USE

[0206] The functional arrays of this invention are useful, e.g., for performing high-throughput experiments to screen activity of the transcriptional regulatory sequences of this invention. This increase in throughput of functional promoter assays is important for several reasons: First, removing limits on the numbers of regulatory elements that can be assayed in a single panel allows researchers to interrogate elements corresponding to common pathways in a single experiment. For example, there are well over a thousand genes that are implicated in cancer development and progression. By scaling the promoter functional assays to include promoters of over a hundred of genes, for example over a thousand genes, researchers can study all of the promoters that are part of an oncology pathway (e.g. all cancer related genes) at once.

[0207] Furthermore, many genes have alternative promoters; therefore, increasing the throughput of these assays will allow alternative promoters to be included in a study. Particular alternative promoters have been shown to confer distinct regulation of different isoforms of the same gene, and this is an important aspect of promoter biology that needs to be included in a comprehensive study.

[0208] Increasing throughput will also enable the study of promoter sequence variants on a much larger scale. Since each promoter in the genome will likely have several SNPs on average, increasing the throughput will allow a comprehensive analysis of all existing haplotypes of a given set of promoters rather than having to pick the most common haplotypes.

[0209] Further, assaying a large number of regulatory elements in a single experiment will allow researchers to conduct statistical analyses with much greater power. The previous promoter activity experiments have shown that promoter activity data often breaks down into clusters of similar activity, just like gene clusters in microarray expression experiments. In an experiment with a small number of promoters, each sub-cluster is often too small to make any statistically significant claims as to important features unique to that cluster, such as the over-representation of certain motifs or higher-order sequence characteristics. The larger the dataset, the more power there is to perform these statistical analyses; and a diversity of promoters beyond 200 or 1,000 in a single panel would be very desirable.

[0210] A wide variety of biological samples can be tested according to the present invention, including isolated cells, cell cultures, body fluid (blood, bone marrow, saliva, spinal cord fluid, and semen), biopsy and tissue samples. The tissue samples can be any which are derived from a patient, whether human, other domestic animal, or veterinary animal. Vertebrate animals are preferred, such as humans, mice, horses, cows, dogs, and cats. The samples may be fixed or unfixed, homogenized, lysed, cryopreserved, etc. It is most desirable that matched tissue samples be used as controls. Thus, for example, a suspected colorectal cancer tissue will be compared to a normal colorectal epithelial tissue.

[0211] In one aspect of the invention, a method is provided for determining transcriptional regulatory activity of a plurality of different nucleic acid segments. The method comprises: operably linking each of the plurality of different nucleic acid segments with a reporter sequence in an expression vector such that expression of the reporter sequence is under transcriptional control of each of the different nucleic acid segments; expressing the reporter sequence; and determining the expression level of the reporter controlled by each of the different nucleic acid segments.

[0212] The present invention also provides compositions, assemblies, and kits, preferably for carrying out the methods of the present invention. For example, an array of different regulatory elements is provided, preferably an array of different transcriptional promoters. The diversity of the array is preferably at least at least 50, optionally at least 80, 120, 160, 200, 400, 500, 600, 800, 1000, 1500, 2000, 3000, 5000, 8000, 10,000, or 25,000. Also provided are a library of expression vectors each of which comprises a different gene expression regulatory element, preferably operably linked with a reporter sequence such that expression of the reporter sequence is under transcriptional control of each of the gene expression regulatory element.

[0213] b. Methods of High-Throughput Screening of Promoter Activity

[0214] i. Basic Method

[0215] An array of cells harboring the expression constructs of this invention is useful, e.g., for high-throughput screening of promoter activity. In some embodiments, a support having a member of an expression library of this invention in each receptacle of the device is filled with a cell type of interest under conditions so that the cells are transfected with the vectors. In some embodiments, a support having more than one member of an expression library of this invention in each receptacle in the support is filled with a cell type of interest under conditions so that the cells are transfected with the vectors. In some embodiments, a support having an expression library of this invention in each receptacle of the device is filled with a cell type of interest under conditions so that the cells are transfected with the vectors. The cells are then incubated under conditions chosen by the operator. Cells in which the regulatory elements are “turned on” will express the reporter sequences under their transcriptional control. The investigator then checks each receptacle of the device to measure the amount of reporter transcribed. Generally, this involves measuring the signal produced by a reporter protein encoded by the reporter sequence. For example, if the reporter protein is a fluorescent protein, then light is directed to each well and the amount of fluorescence is measured. The amount of signal measured is a function of the expression of the reporter sequence which, in turn, is a function of the activity of the transcriptional regulatory sequences.

[0216] FIG. 2 schematically illustrates an embodiment of the method for detecting transcriptional activity of a plurality of regulatory elements in a common pathway in a high throughput manner. As illustrated in FIG. 2, a large number of regulatory elements contained in a library of reporter constructs are arrayed in a multi-well plate and transfected into tissue culture cells. Expression of the reporter is detected and correlated with the transcriptional activity of the regulatory elements.

[0217] FIG. 3 schematically illustrates another embodiment of the method for detecting transcriptional activity of a plurality of regulatory elements in a common pathway in a large scale, high throughput manner. As illustrated in FIG. 3, more than a hundred regulatory elements contained in a library of reporter constructs are arrayed in a multi-well format (e.g. a 96-well or 384-plate format) and transfected into tissue culture cells. The library of reporter constructs and a transfection reagent mix can be transfected or added into tissue culture cells in a 96- or 394-well format. Alternatively and more efficiently, the library of reporter constructs and a transfection reagent mix are arrayed in a 96- or 394-well format and tissue culture cells are added into the wells later. Expression of the reporter is detected and correlated with the transcriptional activity of the regulatory elements.

[0218] By expanding from 96-well plates to 384-well plates and pre-allocating the plasmid DNAs, throughput can be expanded from hundreds to >1,000 regulatory element assays in a single experiment. Scaling this experiment to more than 1,000 independent regulatory element fragments greatly improves the scope of the research project and gives more power to the downstream statistical analyses of these data. The larger the dataset, the more amenable it is to approaches such as principle component analysis and hierarchical clustering. By studying more than 1,000 regulatory elements at once in multiple experiments, sub-clusters of promoter activity data are large enough to look for over-represented motifs or higher-order sequence characteristics.

[0219] The steps of the process are refined to increase the accuracy of regulatory element prediction and efficiency of every step, thus enabling functionally assaying multiple hundreds or thousands of regulatory elements in a single experiment and allowing thorough interrogations of common biological pathways in a single experiment: Instead of having to choose only their best candidates for assay because of a limitation on size of the experiment, by using the present invention researchers can include hundreds of genes of interest, therefore receiving much more complete and biologically relevant datasets.

[0220] Method for detecting transcriptional activity of a plurality of regulatory elements in a large scale are described in U.S. patent application Ser. No. 11/636,385, filed Dec. 7, 2006 entitled “Functional arrays for high throughput characterization of gene expression regulatory elements”.

[0221] ii. Detecting the Effect of Perturbation

[0222] In another embodiment of the methods of this invention, the investigator can test the effect of a system perturbation on the activity of a library of transcription regulatory sequences that are part of a common pathway. The basic method described above is performed under a first set of conditions to determine the amount of activity of the promoters. Then the cells are perturbed, i.e., subject to different conditions, in a manner chosen by the investigator. Perturbations can include, for example, exposing the cells to a test compound, changing environmental conditions such as temperature, pH or nutrition, or genetically modifying the cells to introduce new or modified genetic material or changes in amounts of genetic material. In some embodiment perturbations include cells that comprise one or more genetic mutation or one or more polymorphisms in their genome. After perturbation, the amount of activity of each regulatory sequence in the library is examined and compared to its activity in the first state. Regulatory sequences that show altered activity can be isolated and studied further. In this way it can be determined, for example, which transcription regulatory sequences have their activity modulated by a compound of interest.

[0223] In a variation of this method, the test is performed in parallel. That is, two identical devices of this invention are examined for regulatory sequence activity. However, one device is subjected to a first set of conditions and the other device is subjected to a second set of conditions. In this way, the relative activity of the transcription regulatory sequences under the two conditions can be examined, and sequences that have different activity can be identified and isolated.

[0224] iii. Comparison Between Cell Types

[0225] It also can be useful to identify differences in transcription regulatory sequence activity in two cell types. For example gene expression differs when cells transform from normal to cancerous. Regulatory sequences that are overactive in cancer cells may be targets of pharmacological intervention. In another example, gene expression may differ in cells having one or more polymorphisms or one or more genetic mutation in their genome. Regulatory sequences that have different expression in cells containing a polymorphism or a mutation can then help the understanding of said polymorphism or mutation in gene expression and/or may be targets of pharmacological intervention. The devices of this invention are useful to identify such transcription regulatory sequences. Accordingly, the investigator provides two sets of devices comprising expression constructs in the receptacles. One cell type is used for transformation in a first device and a second cell type, for transformation in a second device. The expression of reporter sequences between the two devices is compared to identify those expressed differently in the two cell types.

[0226] In some embodiments, the methods described herein are useful to diagnose a condition. For example, a device as described herein comprising a plurality of receptacles each receptacle containing a different member of a library of cells, wherein said cells are associated with said condition can be used to diagnose a condition. Gene expression is measured in the cells associated with the condition and an expression panel is created. The expression panel characterized the condition and hence the condition can be diagnosed. Expression panels that characterized a condition can be obtained by comparing cells associated with the condition in a diseased state with normal cells as described above.

[0227] iv. Tests in Mixed Cultures

[0228] Using expression constructs in which the transcription regulatory sequences that are part of a common pathway are operably linked to unique reporter sequences opens the possibility of performing tests without the use of a device with multiple receptacles. In such situations a single culture of cells contains the entire expression library distributed among the cells. The culture can be incubated under conditions chosen by the investigator.

[0229] In some embodiments, the expression products are isolated. As described in the section entitled “Reporter Sequences” because each one has a unique nucleotide sequence tag or barcode associated with its partner nucleic acid segment, the amount of each of the reporter sequences can be measured by measuring the amount of transcript comprising each unique sequence. For example, the molecules can be detected on a DNA array that contains probes complementary to the unique sequences. The amount of hybridization to each probe indicates the amount of the reporter sequence expressed, which, in turn, reflects the activity of the transcription regulatory sequences.

### X. PROMOTER VARIANTS

[0230] a. Identification of Promoter Variants Having Different Activity

[0231] There are many published accounts of sequence changes in promoter regions causing changes in human phenotypes or disease status. One of the classic examples is Beta-thalassemia. Just in the past few years, promoter sequence changes have also been linked to cardiovascular disease, Alzheimer disease, schizophrenia, bi-polar disorder, glaucoma, epilepsy, multiple sclerosis and lupus among others. Very recent work has also shown that a 3 base pair deletion in the promoter of the SRY gene is associated with complete sex reversal. Functional variants in the promoter of the C-reactive Protein gene have also been identified. This is particularly important because serum levels of C-reactive Protein are a key predictor of heart disease risk.

[0232] Association studies and efforts such as the Hap-Map project often detect potentially biologically interesting variation in the sequences of promoters between individuals in the human population. The big question then revolves around whether or not those sequence changes actually affect the function of the promoter or if they are essentially silent, non-functional changes. The assays provided herein can be used to compare the activity of promoter variants

[0233] This invention provides methods for identifying variants in transcriptional regulatory sequences that are associated with phenotypic differences in a population. The methods involve the following steps. First, one identifies and selects transcriptional regulatory sequences that exhibit sequence polymorphism in a population, such as SNPs, from a database of sequences or other information source. Then, one tests these variants for transcription regulation activity in an assay of this invention. Polymorphic forms that exhibit differences in activity in these assays are selected for further study. In such a study, two populations are selected that have different phenotypic traits. For example, a first population having a disease and a second population not having the disease are selected. Generally, the investigator will select a promoter that regulates expression of a gene suspected to have some connection with the phenotype in question. The population is large enough to provide statistically significant results. Each individual in the two populations are then tested to determine which form of the variant the individual has. Statistical analysis will indicate whether the polymorphic form is associated with the phenotype. Polymorphic forms found to associate with a specific phenotype then can be used in diagnostic tests to determine how likely it is that the individual has the phenotype.

[0234] More generally, the products provided in the present invention can also be used to correlate polymorphisms in a gene expression regulatory element with a phenotypic trait more efficiently. Correlation of individual polymorphisms or groups of polymorphisms with phenotypic characteristics is a valuable tool in the effort to identify DNA variation that contributes to population variation in phenotypic traits. Phenotypic traits include physical characteristics, risk for disease, and response to the environment. Polymorphisms that correlate with disease are particularly interesting because they represent mechanisms to accurately diagnose disease and targets for drug treatment. Hundreds of human diseases have already been correlated with individual polymorphisms but there are many diseases that are known to have an, as yet unidentified, genetic component and many diseases for which a component is or may be genetic.

[0235] Many diseases may correlate with multiple genetic changes making identification of the polymorphisms associated with a given disease more difficult. One approach to overcome this difficulty is to systematically explore the limited set of common gene variants for association with disease. The functional studies enabled by a regulatory element macroarray will facilitate the sorting out of sequence variants that affect the function of a regulatory element away from those that do not. Therefore, researchers may look for correlation of functional sequence variants with phenotypic traits, changing the focus from funding variants merely correlated with a phenotype towards identifying variants that may cause a particular phenotype.

[0236] To identify correlation between one or more alleles in the gene expression regulatory region and one or more phenotypic traits, individuals are tested for the presence or absence of polymorphic markers or marker sets and for the phenotypic trait or traits of interest. The presence or absence of a set of polymorphisms is compared for individuals who exhibit a particular trait and individuals who exhibit lack of the particular trait to determine if the presence or absence of a particular allele is associated with the trait of interest. For example, it might be found that the presence of allele A1 at polymorphism A in the promoter region of a gene correlates with heart disease. As an example of a correlation between a phenotypic trait and more than one polymorphism, it might be found that allele A1 at polymorphism A and allele B1 at polymorphism B correlate with a phenotypic trait of interest.

[0237] Markers or groups of markers in a gene expression regulatory region that correlate with the symptoms or occurrence of disease can be used to diagnose disease or, predisposition to disease without regard to phenotypic manifestation. To diagnose disease or predisposition to disease, individuals are tested for the presence or absence of polymorphic markers or marker sets that correlate with one or more diseases. If, for example, the presence of allele A1 at polymorphism A correlates with coronary artery disease then individuals with allele A1 at polymorphism A may be at an increased risk for the condition.

[0238] Individuals can be tested before symptoms of the disease develop. Infants, for example, can be tested for genetic diseases such as beta-thalassemia at birth. Individuals of any age could be tested to determine risk profiles for the occurrence of future disease. Often early diagnosis can lead to more effective treatment and prevention of disease through dietary, behavior or pharmaceutical interventions. Individuals can also be tested to determine carrier status for genetic disorders. Potential parents can use this information to make family planning decisions.

[0239] Individuals who develop symptoms of disease that are consistent with more than one diagnosis can be tested to make a more accurate diagnosis. If, for example, symptom S is consistent with diseases X, Y or Z but allele A1 at polymorphism A correlates with disease X but not with diseases Y or Z an individual with symptom S is tested for the presence or absence of allele A1 at polymorphism A. Presence of allele A1 at polymorphism A is consistent with a diagnosis of disease X.

[0240] b. Pharmacogenomics

[0241] In addition, the products provided in the present invention can also be used for pharmacogenomics. Pharmacogenomics refers to the study of how your genes affect your response to drugs. There is great heterogeneity in the way individuals respond to medications, in terms of both host toxicity and treatment efficacy. There are many causes of this variability, including: severity of the disease being treated; drug interactions; and the individuals age and nutritional status. Despite the importance of these clinical variables, inherited differences in the form of genetic polymorphisms can have an even greater influence on the efficacy and toxicity of medications. Genetic polymorphisms in drug-metabolizing enzymes, transporters, receptors, and other drug targets have been linked to inter-individual differences in the efficacy and toxicity of many medications. (See, Evans and Relling, Science 286: 487-491 (2001) which is herein incorporated by reference for all purposes). The functional studies enabled by a regulatory element macroarray will facilitate the sorting out of sequence variants that affect the function of a regulatory element away from those that do not. Therefore, researchers may look for correlation of functional sequence variants with phenotypic traits, changing the focus from finding variants merely correlated with a phenotype towards identifying variants that may cause a particular phenotype.

[0242] In a manner similar to that above, transcription regulatory sequences encoding genes suspected to be involved in drug metabolism are screened to identify those that exist in polymorphic forms in a population. These sequences are tested for functional differences in the assays of this invention. Those that exhibit functional differences are then examined in populations having different responses to a drug to determine whether a polymorphic form is associated with differences in drug reaction.

[0243] An individual patient has an inherited ability to metabolize, eliminate and respond to specific drugs. Correlation of polymorphisms in a gene expression regulatory region with pharmacogenomic traits identifies those polymorphisms that impact drug toxicity and treatment efficacy. This information can be used by doctors to determine what course of medicine is best for a particular patient and by pharmaceutical companies to develop new drugs that target a particular disease or particular individuals within the population, while decreasing the likelihood of adverse affects. Drugs can be targeted to groups of individuals who carry a specific allele or group of alleles. For example, individuals who carry allele A1 at polymorphism A may respond best to medication X while individuals who carry allele A2 respond best to medication Y. A trait may be the result of a single polymorphism but will often be determined by the interplay of several genes.

[0244] In addition some drugs that are highly effective for a large percentage of the population prove dangerous or even lethal for a very small percentage of the population. These drugs typically are not available to anyone. Pharmacogenomics can be used to correlate a specific genotype with an adverse drug response. If pharmaceutical companies and physicians can accurately identify those patients who would suffer adverse responses to a particular drug, the drug can be made available on a limited basis to those who would benefit from the drug.

[0245] Similarly, some medications may be highly effective for only a very small percentage of the population while proving only slightly effective or even ineffective to a large percentage of patients. Pharmacogenomics allows pharmaceutical companies to predict which patients would be the ideal candidate for a particular drug, thereby dramatically reducing failure rates and providing greater incentive to companies to continue to conduct research into those drugs.

[0246] c. Marker-Assisted Breeding

[0247] The products provided in the present invention can also be used for marker assisted breeding. Genetic markers can assist breeders in the understanding, selecting and managing of the genetic complexity of animals and plants. Agriculture industry, for example, has a great deal of incentive to try to produce crops with desirable traits (high yield, disease resistance, taste, smell, color, texture, etc.) as consumer demand increases and expectations change. However, many traits, even when the molecular mechanisms are known, are too difficult or costly to monitor during production. Readily detectable polymorphisms in a gene expression regulatory region which are in close physical proximity to the desired genes can be used as a proxy to determine whether the desired trait is present or not in a particular organism. This provides for an efficient screening tool which can accelerate the selective breeding process.

[0248] In a manner similar to that above, transcription regulatory sequences encoding genes suspected to be involved in the phenotypic trait of interest are screened to identify those that exist in polymorphic forms in a population. These sequences are tested for functional differences in the assays of this invention. Those that exhibit functional differences are then examined in populations having traits to determine whether a polymorphic form is associated with this trait.

[0249] It should be noted that the methods, libraries, arrays, kits and assemblies provided in the present invention are not limited to any particular type of nucleic acid sample: plant, bacterial, animal (including human) total genome DNA, RNA, cDNA and the like may be analyzed using some or all of the methods disclosed in this invention. The word “DNA” may be used below as an example of a nucleic acid. It is understood that this term includes all nucleic acids, such as DNA and RNA, unless a use below requires a specific type of nucleic acid.

### XI. SOFTWARE

[0250] In one aspect, the present invention provides data analysis software that identifies genes in a pathway from all of the human gene functional annotation available at the gene databases, e.g. http://www.geneontology.org and at the NCBI portal for gene annotation (http://www.ncbi.nlm.nih.gov/RefSeq/).

[0251] In another aspect, the present invention provides data analysis software that normalizes promoter strength measurements and calculates the statistical significance of each measurement with a background model. The data analysis algorithm first normalizes the data in each plate using a plurality (e.g., a set of 4, 8 or 16) of standard controls. These normalized raw values for each experimental construct are then compared to the promoter activity of a panel of at least 48, 96, or 384 random genomic fragments to assess their significance above background. These random fragments can be chosen truly randomly throughout the genome or from middle exons of protein coding genes that are at least 1000 basepairs in length and at least 5000 bases from a known transcription start site. For each experiment, the average and standard deviation of the random fragment values are calculated. A z-score is then calculated for each experimental promoter activity from the following equation: Z-score promoter activity=(raw promoter activity−mean of random controls)/standard deviation of the random controls. The confidence level for each Z-score is equal to the area under the curve assuming a Gaussian distribution of the negative control fragments after correction for multi-hypothesis testing. (i.e. fragments with a Z-score≧3 are considered active at a p<0.01 confidence level.) The Z-score transformed promoter activity data can then be compared to Z-transformed data of other types such as DNA methylation, chromatin IP combined with genomic microarrays, expression array data, etc.

### XII. METHYLATION

[0252] The present invention also provides a method for determining methylation status of CpG dinucleotides within a nucleic acid molecule, in particular, regulatory elements. In certain embodiments, the method is performed in a high throughput manner. Many regulatory elements are CpG-rich, and many CpG-rich regions represent regulatory elements. Therefore, measuring the methylation status of CpG-rich sequences provides insight into the function of many transcriptional regulatory elements.

[0253] FIG. 4 schematically illustrates an embodiment of the method for large scale, high throughput determination of methylation status of CpG-rich sequence regions genome-wide. As illustrated in FIG. 4, high-molecular weight genomic DNA is prepared from cell lines or tissues and digested with at least three (preferably 6) different methyl-sensitive restriction enzymes. If the CpG-rich sequences in DNA from the source are not methylated, the methyl-sensitive enzymes will cleave these sequences into small fragments. The digested DNA greater than 100 bp in length is purified and labeled with a detectable marker such as a fluorescent label. Undigested genomic DNA is labeled with a different detectable marker. Labeling can either proceed by cleavage and end-labeling, or by hybridization of random labeled primers followed by extension of the primers. Both samples are applied in a competitive hybridization assay to a genomic microarray, such as a spotted promoter or CpG island array or an oligo array that tiles across genomic regions of interest. In DNA in which the CpG-rich areas are unmethylated, there will be a significant depletion of these CpG-rich regions, as this area will have been cleaved into small fragments less than 100 nucleotides. However, these regions will not be depleted in the un-digested DNA used as a control. Method for large scale, high throughput determination of methylation status of CpG-rich sequence regions genome-wide are described in U.S. patent application Ser. No. 11/636,385, filed Dec. 7, 2006 entitled “Functional arrays for high throughput characterization of gene expression regulatory elements”.

[0254] Individual methyl-sensitive restriction enzymes (restriction enzymes that cleave nucleic acid molecules having unmethylated recognition sequences, but not methylated recognition sequences) have been used previously to measure DNA-methylation, but they have usually been used to mark and retrieve the pieces of unmethylated DNA. The novel aspect of the approach is that it measures the depletion of these regions relative to the rest of the genome. Using a cocktail of enzymes, each with a different recognition site, enables a depletion of unmethylated regions that does not occur to the same extent under the treatment with any one enzyme alone. Examples of methylation-sensitive restriction enzymes include: AatII, AciI, AcII, AfeI, AgeI, AscI, AsiSI, AvaI, BceAI, BmgBI, BsaAI, BsaHI, BsiEI, BsiWI, BsmBI, BspDI, BspEI, BsrBI, BsrFI, BssHII, BstBI, BstUI, ClaI, EagI, FauI, FseI, FspI, HaeII, HgaI, HhaI, HinP1I, HpaII, Hpy99I, HpyCH4IV, KasI, MluI, NaeI, NarI, NgoMIV, NotI, NruI, PaeR7I, PmII, PvuI, RsrII, SacII, Sa1I, SfoI, SgrAI, SmaI, SnaBI, TilI, XhoI.

[0255] By using the method, DNA methylation status at CG-rich regions of the entire genome can be measured efficiently. The major advantage of this method is that it is very efficient, inexpensive, and measures over 97% of the “CpG islands” in the human genome with a very high specificity. DNA methylation is implicated in carcinogenesis and transcriptional regulation. Therefore, profiling the methylation status of the genome could help classify different cancers and explain mechanisms of gene regulation in specific pathways.

[0256] CpG Island and promoter arrays could be designed specifically for this assay. One embodiment of an oligonucleotide array design would be to implement an algorithm that specifically designs an array depending on the set of methyl-sensitive restriction enzymes used. This algorithm would first map a defined set of methyl-sensitive restriction enzyme recognition sites throughout a mammalian genome sequence of interest. Preferably more than 2 MSRE and approximately 6 MSRE would be used in this embodiment. A genome-wide map of the MSRE sites describes where the genomic DNA would be cut if it was not methylated at that location. After mapping a set of MSRE sites, the algorithm then calculates the distance between each neighboring MSRE site. The algorithm then clusters those MSRE sites that are less than 100 bp from each other and defines the coordinates of genomic regions bounded by at least 2 MSRE sites where the distance between neighboring MSREs within that region is less than 100 bp. These are regions of the genome that would be depleted if they were unmethylated and digested by the MSREs. Conversely, the algorithm also records those regions that would not be depleted upon digestion with the set of MSRE. These are regions that are greater than 100 bp in length that do not have MSRE recognition sequences closer than 100 bp to each other. These regions would not be depleted in the MSRE treatment and contain few, if any, CpG dinucleotides. The algorithm ultimately produces two lists of genomic regions: one that could be depleted by treatment with one or more MSRE and one that would not be depleted by treatment with one or more MSRE. Examples of depleted regions are shown in SEQ ID NOs. 45,097-45,296. Examples of recovered regions are shown in SEQ ID NOs. 45,297-45,496. The algorithm would then design oligonucleotide probes approximately 25, 30, 35, 40, 45, 50, 55, or 60 bases in length that cover 10%, 20%, 30%, 40%, 50%, 60%, 70%, 80%, 90%, or 99% of the putative “depleted regions” and another set of oligonucleotide probes approximately 25, 30, 35, 40, 45, 50, 55, or 60 bases in length that cover 10%, 20%, 30%, 40%, or 50% of the putative “recovered regions”. Hybridization and labeling of a genomic DNA sample treated with a plurality of MSRE and an untreated and labeled sample would then identify which regions were depleted, thus unmethylated in the genomic sample hybridized to the custom-designed array. The set of “recovered regions” serve as controls that are used to build an error model to measure the significance of depleted signals at putatively unmethylated regions.

[0257] Additionally, enzyme complexes that specifically cleave methylated DNA such as McrBC, could be used to perform the reciprocal experiment (identify depleted methylated regions). This approach could also be applied to whole tissues and other mammalian models.

[0258] The present invention relies on many patents, applications and other references for details known to those of the art. Therefore, when a patent, application, or other reference is cited or repeated below, it should be understood that it is incorporated by reference in its entirety for all purposes as well as for the proposition that is recited. As used in the specification and claims, the singular form “a,” “an,” and “the” include plural references unless the context clearly dictates otherwise. For example, the term “an agent” includes a plurality of agents, including mixtures thereof. An individual is not limited to a human being but may also be other organisms including but not limited to mammals, plants, bacteria, or cells derived from any of the above.

[0259] Throughout this disclosure, various aspects of this invention are presented in a range format. It should be understood that the description in range format is merely for convenience and brevity and should not be construed as an inflexible limitation on the scope of the invention. Accordingly, the description of a range should be considered to have specifically disclosed all the possible subranges as well as common individual numerical values within that range. For example, description of a range such as from 1 to 6 should be considered to have specifically disclosed subranges such as from 1 to 3, from 1 to 4, from 1 to 5, from 2 to 4, from 2 to 6, from 3 to 6 etc., as well as individual numbers within that range, for example, 1, 2, 3, 4, 5, and 6. The same holds true for ranges in increments of 105, 104, 103, 102, 10, 10-1, 10-2, 10-3, 10-4, or 10-5, for example. This applies regardless of the breadth of the range.

[0260] The practice of the present invention may employ, unless otherwise indicated, conventional techniques of organic chemistry, polymer technology, molecular biology (including recombinant techniques), cell biology, biochemistry, and immunology, which are within the skill of the art. Such conventional techniques include polymer array synthesis, hybridization, ligation, and detection of hybridization using a label. Specific illustrations of suitable techniques can be had by reference to the example herein below. However, other equivalent conventional procedures can, of course, also be used. Such conventional techniques can be found in standard laboratory manuals such as Genome Analysis: A Laboratory Manual Series (Vols. I-IV), Using Antibodies: A Laboratory Manual, Cells: A Laboratory Manual, PCR Primer: A Laboratory Manual, and Molecular Cloning: A Laboratory Manual (all from Cold Spring Harbor Laboratory Press), all of which are herein incorporated in their entirety by reference for all purposes.

### EXAMPLES

### Example 1

### Prediction of Putative Human Core Promoters in Genes Involve in Oncology Pathways

### Identification of Genes

[0261] The total oncology pathway set was broken down into 5 subsets: (i) Hypoxia pathway, (ii) DNA-damage pathway, (iii) Apoptosis pathway, (iv) Cell cycle pathway and (v) p53 pathway. To identify genes in each pathway, all of the human gene functional annotation available at the gene ontology database (http://www.geneontology.org/) and at the NCBI portal for gene annotation (http://www.ncbi.nlm.nih.gov/RefSeq/) was downloaded. With a genome-list of human genes and their known biological functions, custom software was written to query this compiled set of gene information for each of the 5 categories above.

[0262] Identification of genes involved in hypoxia pathways: To identify genes in the hypoxia pathway, the gene ontology annotation (described previously) for the following terms were queried: “hypoxia”, “hypoxic”, “vasculargenesis”, hypoxia inducible factor, hif. In addition, published literature databases (http://www.ncbi.nlm.nih.gov/sites/entrez?db=PubMed) were search using the terms “hypoxia” and “human” and “gene”. These genes were then included as genes previously described to be regulated by hypoxia. Furthermore, a probability matrix that describes a sequence motif known to be involved in the transcriptional regulation of the hypoxia response was used. This motif is known as the “hypoxia response element” or “HRE”. The probability matrix is shown below:

Position (5′ to 3′)

| | A | C | G | T | |
|---|---|---|---|---|---|
| 1 | 0.087 | 0.174 | 0.652 | 0.087 | G |
| 2 | 0.217 | 0.478 | 0.130 | 0.174 | N |
| 3 | 0.217 | 0.217 | 0.478 | 0.087 | N |
| 4 | 0.043 | 0.130 | 0.391 | 0.435 | K |
| 5 | 0.957 | 0.001 | 0.043 | 0.001 | A |
| 6 | 0.001 | 0.999 | 0.001 | 0.001 | C |
| 7 | 0.001 | 0.001 | 0.999 | 0.001 | G |
| 8 | 0.001 | 0.001 | 0.001 | 0.999 | T |
| 9 | 0.001 | 0.001 | 0.999 | 0.001 | G |
| 10 | 0.087 | 0.739 | 0.130 | 0.043 | C |
| 11 | 0.130 | 0.174 | 0.522 | 0.174 | G |
| 12 | 0.043 | 0.217 | 0.565 | 0.174 | G |
| 13 | 0.043 | 0.391 | 0.304 | 0.261 | N |
| 14 | 0.304 | 0.304 | 0.217 | 0.174 | N |

[0263] This probability matrix was used to evaluate each string of 14 bases in every promoter of the genome. Each promoter in the genome was ranked by this score. The top 200 promoters in the genome with the highest occurrence of the HRE were selected to be included in the hypoxia pathway panel.

[0264] Identification of genes involved in DNA-damage pathways: To identify genes in the DNA-damage pathway, the gene ontology annotation for the following terms were queried: “DNA damage”, “DNA repair”, “damaged DNA”, “damage DNA”, “nucleotide excision repair”, “double stranded break repair”, “mismatch repair”, “UV”.

[0265] Identification of genes involved in apoptosis pathways: For the apoptosis pathway, the gene ontology annotation for the following terms were queried: “apoptosis”, “onco”, “tumor suppressor”, “tumor”.

[0266] Identification of genes involved in cell cycle pathways: To identify genes in the cell cycle pathway, the gene ontology annotation for the following terms were queried: “cell cycle”.

[0267] Identification of genes involved in p53 pathways: To identify genes in the p53 pathway, the gene ontology annotation for the following terms were queried: “p53”.

[0268] Once the list of all the genes involved in the 5 oncology-related pathways described above was compiled, the extended transcriptional promoter region and sequence for each of these genes were then identified as described below. We are able to use the Refseq gene sequences that are incorporated into our promoter prediction algorithm to link the gene functional annotation to specific promoter regions in the human genome.

### Identification of Human Promoters

[0269] The extended transcriptional promoter region and sequence for each of these genes were identified using the genome-wide set of promoters that were identified in previous patent application Ser. No. 11/636,385, filed Dec. 7, 2006 entitled “Functional arrays for high throughput characterization of gene expression regulatory elements”.

### Example 2

### Prediction of Putative Human Core Promoters in Genes Involve in Membrane Pathways

[0270] The membrane pathway set includes transport proteins, G-protein coupled receptors, ion channels, cell adhesion proteins, and others.

[0271] To identify the genes of membrane pathway all of the membrane-bound proteins in the human genome were identified. To identify these genes, all of the human gene functional annotation available at the gene ontology database (http://www.geneontology.org/) and at the NCBI portal for gene annotation (http://www.ncbi.nlm.nih.gov/RefSeq/) was downloaded. With a genome-wide list of human genes and their known biological functions, custom software to query this compiled set of gene information was then written to identify all of the membrane-bound proteins in the human genome.

[0272] The software first filtered out all of the genes whose annotated component in the cell was not the membrane by eliminating genes whose component contained the terms: “cytoplasm”, “cytosol”, “cytoskeleton”, “intracellular”, “extracellular”

[0273] The software then queried the gene ontology annotation for the following terms: “GPCR”, “G protein coupled receptor”, “ion channel”, “lipid transport”, “drug transport”, “nuclear receptor”, “TNF receptor”, “nuclear pore”, “membrane”, “receptor”, “transporter”, “CXCR”, “PTHR”, “protocadherin”, “cadherin”, “T cell receptor”

[0274] Once the list of all the genes involved in membrane pathways as described above was compiled, the extended transcriptional promoter region and sequence for each of these genes were then identified using the genome-wide set of promoters that we identified in previous patent application Ser. No. 11/636,385, filed Dec. 7, 2006 entitled “Functional arrays for high throughput characterization of gene expression regulatory elements”. We are able to use the Refseq gene sequences that are incorporated into our promoter prediction algorithm to link the gene functional annotation to specific promoter regions in the human genome.

### Example 3

### Prediction of Putative Human Core Promoters in Genes Involve in Nuclear Receptor Pathways

[0275] The nuclear receptor pathway set includes the regulatory elements that control the expression of the nuclear receptor genes themselves and the regulatory elements that are bound by the nuclear receptor proteins under various conditions of hormone signaling or response to exogenous ligands. The nuclear receptor pathway set that was broken down into 6 subsets: (i) Glucocorticoid receptor pathway, (ii) Peroxisome proliferator-activated receptor pathway, (iii) Estrogen receptor pathway, (iv) Androgen receptor pathway, (iv) Cytochrome P450 pathway and (vi) Transporter pathways including ABC and SLC transporters.

[0276] To identify the regulatory elements involved in each pathway the genes involved in each of these 5 pathways were identified. To identify the genes in each pathway, all of the human gene functional annotation available at the gene ontology database (http://www.geneontology.org/) and at the NCBI portal for gene annotation (http://www.ncbi.nlm.nih.gov/RefSeq/) was downloaded. We also selected published datasets that identified genomic binding targets of nuclear receptor proteins. We also searched for the sequence motifs of the nuclear receptor proteins in our genome-wide set of human promoter sequences.

[0277] Identification of genes involved in Glucocorticoid receptor pathways: To identify the regulatory elements involved in the glucocorticoid pathway a list of 53 genes whose transcripts changed upon GR induction and whose promoters were bound by the GR protein in mouse cells were extracted from the following publication: Phuc Le P, Friedman J R, Schug J, Brestelli J E, Parker J B, et al. (2005) Glucocorticoid Receptor-Dependent Gene Regulatory Networks. PLoS Genet. 1(2): e16 doi:10.1371/journal.pgen.0010016

[0278] These regions were then mapped in the mouse genome to the synthetic regions in the human genome to identify these human GR-responsive promoters.

[0279] Two different probability matrices that describe the sequence motif known to be bound by the GR were used. This motif is known as the “glucocorticoid response element” or “GRE”. The two probability matrices are shown below:

| | Matrix1 | | | | | Matrix2 | | | | |
|---|---|---|---|---|---|---|---|---|---|---|
| | A | C | G | T | | A | C | G | T | |
| 1 | 0.211 | 0.105 | 0.474 | 0.211 | A | 0.632 | 0.001 | 0.132 | 0.237 | A |
| 2 | 0.237 | 0.211 | 0.447 | 0.105 | G | 0.026 | 0.132 | 0.790 | 0.053 | G |
| 3 | 0.237 | 0.237 | 0.184 | 0.342 | A | 0.500 | 0.158 | 0.237 | 0.105 | A |
| 4 | 0.368 | 0.237 | 0.105 | 0.290 | A | 0.868 | 0.001 | 0.026 | 0.105 | A |
| 5 | 0.132 | 0.579 | 0.158 | 0.132 | C | 0.001 | 0.999 | 0.001 | 0.001 | C |
| 6 | 0.395 | 0.211 | 0.158 | 0.237 | A | 0.999 | 0.001 | 0.001 | 0.001 | A |
| 7 | 0.316 | 0.342 | 0.105 | 0.237 | N | 0.316 | 0.342 | 0.105 | 0.237 | N |
| 8 | 0.263 | 0.079 | 0.079 | 0.579 | N | 0.263 | 0.079 | 0.079 | 0.579 | N |
| 9 | 0.211 | 0.263 | 0.395 | 0.132 | N | 0.211 | 0.263 | 0.395 | 0.132 | N |
| 10 | 0.001 | 0.001 | 0.001 | 0.999 | T | 0.001 | 0.001 | 0.001 | 0.999 | T |
| 11 | 0.001 | 0.001 | 0.999 | 0.001 | G | 0.001 | 0.001 | 0.999 | 0.001 | G |
| 12 | 0.105 | 0.026 | 0.001 | 0.868 | T | 0.105 | 0.026 | 0.001 | 0.868 | T |
| 13 | 0.105 | 0.237 | 0.158 | 0.500 | T | 0.105 | 0.237 | 0.158 | 0.500 | T |
| 14 | 0.053 | 0.790 | 0.132 | 0.026 | C | 0.053 | 0.790 | 0.132 | 0.026 | C |
| 15 | 0.237 | 0.132 | 0.001 | 0.632 | T | 0.237 | 0.132 | 0.001 | 0.632 | T |

[0280] both of these probability matrices were used to evaluate every possible stretch of 15 bases in every promoter of the genome, and then each promoter was ranked in the genome by this score. The top 200 promoters in the genome with the highest occurrence of the GRE were selected to include in our glucocorticoid receptor pathway panel.

[0281] Identification of genes involved in Peroxisome proliferator-activated receptor pathways: To identify the regulatory elements involved in the Peroxisome proliferator-activated receptor (PPAR) pathway a list of 118 genes that were previously described in the literature to be regulated by the PPAR protein was extracted. The promoter regions of these genes as described previously were then identified.

[0282] a probability matrix that describes a sequence motif known to be bound by the PPAR protein was also used. This motif is known as the “PPAR response element” or “PRE”. The probability matrix is shown below:

| | A | C | G | T | |
|---|---|---|---|---|---|
| 1 | 0.658 | 0.041 | 0.233 | 0.069 | A |
| 2 | 0.096 | 0.001 | 0.863 | 0.041 | G |
| 3 | 0.069 | 0.027 | 0.877 | 0.027 | G |
| 4 | 0.151 | 0.151 | 0.301 | 0.397 | T |
| 5 | 0.069 | 0.630 | 0.219 | 0.082 | C |
| 6 | 0.918 | 0.027 | 0.027 | 0.027 | A |
| 7 | 0.644 | 0.069 | 0.247 | 0.041 | A |
| 8 | 0.904 | 0.014 | 0.069 | 0.014 | A |
| 9 | 0.069 | 0.027 | 0.904 | 0.001 | G |
| 10 | 0.001 | 0.001 | 0.822 | 0.178 | G |
| 11 | 0.055 | 0.055 | 0.110 | 0.781 | T |
| 12 | 0.027 | 0.781 | 0.151 | 0.041 | C |
| 13 | 0.836 | 0.014 | 0.082 | 0.069 | A |

[0283] This probability matrix was used to evaluate every possible stretch of 13 bases in every promoter of the genome, and then each promoter was ranked in the genome by this score. The top 200 promoters in the genome with the highest occurrence of the PRE to include in our PPAR pathway panel were selected.

[0284] Identification of genes involved in Estrogen receptor pathways: To identify the regulatory elements involved in the estrogen receptor (ER) pathway, a list of 442 genes whose promoter regions are bound by the ER protein were extracted in the following publications: Multiplatform genome-wide identification and modeling of functional human estrogen receptor binding sites. Vinsensius B Vega* 1,2, Chin-Yo Lin* 1,3,4, Koon Siew Lai1, Say Li Kong1,3, Min Xie1,3, Xiaodi Su5, Huey Fang Teh5, Jane S Thomsen1, Ai Li Yeo1,3, Wing Kin Sung2, Guillaume Bourque2 and Edison T Liu1 http://genomebiology.com/2006/7/9/R82; Nature Genetics—38, 1289-1297 (2006); Genome-wide analysis of estrogen receptor binding sites; Jason S Carroll1, Clifford A Meyer2, 3, Jun Song2, 3, Wei Li2, 3, Timothy R Geistlinger1, Jérôme Eeckhoute1, Alexander S Brodsky4, Erika Krasnickas Keeton1, Kirsten C Fertuck1, Giles F Hall5, Qianben Wang1, Stefan Bekiranov6, 8, Victor Sementchenko6, Edward A Fox5, Pamela A Silver5, 7, Thomas R Gingeras6, X Shirley Liu2, 3 & Myles Brown1.

[0285] These 442 regions were searched for the ER binding motif (ERE) described in the probability matrix shown below:

| | A | C | G | T |
|---|---|---|---|---|
| 1 | 0.156 | 0.333 | 0.111 | 0.400 |
| 2 | 0.111 | 0.289 | 0.422 | 0.178 |
| 3 | 0.489 | 0.044 | 0.356 | 0.111 |
| 4 | 0.089 | 0.001 | 0.911 | 0.001 |
| 5 | 0.044 | 0.022 | 0.933 | 0.001 |
| 6 | 0.156 | 0.001 | 0.089 | 0.756 |
| 7 | 0.001 | 0.933 | 0.044 | 0.022 |
| 8 | 0.867 | 0.067 | 0.044 | 0.022 |
| 9 | 0.178 | 0.111 | 0.444 | 0.267 |
| 10 | 0.089 | 0.244 | 0.467 | 0.200 |
| 11 | 0.044 | 0.244 | 0.644 | 0.067 |
| 12 | 0.044 | 0.133 | 0.001 | 0.822 |
| 13 | 0.022 | 0.089 | 0.889 | 0.001 |
| 14 | 0.756 | 0.001 | 0.178 | 0.067 |
| 15 | 0.178 | 0.733 | 0.001 | 0.089 |
| 16 | 0.044 | 0.867 | 0.022 | 0.067 |
| 17 | 0.111 | 0.267 | 0.111 | 0.511 |
| 18 | 0.222 | 0.111 | 0.311 | 0.356 |
| 19 | 0.022 | 0.244 | 0.667 | 0.067 |

[0286] The total list of 442 was narrowed down to a list of 384 based on the promoter sequences with the highest occurrence of the ERE.

[0287] Identification of genes involved in Androgen receptor pathways: To identify the regulatory elements involved in the androgen receptor (AR) pathway, a list of 129 genes that were previously described in the literature to be regulated by the AR protein was extracted the promoter regions of these genes were then identified as described previously.

[0288] Identification of genes involved in Cytochrome P450 pathways: To identify the regulatory elements of cytochrome P450 proteins we first needed to identify all of these genes in the human genome. To identify these genes, all of the human gene functional annotation available at the gene ontology database (http://www.geneontology.org/) and at the NCBI portal for gene annotation (http://www.ncbi.nlm.nih.gov/RefSeq/) were downloaded. With a genome-wide list of human genes and their known biological functions, a custom software was then wrote to query this compiled set of gene information to identify all of the membrane-bound proteins in the human genome.

[0289] The software then queried the gene description and ontology annotation for the following terms: “P450”, “cytochrome P450”

[0290] This search resulted in a list of 66 cytochrome P450 genes in the human genome. The extended transcriptional promoter region and sequence for each of these genes were then identified using the genome-wide set of promoters identified in previous patent application Ser. No. 11/636,385, filed Dec. 7, 2006 entitled “Functional arrays for high throughput characterization of gene expression regulatory elements”.

[0291] Identification of genes involved in transporter pathways including ABC and SLC transporters: To identify the regulatory elements of ABC and SLC transporters proteins all of these genes in the human genome were first identified. To identify these genes, all of the human gene functional annotation available at the gene ontology database (http://www.geneontology.org/) and at the NCBI portal for gene annotation (http://www.ncbi.nlm.nih.gov/RefSeq/) we downloaded. With a genome-wide list of human genes and their known biological functions, a custom software was then written to query this compiled set of gene information to identify all of the membrane-bound proteins in the human genome.

[0292] The software then queried the gene description and ontology annotation for the following terms: “ATP-binding cassette, sub-family,” “solute carrier family AND (fatty) OR (lipid) OR (sugar) OR (glucose)”

[0293] This search resulted in a list of 88 ABC and SLC transporter genes in the human genome. The extended transcriptional promoter region and sequence for each of these genes were identified using the genome-wide set of promoters identified in U.S. patent application Ser. No. 11/636,385, filed Dec. 7, 2006 entitled “Functional arrays for high throughput characterization of gene expression regulatory elements”.

[0294] To complete the nuclear receptor pathway panel, all of the promoters for the nuclear receptor genes themselves were also identified. Using similar searches as those described above, a list of 49 nuclear receptor genes in the human genome were identified. We then identified the extended transcriptional promoter region and sequence for each of these genes using the genome-wide set of promoters identified in previous patent application Ser. No. 11/636,385, filed Dec. 7, 2006 entitled “Functional arrays for high throughput characterization of gene expression regulatory elements”.

[0295] While preferred embodiments of the present invention have been shown and described herein, it will be obvious to those skilled in the art that such embodiments are provided by way of example only. Numerous variations, changes, and substitutions will now occur to those skilled in the art without departing from the invention. It should be understood that various alternatives to the embodiments of the invention described herein may be employed in practicing the invention. It is intended that the following claims define the scope of the invention and that methods and structures within the scope of these claims and their equivalents be covered thereby.

The application's sequence listing, which the Patent Office published only in electronic form, follows.

SEQUENCE LISTING (13994 sequences)

SEQ ID NO: 1 - DNA, 1300 bp, Homo sapiens
tggagtcagtcagtcttgggttccagcctcccgctaggacgcaatttcttgagagcaggattcgatctgttgttcacggctagatcctaagcgcctagaatagtttctggcacacagtaggcactcaataaacatttgcagaatgaatcaatgaatgaatggtcacgctccattcctcggctgtaaacacaatgaaatcacctagccgcaaacttggcgcacagtaggcgctcaacaagttgtatttttcccttcccttgcagtagaccgcggtccccaggcgaccgcgaaagaaaaaaaggggtttctctacctcgcgtggtctgcacctcgcttcgcccccgcagccctcgctgggtcgcagggagcacgtgggccaggcaggctgggtgggagtggagtggagtggaggggagggggcggcggccagcggctcgcgcggagccggtctcccgggcttacgtaaggcgcgagtcccgcgcggccggccggggctccgcgactgggcgggcggaggcggcgccgccctgcaggatccgggctggaagcctctcggagtgctgcctccagccaaggtgtgtgtttatttgattgcttttggtggcgaggcgcggggctcgggctcgtcgcgcgccccatggccggggagcgcatccgccaaccccgggcggaggtgggcccctccgagcgcgcgcgggcggcgggcagcggcggcagctgagactccgggggatgtgacagccgccggggaggggacgagacgcagaccacacgttgcccacgtgcgaggaccgggcaggggctcagcccctaggccgcccggtgcgtggggcggcgggggctggctttgagtcacccccgcttgtgccagcttccccggctcggcggagactggcttggggatgcctggccgcccggcccccttctcggacgcggcgtggggagcgagctggagttaaggatgaaggtgggactggccgggccgacctctgacccctggaggccgagtcggcagggcggggcacggcgcgcttcagcagctttgcgtgggggcgaggaggtggaggagggcgaggaggtggagaagggcggggaggtgtagcgtggcgctcagtccgcctgctactcggtcccggcgctgggctgaggggaggggttgtcttaaaagtctctccttccccctgtaggggcggccggcgagtcccagtgagagcggagggtgccagaggtagggggccgagaaacaaagttcccggggcttcctccggggccgcggtcggggctgcgcgtttgaccgccc

SEQ ID NO: 2 - DNA, 1300 bp, Homo sapiens
ttcttttctttttttttttttctttccagacagggtctcactgtcatccaggctggagtagcagcccccaatcacggctcactgtaccctggatctcccggactcaagcaattttcccacctcagcttccctagtagctgggactataggtgtgtaccaccacacccagctaatttttaaatttttttatagaaatgggggtctcactttgttacacaggctggtctagaattcctggactgaagcaatccacccacccggctctcccaaagtgttggggttacaggcgtgagccactgcccctggtgttagtgtctgtctgtcaagtcaggagggcagccatgaacgttctgatgtctactgagcacgtgtggcccagaccgtgtgtcaggtgtttaggtgccatccacagaaccttcctaataaccctgggcagcataggctttcttatctctgacagatgaggaaatggagactcagattctgaaccgaagtcacagacacagtagatggtaggtctaaatggggacccaggtctatctgactgcaaagtccaaaccgtttccttgcctctgctgcagcctgcgaggagcagctgggcagaaagactgtgcctttacggtggtgagtcttccgatgcccaagcctcaccccagaccgatgaaatcagaatctctggagacccgacccagacattggtgggttttagggctcctggctgattccagtgggcaaccgggctaccaagcactgttttaccctaagggtaagaggaacatcgcctcctcgagggctctccaggtgtgcctttcacagcgtaatcccgttcacgaaaccaaaaatcaaaactaggccactgcccactggtggctgatacgcccttttctcatcaacagaaccgggaggaagggctctggtggggctggcggtcccctgttctccccgctcaggtgcggcgctgtggcaggaagccaccccctcggtcggccggtgcgcggggctgttgcgccatccgctccggctttcgtaaccgcaccctgggacggcccagagacgctccagcgcgagttcctcaaatgttttcctgcgttgccaggaccgtccgccgctctgagtcatgtgcgagtgggaagtcgcactgacactgagccgggccagagggagaggagccgagcgcggcgcggggccgagggactcgcagtgtgtgtagagagccgggctcctgcggatgggggctgcccccggggcctgagcccgcctgcccgcccaccgccccgccccgcccctgccacccctgccg

SEQ ID NO: 3 - DNA, 1300 bp, Homo sapiens
aatgtagtcaaatccacttttgctgttgatttttttttttttaatctgtagagacatcgtctcgctatgttgcccaggctggtctggaactcctggcctcaagcgatcctcctgctttggcctcccaaagtgcgtgggccaccgtgaccagcagttatttattttctttggttgtgtgtgtgtgtgtgtgtgtgtgtgtgtgtgtgtgtgtgtatgtatgtattgagacggagcttgctctgttgcccaggctagagtgcagtggcacgatctcggtgcatgcaaccttcacctcccgggttcaggcgatactcgtgcctcagcctcccgagtatctgggattacaggcgtgagccaccatgcccagctaatttttgtattttcagtagagacggggggtgcgggtgggggaatttcaccatgttgaccaggctggtctcgactcctgacctacggtgatccgcctgcctcggtctcccaaagtgctggaattatgggcgtgagccaccgcgccgggccagctattgattttttgaaaggatttttaaaaaataatgttgctttgaaaatttttatttatgactagctcttttggttaaaacttggctatggtttctctggagtgatcctgagttggataattttgggaaagttagagaatctaattaaaaacattttcaaatgcttattaattgtaacaaaagagatatcacaggatccataaagagcgctagcccgaaacgtcttttgatgcagtaattcctgggcaccggcatcgctcacattctcctctcagaattacaccgggaggggtcgcgaacctctgctagccgctctcgctgcgatccggagatacccagacaccggactccttgagttcacagcccggatgcagaagggaatcctagcagcgccgtaccggatgtgtgagtggaagtgactgaggtgaactcacgaccgattggttctcccgagtggacccaagcctgttttcacctgccactggccgcgtggtttgtctatttgaacagtccccgccccctggagaagccgggtcctgaagcttctcttcttcattactattggcctgtttttcagtccatcttctccctatacctgtcgattggtcctcagggctgggaaccctccttccctcgctcccggcttagaggacagcggggaaggcgggcggtggggcagggggcctgaagcggcggtaccggtgctggcggcggcagctgaggccttggccgaagccgcgcggtgagtctagggcctggcacgacccctctagggcggc

SEQ ID NO: 4 - DNA, 1300 bp, Homo sapiens
gggctattgcgattatctaggcaatagatgagggtagcttggagctggctagtattggtttcagttatatttatattttccaaatattatcataaaaatattcaaacgtagagccaagttgaactttacagtgaatacccaggattctggttatatttggaaagaagagagtccatgggactcactgagcgagcagagcctgtgggatatcttgggagggttgcagcaggcagtcaggtcatttgacttggaactagaactacagccctggtctgcagcatcacaccagacccagatgcctcaaaaggattatatgttaaggacagtctgctggtctgttggcacctaaccttttttgggttatgaatccaataaactatgagcagtttgaacctttctcagaaaatgcaaagaaaattatttgtagttttagaagaatcatgaatacagacaataaaagacataaaatgtagtctatttcactcaattacaaaatattcagtgttgcagaaccattgtgggtaaacattcctaatttttagtgaacatataaagaccccgtgcctcaccaagacgtcctcctgtcttgcccccagaattcctgtttctccatctgcctggtctatgggcaatgcacagaatacgtaatgaagaggggagcagtgagtattgggttacacaattccctggaacctggaacacacccttctgagtactgtgaagatgtggtccccaaggctagagctgaaaagaggcttagggccgggtgagccttccagccagggcctgcctccaagtgatgctcccccagggcagggggcataaggatggcacccagccaggtgggagcctgggccctgcccagcctcaaagctttgagctcaggaaatccggaggcaggggagggggacatcgttgccacattccccagccctttaagacccccaaggcaggaaggctgcccgggcctcaccagcttccctcacaggctccttcctgggaggaaggggctgcctgtgccctcgaaggcgcaagggagggcaggagggaggctcggaaggtgttgcaatccccagcccccgggcctgtcagaggctgagccattaacgacagagctcggggagagaagctggactgcagctggtttcaggaacttctcttgacgagaagagagaccaaggaggccaagcaggggctgggccagaggtgccaacgtgagtaggggatccctagagaggggctgagccttgggcttgatggagagctggaatcctggggccactccccacagctctgccaa

SEQ ID NO: 5 - DNA, 1300 bp, Homo sapiens
gtatatgatgcatcctgtctccatgtgtaatatattttaatgataaatgtatttttaacagtggcggttgtgtatgtttttatgtcttaagagatggcagttcgctgcagctggattttgtggctcaagccttggggccaaagagacatattcctggcagtctggtgggtaccagtcactattcacatacttccagcaagaaatggttatggcactgacctgaaccccttgacccctggtctggtctttggagttgtcccactctgaatattcgagagaagcagcttatggttaaaacaggcagtggcagctgggaggatctaacagctagatcctccaggcatttggaaaggacaggggcataacgaaggcagaatcgcttcctgggtacgaatgcccactacttctgggcactgtgaaatgggtttaagacgcgggccagcaggacaatgtgaacggtgaaaggaagggagtggccggtaggtggcgctaactggcccgggcatgagtcccgccgtagccgcgtcctcttgcaggggaagaaagttgggaccgccagcctgggcaagcgcgtgagaagggagctgggggtcctaggcaagcgcgtgagaaggggaagaggcggcggcgtcctctccagctgggcttagaatactcttagttctgcctttggggtcttgtcttcctttctgggcctcctgcctgtgttaactttgatgggtgctgaagggaaggccggggtcccggcaggagaaacccgggaacgtcgcggccgtccaggctcccctggcgggttggagccagggttctgactgccaactgtggtccttcccgctgcggctgtggctgccagggcgagggcggtcagcgcaaacctggctgaggacatttcggattcttccttggggattcgttcccttctccttgactccggtgccgcgagggcgacaccctccgggccccgcgtggccaccccgggcgcttccccacgcggatgaacccacctcctgggcgccttcccctcggtgccccgctcgccaattggaggctgcagctcagccccctgacaacctgagccaaccagaggcgccagggaggggcggatcctctgtccccaccttcctccggaaagaggaagcggaagtgacgttaggggaaggtgggggcaatcatggtgccgctggggaggggagaagctgctgctgccgccgttgccgggagccgcggaggtaaaaggcgaaactagactcggcctgggcttgggacttaccgggaggcgcgggacttaggctccctcctg

SEQ ID NO: 6 - DNA, 1300 bp, Homo sapiens
ggctcacgcctgtaatcccagtactttgggaggcgaggtgggtggatcacgaggtcaagagttcaagaccagcctggccaaaatggtgaaaccccgtctctactaaaaataaaaataattagccaggggtgatagcgggcgcctgtaatcccagctactcgggaggctgaggcagagaactgcttgaatccgggaggcggaggttacagtgagccgagatcgtgccgctgcactccagcctgggcgacagagcgagactctgtctgagaaaaaaaaaaattaaagaaaaaaacgaaaacagcctcactggccaggaactcgcccaggatcgcggccgggccagtatacagttgagctggttcaaacccgaggtctatcatgtccttaatgtcctatcatgtcagtcagttagcctgcctttcatattttccacacttacaggtcaccatagactcacctgaactgtgagaagtagaggaaggcgtcccagaggaggtgattttaaagcccaggtttgagatgggtatgcatttccaggcaagagagcccggccggtgcaaaagcaaggcttggctcacaaacgggaatgtggggggtggagacagggaagggagaagtcaatccctgggcaagacctcctggagtctctctaacaaataaatactactttccatgcagtagacgctgttctaaacactttacaaatattaactcacttggtctttctacaaccctacgaggtggtactgttactatccctagtgcaccgaagtcacccagcggccgagtgagaactccagtccagctttccacccgctactccgcgcatcccagcttgccttacagccgggtaccggctccaccattttgctagagaaggccgcggaggctcagagaggtgcgcacacttgccctgagtcacacagcgaatgccctccgcggtcccaacgcagagagaacgagccgatcggcagcctgagcgaggcagtggttagggggggccccggccccggccactcccctcaccccctccccgcagagcgccgcccaggacaggctgggccccaggccccgccccgaggtcctgcccacacacccctgacacaccggcgtcgccagccaatggccggggtcctataaacgctacggtccgcgcgctctctggcaagaggcaagaggtagcaacagcgagcgtgccggtcgctagtcgcgggtccccgagtgagcacgccagggagcaggagaccaaacgacgggggtcggagtcagagtcgcagtgggagtccccggaccggagcac

SEQ ID NO: 7 - DNA, 1300 bp, Homo sapiens
ggctccgagtactactgcgtgactttatgcgagtgtccgccgccttctgggcttgttttcccggaagcaactcggcgcggatggagtgtgtgtgtgcgcgcgcgcgcgcgttatgttgtgcgtgttgtgttaagcgtgtgcgtgttgtccgggggcgggagggggagtagactaacaccggggttccccgagtttcggatcgcctacacgcttgttcccatctggaccctgttacccaccaattgcgcccactataaaaactgcccctccgaggcaaagctgtgaacccccgcgccctttcccccacggtcccggaggatgaagtggggtgcaacggagactcagctgagcgtccagtttcgggcaatacaaatctctcggcttctacgagcagccagacgaccccgcggaccgtcgctcctgaacttgaccgagatgcaaacttcggagtgttctcaacgtggggggccgactctcgggagaccgcccctaaacttaagtccccttaggctcgcccccacctgggacttcacagagccaccttaagggcggtattcccgcccccccggaagtgcgggggggtggcagcgtacttggattctcagcctccagccccgcgcggtggcggccgccggtggatgacttcgggccccacaagtggggaaacaacaaccacccctcgcccgcacccctggcccaaaacaactggccaggttccctggcctcccgggtccctgcatcccccgcatccccgtccgcagccgtgaacttgagcccccctccatcagaggttgcgagcgtccgcccgctcgcggcagccaccgtcactagacagtcaaaccccaagacgtcagcccacaatgcaccgggcgggccgggaaaaacggcccggggaggggaccggggaagagagggccgagaggcgtgcggcaggggggagggtaggagaaagaagggcccgactgtaggagggcagcggagcattacctcatcccgtgagcctccgcgggcccagagaagaatcttctagggtggagtctccatggtgacgggcgggcccgcccccctgagagcgacgcgagccaatgggaaggccttggggtgacatcatgggctatttttaggggttgactggtagcagataagtgttgagctcgggctggataagggctcagagttgcactgagtgtggctgaagcagcgaggcgggagtggaggtgcgcggagtcaggcagacagacagacacagccagccagccaggtcggcagtatagtccgaactgcaaatcttattttcttt

SEQ ID NO: 8 - DNA, 1300 bp, Homo sapiens
gtcgtgtcttgcaggcaatatagagtaataataataaaaatgacaggagatactttgacaggatggcttaaaatgccactcaatagatgaagagttgttctcatgcttggcaagtttacagcaaagcccagaaggagaagccagaaaataatttagaaaaaccaaagcttaaaactagtggcacacaactctggttacatttttcattttcatttttggttcctctgcatttcggtggaactcagtcccacagatgtcttcttcaatgtgggaaccatcctttctggaaccacagagctgcagatgtcacgctggaattctcccagaggcaaactgccagatgtgaggctgctcttcctcagtcactatctctggtcgtaccgggcgatgcctgagccaactgaccctcagacctgtgagccgagccggtcacaccgtggctgacaccggcattcccaccgcctttctcctgtgcgacccgctaagggccccgcgaggtgggcaggccaggtattcttgaccttcgtggggtagaagaagccaccgtggctgggagagggccctgctcacagccacacgtttacttcgctgcaggtcccgagcttctgccccaggtgggcaaagcatccgggaaatgccctccgctgcccgaggggagcccagagcccgtgctttctattaaatgttgtaaatgccgcctctcccactttatcaccaaatggaagggaagaattcttccaaggcgccctccctttcctgccatagacctgcaacccacctaagctgcacgtcggagtcgcgggcctgggtgaatccgggggccttgggggacccgggcaactagacccgcctgcgtcctccagggcagctccgcgctcggtggcgcggttgaatcactggggtgagtcatcccttgcagggtcccggagtttcctaccgggaggaggcggggcaggggtgtggactcgccgggggccgcccaccgcgacggcaagtgacccgggccgggggcggggagtcgggaggagcggcgggggcgggcgccgggggcgggcagaggcgcgggagagcgcgccgccggccctttatagcgcgcggggcaccggctccccaagactgcgagctccccgcaccccctcgcactccctctggccggcccagggcgccttcagcccaacctccccagccccacgggcgccacggaacccgctcgatctcgccgccaactggtagacatggagacccctgcctggccccgggtcccgcgccccgagaccgccgtcgctcggacgctcctgct

SEQ ID NO: 9 - DNA, 1300 bp, Homo sapiens
cgtgtggcgtgcgcctgtaatcccagctactcaggagactgaggcaggggaattgcttgaaccggggaggtggaggttgcagtgagccgagattgcgccactgcactccagcctgggcgacagagagagactctgtctcaaaaacagacaaacaaaactcctcactctgtccctgtcactgaccaaagaagttacccattctcaaattactttcttcatctattgcctccaattttggctggcaatatctcccataccaaaccgttaacacctggatccttttagactaccggttccatagcaggcattcaaaagttagtcatttaactttttcaccagggacaaaagtccttaaaagaggaaaaaaactggaaaggattacaaatcaccatgtgatgtttaggtgctctttagcacctaaagaggatttacaagatacattgtctgcacggcaaccactcagacgaatccaccaccaagcgaaggtttttagtaaaatatccttttttttttttttgagacggagtttcgctcttgttgcccagactggcgtgcagtggcgctatctcggctcactgcaacctctgcctcccaggttcaagcgattctcctgcctcagcctcccaagaagctgggattacaggcatgcgccaccacgcccggctaattttgtatttttagtagagacggggtttcgccatgttggccaggctggtttcgaacccctggccacaggtgatccggccgcctcggcctcccaaagtgctgggattacagacgcgagccaccgcgcccagcctaaaatacccattttaattgcatttcaatgacgttactcggtcattgacctcttacgcaaggagggcgagattagggagacagctggacttcttcctcgccctcccttcactggactggctggcgcagtgagtagccctgcccttggacgatttggcattttcattggtcaatttttcttaggaggctggccgtgtgttgactccgcctactatataggcggggtctccccgccgcaggggctgggatgctgggggctgctgaagccgccatcttggattccgcggtagcggaggcggcggtcaggcgccgcttctggggagtggcctttcttttcccctccctcccggttcggtggcggcggctcctcccactgggggggggggtggcgcggcggcggtggcatctgcggccatggcggcgactactgccaaccccggtgaggagacggaggactggggcgcctctaaaggggaggggccgaaggggctgacaactaagg

SEQ ID NO: 10 - DNA, 1300 bp, Homo sapiens
cccaggcaactgaaaagtaaatgctatgttgtactttgatccatggtcacaactcataatcttggaaaagtggacagaaaagacaaaagagtgaactttaaaactcgaatttattttaccagtatctcctatgaagggctagtaaccaaaataatccacgcatcagggagagaaatgccttaaggcatacgttttggacatttagcgtccctgcaaattctggccatcgccgcttcctttgtccatcagaaggcaggaaactttatattggtgacccgtggagctcacattaactatttacagggtaactgcttaggaccagtattatgaggagaatttacctttcccgcctctctttccaagaaacaaggagggggtgaaggtacggagaacagtatttcttctgttgaaagcaacttagctacaaagataaattacagctatgtacactgaaggtagctatttcattccacaaaataagagttttttaaaaagctatgtatgtatgtgctgcatatagagcagatatacagcctattaagcgtcgtcactaaaacataaaacatgtcagcctttcttaaccttactcgccccagtctgtcccgacgtgacttcctcgaccctctaaagacgtacagaccagacacggcggcggcggcgggagaggggattccctgcgcccccggacctcagggccgctcagattcctggagaggaagccaagtgtccttctgccctcccccggtatcccatccaaggcgatcagtccagaactggctctcggaagcgctcgggcaaagactgcgaagaagaaaagacatctggcggaaacctgtgcgcctggggcggtggaactcggggaggagagggagggatcagacaggagagtggggactaccccctctgctcccaaattggggcagcttcctgggtttccgattttctcatttccgtgggtaaaaaaccctgcccccaccgggcttacgcaatttttttaaggggagaggagggaaaaatttgtggggggtacgaaaaggcggaaagaaacagtcatttcgtcacatgggcttggttttcagtcttataaaaaggaaggttctctcggttagcgaccaattgtcatacgacttgcagtgagcgtcaggagcacgtccaggaactcctcagcagcgcctccttcagctccacagccagacgccctcagacagcaaagcctacccccgcgccgcgccctgcccgccgctgcgatgctcgcccgcgccctgctgctgtgcgcggtcctggcgctcagccatacagg

SEQ ID NO: 11 - DNA, 1400 bp, Homo sapiens
aagtaattaaaaaaatgtatttcagaatttacaggcccatgtgagatatgatttttttaaatgaagatttagagtaatgggtaaaaaagaggtatttgtgtgtttgttgattgttcagtcagtgaatgtacagcttctgcctcatatccaggcaccatctcttcctgctctttgttgttaaatgttccattcctgggtaatttcatgtctgccatcgtggatatgccgtggctccttgaacctgcttgtgttgaagcaggatcttccttcctgtcccttcagtgccctaataccatgtatttaaggctggacacatcaccactcccaacctgcctcacccactgcgtcacttgtgatcactggcttctggcgactctcaccaaggtctctgtcatgccctgttataatgactacaaaagcaagtcttacctataggaaaataagaattataacccttttactggtcatgtgaaacttaccatttgcaatttgtacagcataaacacagaacagcacatctttcaatgcctgcatcctgaaggcattttgtttgtgtctttcaatctggctgtgctattgttggtgtttaacagtctccccagctacactggaaacttccagaaggcacttttcacttgcttgtgtgttttccccagtgtctattagaggcctttgcacagggtaggctctttggagcagctgaaggtcacacatcccatgagcgggcagcagggtcagaagtggcccccgtgttgcctaagcaagactctcccctgccctctgccctctgcacctccggcctgcatgtccctgtggcctcttgggggtacatctcccggggctgggtcagaaggcctgggtggttggcctcaggctgtcacacacctagggagatgctcccgtttctgggaaccttggccccgactcctgcaaacttcggtaaatgtgtaactcgaccctgcaccggctcactctgttcagcagtgaaactctgcatcgatcactaagacttcctggaagaggtcccagcgtgagtgtcgcttctggcatctgtccttctggccagcctgtggtctggccaagtgatgtaaccctcctctccagcctgtgcacaggcagcctgggaacagctccatccccacccctcagctataaatagggcatcgtgacccggccgggggaagaagctgccgttgttctgggtactacagcagaaggtaagccgggggccccctcagctccttctcggtcttgtctctctcagatgtaactgagctgtgggctaggaggaaaaggccgggaggaggcacggtgatgactgaaaaacctctcccctctcataagaccagtcatccggacgcgggctttcccccactcggtgcccacctggggtcttacag

SEQ ID NO: 12 - DNA, 1300 bp, Homo sapiens
tgatacacaagcctagcaccccactttccacatagtgttcgataaagattgataaactcgaaatcacagaccttttaattcttaagacaaatagcagcagaaagaaacatctttggcttatttctggtaaggtttttatgctctgtaaaacaaagaattgtattcatccgcgcagcacagattctattaaaaataaatgtgagagtcgttaatgtagtactgctcatttaccatcaaaattcacttttcaggaataatcccatcagtttaaattggatattggaatgagcattgattacatttaacttggtagcccaaaatttcttcatggggttttgaactcggcgggatttcaaaggttttaaaaatgagtttttgattttttttaaaaccctcaaatttcattacctttaaactaggtcgaaacggggcgcaagagattggattaacaccatagtaatacttattttgttcttaaccatttcagggcttcttgaaatagaggctgtatggtgtaatggaaaaaacagccttggaatctgggagcctgattcctggattcagtcccagttttgcgtgaccttgggcaagttactttacttctctgaatttccgtttcctcctctgcaaaatgaggatcgcaatagccaccttgcaaccttgactggagcgagcctcgcacaccccgcgccggcctggaggaagagcagccatgattacgccgccttcgctccgctacccgcttgcggctggcgccctcctccagcaggtgtaggcgctgccgcgctgccccacgcctttccgccgctcgcgggcctgcgcctcggcgtccccgaggaggccgctgcgggctgaggtagcgcaccggcctctcggcgtcccagtccggtcccgggcggagggaaagcgggcgacccacctccgaggcagaagccgaggcccggccccgccgagtgcggaggagcgcaggcagcccccgcccctcggccctccccccggccctcccggccctccctccgccccctccgccctcgcgcgccgcccgcccgggtcgccgcggggccgtggtgtacgtgcagagcgcgcagagcgagtggcgcccgtatgccctgcgctcctccacagcctgggccgggccgcccgggacgctgaggcggcggcggcggccgagggggccggtcttgcgctccccaggcccgcgcgcctgagcccaggttgccattcgccgcacaggccctattctctcagccctcggcggcgatgaggcgctgaggcggctgccggcgctgcgccggagctt

SEQ ID NO: 13 - DNA, 1300 bp, Homo sapiens
agaggtcctttaaacagatagaaacgctgtgctccaggcagatgccataacaaacactggctctagatctaccatgggttatatgggtccttagttaagattagatatggagtcacagtgtgccagaatttcagggagagaggaaagtggaagggctttccactaagccttttgaactactaggtacccctcgttttacatctggttatctcatttaaatctatgacgttttaaaatacttattaccatttaagacatgagaaaaattaagtttagaaacggctagatagctcacgctagaaaggaaggactccaaattttaaccaagggcagatgtgcatggaggccaagtcatttccttcccatgctctcatactgacccaacaaacccattctgcacgtgagaaaactgaggcccggaggagggaattcacacacgtttgaagccaagctggggccagaaagtagatcggctgatctccaaacctccacgtcaaaggtcttcccaggaggacatatgccttcaaggattttacaatgtataccaccctacaagtgatgggagagaggggaaaaaagcaaccgactaaggagaaaagcaaggagcagaaaaaggagcaaaagaggagctgtcagaacggtgtgaggagagtgggaaaggagccgcctccttttgcctctcttcctacttattaacaaaacagaacgactatccaacgtatttcagggagctaagtcttagccagcttcagctgtgttttaacccttagctaaatatagacaaggctaaggcaggccaggtgtacacttcaggaagacgtggaaattcccagggcggaccaaaacttgagctgttccggcggtagtgatttgaggtcagtttgaaagagaagttgagaaagcggccgaggggcgaatttggctgcactacacgctcgccacaaagaggaagggccgccggccgccggggccgagtgcgcttccagcccaggcggagcggtagacgcaacagcctccgcccgccacgtgacccgtagtgttgtggtctggcccgcgtgggtggcgggagcgccgagagggcgggggcggcgatggggcgggtcacgtgatggggtttaaatctcccgcagccggagccgcgggggcgccagtgccgcgcgtcgagcgggagcagaggaggcgagggaggagggccagagaggcagttggaagatggcggacgaggcggccctcgcccttcagcccggcggctccccctcggcggcgggggccgacagggaggccgcgtcgtcccccgccg

SEQ ID NO: 14 - DNA, 1300 bp, Homo sapiens
gcgtggtggtgtatccttgtgatcccagctacttgggaggctgagtcaggagaatcacttgaacctggggggtggaggttgcagtgagccgagattgagcaactgcactccagtctgggtgacagagcgagactctgtctcaaaaaaaaaaaaagtttttggattccagctctaagcgtcaccatttgctgaagcgggatgtccagatggagtgaagggggctgagtctaaagacggagagagagagaggccagctagggctggggataatgagggagctgagggttccccaggacatattttttacactttcttttttgttgttttttgagacaaggtctcattctgtcactcaggttggagcatggtggcgcaatcacgaatcactgcaaccttgacctcccgggctcaaggcattctcccatctcagcctcccgagcagctgggactgcaggcgcatgccaccatgccagctgatttttaaattttttgtagagacaggggtctcactatgttgccctgacttgtctcaaactcctggcctcaagtgatcctcccgccttggccttccaaagtgctgagatttatagtcgtgagccactgtgcctggtccatactttcaatacaaatgtatggtgatactactgtgaacaggtcctagatttaccaaaattatctttttgtgtgtttgtgtattttaaggttatatctctttagagaaatgtcgtatgaatttattaaatgtatctttttatattttgaagttatgcctctttggagaaaggtttcaccttatcaggtttcatcttaatcagttgaaaaccttgctgtccttattctctttccccaggtctcccatttcatggtaagtcatcctcagctcccagtccctctttcccctggttctgctaggggtctttctctttgctgtctttcctggacaaatgatctgacccatagattcaggttgttgtgccactaagttctcccatgacctggtctctcagcacatgtttggcaggttagggaggtcacccagtcccttctcacccagccgtggtctcttacaagaaaaaggagacacaaggtatctaggcaagcttgcacattctgactaattgattgcatcatagaatccttgaacaagaaccagaactccagagagggaaaacatctatcttgctgtgtttggacaggccagcccctgaaacatcttgggcaatggagggttaacttctcaaagtttaataggcaagaccagcaaccatgcaacaaggtaaattgtcctcacgagaactcc

SEQ ID NO: 15 - DNA, 1300 bp, Homo sapiens
aagggggggcggggctaggtggtctctgagaaccgagcttgactccgacgccgcgaaccgacctggagcccgaggggaaagatgctcgactctcttgggggcaccggagcgggcgcaggagaggcctgcggggtgcgtcccactcacagggatcctctttcagttcatttagataggtgccctttgggcccttgaaattcaacggctatgtgttcacgttcagcacgctcggctgagagctttcatttttagggcaaacgagccgagttaccggggaagcgagaggtggggcgctgcaagggagccggatgaggtgatacacgctggcgacacaatagcaggttgctctttgtgctaagactgacaccatgaggacacagatttgggggaagggggaatctctaggcaaaggctgttacagtcaaatctctgcgaacgattgtgatccgacagcggtgcaaaaggaaagagcgaatgcagtccacgccgcggaaatctaggggtagaggcaaggggggagggtattccccttgcagggaccgtccctgcatttccctctacactgagcagcgtggtcacctggtccttttcacctgtgcacaggtaacctcagactcgagtcagtgacactgctcaacgcacccatctcagctttcatcatcagtcctccacccccgccccacaacagcctaccctgcctccggctgggtttctgggcagaggccgaggcttagctcgttatcctcgcctcgcgttgctgcaaaagccgcagcaagtgcagctgcaggctggcggctgggaaccggcccgagcaagccccaggcagctacactgggcatgctcagtagagcctgcggcttggggactctgcgctcgcacccagagctaccgctctgccccctcctaccgccccctgccctgccctgccctcccctcgcccggcgcggtcccgtccgcctctcgctcgcctcccgcctcccctcggtcttccgaggcgcccgggctcccggcgcggcggcggagggggcgggcaggccggcgggcggtgatgtggcgggactctttatgcgctgcggcaggatacgcgctcggcgctgggacgcgactgcgctcagttctctcctctcggaagctgcagccatgatggaagtttgagagttgagccgctgtgaggcgaggccgggctcaggcgagggagatgagagacggcggcggccgcggcccggagcccctctcagcgcctgtgagcagccgcgggggcagcgccctcggggagccggccggcctgcggcggcggcag

SEQ ID NO: 16 - DNA, 1300 bp, Homo sapiens
ttggctgggttagcgatctcatctgaggctccgtgtgtgtcctttcccaagttcagtggttgttgccagaattcagttacttgcatttgtaggattaaggtgcccactttcttgttggctgtcacccaggagcctttctcagctcctagagtccacctgccatttcctgccatatggcagtttgctccttcaaggtgaacaggacagctgtgctgtggcttcaaatctcttagattctgtctctgacctctagccctgatttaaagggctagagtgataagatgaagcccaccaggataaatcacctctttttgactgccttaaagttaattgattagggactttaattacatccttgtcatataagctaacctaattacaggagtgatgctctatcatattcacagtcgtgttttcttttaaggggagaaatgtatacaggatgtgtacaccgtagggtacaaatcttgggatacatcttagaattgggcctctcacagccagccataagaactgtccaagtaagcaatagaggtattaatatggccttttataatcagtatagattgtttgaaaatgtgagatgtccatggttggcctctaataacattcgattcacggcaaacatatattcaagtaggagacatggtgatataggcagaaaaatcaaatgatgctaaacaaaagaaaactgtctttgattttgaaagaattcaacttgctgtatatcttttgcctaagccttcagtcagcctttgctctacatctaccaatgtgatcactgcttttccttctgacttctttaggtgggtcaagagtttgcttttctccccattcatgagtgtaaagtttaatgcctaactgaacttgcttccttctttgactcttgtgtagactcgggcacatggggcaactttttttgtgttttgctctaccaggtcgtccctattccgtgggactagtgtctagccccatttcttcagcagtggagcctaggatgtagagctgcatactaccattaggaggcgcaccctcaggcctcggctccgcgttctttatgtctctggaccgctctctctcgcagctcatctctatggtttccgttgggtgtgtggtttttttgtttttttttttttggggtccggaataggcggagcttccggttccggtgggggccgtccctggcggcggagatggcggcgacagcggcggaggctgtggcctctggctctggagagccccgggaggaggctggagccctcggccccgcctgggatgaatcccagttgcgcagttatag

SEQ ID NO: 17 - DNA, 1300 bp, Homo sapiens
tggcctctctcggatctgcaggaagggtgggctgtgcgggtccagagtgggatgcccgttctggccggcggtgcctgctgagcccttcctgatgtgactttattagacaaacccccactcccgccaggggtagacacacgagtatctgctttaggaagatttctgcaacacggcagggtgcaattcaaactctgggttctcctttcctgagcttagaaaccaatttgttcggagataggagaaggctctgttggcagaagacctaagagacgggaggaggcgcctggcgtcagcgggtcgcttctcagccgtgaccacgagcggccagcaggtgtcagtgcgtcctcgctttgccctggcgctcggctcctggacccctccccacctcggtctaagggggcgcggtccagaccccgggtcttgcgtttcccgcagacagcatcgcggctgggaggacacgtagccgcttcttccctaagcggaggtctgaactccggcttgtaccacttccccgtgggtgctgtccattccgccccaggggttccatccgaagccgcgccttcctccctctccaggacccctttctccccagcctccaggagcacctgcggaccgcgtcggctctggcccggagctgggctgctccagacgtaactcacaccggaggttacttccctcgatttgggcggggattcccttccatttttttcttcccttttctcccaagatccagcttcttgggggcactcacgggtgcccgttgcgttctgctccgtcggcccggagctgcatggccaactcccagcaggggccgctcctcccctaccccccacccccgggctccctctttaagtctctagctcaaggtacccgcctctccaaagggctcgtcccgcctgagggcaacgctccccgaggtccagcgctaggcgcgggcgctagactggcggaggggtggtgcgaggggcgggggagggtcggcttcccacgtgggggctgacgccggctgctcagcaacgcttgcttgatcctggggctataaaacgagtccaccgtgagcgcagcggagcagcagcagctccagctcggtgcagaagcccagcagccggcgtgccgccgcccggccactccagcgccttcttccccgccttgcgctcctgccccaactcgcgctgtcgtcggaccccggcccatccagcagcgctcggcgcccaccaggcggacgcccaggagaacccctgcctccgtcgcggctcctggagagctgatcgttcacctgccccggcccgcctgaggacgg

SEQ ID NO: 18 - DNA, 1300 bp, Homo sapiens
acgtttctgtctccctaagcctctcctttcatatcatgagcatacatttttgcatcatgctcacacgttcattagctaggactgaggagtgtgtacgattccaaagggccctcagcgttagctgttagatgcacaaaccttcgcttcctttccacatctactgcactcgaggttcaacagaggatccttgcaagaacagcgcccagagagcattcttgacagatgcgcgcttggctccagcaacccgctctgctgggaagtttcttctaaccactaacacccacctccaatcccccaagctgtcacgacgcatgctggctgggtcccgtcttgacgggggaagggttttacacacaccctgctaggctgccccacatcacaaccaagctcgcagggcaaactcctccaagcctggcggacaagctgtcccaggcgctctggcgcttcctgaacaccaaggtcccctccccgctcaagggagctagcgctctgttccgcagagaaccccggaactgcaggtcgaggggatgcggggggagcgggggcgcaggagggagccgagtgctggaggcaaacggggcgcaggagcgggtgcgggaggcaaacggggcgcaggagcgggtgcgggaggcaaacggggcgcaggagtgggtgcgggagcgagtgggggctgagggaggggacggggccccggggggagccaggcgcggaagggggcgcgggggaacagggaccaggaaccagcgggcgcaggaaggggtgcgtccgcaggaacccgcgggcgcacgggaggcactagctacgcgatcagctcgggactctcaggagccgctcaattgccaacgggaggggggtgcggggagttggaggtgggggtgcagaccagacgggggcgtgcctttgcccggattggctgcaggagcctgacgcgaggccccgggggttggcttggggagtgggagcggggtggggtgggtgctgggtgccggagctgcgggcccggcgcgctcagaaacatgctgaagtcccggcggctcttccagcagcggcagcggctccagcagcagcggcggcggcggcggcggcggcagcggcagcgacagcgctcggctcctgcgggaaaggcgcccggcgcccatgcctccggccccgcgccgcggctgccctgacccggccgcgacctccctctgcgcaccacgccgcccgggcttctggggtgttccccaaccacggcccagccctgccacaccccccgcccccggcctccgcagctcggcatgggcgcgggggtgctcgtcct

SEQ ID NO: 19 - DNA, 1300 bp, Homo sapiens
agagatggggtttcgccatgttggccaggctggtctcgaactcctggcctcaagtgatccgcccgcctcagcctcccaaagtgctgggattacaagcgtgagccaccacggccggccgtgagggtggatctttttaaagccagaaatatttgctctttaaagtctcaaaagcaaaactgatctttatggattctggtgcttaattgcagaggtggggaggcagtatgtgtgatggttatgaccacaggcttcggaatcagatcgacatcaggtttgtacctctcagctctaccaccttcaagctgtgtgatctttggcatgctacaatctttaattctgggatctttatctgtagaatgtgcaaaataatgttcccaatctgatatcattgataggaatgagcaaatgtatgtaaatagctttgcacagtgtcaagtgagcactttcctggagccctcagttagctattaataacttctcgagctaccatggccattaacaatgggacctgaagcactgcggatgctacaaatgcttcagcagacccagtgcttgatttcaggaatttcagacgaagggcgacacgccctcagctggagatggaggaagaaggggcagggtccagcagggctgagaggagagaattccgaagaaaaatctctccccagccctgggaaaggaaaggaacgaaggactggtcaaggagggtccccagagcgcccgccgcccgccccggctggggtggctgagcagtccactcacagctccaagctctgtggcaccgccttccgagtgtatctggagatcatcctcctcctcctcctcctcctcctcctcctcagccgcggccggggcaggcacgccagggtgggggcctccgggcctggccctcccgccggctccggcccggcccctcccgccacctaccggccccgtctcgccccgtcacctagactccgagcagccacctccccagggtccccacctctccagtcctccgacctccctgctttgccgcgggggcggaagtgacgaaggcccccggacactcgcaaaatgctcccgccgacgcacagcagtgacgacacacaaggtttcggggactgagtgggtttcagactttctctcaggatttccgctggcttcaggttccggtcaggcgtcgggacagagcctgatccaggcttcggcggccggtggcagctctcgatcagctctcgcagtcggagaggcggctaaggaaaggtgccacagcagagacgcgaaggagaggccctagaaccgtaagagaaattggctt

SEQ ID NO: 20 - DNA, 1400 bp, Homo sapiens
gaggtctggcttcgcggctctgtgaccccggttcagcttctgagcgcctggttccttggcgggacgcctcctcctttcccgcaagaccagacacgactgtctgggaagcagcgtttctggggcgcaccttgacacttggatttggatcaacaatgctttcaagaagaaagacttttgatcaaaagcgggaaatgagaaagcgactttcctctgaaaagtgcctcccagtcccgaggctgcgaggcccccacgccaggctggctcccacggaagccgggcacccacccggcccgaccaagcgccactccgccccgtggacggggcgtcccaccccggggacgcccgccccacaccgcgtttgcaccccggaggccccttgccgcagaggcggacggcgcgcctctcccgggcccctggggtccgcgcctccctcgggcagactctttcgactctgctcgagcctccgcttcttcctgcgggcggacgccccggacacaacgggccccgctgttcacgcaggggcgccccggcggggcgggcaaagacccggggacgcggtcccgtcccgagacgctcagctccggcccaccgctcgcagctcccgccccgggcgcaggtcccgaccccacgggccgtctcggagccgcagcggccgcttccctgcacgtcctcacgccccccgcacggacgccgccagccccgcgcctcagtttccccactagcaggatggaaagacgggccccgccccgaagcgtagcggcgtctccgtggtagccagtgcccagagagtccgccggtcccaccgccccttcaaaggagaacccggcccaccgcccgccgcggcggcgaccgcgcagcccactcgtcacgcggcccgcggcgtccagcccgggccggctcacctcaggcggtcgctgccgccctcgcgcctgcgcgcccctcgccccgcccctctccccgcccgcgtcccgcgcaccgcaggcctctgcccctcgcccaccgcaggacccgccccgcgcacgcgccgcacgtgccacacgcaccccacgcccctgcgcacgcgcaggccccaagtcgcggccaatgggcgacgcggccgcagatccgcccggccccgccctgccctgtgagttcctccggccgggctgcggggctccgctcagtccgggagcgcagctgggccgcggcgctccgacctccgctttcccaccgcccgcagctgaagcacatcccgcagcccggcgcggactccgatcgccgcagttgccctctggcgccatgtcgcagaacggagcgcccgggatgcaggaggagagcctgcagggtgaggcggaggaggcggcgcgggagccgagggggcgcgggggggaagcctggggaaggccaagagggcgccaagg

SEQ ID NO: 21 - DNA, 1300 bp, Homo sapiens
tctttgggcgggggctaggactctcctttgccccttgagaagttggtgaccccagcctagaggaatccacgccgcgccccagtcggccgtgctagcgtgtcgggccgagtagggactctgctgcttcctacctgcagggtgacttcccctctctgcagatacctcccctctctgagcttgaattttctacctgctgaaatgggaaaaggaatgttaccttccttgcctgactcaagggtggctgtgaagctcaaagtagactgggatgtggccgtgcttggtaaactgtaaaatgattagcatacgtgaagcgttagtgtgctccctggcagtcagtcctcacgtttacgatggattaatgaaggcagccaggcacaatctcaggttatgaccttataaggcataataggattacaaggaggcaaaatgaaacagtatatttcctcctaattttggttattcctatgtttccaaatagaaatgaaaattctgaaatttcagataattcccccctccaaatcccaattctcaatttagcttttctgagccttgtccctaccgtgaaatcttactagctcaccccgaaacgccggggtcttggtcctctgggggactagtgagtcctgctcctctcggctttgctccgtccctgccccggcccctccgcgggagtctggggtcgcggcccggtcaggcgccaagccggcaggggggcgcggtccacttgaggccacagctccccaggtccagggctcgggccatccgcgctgtcccttccgcgggctcttgctgttcttcgccaggaggctttgcactccgggccgcatgggtcctggataaggacctcaagaggttgtagtggcgccccttcgctccggcgtactgtctgaaccctgtgcccaaagagggctgtggcagttcctgcaccaaccgcctggagcccatacctaagccctctgggcacgagggacctcctctcccccgctcccccctccccccatcccaactccagccccaaaggaagcaatgcgcgcgtccgagagcaggagcgcgcgtggctgaggaaagaaagggaaggcaaccgggcagcccaggccccgccccgccgctcccccacccgtgcgcttataaagcacaggaaccagagctggccactcagtggtttcttggtgacactggatagaacagctcaagccttgccacttcgggcttctcactgcagctgggcttggacttcggagttttgccattgccagtgggacgtctgagactttctccttcaagtacttggcagatcact

SEQ ID NO: 22 - DNA, 1400 bp, Homo sapiens
gtaagtatgataagaaaacaaaaaattgagctgggcacggtggctcacgcctgtaatcccagctctttgtgaggccgaggcggccagatcacttgaggccaggagtttgagatcagcctgaccaacatggtgaaaccccgtctctactaaaaattacaaaaattagccgggcgtggtggcgcctggctgtaatcccatcttctcaggaggctgaggcaggagattcgcttgaacccgggaggcggaggttgcagtgagccgagatcagcccactgcactccagcctgggcgacagagcgactccgtttcaaaaaaaaaaaaattaataattaaaaaaaaaatcgcagggcaagtgggcgcgcttgtagtcccagtcacttcggggagccgaggtgggaggatcgcttgagccagaaggtcgaggctgcaggaagccatgatcacgccactgccctccagcctgggtgacagagtgagaccctgtctcgaaaaataccaaaaaacaaataaacaaacaaaaaaccaaaaccaaaaaaacaagccactgacagttcttgggtatggttgagactcgagatgagatgccagtggggtgggcagtagaaagtgcagaataaaatgtacatttgaactgagtcaccctgcaaggcctgagaggccaaggcttcactgtgagtgggagctggtaggcttagcagcagagggaaaagcagcgtcgagttttggaggtcactcgacttaggtaagaacagactgactgactgctaggcattttcttcctttcgttcaacaaatatttgtggagtgcctattacgtgccagaagctgttctggacactgagaaacagggatgaagaagaaacagatccaagccttcctgagagtaacctccccaggtttcatggatgaggaaactgaaggtcgtcctgactcaggctcatggctccgaccccggcttctgtggttggagggcagcaccttacttagactcccagcgcacgtggagcagtctgccggtcggttgtctggctgcgcgcgccacccgggcctctccagtgccccgcctggctcggcatccacccccagcccgactcacacgtgggttcccgcacgtccgccggccccccccgctgacgtcagcatagctgttccacttaaggcccctcccgcgcccagctcagagtgctgcagccgctgccgccgattccggatctcattgccacgcgcccccgacgaccgcccgacgtgcattcccggtacggtagggccctgcgcgcacggcgccagagggatgggcgggtagagccaactgcctctggttctgctggcctccgctgctcgcgaagggattcctgctcccgggaggtgtaggagccgctttccagaagcacagcccagag

SEQ ID NO: 23 - DNA, 1400 bp, Homo sapiens
acactcagtattaaccatcaaaattacgtattatgattcacaaatgagaaaacaattaggtaaaatgtggtgggagaagtagaaaccttggtttattccagactgattttcaattctacatttttgttttttatttttgagacggagtctcactctgtcacccaggctggagggcagtggcatgatctcggctcaccaaaacctccgcctcccgggttcaaacgattctcctgccccagcctcctgagtagctgggattacaggtgcgtgccaccacacccggctaatttttgtatttttagtagagacggggtttcgccatgttggccaggctggtctcgaactcctgacctcagctaatccacccgcctcggcctcccaaagtgtggattctacatttaaccacttaataatgaattgagctttcccttcatcttgtaaaaatggttatcaattggcactgcattcatcaaattcttcaggtttcatatcttatttccaaattccttttgcatacagagttttgttgttgttttgagacagggtctcactccgtcacccaggctggagtgcagtggcacaatttcggcttactgcaacctccgcctcccaggttcacaaacaattcttgtgcttcagcctcccaggtagctgggattacaggggtgcaccaccacgtccagctaatttttgtatttttagtagaaacgtggtttcacgatgttggccaggctgatttcgaacccctgacctcaggtgatccgcccgccttggccttccagagtgctgggattacaggcgtgagccaccacgctcggcccagagttttaaaattttactttttctactttagctcacatttgaggtggtaaaagttaatcttgaggtccctttctcctacagggctgggggaaaattttcacgtgagagtcaaacagtccttttcagatacatccagacaaggtttggttagaaataaaattacttgggctctctggtggatgggttctaggcaaacaactccgcccaacagcagaggccctgcactgcgttgtgcctgcagcacctcgtgcgccttctgcagccggccaaccacctacaccgcagcccgcccacccgcacgcgggggcggggcgggcaggcagaggcgcaggcgcggtgcttcgcagcccgcttccggcctcacacctgccaagcatcacacctgccaagcatcacacctgccaagcatcacacctgccaagcatcacacctgcgatgcctgcacgagctgggtgcggtccgcgcagctgcagtaagggggcgacccggcgtctgttagtcggcggttcatctccttcgtgcctcgatgagctttaacgccattttcctccattctctttcttcacctcttgagtgag

SEQ ID NO: 24 - DNA, 1300 bp, Homo sapiens
gaaatacaaaaaaatacaaaaaaatttgcccggcggctgggcacggtggctcagcacggtggctcacgcctgtaatcccaacactttgggagggcggatcactaggtcaggagttggagaccattctgaccaacatggtgaaaccccatctctactaaaaatacaaaaattagccgggcgtggtggcgcacgcctgtagtcccagttacttgggaggctgaggcaggagaattgcttgaacccaggcggcggaggttgcagtgaactgagattgtgccactgcactccagcctgggcgacagagtgagactctgtctcaaaaacaacaacaataacaacactacaggctattataagaaaaataaattatattttggattttgaaaaaggttcaaatgcaaatactctacaaaagatggagtaggttgtgtccccttctgtgagatatatatctctctcacaaaaaaaaaaatatatatgtaaattttttttgagatggagtttctctcttgttgcccagtctggagtgcagtggcgcgatcttggctcactgcaacctccgcctcctgggttcaagcgattctcctgcctcagcctcccaagtagctgggactacaggcatgcaccaccatgcccgactaattttatatttttagtagagacggggtttcgccatgttggccaggctgttctcaaactcctgacctcaggtgatccacctgcctcggactcccaaagtgctgggattacaggtgtgagccaccgcgtccggccatgagttataaatattaacaatttcttgctgtaaattgaaagcatccttcgcgtctttgcgtttcattaccaccctctgttctctcaagagaaattctaactttatttcagcactcagtcctgaagttacagaagttaataattttttaaaatcctgcaaacaatgcatggatatccccgtcttgcacactctttgggccagtctagaattcttcccatcagcatttcggtgatctggaccgccgccacccacactgcgctccagggcagaaaagacgccccatgcccgcgcctgggccggcggggggcggagcttgcgtgctgacgcataagagccgagcgggggaacgtgcgtgtctcgagtcgcacggagggcaaccgtcgacgggcttagcgcctcaactgtcgttggtgtatttttctggtgtcacttctgtgccttccttcaaaggtggtgctttgtccctgtgggtcatctgtactgattgcgccaagcaaagcatttgtgagcgtgtggtgctggggt

SEQ ID NO: 25 - DNA, 1300 bp, Homo sapiens
agatcaatttgtggctttcttttccaatgaactgctaaagttccacttttatgcccaagattcttatcatacttttgtaagatcaagaacaacatgtgaagtttccactattatatatccacccattatatgtagttgtactggaaaaaattaaaagctgataacttttaatttgaagatgatggtatatactatgtatatatattaaggtgcttaaagataaatcctagcacctgaggaggtgtagaaatcattcaaactctttgattacaatgacaaactagtcagtaacttactaaatattgtactatatattactaagtattttactcttcaacatagctttttaaagacacaaagcttttcaaaattcctgcttacctgggggtaaaatttggggaagcagatttctccagtgtttaaagaagccaatttggcagtgtaccagagttgaatacatttttcccatcacaagggaatacatttttcccatctaagttaagttgtttttctctggtaaaggaggaaatcaacacccatctgtacggagataaacgtttcagagtgtttttatattaaataattagtatactagtctagtaagtgataatccacgaataagttaagaagagctaagaaagaaaaagaaaagcatccatccatcctttggttgcaaataatacttacattagcgtatggcaaaatttaattttgtacagagtaatttaacccaggattgctgactttttaagagctgagaaagcatagctatggagcgcaaggccccacccagcagggtctaagtattccgtctgcaaaactggcaggccaccaacggccgcgtcccagggcggcctgaaggatgctgataaccgggagccccgccctgggttcggctatcccgggcaccccgggccggcggggcgaggctctccaattgctgggccagagcgggacccttcctttccgcaccctcctgggtatctccggtcttcaggcctccttcggagagccctgctccgagcccattgggcttccaatcttggcctgcctagcgccgagcagccaatcagaaggcagtcctcccgagggggcgggacgagggggtggtgctgattggctgagcctgaagtcgccacggactcggggcaacaggcagatttgcctgctgagggtggagacccacgagccgaggcctcctgcagtgttctgcacagcaaaccgcacgctatggctgacagccgggatcccgccagcgaccagatgcagcactggaaggagcagcgggccgcgcaggtac

SEQ ID NO: 26 - DNA, 1400 bp, Homo sapiens
ctccggggctccggcgcggcaccggggggcgctcgggatctggctgaggctccaagcgccgcgtggccggctcctcctgctggggcaggtggcggctgcgcgccccgcccgagcccaggggccccctcagccgcaacaaccagcaaggaccccccgactcagccccaagccacctgcatctgcactcagacggggcgcacccgcagtgcagcctcctggtggggcgctgggagcccgcctgcccctgcctgcccggagaccccagctcacgagcacaggccgcccgggcaccccagaaacccgggatggggcccctgaattctctagaacgggcattcagcatggccttggcgctctgcggctccctgccccccacccagcctcgcccccgcgcaccccccagcccctgcgaccgccgccccccccccggggccccagggcccccagcccgcaccccccgccccgctcttggctcgggttgcgggggcgggccgggggcggggcgagggctccgcgggcgcccattggcgcgggcgcgaggccagcgaggcccgcgcgggccctgggccgcgggctggcgcgactataagagccgggcgtgggcgcccgcagttcgcctgctctccggcggagctgcgtgaggcccggccggccccggccccccccttccggccgcccccgcctcctggcccacgcctgcccgcgctctgcccaccagcgcctccatcgggcaaggcggccccgcgtcgacgccgcccgctgcctcgctgctgactcccgtcccgggcgccgtccgcggggtcgcgctccgccgggcctgcggattccccgccgcctcctcttcatctacctcaactccccccatccccgcttcgcccgaggaggcggttccccccgcaggcagtccggctcgcaggccgccggcgttgtcacccccccccgcgctccccctccagccctccccccggcgcgcagcctcgggccgctcccctttccgcgctgcgtcccggagcggccccggtgccgccaccgcctgtccccctcccgaggcccgggctcgcgacggcagagggctccgtcggcccaaaccgagctgggcgcccgcggtccgggtgcagcctccactccgccccccagtcaccgcctcccccggcccctcgacgtggcgcccttccctccgcttctctgtgctccccgcgcccctcttggcgtctggccccggcccccgctctttctcccgcaaccttcccttcgctccctcccgtcccccccagctcctagcctccgactccctccccccctcacgcccgccctctcgccttcgccgaaccaaagtggattaattacacgctttctgtttctctccgtgctgttctctcccgctgtgcgcctgcccgcct

SEQ ID NO: 27 - DNA, 1400 bp, Homo sapiens
gtcacaggggtggcctgtcaggtcaggcgggcggctcaggcggaagagcgtggagagcaggcacctgctgaccagccccttcccctcccaggacaacttccccagataccccgtgggcaagttcttccaatatgacacctggaagcagtccacccagcgcctgcgcaggggcctgcctgccctcctgcgtgcccgccggggtcacgtgctcgccaaggagctcgaggcgttcagggaggccaaacgtcaccgtcccctgattgctctacccacccaagaccccgcccacgggggcgcccccccagagatggccagcaatcggaagtgagcaaaactgccgcaagtctgcagcccggcgccaccatcctgcagcctcctcctgaccacggacgtttccatcaggttccatcccgaaaatctctcggttccacgtccccctggggcttctcctgacccagtccccgtgccccgcctccccgaaacaggctactctcctcggccccctccatcgggctgaggaagcacagcagcatcttcaaacatgtacaaaatcgattggctttaaacacccttcacataccctccccccaaattatccccaattatccccacacataaaaaatcaaaacattaaactaacccccttcccccccccccacaacaaccctcttaaaactaattggctttttagaaacaccccacaaaagctcagaaattggctttaaaaaaaacaaccaccaaaaaaaatcaattggctaaaaaaaaaaagtattaaaaacgaattggctgagaaacaattggcaaaataaaggaatttggcactccccacccccctctttctcttctcccttggactttgagtcaaattggcctggacttgagtccctgaaccagcaaagagaaaagaaggaccccagaaatcacaggtgggcacgtcgctgctaccgccatctcccttctcacgggaattttcagggtaaactggccatccgaaaatagcaacaacccagactggctcctcactcccttttccatcactaaaaatcacagagcagtcagagggacccagtaagaccaaaggaggggaggacagagcatgaaaaccaaaatccatgcaaatgaaatgtaattggcacgaccctcacccccaaatcttacatctcaattcccatcctaaaaagcactcatactttatgcatccccgcagctacacacacacaacacacagcacacgcatgaacacagcacacacacgagcacagcacacacacaaacgcacagcacacacagcacacagatgagcacacagcacacacacaaacgcacagcacacacacgcacacacatgcacacacagcacacaaacgcacggcacacacacgcacacacatgcacacaca

SEQ ID NO: 28 - DNA, 1300 bp, Homo sapiens
ccgaaaagtacaacatctggcccgccccagcccgaagacagcccgtcctccctggacaatcagacgaattctccccccccccccaaaaaaaagccatccccccgctctgccccgtcgcacattcggcccccgcgactcggccagagcggcgctggcagaggagtgtccggcaggagggccaacgcccgctgttcggtttgcgacacgcagcagggaggtgggcggcagcgtcgccggcttccaggtaagcggcgtgtgcgggccgggccggggccggggctggggcggcgcgggcttgcgccggacgcccggcccttcctccgcccgctcccggcccggggcctgcggggctcggcggggcggctgagcccgggggggaggaggaggaggaggaggaggacggacggctgcgggtcccgttccctgcgcggagccccgcgctcaccctggcggcggagctgggggtggggtgggggcgtcgggaagggccgagggaggtgtgaggtgtctgcaggggcgacttcccggtcggtctgtgggtgcagggggtgccgcctcacatgtgtgattcgtgccttgcgggccctggcctccggggtgctgggtaacgaggaggggcgcggagccgcagaagcccaccctggtatgttgacgcggtgccagcgagaccgcgagaggaagacgggggtgggcggggccaggatggagaggggccgagttggcaggagtcatggcagacgccacattcgcgacatctcccccacaccccctctggctctgtccgcaacatttccaaacaggagtcccgggagagggggagaggggctgctggtctgaggctaagaagggcagagccttcgacccggagagaggccgcggcccctgcccagtgggcagcgtggaagtttccatacaaggaggtgggaaggagacccccccccccttcactgccctgtgcagagatgagccgggggtgcaggatgggagcccatggcacttcgctacgggatggtccagggctcccggttgggggtgcaggagagaagagactggctgggaggagggagagggcgggagcaaaggcgcgggggagtggtcagcagggagaggggtggggggtagggtggagcccgggctgggaggagtcggctcacacataaaagctgaggcactgaccagcctgcaaactggacattagcttctcctgtgaaagagacttccagcttcctcctcctcctcttcctcctcctcctcctgccccagcgagccttctgctgagctgtaggtaaccagggctgtg

SEQ ID NO: 29 - DNA, 1300 bp, Homo sapiens
ttcccagaggtggagatttaagatgctaatgatacatacgtcctatgaagaagcatgttaaaccaccatgcatgcaccagaaaaactccacctctacatgccctgtctatagttctccttatttccccttacgggagaggcccgtaaaagaaacccacaccctgacttcgaggaacagcccacttttttttttcttggtgttagctcccttgtgcgcacaagctttaattaaaagaaagaaagaaagaaaaccaaaaaaacttgctttttgctgcgatatcccttgatttctgtcctgaaggatccaaagagccctcagggagtcgataccagagccgtatttgtttttgcagcaacaggttggctgcgggctcttcccccgccttccaaagccctcagcccctggcccaccctgcaacttactcatctctccaaccctcctcccctagaactgctgcctcctgtgcgcagcccctagcctgggcctgattccaatttctgtaacattcccctgcccgggattgaatacaggttgaaagtcggtctcctccgcgcccctgaggcccaaccccggcgctgaagcctcccaactcctgtgtgcaaaggagacggagactgagggatctgggcgctctggcaggcacaggagggctccccgcccgtggcctcgccggagatgcacccggctcccaacccaacaaacccgctttgggaggggatggggtggggaaaagaagacggggctcggggctcgaggggagatatagagaaagcaagttaggtagaggagatgtcccagaggaccccattttcgggactgcacctcccattggagctccccgctcccaagccctctggggactcccgcgctgccgtcgaaacccctattccggccccaacggggacacttctccaggatttgctcctcgcctgtggggaccacagccaaagactcctggaatcgatcccagatcctgggagtcggggggcccagccggggtgcggggagtcgcggcgtcgtgactgcacccgccccgccgcgccgggaggcgcccctggcgaccgtcgcgaacgccacaccctcggttcggccctggccccgcccccgcccagagcgcgttcgcggccaggggaggcgtgtgctgctcccgcagccagcgagagcgagagagggatggatgttggaggaggaattcgggcttaacaagtgatcgctgctgtctaggattttgtttcttttcgggggaaccttgacttcctttcccaggcaatccctcctgtgctgaactccagaggaacc

SEQ ID NO: 30 - DNA, 1300 bp, Homo sapiens
cctctggcacctagagcaatgtcgtccgtatatgtttgctaaatgaatgactagatgcactgcttgaggattctaacaaaagataaacttagctaaataatctgcaaataatcatccttgattatttttctaaccttaaacatttgtattaattataataatatcactcattatttgcttaccatttgccaggctatgttccatgcattttccacattttctctcacttaatgctcaaaactgtgtaggtacatactattaataaaattatttcacatacagaggaaccaatgcatagggaagttcattatcttgccaaggaagggaagtttaaaatgctaagttcgacattctcattccagagcctatgctctgggcctctacaatgcaatttccctcaaaaataaaccctccaggatgggtgggtggctcatgcctgtaatcctagcaatttgggagaccaaggtgggcacattgcttgagcctgggagctgaagacaagcctaggaaacacaaggagaccctgtctttacaagagatacaaatattagctggccatggtggcatgtgccagtaattgcagctactcgggaggctgagttggaagaatcatctgagcctgggaagtggaggctgcagtgagccaaggtcaaataactgcattccggcctgcacgacagaatgataccctgtatcagaaaaaaaaaaaaacagaaagaaaaaagcaatgtgaaaagaaggacattaaataagaaaagctttaattctggtgaaaaatgtttctatttcttaaagcaaaaatgtttcacagggacatacattacccacaactttcccaagagctatgaggtggggtcaggggaacagtggttcacatactccaaaggttgtgttacttttctccgtcaagctttctaatgattgagaaactcttcactgtgtgaatttaattgtacacatactttttcaatcctgtcttactctccaagccccattcccctcctaccctgatctatccaagggctggtgaagaaaatttcccatggatacactacctgatgcaggctacagttctgattctttaatgggaagaaaaataaagacatgcatatgcatgcacagtgagtatttcccaatacatgtacaggccctgccaaaaaggaaggcgaagcatactttcagtttcagtcacacaagaagggaggagagaaaagccatggccggtgagtcttttactgttccaagaacaggtccctgggaagaaagagttttggaaggggctggctcttctggaagccat

SEQ ID NO: 31 - DNA, 1300 bp, Homo sapiens
aaaccctatcttgtttttaaaacaaacaaaccaacaaaaagtagtgtttatgtaagcattttgttccctgactctaggaacccctctgtttttatatcaactctgtactggcaaaacacaaaaacaaaatgccaccttgctaattcccttcctagcaaagtaatacagtttagcacatgttcaagaaaaaaatggctaagaaattttgtttccactaattattttcaagactgtgatatttacactctgctcttcaaacgttacattttataagactattttttaacatgttgaacataagccctaaatatatgtatccttaaattgtatttcaaatattttaggtcagtctttgctatcattccaggaatagaaagttttaacactggaaactgcaagtaaatatttgccctcttacctgaattttggtatccctctccccaagcttactttctgttgcagaaagtgtaaaaattattaaataaaattctaatgatggtatccgtgtggcttgcatctgatacagcagataaagaagttttatgaaaatggactcctgttccactgaaaagtaaatcttaatggcctgtatcaactatcctttgacaccatattgagcttgggaggaaggggaagtcctgaatgaggttataaagtaaaagaaaatatttgcaaaatgttcctttttttaaaatgttacattttagaaatattttaagtgttgtaacattgtaggaattaccccaataggactgattattccgcattgtaaaataagaaaaagttttgtgctgaagtgtgaccaggaagtctgaaaatgaagagagacagatgacaaaagaagatgcttctaatggactaaggaggtgctttcttaaagtcagaaagagatactcagaaagaggtacaggttttggaaggcacagagccccaacttttacggaagaaaagatttcatgaaaatagtgatattacattaaaagaagtactcgtatcctctgccactttatttcgacttccattgccctaggaaagagcctgtttgaaggcgggcccaaggagtgccgacagcagtctcctccctccaccttcttcctcattctctccccagcttgctgagccctttgctcccctggcgactgcctggacagtcagcaaggaattgtctcccagtgcattttgccctcctggctgccaactctggctgctaaagcggctgccacctgctgcagtctacacagcttcgggaagaggaaaggaacctcagaccttccagatcgcttcctctcgcaacaaacta

SEQ ID NO: 32 - DNA, 1300 bp, Homo sapiens
aaactctgattgtttgagtttgagttccagcatcatcagtttccacctgcataagcctgggtgagtctgtcaatctctctgtgcctcagtttcttcatttataaaatggtgatgataatagtacttacaaaataggttgctgtaggaatacacagagacaatatttgtaaagtgctgagagtgggctggtgcataatgagagccaagtaagtattggttgttattattccattcttgggaatgctccagccttggagattggacaacctccctggctccctctcataagccacctccaccctcagtctccttcatggacctagatgcagttgctcggtccaagattcaccaggcaggattagccctcaccaggattgtaaaaatcgcttctccccttccctgctgtggtttttgcaaatgggattcgttggagcgggtggaggggttctgctgggttgagaccagacagctcatctcctgactaggctgcttgcctgggctgccaccaggtctgtactggaaacaggctagggcatgggaatcctgcagggttccaacccccttgtacatttttgtggatctgtaggaagacgggaagagagatgcttctccattgatacatgtatttcaaggtccgtaactacgtggcccccctcccttctgtaatccttcccaaagaaataccgttatttctccaaaataaaaaggactggtgtctcccgtctctgtctctcatactccgactcagctcaaagcctcgtccctttagcccaaggcacttcgttcctcctggagtccactcggcttccagcgggttcccaggtgaactgaaatccagagctattctcatctggttgccctgggaatttcagcgctgtcggtacaacctgttcctccatcctccccactccttccctccctccgctgggctgcacccttctcagcccctcctttcccttgctaggggccccagctgcgccctccggggagacacccgctgccacgagacccgggaggggaagcgggaggagggggagaggaggggaaggcgggggaggcgccgagggtggaggccaagcgcggcgcagccagagaggggcggctgaaggttgcatctgctggaaggaggcttttcggctgcttggtaacgggctgccagaagagagagaggcagagagcagggcagcggcttcttgacgtcagggccaagcgaggggatcgcgccagcaaccccagctctccccagagaggggccggccgaccgctggagcggagcctgacgccaggcgcccgcggagcg

SEQ ID NO: 33 - DNA, 1400 bp, Homo sapiens
ccgtgtgcccaagacctcttttcccactttttccctcttcttgactcaccctgccctcaatatcccccggcgcagccagtgaaagggagtccctggctcctggctcgcctgcacgtcccagggcggggagggacttccgccctcacgtcccgctcttcgccccaggctggatggaatgaaaggcacactgtctctctccctaggcagcacagcccacaggtttccaggagtgcctttgtgggaggcctctgggcccccaccagccatcctgtcctccgcctggggccccagcccggagagagccgctggtgcacacagggccgggattgtctgccctaattatcaggtccaggctacagggctgcaggacatcgtgaccttccgtgcagaaacctccccctccccctcaagccgcctcccgagcctccttcctctccaggcccccagtgcccagtgcccagtgcccagcccaggcctcggtcccagagatgccaggagccaggagatggggagggggaagtgggggctgggaaggaaccacgggcccccgcccgaggcccatgggcccctcctaggcctttgcctgagcagtccggtgtcactaccgcagagcctcgaggagaagttccccaactttcccgcctctcagcctttgaaagaaagaaaggggagggggcaggccgcgtgcagccgcgagcggtgctgggctccggctccaattccccatctcagtcgttcccaaagtcctcctgtttcatccaagcgtgtaagggtccccgtccttgactccctagtgtcctgctgcccacagtccagtcctgggaaccagcaccgatcacctcccatcgggccaatctcagtcccttcccccctacgtcggggcccacacgctcggtgcgtgcccagttgaaccaggcggctgcggaaaaaaaaaagcggggagaaagtagggcccggctactagcggttttacgggcgcacgtagctcaggcctcaagaccttgggctgggactggctgagcctggcgggaggcggggtccgagtcaccgcctgccgccgcgcccccggtttctataaattgagcccgcagcctcccgcttcgctctctgctcctcctgttcgacagtcagccgcatcttcttttgcgtcgccaggtgaagacgggcggagagaaacccgggaggctagggacggcctgaaggcggcaggggcgggcgcaggccggatgtgttcgcgccgctgcggggtgggcccgggcggcctccgcattgcaggggcgggcggaggacgtgatgcggcgcgggctgggcatggaggcctggtgggggaggggaggggaggcgtgtgtgtcggccggggccactaggcgctcactgttctctccctccgcgcagccgag

SEQ ID NO: 34 - DNA, 1300 bp, Homo sapiens
gatttggtcgtattgggcgcctggtcaccagggctgcttttaactctggtaaagtggatattgttgccatcaatgaccccttcattgacctcaactacatggtgagtgctacatggtgagccccaaagctggtgtgggaggagccacctggctgatgggcagccccttcataccctcacgtattcccccaggtttacatgttccaatatgattccacccatggcaaattccatggcaccgtcaaggctgagaacgggaagcttgtcatcaatggaaatcccatcaccatcttccaggagtgagtggaagacagaatggaagaaatgtgctttggggaggcaactaggatggtgtggctcccttgggtatatggtaaccttgtgtccctcaatatggtcctgtccccatctcccccccacccccataggcgagatccctccaaaatcaagtggggcgatgctggcgctgagtacgtcgtggagtccactggcgtcttcaccaccatggagaaggctggggtgagtgcaggagggcccgcgggaggggaagctgactcagccctgcaaaggcaggacccgggttcataactgtctgcttctctgctgtaggctcatttgcaggggggagccaaaagggtcatcatctctgccccctctgctgatgcccccatgttcgtcatgggtgtgaaccatgagaagtatgacaacagcctcaagatcatcaggtgaggaaggcagggcccgtggagaagcggccagcctggcaccctatggacacgctcccctgacttgcgccccgctccctctttctttgcagcaatgcctcctgcaccaccaactgcttagcacccctggccaaggtcatccatgacaactttggtatcgtggaaggactcatggtatgagagctggggaatgggactgaggctcccacctttctcatccaagactggctcctccctgccggggctgcgtgcaaccctggggttgggggttctggggactggctttcccataatttcctttcaaggtggggagggaggtagaggggtgatgtggggagtacgctgcagggcctcactccttttgcagaccacagtccatgccatcactgccacccagaagactgtggatggcccctccgggaaactgtggcgtgatggccgcggggctctccagaacatcatccctgcctctactggcgctgccaaggctgtgggcaaggtcatccctgagctgaacgggaagctcactggcatggccttccgtgtccccactgccaacgtgtcagtggtggacct

SEQ ID NO: 35 - DNA, 1300 bp, Homo sapiens
gtctgaactagtttttcagattaactttggaatacccttgactgagaggaggggtctattcagatggttgaggggcttataattttatttttggtttacattcttaatgagttgcaaatgagttctttatttattctggatgccagccccttatcagatacatgatttgcaaatattttctcccattctgtgggttgtctttccactttcttgatggtataatttggagaacaaatgcttttattttgtgtagtcaaatggggttttatctcctagtcacttgcatttgtattgtttgtgccagaatgtgcagaggtagagatacaagtaagcaagaggaagagggcagtggtaaaagcaagaggagacccgactgtggagacaatgaagcaaagggaaggtgagacttgagtaatggatgcacctcttgctctgggagcatctgaccctttttccagagtggatcctgtttgctgtgaagcccaatttatatgtttgcttcactgccagaatcccgcccccatccctccccactgcaggcttgagaagtggcctcacagacacgcccttccctcttgacactttcattccaaatagctagcttttctgtactttctctgagaaaggtaatgtaaatgtaaaagaagtttttgaggctattctatagaagatgtcataattcaatgttcctcaaaggcagggactatatttattttttttaaacctctcggcacctaatgcaaaatctagcacacagactcccaagaaatgtttgcttaaagacggatagagggccacaggggcaggttttattagcagttgctgaagatgttggaatgcaaggtgtctcaggcagtctggactaggaaaaagttctgtgttgaaaacaagagaagcaacgaaataatttattattcccattaaataaagatgctgatggctctcgagatagatatgaggaccccaggactctggggagtgaaggaactaagccgctgccatatctgagctgagtacttagggggaggaggaagaggaggagaaaggcaagcaggaggaggcggagccttcttgtcagcatctgttagtggaggttgggaagcctctcctccttccccctccctctttgcctccacctggctcctccccatgttcgtccatcacccctcccccctttcccaaggacaatctgcaagaaagcagcggcggaggagagctaagactaaaaggcaagaggggccattgagtgaagagcaagggggagagctgggagtgaggtgggaaggtatgggccgggagc

SEQ ID NO: 36 - DNA, 1300 bp, Homo sapiens
atctccactgaagcctagggacctatgaccttcctatgaaggtttattttgtgtgtctaatagagtgaagaaaggaacacaagcacagggaaaccagctattgtagtaagcagttcaggtggaaaatggcaatgaggatagaaaggaggggatggataaaggaagataataagaagggagaataataggatttagttactgttttgaatctgagaggaagggaggagataaatttaaaataacaggttttagcctgaaaaactgggagagtgataattctactggcattttatggatacaaaaatacgtcctcttgtgtgttcctttgagagaggtgatccctaaagaataaaatatgaaggtgttcccatgtcgtatgtacacatctgtgtatatacggcagtgactttgtgttaattttctcatttcatagcatgtagtaatgtgaggggcaagacccaaagaccaaggatcaagagatgctcaggaggctgacatcctgagagggaagagccatagaaagcccctgaccattcttgagactgacaccattaatttgcctaactctgatgtgcctttatagcctcagactccagtttcaactccatatcacctaaccccattccaatagcacaattccataacacccaaccctaatcttaattataatccaacctacccttgctcttctacttctactttgctgattgtcatcagtgccctaaacctcatctgattccagccctctgcaataacctatcccttcattgaaaagggagggatcgttgaggctaactcaactttttctcctccctttctcatttctattcagtcaacttctcttttccctgaccttagtttattccccaaataggttccaattggggtgggagggatcagggaggaattaggaccttagtagtcttgggcttgattacatgacatttcagcttgtcagtctacaagggtgtggctttcctctggaagaagtccaaagctctcaggctgcaaagctcagacttggtatagtgggagagcctgactgaggtggctctagccagtctaattgccgttcctttagctagtggcatcttgattcctgctgtgtcttaactgaccattgtcttaaattctagagtggatcatgacccatgaagagcaccatgcagccaaaaccctggggattggcaaagccattgctgtcttaacctctggtggagatgcccaaggtaaggaggaggggacaaaaaacatggctggtgggacttttggaatttactgactcccttagcctatacaa

SEQ ID NO: 37 - DNA, 1300 bp, Homo sapiens
aaaagctgcagaagggaaggatataactttataaaaaaaggtccttgttcacaaggagctaatcacttactggccagagaagaaacgtgttccttctttgcaatggctgtgtttttgggtttagctaactcaattctttatgtcctcaatttatgagaccgcatcaaaaacgtttttgccacatctctgtgggaaagtaggtgagtcagaatgagtgcataatatataagtatatattttaatgataatgaatgtgtagattaacaaacccaaactttgtttttgtttttttgagagtcttgccctgtcgcccaggctggagtgcaatggcatgatcttggctcactgcagcctctgcctcccgggttcacaggattgtcctgcctcagcctccggagtagagtagctgggattacaggtgaccgccaccacgcccgactaatttttgtagtttttagtagagacggcgtttcccatgttggccaggttggtcttgaactcctgacctcaagtgatccacccgcctcggcctacccaaagtgatgggattacaagcgtgagccaccgcgcccagccaaacccaaacattctaaaagcgcagagtaaccgctcccctccccgccaacggtaaccagcatcttcgttctccaaccagaacagctgtatgcaccggtgtataagcctgccttaagtgctatttttaatcttttttaaaaacaggccttaaaataactcatttgggtacaactccagcggctggtggagtgggcttaatatattaaacagctgttaattttggtttctttttggtaacagcgacacggagatccgcatttgtcgcagtttccaccgcgggcgggaagtgtaaacacaagaaatacaaacatagcgcaacggctaaaggagtgtcacagcgccaaaccttgctggctccgcgccaggccgagccccaccctctcagctcgcggccaacacccccaccccgcctcacagcccgccgcgcccgcggggcgacaccccccactccatcatcccggaggtggtgcggccgagccccggacccaattggcggaagcggggccggttgtgtgcgcgcgcacaaatgcccggatgcgccgcgacgacccgcgcgctcccctcgggcggtagggggcgcgcaccgaggcaccgcggcgagcttggctgcttctggggcctgtgtggccctgtgtgtcggaaagatggagcaagaagccgagcccgaggggcggccgcgacccctctgaccgagatcctgctgctttcgcagccaggagcaccg

SEQ ID NO: 38 - DNA, 1300 bp, Homo sapiens
ccgcgcccgcggggcgacaccccccactccatcatcccggaggtggtgcggccgagccccggacccaattggcggaagcggggccggttgtgtgcgcgcgcacaaatgcccggatgcgccgcgacgacccgcgcgctcccctcgggcggtagggggcgcgcaccgaggcaccgcggcgagcttggctgcttctggggcctgtgtggccctgtgtgtcggaaagatggagcaagaagccgagcccgaggggcggccgcgacccctctgaccgagatcctgctgctttcgcagccaggagcaccgtccctccccggattagtgcgtacgagcgcccagtgccctggcccggagagtggaatgatccccgaggcccagggcgtcgtgcttccgcgcgccccgtgaaggaaactggggagtcttgagggacccccgactccaagcgcgaaaaccccggatggtgaggagcaggtactggcccggcagcgagcggtcacttttgggtctgggctctgacggtgtcccctctatcgctggttcccagcctctgcccgttcgcagcctttgtgcggttcgtggctgggggctcggggcgcggggcgcggggcatggggcacgtggctttgcggaggttttgttggactggggctaggcagtcgccgccagggaggagggcgggatttcggacggctctcgcggcggtgggggtgggggtggttcggaggtctccgcgggagttcagggtaaaggtcacgggggccgggggctgcggggccgcttcggcgcgggaggtccggatgatcgcaggtgcctgtcgggtcactagtgtgaacgctgcgcgtagtctgggcgggattgggccggttcagtgggcaggttgactcagcttttcctcttgagctggtcaagttcagacacgttccgaaactgcagtaaaaggagttaagtcctgacttgtctccagctggggctatttaaaccatgcattttcccagctgtgttcagtggcgattggagggtagacctgtgggcacggacgcacgccactttttctctgctgatccaggtaagcaccgacttgcttgtagctttagttttaactgttgtttatgttctttatatatgatgtattttccacagatgtttcatgatttccagttttcatcgtgtcttttttttccttgtaggcaaatgtgcaataccaacatgtctgtacctactgatggtgctgtaaccacctcacagattccagcttcggaacaagagaccctggttagtatttttgtctcgtgtaacttttaag

SEQ ID NO: 39 - DNA, 1300 bp, Homo sapiens
tgcaagtatttccattaggtatttatggggtgagtagggtggggcagatgtgtcccggaatggggcacagcggacaggaagtaacggtttataacaacgtgaacgcttctgacgtgtagcgggagcttcagaaagcgtggccgaatctgcagctcttaacaaatggctcgttcccaaaccttagcctcaactccttctgagcgataggggcatgctaccagcacggggggaaatgagatacaagaaacgcccgaaagggaaaaacaaggctgggctgtttccttcctttggggtcaagacagaggcacagaaggcccaggtctgggaggttggatcacctccggctggatgttgagccgggtgggagcccaaacagcagggggcccacaggaggccggcccaggcagcctcgcgtccacttaccaggccaggcccaggcacgtccccagcgacagcaggctcaggcacgttcgggggtctgcccagcccccgcctccgctgctccgggccacgggggtcttcccgccctcgctccgcttcccgggctccgcagcaggggctcccttgggccccgacttcttccggctcttcacctcagacatgtctggagaccctaggacgacaagcccagggcagcttcttcaccagggggagcaggacgtggccgccttggcgttcgtgggaaccctgggcggtgaccgcgccccctcacagacttggcaccgcccagagcccagccccttccctctccccggcatcctcgttgcttcactgagtctttcagctgccagctccatagttcccctaggagaggtgggcggcgacctcaacccacagcgccttccactgcgatattgctccaaatccgaggaaattcaaactcccgggcgcgcgcaggccgacgggacccgaggaggaggggcaggacgaaggggtcgcgcgcgccacgtcgggcgcgccgccgctgcccgagtccggcattggtgggaacgcggcgcgtccctgaggcttagccacgccccgtccgcggggtaggcgggcacttctacgcgcgcgggcatgagccgtggcaggagtgcgcggcggcagcggtggccgccccttggggcttggggtgtgtttatttgcataagcgggcgcgcgccgtccgggctgggtggatccggcgggatttgactgctccgctgtccagaggcggagaagaagaggtagcgagtggacgtgactgctctatcccgggcaaaagggatagaaccagaggtggggagtctgggcagtcggcgacccgcgaagacttgag

SEQ ID NO: 40 - DNA, 1300 bp, Homo sapiens
aagttagtgtgtgtagtgtgtgtgtgtgcccatttagagggtgaagaagctaaatcaagcctctgagtttcaccttggaagggcctggcaggacctggcagtggttgcctgtttgtttagagggagtgtggcttctgctggctgttaggagcccgcaacgctctcagctgagagtgcttcaatctggcattatccaaagaagtgggaaagacattccttccttccttccttcattcagttattatgtatttattcagcaaatattcatagcctgctagtgcacagtgctgaataagaacatgagtaagagcagggaagcatgagagagcatggctcaccttagtagctgcaggtggctgggtgcagctggagttaaaagacactctgagtttttcttaaaaaaaacaataaataccaaacttagaatctaataaggaagaggtgctctcaggggaagttaggtgtgttcctaagaatttgtcatttcttttcaggattagtcaggatgaactagacatttcttttcaaaagcctaataacttcctttagggaactgccaaactgactaatccatgaccttaaggcagtgggtcccaaactttgctgccaactcaatcacctttggagttttttttttttttttaaacgcagaggcccaggtcacactccacaccaatgacatcagaatgtctaggggtgggagccaggcaccaggattctaaagaccctcacgtgatgacaacagctagcaaagttctgtagctactgccttagggcatagtctaatttcttcagtaaaaacacacttattccaaatttggttccagaattgccttaaattgtttttgctctgttcttaggttgggggcggctatgagcaggcagaggatgtggtgtcacccaattaggagctctcagcttacgaggcaattagcataggttgccagggctgcacgaggagtggatttctgctttgtcattctgactctggcagttagcccgcccgctcggcgcagggcgtggcttctcgtagccattaggaaacagcaaccctttcacctcagttttcttcactccggcatttgcagcagagcgaaaggtggtcgagtcctgaaggagggcctgatgtcttcatcattctcaaattcttgtaagctctgcgtcgggtgaaaccagacaaagccgcgagcccagggatgggagcacgcgggggacggcctgccggcggggacgacagcattgcgcctgggtgcagcagtgtgcgtctcggggaagggaagatattttaaggcgtgtctga

SEQ ID NO: 41 - DNA, 1400 bp, Homo sapiens
ccttgagcttggacaagtttcttagcttttctgtacctgtttccctgtctgtaagttgggcctggtaatacttacttgtagagtggttgtgaagttgaaatgtaaatatatgtgaagcagtatagacatgttagctactattattacaattaagcagctatactttgttttttgttttttgttggttttttttgtttgtttgttttttgagacggagtctcattctgtcgcccaggctggagtgcagtggcacgatctgggctcactgcaaccttcgccccctgggttcaagcgattctcctgcctcagcctcctgagtagctgggattacaggcacctgccaccgcgcccgactaatttttgtatttttagtagagacagggtttcaccatcttggccaggctggtcttgaactcctgacctcatgatccacccgcctcggcctcccaaataagcagctatacttttgaatgttggcgtgatttatgtctaatgaataggcctcatgtcagtgtaactgtggaatctgtatgttccactgagttcacccctttgtgaaattttaccattagtgcctagtttcatctgtagcgttgtgtattgcttcaggattctttttaagaatgcaccaggtaggcagagtgttcttaattttgctccacggtttcaaatgtcaaggaaacgttggaagttggattttggcattcagtatagatgcagagttgaaagcaagatcaaactgggaggtgttttgtgaaagttgagataaacgtgtattaagcttcttttttgaagcttttctgaattcgggatttaccgggaaagtaggacgtttaattttagcggagtagtgcaatgatttaaccctgactagaactctgacgtttacagctagccttgaggccatgttttcagccagtgtgcggatttgccggggtcagactccaagcttgattgtgagttctagcctttgtcagaaatgcagcaagtcatgctaacttgcaagggagtcaacagagggcacgcggtgcctgcggggccgggacggaagccccgcccccggcgcagttcccgcctgttagcgggggagaagcaccttacacgctccgctctgcttttgtgccacacagaggacggtcgggccctggaaggaacgctctcggaattggccgcggaaaccgatctgcccgttgtgtttgtgaaacagagaaagataggcggccatggtccaaccttgaaggtaggagagagtaacgtatctttttaaacgggggatgagctcgttgagctcagcgtggtcacagcctgccttttaaagccagcgtggatgtgaccctccaaacgggacgcagcgctgggaaatgacgaaaaacgctcgtgggctagcgcatgtgttaatc

SEQ ID NO: 42 - DNA, 1300 bp, Homo sapiens
agcaataattatagaattagtggtcatatacaagaaatatgcatttacaaaaaaaaacacttcacatacaggaagtttgtgagatggctatatttgaaagcattttaattataagaaaacagaactgaagccagactcttcagaattcctccaatttatcattcattcatttattcatcaatgctatatttaggtaccaagcactggctgagtgttgaagacagaatgaatgacaacatccagctttggagtcgattagggactaaaaaagaaagtgcatctcacttagtggtcccacatttcccctagagggcaaagcctgaccttgagaccaggtggaattgtaggggaacttcagatggcagggacaaagcctcattggtcttgtcaggcaacgagtaagcaatcattgcgtgtttgttgaaacaggttgaaaaaaatagtcattttcatcaaatgaactttaaaacggagatgatctaaattcagatgtatttttttaagtcctttaaagtttaactgaaatgcaacatagaaatttatttctggccgggcgcggtggctcaggcctgtaatcccagcactttgggaggccgaggcgggcggatcacgaggtcaggagatcgagaccatcctggctaacacggtgaaacccccctctctactaaaaatacaaaaaattagccgggcgaggtggcgggcgcctgtagtcccagctactcgggaggctgaggcaggagaatgtcgtgagcccgggaggcggagcttgcagtgagccgagatcgcgccactgcactccagcctgggcgacagagtgagactccgtctcaaaataaaaaaaagaaggaaagaaatttatttctatttgtactaaatctaatagaacaagagcgttaaagtccagaagagtcggggatgggcaagttttataaataacttggcctccgcattgaagagcctgcgagatgtgagaccagctgagagcggaagcctctggaaggagacctcctcatctggagggtgggggagggagtgtgcatacttgagcccttgtccttgaaggggattgagcgagccgaggggaggggtaggcggtactcggatttccaatcacaatggagaaacctaagaggctgcggtggttgtggggccccgccccctcctccctccttgcagagccggcgccggaggagacgcacgcagctgactttgtcttctccgcacgactgttacagaggtctccagagccttctctctcctggtaggtttcggctcaggaccctgaatcctggcccacagg

SEQ ID NO: 43 - DNA, 1300 bp, Homo sapiens
agcaaaacagctggcttggaccatgttgccggccagtcacccagttgagggatttgaatgacatcataaccctcgagagggtattgctagccagctggtgttatttagaatacacaaaaatcagagaaagaaaacacactctggcacacagactccctctgtcatacacacacacacacacacacacacacacacacacacacacaggtttgagttatatggaaaattcaaacaacaggaaaattgtttgccccccaggtacccttctcccagagtggtggggtggggaggggacagtgacaggcagcctagtagaagaataaagaaaaatgttctatttcagttgggttttacagctcggcatagtctttgcctcatcgcaggagaaaaagtatgagacagtgccctaaagggaccaatccaatgctgcctgcccctccataggttctaggaaatgagatcacacctctcacttggcaactgggacaaggggtcacccgagtgctgtcttccaatctactttaccccagtcacttcagggttaaaattgtagagtttgctggagagggtcttatcgtcctttctttctttttttgttttaaataatgcatttgctctagaatctaaaattgctctcccatcccccatattcctttaatactggtaaggtgtattagcagacgtttgtgtcttcatgcccagcagaaagttaatcagaaaacagatccttattttctatggcagcataagtattttaatgtctgcgaaccctgtcactaacacacattcttttaagggaaaaaaatgcttctgtgctctagttttaaaatgcaaaggtatgatgttatttgtcaccatgcccaaaaaagtccttactcaataactttgccagaagagggagagagagagaaggcaaatgttcccccagctgtttcctgtctacagtgtctgtgttttgtagataaatgtgaggattttctctaaatccctcttctgtttgctaaatctcactgtcactgctaaattcagagcagatagagcctgcgcaatggaataaagtcctcaaaattgaaatgtgacattgctctcaacatctcccatctctctggatttctttttgcttcattattcctgctaaccaattcattttcagactttgtacttcagaagcaatgggaaaaatcagcagtcttccaacccaattatttaagtgctgcttttgtgatttcttgaaggtaaatatttcttactctttgaagtcattggggaattctatttaaattgtgtactgtttgcttct

SEQ ID NO: 44 - DNA, 1300 bp, Homo sapiens
ttgcccttgtggcagccaggaagtggcagagccctggggctggtggcatttctccaggcctccttccagcatgtggaagacagcatagacctccaggcaccctcgtcagcttattctttattccttcctcccctcctcatcccccacacccttcttcctgcccccaaagtcacacaccccctcccctgctggatgtgcaagacgatctgaaaagcatttattagtgacaaagggggtggtggttttcctctttgcctcttctctgcgcaactcgaagcctgagtgggtttgctccgcttggcaaggctggggaggaggaaaagatcaaatcacccagagccaggtgccaagtgtgtgtgtgtgtgtgtttgtgtgtgtgtatgtgcgcgtgtgcgcgtgcgcgtgtgtgtgtcctctctttccttgattttcccccgttttcccaagactgtgtgagcagcagcaacagcaacggggagatgcaaaatcctttgcaatctgcccaggaaaagacagattttgagtcgggtttatatggttacccatatgttagggcccctaagaaaggaagggaagctgcgttctctgtgtcttccctcctccagcccagaccttggcctctccacacctgtggggctcccaggccacagatgaacatgtgccctccatccttcactctccccagatgccaggcctgagtgtggctccagaaaagaccagaaccaggcaacatttcctgaacaggctgcttttctccgtctgtccacccgagagccaaggccagaacccaggctgcaacctctgcgggctcctgggaggggctcccagcactgcccagcctgggaggctgtgtgttccactgtcccattaaggaatgctatcccaacactgatgtagaggcagaaataaccatccctgcctcccatggggccttctctgcccaaatagacctgccctgccctgcgtggctactacattcagccctatccaggctcccagaaattgtcattgtgtgtgtgtgtgtgtgtgtgtgtgtgtgtgtatgtgtgtgtgtgtgtgtgtgtgtgtgtttcctgatagaaaaaaaaaaatggaaattaggttatataaaagatgtatgctttggagcccagagcggctcttttaatgagggttgcgacgtctccctccccacacccataaaccagtcgggttggacgtcactgctaattcgtttcagtgatgataggataaaggagggacattaagaaataaattccccctcacgaccctcgctgagctcacggctcagtccctacat

SEQ ID NO: 45 - DNA, 1300 bp, Homo sapiens
ccagtccttcaggaagagtctctggctccgttcaagagccatcacagtcccttgtattacatccctctgacgggttccaataggactatttttcaaatctgcggtatttacagagacaagactgggctgctccgtgcagccaggacgacttcagcctttgaggtaatggagacataattgaggaacaacgtggaattagtgtcatagcaaatgatctagggcctcaagttaatttcagccggttgtggtcagagtcactcatcttgagtagcaagctgccaccagaaagatttctttttcgagcatttagggaataaagttcaagtgccctgcgcttccaagttgcaggagcagtttcacgcctcagctttttaaaggtatcataatgttattccttgttttgcttctaggaagcagaagactgaggaaatgacttgggcgggtgcatcaatgcggccgaaaaagacacggacacgctcccctgggacctgagctggttcgcagtcttcccaaaggtgccaagcaagcgtcagttcccctcaggcgctccaggttcagtgccttgtgccgagggtctccggtgccttcctagacttctcgggacagtctgaaggggtcaggagcggcgggacagcgcgggaagagcaggcaaggggagacagccggactgcgcctcagtcctccgtgccaagaacaccgtcgcggaggcgcggccagcttcccttggatcggactttccgcccctagggccaggcggcggagcttcagccttgtcccttccccagtttcgggcggcccccagagctgagtaagccgggtggagggagtctgcaaggatttcctgagcgcgatgggcaggaggaggggcaagggcaagagggcgcggagcaaagaccctgaacctgccggggccgcgctcccgggcccgcgtcgccagcacctccccacgcgcgctcggccccgggccacccgccctcgtcggcccccgcccctctccgtagccgcagggaagcgagcctgggaggaagaagagggtaggtggggaggcggatgaggggtgggggaccccttgacgtcaccagaaggaggtgccggggtaggaagtgggctggggaaaggttataaatcgcccccgccctcggctgctcttcatcgaggtccgcgggaggctcggagcgcgccaggcggacactcctctcggctcctccccggcagcggcggcggctcggagcgggctccggggctcgggtgcagcggccagcgggcgcctggcggcgaggattacccggggaagtggttg

SEQ ID NO: 46 - DNA, 1300 bp, Homo sapiens
atatagaccattgtttttacatgctaatacaattgaaagccactacagatatttatatttacaacccaaagctaggttttaacaagaaactcataaggcaaaggtgagaagtaaaataatttagcgccaagtggagatatatgtgcaatgctactttgttgggctcaaaacatatttttcttttagaagactgacaggcttgaagtttatgcctccaaagacaaaagtgattatgttttgtttagtagcttgcaaagttgccaaaggccattttttctactctttccctgaaattggtttatatgcttattaaagtcatttatacctatttgcaaatgcttaacatagtttcagattttaagatttccctgcaactttatttcccttgaagtttacagcaacaggagttcatttttatttttaattgcatttattcagtaagtaaactccgccacagaaaaacttagtagacaaggtgagttcccctgtgctccgtggcaaagagtgcggtgggtgacattgacccatggttaggtaatctggtaaggaaagaccccgttgtaacacatctgagcaacgagaccaaaggaagggcttgctgccacgaggcgaagtctgcttttttgaacagagagcccagcagagttgggcggcaatcgtgcccagcactgaggccgaggagaaagagagcaggagcattacattactgcaccaagagtaggaaaatatgatgcatgtttgggaccaggcaaccgaaatcccttctcagcagcgcctcccaaagccgggcaccgccttccttcggagaaggcgcagagtccccagactcgggctgagccgcacccccatctcctttctctttcctccgccgctaaacacagacgagcacgtgagcgtcgcagcccgtcccagctgtgcctcagctgaccgcctcctgattggctgagagcggcgtgggctggggtggggacttgccgcctgcgtcgctcgccattggatctcgaggaacccgcctccacctcaggtgaggcgggcttgcgggagcgcgcgccggcctgggcaggcgagcgggcgcgctcccgccccctctcccctccccgcgcgcccgagcgcgcctccgcccttgcccgccccctgacgctgcctcagctcctcagtgcacagtgctgcctcgtctgaggggacaggaggatcaccctcttcgtcgcttcggccagtgtgtcgggctgggccctgacaagccacctgaggagaggctcggagccgggcccggaccccggcgattgccgcccgcttctct

SEQ ID NO: 47 - DNA, 1300 bp, Homo sapiens
ccagcccccgtcctccaccctccaagtccgcgctggaaaatcacccgctgcgggctcccgtaagcacagcttcctggcgggaccgaaccagccctcagcgcagatttgagttccccgcaggaagcacaccccgccttgtcatcccgaactgaccaccctgcccacataaccacacctcgcactccctacccctggggcccagctcagaaccgggcagacacccccttcaaatgtcttcgcacgtaggttttgcacagtgtttatctgctggtgtctcagggatttgacagtttccttaatattcccacacatggccgagaaaaataaataaataaatgcgctgtcttctttaaaaaaataaataaataaagtacccagtatcgtaaagtaggttatcgtattctcttattttggatcctccactttctgcttccaaacgcaggaacagtgctagtattgctcgagcccgagggctggaggttaggggatgaaggtctgcttccacgctttgcactgaattagggctagaattggggatgggggtaggggcgcattccttcgggagccgaggcttaagtcctcggggtcctgtactcgatgccgtttctcctatctctgagcctcagaactgtcttcagtttccgtacaagggtaaaaaggcgctctctgccccatcccccccgacctcgggaacaagggtccgcattgaaccaggtgcgaatgttctctctcattctgcgccgttcccgcctcccctcccccagccgcggcccccgcctccccccgcactgcaccctcggtgttggctgcagcccgcgagcagttcccgtcaatccctccccccttacacaggatgtccatattaggacatctgcgtcagcaggtttccacggcctttccctgtagccctggggggagccatccccgaaacccctcatcttggggggcccacgagacctctgagacaggaactgcgaaatgctcacgagattaggacacgcgccaaggcgggggcagggagctgcgagcgctggggacgcagccgggcggccgcagaagcgcccaggcccgcgcgccacccctctggcgccaccgtggttgagcccgtgacgtttacactcattcataaaacgcttgttataaaagcagtggctgcggcgcctcgtactccaaccgcatctgcagcgagcatctgagaagccaagactgagccggcggccgcggcgcagcgaacgagcagtgaccgtgctcctacccagctctgctccacagcgcccacctgtctccgcccctcggcccc

SEQ ID NO: 48 - DNA, 1300 bp, Homo sapiens
tcacctctactaaaaatacaaaattagccaggcatggtggcgggcgcctgtaatcccagctacttgggagcctgaggcaggagaattgcttgaacctgggatgcggaggttgtggtgagcagagatcacaccactgcactccagcccaggcaacaagagcaaaactccgtctcagaataaataaataaaaaaaatacagttcctttttttttttttttaaagaagtacaaatagctttgcatgcaatttatgaattttttcctgattctgatcgctggtgttcagtaggaaagggaatcaaaactccataaagcaaatcagcttatctgtagataaccaaagtcttctcagtggtgtctgtccctcttgtgaaagtacagctgcttgtgggaaaagtgagagacctagaatacagtgtatcttttgggggacatacctctgactgttacagaagcatgtgattaatttggaaggtagaatttcggaacatcatattttaataggaagcttgaaaggtaagtagaggaaaacatcaagcaaagcaaaatacaccatttgcagagttcaatcagatatgactcagcatttcttcattgtgctcatccccagctcctcaagcacatagtgccttgcacacagtaggggctgagggaaatattcgttaatgcattaattttagttaaaactagatacctcctaatctctcagtggcttgaactgggtcaaacagcagaggaatggggtaaataaggaaagacacccggtaaaggtagaacaagaccactgcttaataaatatattcgtttttggggttattattttgctcaaaagtctatgaggtgaccaacccagaatgtggcagttaattctatttacattttcagtgtgggatccaggttttcaagtttgttatgtgattttatgcaaaacaatatgcaaatccagcgcattctaaaaattcagtctgctttccagccgctcccctggtcacaaacaactaaggttggcgccgggctctctgggatccttcgcggaggggcagagcaggcgggggtgactggcagcggggcgggggaaagggcggtcccggaggcggtcccggggcggagcccgtgacgcgcggagtcggccggcttaagggccggacctcagcgtctcccggagtctggccgcagtcgcggcagtggtggcttcccatccccaaaaggcgccctccgactccttgcgccgcactgctcgccgggccagtccggaaacgggtcgtggagctccgcaccactcccgctggttcccgaaggca

SEQ ID NO: 49 - DNA, 1300 bp, Homo sapiens
ggaccaggagggagagtagacgcgggccgcggacggcgcggactgacagctggcgagagggcgccggggctgggggaaagggagggagggggctcatcggagtaactttccagaaaaacagccaacgtgtggcaggagtgattccaagaggggaaaaaaagttcagctaccacgtcgaacgagaggactcgcaaagtatttttcaaaagggctcggcttttcctgtgcctgtttaaaacattaacatcgtgcagcaaaagaggctgcgtgcgctggtccctccctcccccaccccaggccagagacgtcatgggagggaggtataaaatttcagcagagagaaatagagaaagcagtgtgtgtgcatgtgtgtgtgtgtgagagagagagggagaggagcgagagggagagggagagggagagagagaaagggagggaagcagagagtcaagtccaagggaatgagcgagagaggcagagacaggggaagaggcgtgcgagagaaggaataacagctttccggagcaggcgtgccgtgaactggcttctattttattttatttttttctcctttttattttttaaagagaagcaggggacagaagcaatggccgaggcagaagacaagccgaggtgctggtgaccctgggcgtctgagtggatgattggggctgctgcgctcagaggcctgcctccctgccttccaatgcatataaccccacaccccagccaatgaagacgagaggcagcgtgaacaaagtcatttagaaagcccccgaggaagtgtaaacaaaagagaaagcatgaatggagtgcctgagagacaagtgtgtcctgtactgcccccacctttagctgggccagcaactgcccggccctgcttctccccacctactcactggtgatctttttttttttacttttttttcccttttcttttccattctcttttcttattttctttcaaggcaaggcaaggattttgattttgggacccagccatggtccttctgcttcttctttaaaatacccactttctccccatcgccaagcggcgtttggcaatatcagatatccactctatttatttttacctaaggaaaaactccagctcccttcccactcccagctgccttgccacccctcccagccctctgcttgccctccacctggcctgctgggagtcagagcccagcaaaacctgtttagacacatggacaagaatcccagcgctacaaggcacacagtccgcttcttcgtcctcagggttgccagcgcttcctggaagtcctgaagctct

SEQ ID NO: 50 - DNA, 1300 bp, Homo sapiens
tccgaaaattcccatgtagaaactggcttttccagcctgggcaacatggtgaaaccccgactctacaaataaatacaaaaactagacaggtgtggtgtccgcgcctgtggtcctctgcccacgctcgtcccagctactgggaaagctgaggcgggaggatcacctgagcccgggagggtcgaggctgcagtgagccgagattccgccgcggcaccccagcctgggcgacaaagcgagagcctgtccaaaaaaaaaaaaaagaaaaaaaaaaaaaaaaaaaccttttagggcaagttaatcaccaaagtgttagatacttaatttggagaccgcaaatcggtcggcaaaacgatgggcttttcaaaatcatgccgggtgtagctgggtaagcatgaatttgttcaccaagtccccgattcccaagctaagggacccttaagtatgaagcacatggctttcggggaacccaaaagtagggagcgctcccgagccagcggtgggtctggagaatccccgagcgcgcaggccgcgggacagcctccccagtgcgcagcagcctgaggctaacagcccccagagggcagagccccgcgatcccggcgccgcttgcggctggattctttggcagcgggcgcggcgccagtcaggacgacggctccggaagtctcccgggcgcgtgagacccgggccgctctccgtccacgcacgaccctccctccaggcgcgcctcccaccccggccccgcgttccgctcagcccgggtgaccaactacacctcacttcaaaggcccccacgcccgggcgtgccctccgcccgcccgcggcaggtgggggtgcagggcggagggcgcgggcggccccagaaggcgcccggaccttcccgagaattccgggccgcgcaggcgcattgaggccggcgcgggggcgtgcgagaggcgcgcggcggcgattgagggaaggttgcccgggccgggccacgagcagggcctgcgcgcgcccgcaggaaggcgcgggggcggggtgccgcggcaacggcgcatgcgtaggcgcgcggccgcggcggcggctggggagggttcttccggaaggttcgggaggcttctggaaaaagcgccgcgcgctgggcgggcccgtcgctatataaggcaggcgcgggggtggcgcgtcagttgcttcagcgtcccggtgtggctgtgccgttggtcctgtgcggtcacttagccaaggtgacgggtggttgtgggggcctgtggaggtggactggggaccgggactgggggcggctggcgcggggcggagg

SEQ ID NO: 51 - DNA, 1300 bp, Homo sapiens
ggaaggcctgcagatgctgatgagtatctggctgcctggatggcccagctgatccgtaatcagaactccagctctcaagtccccataccccttcttcagtggatccataggggtgtctaagtgacatactcaatacttttcctaaattttagctaagccagagcaaaagtgaagcccctcatgctcagtaattcactgcaatgagccatgtcatctgaggctttgcagtttctcccagaagtggtatcaaagttgcaccaatctggccagaaactcatgctcagatactctgtttaacaagagatcagctgggatgatggatgagaccaggggatttccatagcactaggaagtccccaagaccacgacctcaacttaacttttttatcatcagcagccccacacagcctggcatccagtaggcacccaatactgatgggctttataagaacaccaaaagtgcactctgggccttgatttatactaccagtaggcatggggagacaaggaatgccagtctgtgattccagcaagaggcaagacgaaaatccatttattcagcagctaatacatgtagcagggtgattcattttccaaaaatatgcagtagtatgctgagatttagtgctggagtgactcccagccggcccctaccctgctgaagccccagccgactgtcccagggtgggtcctggccaggactggcaccaaggcagtggaatcctttcaaaataggcctccagcgccatagaccagaaagcaggcgcccaattctgggacactgggagatggtgcaggcagccaccagtacgcaaagcatagagccctatccttcctggcagggtcacggttcagaaaacgtaaccttattttcatctgtagttaacagaagcatgtttcctcagcattcatattaaaaataaaaaactagtaattccagggatctcggttagcctcttaagcatgtcaactattgataatactcttagcaaaactaactccagaaatcacttgctagagaagcagcccttcactgccttagtctgagcacccacggaaagcacgtgtcggagactctggcaaggcccgcgcagccgcagtagagggccagggggcggggcacgcgcacctgccgtagagtgctgaaggtcctgccaacggctctcttggcgtctcaacgttcggatcagcagcttttttccattctctctctccacttcttcagtgagcagccatgagttggactgtgcctgttgtgcgggccagccagagagtgagctcggtgggagcgaatttccta

SEQ ID NO: 52 - DNA, 1300 bp, Homo sapiens
tgcagtggtgtgatcatagctcactgcagcctcaaactcctgggctcaagtgatcctccagcctcagcctcctcagtagcttggacgacagctgcacacaaccatgcccagctaatagagacgggggactcactatgttgcccaggctagtctcgaactcctgggctcaagtgatcctcttgcctgggcctcccaaaattgggattacaggcgtgagccaccgctcctggcccgaaagagtgtttttaaggctttaaaaaaatattgccaacatggtgaaaacccgtttctacaaaaatacaaaaaggatccgggcatgacggcgagtgcctgtaatcccagctactcaggagactgaggcaggagaatcgcttgaacgtgggaggcagaggtggtagttagcggagatcgcgccactacactccaggctgggcaactgagggagacaccgtcttaaaaaaaaaaaagttcccaagtctaaaaaaaaaaaaatcatcaatctgctctcaaaaactgtcgcaacaatttacaatctcatcagcactgagtatccatttccttgcacccttctcagtagtattaccattaaacaaacaaaatttatatgcgtcagtttgttgggctcaaaggagcctctcgacaagtttcctattccccacgctgcctctcctctggacacaggaaggggtccttttccttatttattttgttatttcattttcgtcaacacggctcggcttggggacaggggtcgggggcaggccggttaccgcagaggtggaggccgcgcggcacctggcctggagagctcaccacacagcgacacagacttcttctcagctgggtccacctgcttgcctcggggcgacagagggcgccacggcgtccgcgacggaccccgcccccaggcagtgcgccgcgctcccgtgacgtatttccgcgtcatctgccgccgaggcttgcccccattggttgtctgcgaggcaataggggcggagccgagtgggagtgtggaaagcgccgcatcccgggtgggaggcgaggcttccccttccccgcccctcccccggcctccagtccctcccagggccgcttcgcagagcggctaggagcacggcggcggcggcactttccccggcaggagctggagctgggctctggtgcgcgcgcggctgtgccgcccgagccggagggactggttggttgagagagagagaggaagggaatcccgggctgccgaaccgcacgttcagcccgctccgctcctgcagggcagcctttcggctctctgcgcgcgaag

SEQ ID NO: 53 - DNA, 1300 bp, Homo sapiens
ttgaacatacatcccaaattttctgccctccagaaaatgcttccttggaaggatttaagacagtttgatgtctctgcaaacattatctgcgtttagggaccaacttgcccttctcagcgttcacctgggatgtctttattcttccatttaacctttacaggggaccccgatggtgacgtgtccttcctaggggccattacctctctcagggatcctagtgtctggtagaaaacaacagctccaagttctctgcatccaaacttcgccaggatacgcagataaacctatttaaaaaaaaaaatctttttaaattctcaacttggtggtgtaaataaggcccttgcagcgccctcaagtaataatcaacggcagtcattatggaaggagggtagagatgagcgccttactcaaagccaagacattcacaatttctcgggccggctgcctgtgcctgggcgtgtgcactgtgcactccgaagctgtgtgcggcggtggccttggaggtgcgcgtggccttaggaattcccgcggtcgggcaccctccgcttaacaccgggccgtgtccccggcctgggagccgagcagcgcggctctggcatgctaagtgggcagcactggggcgcctttgttcctcgcggccgtctcccaggaccggcttccctctgaatctaaatgggcttctccctcacccgctccgccctggcctcctggcctgggcacggcgcccctgggtaaagcgcgcccggacacctggggcgtgggcgtgcgggggcagcccgggctaggcgagcgcgggagaggcgcctgcggtcccagcccggccaggcccgagcacctgcgcgagcccgagggagcgcccggccctctgcccccgccagtcgccggcgcccaacttgggggtcccgccgtccgcagccccaagtctcgcggtgctaccgctctgaccggggagccgcgggccgggcgccccccgccgcgcgacaaaggctgaaccgggaggaggaggccgaggagggggaggaggaggagagaaaggcggggacggcgagcggccgcggcggcggggagagcggagggagcgccgcccgcccgcgccgtcctttgtgtggcggcggcggcgcctgggcctgaccgggtccccggggctgagcgccgggctccgcgccgcccctcccgcgcccctgccaagcgggcgcctatcctctccgagcaagatggcaaccccggcggcggtcaaccctccgggtgagtagcggcctgggccccgccgcccgccgcagcccgcaggccttgcccgggg

SEQ ID NO: 54 - DNA, 1400 bp, Homo sapiens
tttcgatggtttccaaattccttatccaggcatttagggtctttcaattgttcccctgcccccagaaatgcattcattttctgtggctttttactagtttaacttttagagggcaatcttatttccaagtttctgagggacactttgttggaaccaacaaacattgcgagtaactattcagatatcaagtagaatgaggattcagtaagaagccgcaggacttggcaaataaaaaggtcattgggggagctcaatgctagcagtttcggtaagcttgtgggagtggaccccctgggagtggacaaatgaatctgaattccttcgttagatatctaggaagtgctggaccctcagagtaaaatataagtaattacagacgagatccctgccctggtgcggcttatctgagaaggaaaggtgacctaaagtcacgacaattgtgtaatgatacagttcatgttgttgaggaactgtacagggctgtgacagcctttaagaggtggctctggcctagtgtagaggtttaggaaggaaaggttctgaggcagagacgtaggactggagatgtgaaggcgtggcagagtggagcaagacttttggcgtgcccaaaagacagcctgtgtggctacagagcggagagcgaggagaacagaactaggcgaggatgggtaagtggaaagagtaaaataaagctcctagaacgaggggaccagagtggacaggaaagggcggggaggggcggttccacttagaaactacaattcccaggaagcactcggcagccacaaacggatgtgaggtgaggcaggagcggcgacctttgaaggaaaaaaggaagtgtttggacgacagcgagcgggagaagcggggtcaagtaggtaggggtgcggtgcgggaggggcaggcgggctccggcgtgcgagggccttggccagcggagcgtttcgcggctccgtgtcgtcataaggcggcggccattttcgcgggcggaggcggcccggcgggccctgggagagctgggacgggcggcggccgggtggcctcggccacccgctaattgcatcttttcccggcgtctcgtctgcagagggagcactatgtctgcggaagtccccgaggcagcctccgcggaggagcagaaggtgagcgcgcggggcgtgagccctgggccctgcccaaggccgggtctggcgggcggcctgctcccgccaggcggagggccgcgcccgagatgcggggccgaggcgcatgaggccgaggctcctgcgccccacctttggcttcccgccgtcgctggctggtgcgccgacgaattgggagttccaacgtgccccgcgtttactccgaatcgtgccttttgtaacacctccgtgggtcgcggtgttcctcagtcacttata

SEQ ID NO: 55 - DNA, 1400 bp, Homo sapiens
agctgcccggtttatctatctcagtacagctttttctctttctctttttctttctttttttttttttttctgttttgttttgagacaagttctcgctagacctgggtatgcacccaggctagagtgcagtggtgtgatcatgactcactgcagcctcaaccttccatgcttaagcagtcattttgcctcagccttttgagtagctggaaccacagacatgtaccatcatgcccggctaatttttaaacttttttacaaaggttgggttttgtccatattgcccaggctggtctcgaactactagcttcaagcaatccgcccacagctcccaaagtgttgggattacaggagtgagccaccgtgcccagtctgtttttcttgattaattcttctgcagtacttgccatgaagtaataaacactccttccctattaaatatagcactttgaaagaaagcagactaaatcaagactgttgttcaaagtgaatagatggaagaattgatagttctgtcaggaaacaggtttttgatatattaaagaataggatgtttgacatgaacagagtttgtcattttaaacatgggggagagttaggcaatgatatacatagatgtgaggattgacaaaaatgatgtttctcttctttaaaaataacaggatgggccaggcatggtgggtcatgcctgtaatcctatgactttgggaggtcgaggcaggattgtttgagcccaggagttcaagaccagcctaggcaatatagcaagaccccatctctattatttaaaataataaaaatattaaaaatttattataaaaaaacaaatatcaggatcatctgtattcaagaaaaatgtactgataagtaggctgctgttaatttctagtaaagaatctaacttcaaatcatacataattttagataaatagaaaaaattctgtatattttaacagtattaggatgattctctaaatataggcaaagaactgaagagttccatagaaggtgactaactataaatgtattatacatgactggaaaagtaatggcaagcaagacttcagagctgagctatcttgatatttttatccagtgtgtggggtgttacacatgcatcacagctataatagagctatcacatggatcttttgaaaaacaagatagagatgttttaaaggcttctgggtttgatttcttagtcagatgctgtggtacttggcatttaacaactagaattcagaatccagatttttaaaggtgaattattttaaataactgagttgtaatagagaagtaatttatttgaaattattttaggaaatggaagataaagtgactagtccagagaaagcagaagaagcaaaattaaaagcaagatatcctcatctgggacaaaagcc

SEQ ID NO: 56 - DNA, 1400 bp, Homo sapiens
taaaaactcccagaggcagggtgcagtggttcaacgcctgtaatcccagcactttaggtggatcacgagatcaagagatcaagaccagcctggccaacatggtgaaaccccgtctctactaaaaatacaaaaattagctgggtgtggcggcgcgtgcctgtaatcccagctacccaggaggctgaggcaggagaatcgcttgaacccgtgaggcagaggttgcagtgagccaagaccatgccactgcatttcagcctgggcgacagagggagactccgtctgaacaaacaaacaaacaaacaactcccggaatgcttggggagactgatttgagtactggaatcccagtactttaggaggccaaggtaggtggatcatttgaggtcaggagttccagaccagcctggccaacatggtgaaaccccgtctctactaaaattagaaaaattagccgggtgtggtggtgggcgcctgtaatcccagcactttgggaagccaaggcaggtgaattatctgaggtcgggagtttaaggccagccttaaactggcgaaaccccgcctctactaaaaatacaaaaattatctgggcatggtggcatgtgcctgtaatcccagctactcgggaggctgaggcaggagaatcgcttgaacccgggaggcggaggttgcagtgagccgagatcacgctattgcactccggcctgggcaacagagcgagactccgtctcaaacaaacaaacaaaggaacgaaaacctccggtctccggcacggcaagctctgcgtgaattactttctccattgcaactcccctgtcttgataaatgggctctgtctaagcagcgggcaaggtgaactcgttgggctgttacaggaccagtgacagaccaagggcatgccactgaaggaatccctagacgcacccttctggatgtgagacaggcggatctcacccacgcctgccagcagctcctcggagaactgtgttcctgggtcagccctggcccagaggagcgccggggacccgcagagtgctgctgaagtcaaggctacaactcacctaggatctggggcgccagccctccggtgggcagggcgttctcctcccccaccccctccccgcacgatgacatcaagtgtttggcgttgagttgctccataaaagctgcccggggaagccaggagagcgaagggcggacgtactcgccacggcacccaggctgcgcgcacgcggtcccggtgtgcagctggagagcgagcggccaccgggagcccccggcacagcccgcgcccgccccgcaggagcccgcgaagatgccccggcgcagcctgcacgcggcggccgtgctcctgctggtgatcttaaaggaacagccttccagcccggccccagtgaacggta

SEQ ID NO: 57 - DNA, 1300 bp, Homo sapiens
ctgtgattcagctgcaggcagcgggtatgcctgagcaggtcacacccatttggtctcttttgccaggaaaataaaaaaagaacctaagagaacggtcttcacattttgaatgcgcaacattgtatctgtgaatgaaggcaagagttaacagctgtttaattgataactgctcgcatcattagttgctggctaacaactgggaaatcagaaaatgtcttgtagaaaaatgtaagaaaagttccaacaatactgacttaaacacgacaaaggtgaaaacagaaatgctgactcctgcataggttatcggccctaatgttctgacttgatatttccagatgcccagctctgcgctaatatcaacaccgtctatttactttctactctgaggcattcgctctgcaggattccagaccctactaaattattcacatggccccaaccggtccttccttgttccgcggtcctaacacaatgaatggtcctaagaggaaaacggcctcgcgctcccgctccaggcccacttcgcagtccctagttctccctactgccgctccagtgccagagcccctccgaaggcggccaggacctccaaccacgcacaagtctgcagctctccccaactttccgttcagctcagtctccgagggtgcgccagagcagacacccggaggagtggggagtggcagggcggggccgggagaatgctgccccggaacccataaatctgggccctgcccaggtaggccgggacagctggggtggcctgggccgagagccaagaaaagacaccccatctggcagcccaacttggcggcaacaggtggcccggcgcccgggggtctgggaggaaagtcgctccgggggcgggccccgttgccccgccgcgtccccattggtcatcaggtttcttaaaatgtgactctgaatctgtgtccttccgccgcagaatttagtcccaccgaaagggcaacctgcccgcgcgttccgccgccgccgccgcgcttcctcctgaaggtgactgcgcccgcggggacgcagggggcggggcccgggtcgcccggagccgggattgggcagagggcggggcggcggagggattgcggcggcccgcagcgggataaccttgaggctgaggcagtggctccttgcacagcagctgcacgcgccgtggctccggatctcttcgtctttgcagcgtagcccgagtcggtcagcgccggaggtgagcggtgcaggaggctacgccatcagtccccaccaagggccagtcgcccggctagtgcggaatcccggcgcgccg

SEQ ID NO: 58 - DNA, 1300 bp, Homo sapiens
ttcacagcctttatggataacatccagagtcctcggttcatctgaggagtccattttcaaggtggccaacagggaagaagagctttcaggcttctctttgctatggctcatgaatgccaggtcccctttattgctttctgaacacactgctgggaaagcttgatgaggtcagtgctcaaatccctgcagctgtcccccttgaggaacttcttggcaaacctgcattgaagaaacactgattgcgttcacgcttcatgtcatggtttgccttccccacactgctcctggcgacagtggtgacgcagcactcggatgttgtcacctattcattattttttcagttctattcccaattcccaacccttcttttgaaacacagctaggtatgtgcacttcaaatgctccagaaaaacccaaggtcacatttcaaataggatggttatggtcaccataaaggtggtgacgtttgagtggtggaagagggtgcgggacggcgttgcaggcagaggaacacagccaggacactattataagtaactctgtgatcgtgtcttgtggtgatacagtataattcaacacaggttagagcagttactatgatcgttctttcctaaaaggctttgattttggagaaagaaccttgaggatcggtggggactttcttggcctgaaaggtatcaccagcagcaggagcaggaggctgctcacatttcgtgtcttcacttggggtggacgttggctgcaaccctcaaatgctgggagtcgtcaaccaactgagccctgttgtccaatgtgccccgggcaaggatgtgggtgcaaatcctgcttccgggcgaccactgacttccttggcttcagtgtccaattagaaaaaaaaaagaaagtagaaattcggtaagaaatccgtgaacgaggtccgtcctccacccccgactcaagccaagagatagcacagaacgttcccacacgcgctgtcccggccccggcgagcgtagccgggatttctcccccgccacgcccctcggccacgcccccctgcgtttggcccagcgacggggcggggtcggcctgcgattggccgggaccacgaccgcgtccgggcgcgccacgtgtgcgtaggagcgcaccggaagcgcccggctggaggcgcggcggcagggctgggcggcggcggcggcggcggtcatggaacgccaagaggagtctctgtccgcgcggccggccctggagaccgaggggctgcgcttcctgcacaccacgggtgagtcgttgcggggcagccgggcgcgcgccgccactt

SEQ ID NO: 59 - DNA, 1300 bp, Homo sapiens
ggggtcattagagaagatcggggacacatgtggggcgggcaggagctgccttataaccagcccgggaacccctagctcactcgctgctgaccaggctctgccggctccttcggcctcgccgcaggtgggccccttgcaggaccgggccggggtggggatggggttggggttgggccaacagggtccagatggggtccaggtgaggaggggagatttggacgataggagcagggggctcagcatctgggaggcagatcagttcggggacggattttcttttggagaaggaagtcaggctcaaggaagacgtttggcaggaactgtgaccccgcatgccagaggccgagcagcggccggtgcatagccgcgcattctggttttctgtggcgcagaggactaccagcctggctgcggcggcccggcggagagcgcgcacgcatgcgcgacccagcccggcctgccagcctggaactcggatggggaggtctcgcctccgcgcgccgctagttccgccgccttctcgcgctccctgcgtgtcctctcgatgccctttcctccgcctcccttacgcctgggccagtgacagggtgtcggctccgcgccgattcagcccgcgggcgaggcaggctaacgcacgactgcgcgatgtggcccctatggtgacacgcgctgcagccgcgaagaccggaagctggggcggccccgggccgcgcgcgctgggcctgggaggcgaaactcagcttccttcgtttccgacttttccatccgcgtcctccacttccccgttccgccctcccccattgccaacattctggctgagtcacggcgccccagagcgcgccaggctgggggaaaggagcagaagggagggccctagcgacccgcgggatgtggtccgagtcacgtccgaggggggtggggagggatcgtgttctcggcgcccgccccttcctagcgcggcctctgggctgcgcctctcgggggcggcccgtagcccagtccgtcgcctgccattggacgccgcccgctcctcgtaaaggaaaaagctcggcggagggcggagtggtgcctttaaaaggccgggcgccgccttccgcctgcccgcctcctgcgccgccccttccgaggctaaatcggctgcgttcctctcggaacgcgccgcagaaggggtcctggtgacgagtcccgcgttctctccttgaatccactcgccagcccgccgccctctgccgccgcaccctgcacacccgcccctctcctgtgccaggtgagcgcccctcttcacgtgcggggaccaggg

SEQ ID NO: 60 - DNA, 1300 bp, Homo sapiens
ttggtctcatgctgaagaagtccataaagcccacaagtcattttcatgatggacagaaaaatgtgtgtgctttctctgtctactgcctcaactgcacagaccccgggactgtagcagaaccatcttttgagcttgacaccgggaggcccaaattctagcacgggacccagggccagttgctctctggtcctcagtctcctcacccataaaatgggaaggagagaaccctgaatcattgcttctagcttctgaactcagttgttcagaacaaggactcactgctgatttttcaacagcacagggaattgcactgttcctgggaatgatggacagtaccctctgttccactgggcaagtgagatttcccaggcctctctgttcccttctccccttagagagcaacagacgtggccccatcccacctccctcaaccctctctctcctccctcaggactgggcacctcgctgcccccgctgctgcccactctgcgactgtgcctgtacgtgccagctccccgactgccagagcctcaactgtctctgcttcgagatcaagctccgatgaggacccagggcccctgccctctggggagcggccagcccccagggcccatgtgccctcctccctgaagagcctttccccacgccactggaaccacagatggcctgccgagcacccaggcctgggaactggaagtggcagcgcagggcctggctccctgcagggcaggactcttggccggctggacggcagctcctctggagggccagaaaagagaggggctagtgctcgggcaggtgccctggcttcccttcccctccacacgtcaacgattctatttgaagttgggcaggggggtggcgctgctcaccacacacaagtgttataggaggagtctggcccttgagtaccgggtacgcaggggtgcctcaaccacactccgtccacggactctccgttattttaggaggtgagtgtagtgccagtatctactctccttcttaaaaaaaaccagggctccagagaatcagaacagccaccatcaccgcagggagtcaagggaggagggagattagagaaggagccagggagggtggcagggaggccacgtgatccgagtcccctcacccctttccttcccacaggtccctggccaaagatttatttctcttgacaaccaagggcctccgtctggatttccaaggaagaatttcctctgaagcaccggtgagtgggcaggggctccctccccatcaatagggccgacccaagtcttcctcccccttcccccatgccggg

SEQ ID NO: 61 - DNA, 1400 bp, Homo sapiens
gaggctgaggctggaggactgcttgagcccaggagttcaagaccagccttaacaacatagcaagaccacatctctaaaaattcagaaaaaaaggctgggcacagtggctcatgccagtaatcctagcactttgggaggccaaggcgggcgggattgcctgaggttaggagttcgagaccagcctggccaacatggtgaaaccccgtctctactaaaaatacaaaaattaggtgtgcgtggtggcagtcgcctgtaatctcagctactcgggaggctgaggcgggagaatcgcttgaacccaggagacataggttgtagtgagccaagatcacaccattgcactccagcctgggagatgagcgaaaatctgtctccaaaaaataaataaatcaattaataaataaatcagtaaaaaagaaccgggcccggcgcggtggctcacgcctataatcccagcactttgggaagctgaggcgggcgcatcacttgaggtcaggagttcgagaccagcctggtcaacattgcgaaaccctgtctctactaaaaatacaaaaattagccgggtgtggtagtgcgcgcctgtaatcccagctactcgggaggctgaggcaggtgaatcacttgaacacgggaggcggaggttgcagtgagccgagatcgcgccactgcactgcagcctgggcgacagagcgagactccgtctcaaaaataaataaataaataaataaataaataaataaataaatataaataaaatataaaaagtagcattgatgtttacaatatccctgagcggcaggcgtttctcccttttgcagatgctcagtggcttggccggagatacatccaagtggtgggtgtagcctgggggttcaatcctcctgtggcgccccagaacccggtgcctcctccaacgtccggcatctgatgaggatccgacccaggcgggcggcggcgggattcgctcttccccttcgctccccgcgagaaagccccgagggccgcggcggcgcagagccggtgacagttgaagcttaggcgggaagagggaggcgcgaggcgggaagagggagtttgggcctcggcagccgccgtacaaacaccgctctggtcaccatggcaacagcgggatgccgcgaacggcttctgggcggggccggtccctcggacgattggacctagcttggcgcggaatccgtgaattgcccgcggcccgagggtgcaggtgatgggtgctgaccgactggggaagcccggagtgtggggactgaggaggggagtggcctggggcgcgctggagcctgcgaggaaggcgccgcctcggatcccccgccccccattccccttcccgaattccaccctccggcccagccatggcctcagtttccccaaacaggaaa

SEQ ID NO: 62 - DNA, 1300 bp, Homo sapiens
aacgtggagagcaaagaacacttaagtgagtagctgccaccatagccaccgggacagtgcgggaggagcagtctcccaggtaaagaccgtgggtagaggggcgcgtggcgggtgagagggaggagtccgcgctgactcacgggtttctggcttaggaaacagtggagctgctgatacctttatgaggaagccgggcaagtttggaggggcagataactaactgggatgggaacacctcgggtattcgtagaagtgtcccgcgggctgtggtctcgcgtgggggactccccaggcccgcacccctgtctggggcacctgcgaggcgccaggcaagttgcctggggcggggagtgcggcctgagcgtccaggcttaagccccgatgcgcgggcccttctccgcccaggccggccctcgccaccccgctctcacaggtgagggtgtctgccctgccgccttgggatgcgaacaggcgtgaggccccctcactccctagtgtcacgaggtagggcgggacccgaatcccggccctgccacttcctgcctcgaccactttggagcagttgctcgccccccgcctcagtttccccatccgcccacctcgtcggcaggacccaagggcggtctgtaacctgcagaggccattccacttccctggccggcggcgaaggctagtggcgcggcctgggctggggtcgccccgaccgttcccgaccgacgccacctaggagggtctggggaaggggacgcgaggagctgggaacacgcagcgccgccccagcgggacgggcgggcccgggctggcgtcgaatccgcgcccgagagcccagcccgcggccaggccgccgctcccggagcccgctggggcccggagccccggccctctacgcctggtcgccatcagaacaaaagctgtggctcagcccggagcccaggcgccccgcaggcctggcccgcgccgggccgccagcttccctacgcttggcggccgcgccttcagcccttcggcccgagcacgctcggctctttccgccacggccggcgcaggtggagggggcggggcgggggccgtgcgtggtgacgccgcgggggggtgacgcaccggcgtgccccgcccccaccccctccccgttcaggctctggaaagagaagaaaaaaaactttcttttttttttaattgaggaatcaacagccgccatcttgtcgcggacccgaccggggcttcgagcgcgatctactcggccccgccggtcccgggccccacaaccgcccgcgcaccccgctccgcccggccggcccgc

SEQ ID NO: 63 - DNA, 1300 bp, Homo sapiens
atgtacttatccccacagccctcggagagctacagtccagcctgggacggcctcccaatgctctgttccagtgtgcggaggctcagggattctcagtggcaccaagatacccagccctcgaggagaacctcaggtgagacacacgcacactgccccagcccctcgaccacctggtacgcacttatcactcgggaactgacctacattttcattaaacttatgttttcaactaagatttctggatatttacctcctacataaagttcccaaaacaaaccagtttcatctttacggcgcgtgcctgctactagtgtccatccggtagggtcttacagtaggctcctcaccccagccccagatcctccaagccactgacctcgcttcgctccctcccgccgtctcctaccttccagcgaagctgccggcggcgggtgcttggctgtcccggcccccgggtggaggctgtccacaggcttctccgactccctgtctgcctgcctggcttcctgggaatgcttctccatcaacttctccttagattttggaactgaataggtggatcccttcttttgctcctcacctgaaatatatggatcatccgttagacccgggacttaccgaatgcagggcagtgggtcccatcgtcttcagtcgcctgcgtggatccagaataagctggcttcaagtctcgagtctccgcgtttccgtaaccgcctcaggcgggaaacgcgccgtccgtggcggactcggcggcaggaacggttcgcaccgggccgagcctggcgcctgcgctcacaccgccccgcccagcccagccccgccctgggcccgcgcccaggggcggagacgcggggagcccagcgcctgcgcctcctttacctttcctgggtttctctttgcttttggaaaggcccatgggtgagcccaccgccccctccgacgcaagcccgggtccccacacctccgcggccgcggagccgggagcgactcacaaaaggtcctcgcgccagcggcgtgcgtcaccatggcgaccgcgcgccgcgcagccgcgccccgcccctctggcgggaccggccaccatcctctcgcgagagcatcccgtgcgaccggaagtggggcggcgaccccggaagtccccgccgggtgcagcttggtcggttcgatcgccgccgggacctgacaccgcccggagttggcgtcccttctccctctccgagtgctgctcctgtcattgtggccatggacggtaagaggtcgcggccgtcctccggggactcgcgcgcggggcggggccgcttct

SEQ ID NO: 64 - DNA, 1300 bp, Homo sapiens
cttctgtagtttctgaggaaatctaaggcacaactgaggaatgaagtcaggctttccaattcccgaaatactcctccactgcttactcatgtcccttggaaattaagaaggaagccaggagaatagctgccataaccagggatgaacttcttgtccactgctgcctgctatgctagcaacagcctcctaactcataatgacttagccatgaggaatgtttctagattctcctttagctgtctgcccatttggaagatgctgaggacagagagaggacccaagcaggcaactagttggaggacttgtacacgtttccttccagcagtatgtcagagaggtggcagcccactggggacagggctgcctgggttctgtgctcgaggggaccttgagcaggctatttaacccttctgtgcctcagttgcctgatctataacatgaaaattagcaatccctactagataaagttggggaatttacagagttaatatttgtaaaggtctgagaatattcctggcagagtaagcactctgtgagtatgacactggcatttcttctgcagcactacatgctgtctatgcctttgtccaagtctgaaaccctagaactcttagaattcagttcaatgtttacacaatcctacagttctgctaggcttctatgatgctactattctgcatttgaatgagcaaatggatttaatgcattgtcagggagccggccaaagcttgagagctccttcctggctgggaggccccttggaatgtggcctgaaggtaagctggcagcgagcctgacatgctttcatctagtttcctcgcttccttccttttctgcagttttcgcttcagagaaagcagaatccttaaaaataaccctcttagttcacatctgtggtcagtctgggcttaatggcaccccatcctccccatttgctcatttggtctcagcagtgaatggaaaaagtgtctcgtcctgaccccctgcttccctttcctacttcctggaaatccacaggatgctgcatttgctcagcagatttaacagcccacttatcactcatggaagatccctcctcctgcttgactccgccctctctccctctgcccgctttcaataagaggcagagacagcagccagaggaaccgagaggctgagactaacccagaaacatccaattctcaaactgaagctcgcactctcgcctccagcatgaaagtctctgccgcccttctgtgcctgctgctcatagcagccaccttcattccccaagggctcgctcagccaggtaaggccccct

SEQ ID NO: 65 - DNA, 1400 bp, Homo sapiens
agaatagctaacacagtactgaaaaagaatagtcagaggactaacattacccaacttcaagatttactattaggaaacagtaatcaagacggtgtggtattggtgaaagaatagacaaatggatcaatggaacagaatagagagccctcaacagatgaatggatacataaaatgtactatatacatacaagggaatattactcagccttaaggatatgtagcatatcatatgctgccacatagatgaaccctgagatccttacgctaaatgacataagccagtcacaaaagaaaaatactatatgatttcactcacatgaggtagttagagcagtcaaaatcagaaacagtaagtagaaatggtggttgccaggggcttgggggaggggaaactggagatcaataggtatagaatttctgtttacagatgaaaagagttattgagactgttgcacaacagtgtgaatgttcttaatgccactaaactatgcacttaaaaatggttaagatggtatgtgcatttttaccacaataaaaataataaatgaataaagaacaaaggaagtaattagctatcaaaccacaacaaggcacggagaaaccttaaatgcatattgcttagtgaaagaagccagtctgaaaaggctgcctactatatgattccaactatgcatatgatacttgggaaaagacaagctcacagagatagtaaaaagatcagtggtagccagagatttgtggagaggaaaaaggatgaatagaagaatacagtgaattcttagagcaggaaaacttctatatgatattgtaatgatggatagatcaggcctgcagggggagtagatgaggtcagtcttttgcaaacctggttccttcttgccacgccccgcccacagccccactgtgtgtgaaccaagagagttggaaggccttctgcagacggacccattccacctgaatctccatgacatattggacttctccatataatttcatttggaaagaaacttgagcatctaaataaaatgtttggaaaccaccatgctacaagaccagcatgtgctgtctagttcttaccctctgcaacagtaagattctggggcattaagacttagttccaggattctgtcattctgccaacgttctgtggctggggttctaaaggagcttgcctggcttagaactgcaagtgactctagtgtgatggagagcaccagcaaagccttagggcccatccctggcctcctgttacccacagaggggtaggcccttggctctcttccactatgacgtcagcttccattcttcctttcttatagacaattttccatttcaaggaaatcagagcccttaatagttcagtgaggtcactttgctgagcacaatcccatacccttcag

SEQ ID NO: 66 - DNA, 1300 bp, Homo sapiens
gctatctgcctgccttgacctcccaaagtgctgggattacaggtgtgaggccctgtacccagctcaatcctgtttttatactagaagaacattctctatctgggtcttccaaacttgattcttactggttaatttgtcctgttcttttgctggtccaagaaaatatcctgaaatctttatttcttctccgtttcctccttgtcctaggacagactagccctatccccttcctgaattaagtccgaatatagtcagtctttgagtgtggaatagctcctagcagtctatcagtcaacgggttctctttgtggtcacattctttgtttattcaggagactacagcatggaaagaaaatggactttggagtcaggtgaatcttgattcaaatcttggcagtgccattcatcagctctgtggcattgagcgcatcagtggaccactctctgatccccaattgccttgtctgtaaaatgagattagacacccctgctcaagattatggtaggattatatataatgtgtgtaacacagcttttccagtgcctggtacaaggtaagtgtccaataagaagttacaaatgttcctgagccaccctactgggtccctcctcacatccaatgctggactcttcatgcccaaggaaacatataaggcacaaaagtcagtggcactcagctcagcagaagaaggcacaggaaggggatgggggagtcctggctcccactttgttcttggggtcaggcttgtggccagcctggaaagactgacatgaaccctccagcatctgagggtgccaaccaccaagagcagcacagttcttgtctacaagccacttgtagcaggtgtgaacatttcatcttttcctctggggtttgcaactctctccccagtctcggtcactgcctttggctgtaccacttcccttttcttctcgcctgcacctccctcatctttcctctatgatgacatcgccctggggaagagaagctgagaggaactcctcactcagctagcttcaggagcatgacgtcatctctaccatggaaattccactcactctcctgtgcccccacatttgtcctaggcctcagagtccctataaagagagattcccaagtcagtatcagcacaggacacagctgggttctgaagcttctgagttctgcagcctcacctctgagaaaacctctttgccaccaataccatgaagctctgcgtgactgtcctgtctctcctcatgctagtagctgccttctgctctccagcgctctcagcaccaagtaagtctacttttgcag

SEQ ID NO: 67 - DNA, 1300 bp, Homo sapiens
tgagccgagatcgcgccactgcactccagcctgggcgacagagcaagactccatctggaaaagaaaaagaaaacgttcaggtctgagccagaggcccaggctgtaattctgtcacttaccatgaccttgggcaaggcacttccttccctggcccagttcacggggttggaatcgactccaaggtcccttccagcattaacgctgcatggttctaagatgagaagatggggcagtttcccctctctcaccccagcccgtgtccacttcaaggtgaatgaccagggaagtcacgtgtcccaatcccgcagttccaaagcccttggggaccctactgtcagggtcgtgcacgaggaggtgaaggtcaggtgagccaatcgcctcgaagggtcttgcctcattcgggacagacatccggtttcctctggctctaccgggattctaggggctttagccgaatgagtcatggggggcgggggggtttctgggggagttcccagctaatcaacttgggacaggacagcctggaactttcgatggtgcctatccaagtgtggggtgggcacagcagccaagacccaatgtccttatctcaggtaggggctcaggaggtctcccagacaggcagcctccggagagtttgggggtaggaatgggagcaaccagcttctttttttctctcttagaatttgggggcttgggggacaggcttgagaatcccaaaggagaggggcaaaggacactgcccccgcaagtctgccagagcagagagggagaccccgactcagctgccacttccccacaggctgctgccgcttccaggcgtctatcagcggctcagcctttgttcagctgttctgttcaaacactctggggccattcaggcctgggtggggcagcgggaggaagggagtttgaggggggcaaggcgacgtcaaaggaggatcagagattccacaatttcacaaaactttcgcaaacagctttttgttccaacccccctgcattgtcttggacaccaaatttgcataaatcctgggaagttattactaagccttagtcgtggccccaggtaatttcctcccaggcctccatggggttatgtataaaggcccccctagagctgggccccaaaacagcccggagcctgcagcccagccccacccagacccatggctggacctgccacccagagccccatgaagctgatgggtgagtgtcttggcccaggatgggagagccgcctgccctggcatgggagggaggctggtgtgacagaggggctggggatccccgttctggg

SEQ ID NO: 68 - DNA, 1300 bp, Homo sapiens
atggacgtgtcctcctgaagaaggggcgaggacacgcaggctgctggccacagtggtggtgactctggaactgtctcagggatgagcatgtgctctccaggcagccgggatgaggtcagaggcaaaggatgaacctggctcatccagggcagggaactacaggaggaaggcttaggtgcagagagggtgggccctggcagaaggccgactgggatgcactctgcacttaaggtggaaatggaggcgcacttaaggtggaaatggaggctcacccaaggtcacgaagctagtgacagggctggattcaatccaggccaatcagaccctggtgcagcacactgcctctaaagaagctacttctcaccaagcccaataggaactcataattgaaatctacttctcagagtaaacctactactgattggcacctaagaaactccaagagaataaagcccatggcgggcgcttacttttaggctctgcagcagctcactgggctgggtgttttacctgtgacatctcgccatgtccccaaaatggccccatgagggatttcactgccaggccctgcctcagtcacagcctcacactctccctggcaccttggagggagtgagtagggctaggggataaggagaggggccaaatcattcatcacagatcattcattcactcaacaaacacctgctaagcacatactaaatgctgggctttgagctgggtatggggggtgtgtataacagtaaggcagattcagtttctgccctgttgcaggaggagaggcacccttccaatcatctggcccaactctcattctagggatgtgaaaactgaggcctggagagggaaagtggcttgcccaaggccatgcagccaggcggtggcgactgaggtgcaccgctcctgtcagccaacaaatatccattgagcgacacctgtgtcccaggtgctgctctgggccctgggagaagtgcatcagtgggcttggtagtagagggtagggatggagtgaagggtaggcaggaagaatgtccccaggctggtaggaggtggggtggggggtttcagtctcaaaactcccatgaaaaccagagagaagtttcagaactccacccaagaggctgggtttctagggcccagagctgccctcccccaccctagaatgggctataaaagtcccttcccagctacgtccagagaagagctggaggaagtgagaggtcggctgggggtcctcaaagtgagaggggagcagaggatcctcccgtgcaggctgtggatgtcactcacttcccagctg

SEQ ID NO: 69 - DNA, 1300 bp, Homo sapiens
gggcttgtccccatgctcctccagacctcaaaggcctggagttagagtggcccactctcctgagcctgtcttgggtctcccttctcccccaagatagcttctggtccagcctctgccctgcaggaagctggatggtgcctgggtaaggaacccctgttcctggccccccatgatcttccctgactcccaccctgtgcctgcaggtactttgtgagttttgtcctgcagttccagttccatgaagccctgtgcaaggaggcaggctatgagggcccactgcaccagtgtgacatctaccggtccaccaaggcaggggccaagctccggtgtgtggtgggaagccgggggaagtgggaggcagagaggagcggctggcaaagggtgtggcaggaggtgtctggctgctctgatggggtggggggcaccaaccacagagctggactgatgtggatgcctgtctcctcgctatgtcatcaaatatttattgagtgggccttctggctggcatggggcgacacaaatgccccctgccaccatcagagagatcccaggccccagggtcttattgccacagtttctgcagtccattggggggcggaagtggccaggggcatgtgggccggggtccaggagcagactccagcctgagtcccctgtgcccatggtacccactctgcccaccaggaaggtgctgcaggctggctcctccaggccctggcaggaggtgctgaaggacatggtcggcttagatgccctggatgcccagccgctgctcaagtacttccagccagtcacccagtggctgcaggagcagaaccagcagaacggcgaggtcctgggctggcccgagtaccagtggcacccgccgttgcctgacaactacccggagggcataggtaaagccctgagtgaggatggtgtggggctaaggtgggtcctcaactctgggcttggcccaggccccaggttcctggtcagctcctaccagctgagccctggtaccctgtcctggagggccaggcagccccccaagctcatcagcagggcctgcgagtggggacaggcatgtctttcccccagcatcctagagagggtgtgctcagacctgagggcccctccccttccagaggaagccagacacaaggctctgtgaggtcacactgcgggctccgctcttattggccaggggacggtagctgcaggactctgctctcctgcggccatgggccagggttgggctactgcaggacttcccagcctcctcttcctgctgctctgctacgggcaccctctgctggtc

SEQ ID NO: 70 - DNA, 1400 bp, Homo sapiens
ccagacaccatcccccactcacccagaagcccaagtgattcccaacagcccccagcagcctaatgggttggggtcttgggagcagctgtccctggctccttccctgatcccaccgcccagcctcaccccacggttcctccattgccccacctcccactgcgccgccgggcctctgccagggtcaaggggcttcccccctctggcagcagacgccatggtgccgaggtggcctccacaaccgccctgtgcgccaataggacaagactgtcctccctcccccacacttgtcactttgagggacacgtggatgagacaggaaaacacaggggagtgtggagacctgaggtgacttggagcaagcctctcaacctgagcggcaatttcttcatctgtaaaatgagggggttgttctcatctctgaggctttgtgtcgctctcaaagcctgctagcctcgggttctaggactctgttgggatcgtgtgtgatgttttctgctgagcgactggcagcctgtgtcctcggggggaaagagggcaggcgctccaaagctcctgcgctctgtggctccccctccctcgcagccccaagccccaggtgtgccggccgccctgagcccctccagcacctcccggaggcgcctgcaagacacctaaggtccccgcctccctcctctcccccccgccacacccctacccccggcaggcgacgtccccgcccctcgaccatggcctggtgaagaagccggccaggcccgatcagccccatccccgccgcacgagcggcgcctgcggacagctcctggggccccggccttgtcactccggaggcgggaggctccggggggtcgggctgggaagatcgagccggaggccgctaggctcccaggccccggccgaggctgcgcggccgcacggtgggcaggctcgggtgttccggcaaactgccgggtccccatcttctaaagagaggaggccctttctccagcttcctctgcgggagcccgacccagccccatcccgccacccccgggctgcacctcggcccctccccggcccgcgcccctgcccggggcgggccaggaacctcggcccgcgccgctggggactctggagcggaggaggaagcgcggcggggcgggggcgggggtgtgtcgggttttataacccgcagggcggccgcggcgcaggagaaggggcagagccgagcaccgcgcaccgcgtcatgggggccgcctcgggccgccgggggccggggctgctgctgccgctgccgctgctgttgctgctgccgccgcagcccgccctggcgttggaccccgggctgcagcccggcaacttttctgctgacgaggccggggcgcagctcttcgcgcagagctacaactccagcgccgaacagg

SEQ ID NO: 71 - DNA, 1300 bp, Homo sapiens
agcggagattagcctcagccaggatggcttcgaagttctcagggatccgacgcagagctaaagaaacccacctgtgcttccctcctcttctgggagtaggcagaagactcccgggaggagaggcgaacagcggacgccaattcttttgaaagcactgtgttccttagcaccgcgggtcgctacgggcctcttgctgtcgcgggatttcggtccaccttccgattgggccgccgcatcccggatcagatttcgcgggcgacccacggaacccgcggagccgggacgtgaaaggttagaaggtttcccgttcccatcaagccctagggctcctcgtggctgctgggagttgtagtctgaacgcttctatcttggcgagaagcgcctacgctccccctaccgagtcccgcggtaattcttaaagcacctgcaccgcccccccgccgcctgcagagggcgcagcaggtcttgcacctcttctgcatctcattctccaggcttcagacctgtctccctcattcaaaaaatatttattatcgagctcttacttgctacccagcactgatataggcactcaggaatacaacaatgaataagatagtagaaaaattctatatcctcataaggcttacgtttccatgtactgaaagcaatgaacaaataaatcttatcagagtgataagggttgtgaaggagattaaataagatggtgtgatataaagtatctgggagaaaacgttagggtgtgatattacggaaagccttcctaaaaaatgacattttaactgatgagaagaaaggatccagctgagagcaaacgcaaaagctttcttccttccacccttcatatttgacacaatgcaggattcctccaaaatgatttccaccaattctgccctcacagctctggcttgcagaattttccaccccaaaatgttagtatctacggcaccaggtcggcgagaatcctgactctgcaccctcctccccaactccatttcctttgcttcctccggcaggcggattacttgcccttacttgtcatggcgactgtccagctttgtgccaggagcctcgcaggggttgatgggattggggttttcccctcccatgtgctcaagactggcgctaaaagttttgagcttctcaaaagtctagagccaccgtccagggagcaggtagctgctgggctccggggacactttgcgttcgggctgggagcgtgctttccacgacggtgacacgcttccctggattgggtaagctcctgactgaacttgatgagtcctctctgagtcacggg

SEQ ID NO: 72 - DNA, 1400 bp, Homo sapiens
gaaaaatgcatatgtatgggaatactgtatttcaggcattataaggaatgaaattataggccgggcatggtggctaacccttgtaatcctagcactttgagaggctgaagtgggcagatcacttgagcttcagagttcgagaccagcatggacaacatggtgaaacccagtctctaccaaaaacacaaaaatattagctgggtgtggtggtgcatgcctgtagtcccagctactcaggaggctgaggtgggaggatcgcttgagcctgggaggcagaagttgcaatgagcagagatcgtgccactccgctccagtcttggtgacagaatgagactccatctcaaaaataaataaataaataaaataaatgaaatgaaattataagaaattaccactttttcatgtaagaagtgatcatttccattataagggaaggaatttaatcctacctgccattccaccaaagcttacctagtgctaaaggatgaggtgttagtaagaccaacatctcagaggcctctctgtgccaatagccttccttcctttcccttccaaaaacctcaagtgactagttcagaggcctgtctggaataatggcatcatctaatatcactggccttctggaacctgggcattttccagtgtgttccatactgtcaatattcccccagcttcctggactcctgtcacaagctggaaaagtgagaggatggacagggattaaccagagagctccctgctgaggaaaaaatctcccagatgctgaaagtgaggccatgtggcttggccaaataaaacctggctccgtggtgcctctatcttagcagccaccctgctgatgaactgccaccttggacttgggaccagaaagaggtgggttgggtgaagaggcaccacacagagtgatgtaacagcaagatcaggtcacccacaggccctggcagtcacagtcataaattagctaactgtacacaagctggggacactccctttggaaaccaaaaaaaaaaaaaaaaaaaagagacctttatgcaaaaacaactctctggatggcatggggtgagtataaatacttcttggctgccagtgtgttcataactttgtagcgagtcgaaaactgaggctccggccgcagagaactcagcctcattcctgctttaaaatctctcggccacctttgatgaggggactgggcagttctagacagtcccgaagttctcaaggcacaggtctcttcctggtttgactgtccttaccccggggaggcagtgcagccagctgcaaggtgagttgccttcatttctggggaagcggctgttttgagagggttttgtttcttcctctttgagaaggctcagaaaattgtgggaattttctgcctacagagagaaggtgttgga

SEQ ID NO: 73 - DNA, 1300 bp, Homo sapiens
gacaaggagttagaaaaactagatgacattgttcagcatatttataaggtataggcaggagggaggtgatatcactaatgaacctggtacaaggcctggccccaggaggtactaatgagcacagatctggttcccagcctgtgctgagagctgggcctgaatcactattgcaggcttctctgtggtgtctgttttctcccctctaattcagcggctgcctcctggggctgggagccctgggccttaagtctgtggtcctgagctgcgttttctgcctctcttcccagaccctgctctctattccagaggtggtgaggggatgcaaagaactacagggattgctggaatttctgagctaagaaactgaaagccagaatctgcttcacctctttttacctgcaatacccccttaccccaataccaagaccaactggcatagagccaactgagataaatgctatttaaataaagtgtatttaatgaatttctccaagcttacggaatcttactttttgggtgagagggggcggatgatgaagtcagggaagaagcagcttgggcctcctgcctgggcaccctccatagatccctctccacctcctgctgcatccaaagccaaggctgcctgcccttcctcccttcctctgctttcaccaaaactctgggcactggactgcttgttccctggctcaccgcctggaggaaacagaaaggcttcattctcttactttccccagccccctcgggggtataccctggcaaatatgggggtgaggacagagaagctcagttcattacttcctgccctgaacttgggcaccttgaagatgcttctgccccacctactcaacctgttgttactgttctggtgcctcctcttcaccagactaagcttaatccccagcatccagcaagtgcccggcacgtggtaaagggattgtggcagaaatgaacgcaaggtcatggccaggctccccgaggtgggagggcagtccctaacagccacggatgcctggcggggcgctcactccacctcgccgccccgcctctgagggcgtggtcttgccccggacaccagtcctggggagggggtgtggtcagggcggggcatgcaggccacgcccccggaggagtcacgtagctctgcgacatccgcagcctcatttaccagagggagccagggctgcagcctcatctgtttgcggatcagaacccgagctgtgcttgtggctgcggctgctaactggctgcgcacaggtaaggccaggcaaggcgggagccactcaacatctccgcttca

SEQ ID NO: 74 - DNA, 1300 bp, Homo sapiens
aagtctaactaagtaaaatgagaaaaattcagaaaaagaaaaaaataagaaaataaatcacccagggacctatcacacaaatataagaactattcattctttaaggcatgtatttccaagcctttgtatttttttccatgcttagggttggcaaggaatatatatatatttgtacaaatatatatgtgtatatgtacaaatacatgtatatatagtacaaatatatatatatatatttgtacaattcttcagactttgtagaatttgtataatgtcgtatcttgctttttttaaccactgatgttataagcatatttatgccacttcattcattttagagacttaataataaatgatctagtggataatttatcattccctgatggagaaaaatttagctttgtttattttagagttataaacgatgctgggtcaggtatctttatgtttgaagatggctccatatttgggttgtttccacagaactctttcctagaaatgctttttctaggttaatggctacagatatttctaggcacctgacatattgacacccacctctaaagtatttttatgatccacaactagcgtttaacacagcgccctagtcactacatgactaataaatagacaaatgactgaaacatgacctcatgctttctattcctccagctttcattcagttctttgcctctgggaggaggaagggttgtgcagccctccacagcatcagcccatcaaccctatccctgtggttatagcagctgaggaagcagaattgcagctctgtgggaaggaatggggctggagagttcatgcacagaccagttcttatgagaagggactgactaagaatagccttgggttgacatatacccctcttcacactcacaggagaaaccatttccctatgaaactataacaagtcatgagttgagagctgagagttagagaatagctcaaagatgctattcttggatatcctgagcccctgtggtcaccagggaccctgagttgtgcaacttagcatgacagcatcactacgcttaaaaatttccctcctcacccccagattccatttccccatccgccagggctgcctataaagaggagagctggtttcagacttcagaaggacacgggcagcagacagtggtcagtcctttcttggctctgctgacactcgagcccacattccgtcacctgctcagaatcatgcaggtctccactgctgcccttgctgtcctcctctgcaccatggctctctgcaaccagttctctgcatcacgtgagtctgagt

SEQ ID NO: 75 - DNA, 1300 bp, Homo sapiens
cactaaaccagtgtaaaaggtgttagggacagagggaaaacattgacttaaactgtcgtaaagcccttgataaaccccttccctggagcgctgagttctgcatggcctgggccacggactaggtgttcaggtggacacgggcggggatgcgcgtgcgtgtgtagtgcgcggacacctaggaagctacttgaaagtaaacaccacgctcggggcgtccctagacattgcttaaaacgtgcagagtcacctgtcttcacagcagggcagcgctgaggtcccactgctgggggcggtggggggcggcattggcctgggtcttcccccggcggccgagcgccggtaacacaacgtgtgtgtgtgtaggcgcgtgtacacactctcatacacggctagaaagggtccaggcgacacacacactcccacatacacggctagaaaaggtccaggcgagacacacacacacacacacacacacacacacactccacacacactcacacggccagaaagggtccaggcggttcccggcgcttttccagcccttgttttcatggcgcaccctcccgccagccgcccccctccgcactccgtcgtccgcccggcccggccgcgtgcggttccccgggagcccccaccccgtcgcggaccccagcgaccaccaagtccgcacgcggcctgccgcaggcctgagcagaaggccccgcgcacacccaccgcgccgcggccgcgcgggaggcctgtgccgcccgcgccacccactggccgggccccgcgggcgcagcggagcgggcgggtggccggcccggacgcgccctccccggccgcggccccgcgcgccatgtgcccccggcgggacgcgccactcccgggcctgccgcggcgcctttaacccgggccagggagcggggcggagggggcggtcgggtggctcagaggagggctctttctttcttctttttttgaatgaaccgtgtgacgttacgcacaggaaaccggtcgggctgtgcagagaatgaagtaagaggacaggcaccacagccccgctcccgcccccttcctcccgcgcccgcccctccgcgccgcctgcccgcccgcccgccgcgctcccgcccgccgctctccgtggccccgccgcgctgccgccgccgccgctgccagcgaaggtgccggggctccgggccctccctgccggcggccgtcagcgctcggagcgggctgcgcggcgggagctccgggaggcggccgtagccagcgccgccgcgcaggaccaggaggaggagaaagggtgcgcagcccggag

SEQ ID NO: 76 - DNA, 1300 bp, Homo sapiens
ctcaagtgagcctcccacctcaggctcccaagtagctgcgaccacagtcatgggcgaccgccctggttcctcccttccttgtgtctcctctttctgttctctaagttcctgctttattataggcaaagctcaggacattaaagaccctggcggtagagggtaggctatgggggtgaggccctgatccaagtcctgccgctaaggcactcataatttcgggctcaggggagaaatggaagtcaaagaatctcataaacacagctgcgatgacgaaccctttcacgggaaggaacatgcgagcccagaaaagtctctcctggtcttgggatggaggtcacacgaagcctccgcaaggcaaggacttttggtgagttccgggctccgctgaactcagctctttttcttttccttcctttctttccttcttcctttctttccctccttccttccttcctctttctctctttcctttctctctctcttttctctctctctctccttcttccctccctccctacctctctctcttttctttttccgtccttccttccttctttccttctttctctctcttttctttcttttcttttcttttctcttctttcattttgagacgtactctggctctgtcgcccaggctggagcgcaatggcgccatctcggcgcactgcaacctccacctcccgggttcaagcgattctactgcctcagcctcccgagtagctgggactacaggcgcgcactaccaagcccggctaatttttttttgtatttttagtagagactgggtttcacgatgttggccgggctggtctggaagtcttgacctcaagcgtgcgccctctccgccactgggtaaggcgggggcggaatagggggcttgcaatttcacactagaggcgggcaccgtgggggaaagaagagtcacgtctcccacggttcgtagaggaaggcctgcctgagcctggagcgggggcgggagagccacagtttggcatccccagggcatcccccagcccgcagactaccaggcctccagaggacaggaccccacccccggccacaggccctgcccccagcactccccgcaccccgcctccaagactcctccgcccactccgcacccaacttataaaaaccgtcctcgggcgcggcggggagaagccgagctgagcggatcctcacacgactgtgatccgattctttccagcggcttctgcaaccaagcgggtcttacccccggtcctccgcgtctccagtcctcgcacctggaaccccaacgtccccgagagtccccgaa

SEQ ID NO: 77 - DNA, 1300 bp, Homo sapiens
taaaataaataagcggcggggcgcggtggctcacgcctgtaatcccagcactttggaaggccaaggcgggcggatctcctgaggtcgggagttccaaaccaccctgaccaacatggagaaaccccgtctctactaaaaatacaaaattagccgggcgtggtggcgcatgcctgtaatcccagctgctcgggaggctgaggcaggagaatcgcttgaactcgggaggtggaggttgcggcgagccgagatagcgccattgcactccagcctgggcaacaagagcgaaactccgtctcaaaaaataataacaaaataagcaatcgtcgcgtcctttctatcctggtcttagcttgcgctctgccataaaactccctctagccgaacccggcccagccctagagcaatccgttacttccggggcgctcagccggcatgcaaacactcttggctacagccccatctccgagtgcgttcggctatttccggaaaccgtcggcatctaggctcaagtccgctaaattctagtgcccgtaggggtcgagatcgttggctgtttccggacgctctgggttgccatggaaactccttcaaccctggctttctccgacttctgctttttgcggcaggccctttccccactctactgccccctgtttgctgagcttgagaacgcctcatttgtcccctggaaccatctatgcttcagtaattcccataagctggcggtcgcctctgggtctaaactcccaaggcctccattgggcactgagcacattcggttatttccagaaacgctccgcggtcttggggatcagcctcagttgtgccagtgcggccgtagagagtgttcggccatttccgaaagcgctcgggcgtctctaagcccagccgagcccagtctcggatccctcgccgacccgattgcactcggctacctctggaaacgctcggctgtctcgggggcaccctctagtccaccagtcccgcgggattacgttcggctacttccggaaacactcgggtgcccccttacctcaggctccgcctcggcctcggttcatccgcccggctcgaatgcgctcgggcatttccgccgggggcgggccaggccgctcggaaccgtggcggcggcggaggcggggatcccgcggctgcggcgacggtggccgcggtggagccacggggcgggcttggcttggtgtgacggcggctgcggcggcggtggcggccgcgaccaggtgagtcctgactggccctcgtggcgggggcggctgggagtgtgcttaaatgcggggcgccc

SEQ ID NO: 78 - DNA, 1300 bp, Homo sapiens
tgcagtgaactatgatcatgccacagcacttcagcctgggcaaaagggtaagaccccatctcaaaaacaaaactaaactagaaacacccttgtgtggccatgaaccctgtgtgtgccctgaggactgcgggcttttgtgcaatcctcacgcatgtgtggataccagtatgcatgcccttgtgctcacgcgaaccgccctacgccctcaggtggcctgcaggggactggtgcagccccgaggacactcccagttgctcgtcgccctcccatctccacgtcggccttcaccgacccggcgggagccttgagtcccagctctccagagcaatggtggagcgggcagggcattcaaaatgaccttatctccttagtctcctaaagtgttcccagctggccatgcaaatgtcttctctgtgtagcgttccgtggatttttttttgtttcattttttaattttgtgtaaagataaggtctcactccgttgcccagactttccctggttctttattctgattcccacaatcgtcccgagggggcaggccggagcgggtcttgaaaatacacatttgcacatcccttctagtccgcgttcccttttctcaagggcaacccgcacttttttgcctccgttataaaagatacttatgtaaattactgacgtgcgaatttacatacatttctcaactaactgcgtagccatttctccgtctctcacctccgttcctggacggcgagaaggaggaggagctgaccatgtaaatgaagtcacgcgcaccgcgctgccgaactcggtgccccgcgctgggcggggggcgggtaggcctgtccatgtaaatcacatcatttgcgtgccccgccccgccgacgccacttgattccaacatgcaagaaacgccccctcccagacccggcccctcacactgcgttccccctcccgcgcaaagggggcggggcggaggatgcaaatgaacctcgtgtaggccacggaccgctgtttcctttctccttggtaggggggttgtcccgaacttcctcgccccgctccgccccgccccgcgcggctcgggcctgcgcaggcgccgtcccctccgcggggcgcggtcacgtgcccaccgggcgaggcggggcggggcgtcgcgcgcggtgggggcggggtatggcgcgctgtgcggcgcagggcggctggcacaaacggcggcgccggggccggaggaaaaagctcggtgaggaggtcgcggggcgagaagggagcgggaggagactaagccggagccggggcgccggcgcgaaccgggcgggg

SEQ ID NO: 79 - DNA, 1300 bp, Homo sapiens
ctggagctggtgaaggcagagcagtggccaagccctattcaaattaaatagatgaagaggacagagaagtggtttcccaaaagaaaacagagtggggaactggcgtgagccggggagccgtgtggattcctggaggaagagtgtgctaagctgtgggaacagcaagtgcaaaggccctaaggtgagcaacttgcctggcaagttcaaggttcaacaaggccacttctgctgtagtatcctcttccctgccaaccaaatccagaatagtggtccaacacacacacacacacacacacacacacacactctgttccttatccaactgtaatgctttcacccttgcttggtacctttgtacttctcccttcatagtcgactagttaaaaaaaaatacatttctcggctcttttttgaagtaggtgtgattgagttaaaacatatttacttgacataagcttaattattcatcaatgggaacctgaaaagggagtcagagaggccaagaggttagggtggagtagagggggtagggaaggtaagctggggtgcagagggtgcagactggaggaatgggggcgaagtggggtatgggactggggtggcagggaggggctggggagagagagagaagggtaggtgccagagggccaaggattgtggaactggggtggggttgggagttggggggtggggaggagatgtggggtactctgtgaataccttagaagggatagagaaggcagggctaggggtttggaaggggtgggattggaggtcagaggggctcaactggggttaggaaatggaaaggtgagaagaggtgggggttagaggctggggactggggtccagagagcagagtgaactgagtgggttcagaagagtactggcgttggcacttcagaggctggactagagaaggcgcgttcagccgacggtgcgggatacactgccgaggaagtccgcggcgaggggcgtggttggggggtgtgtattacacggtatcccccccttgcctttccaagtctttccctctggttccgcctccttttcaggagtgacataccgttgcccaatcagagcctcaggcctggcgtggcacagccaaccgcgcggcgtggggaggagctggggagggggctcgcaaggccggggagggggctaggggcctccgagggctccggagcggcgactggcgagccatggcgctggggctgcagcgcgcaaggtactgaagttcgggggcaggagttctgggaattggggggctctcctcctggagacccctgagctggattgt

SEQ ID NO: 80 - DNA, 1300 bp, Homo sapiens
aagaatgaatgccttgggtctagggttgtgctgggcgctttcttaagttttctttcccgggtacctccccagaactggcatgcaggtattattaaacccattacacaagtgaaactggcccagagacagaaaagtccctggtccaagaccacacaggagtgaggggtggaggaaccctcctcccattgagttctggctttcctatactgaaagccccttcctctcctgcagtaaggtaggtggaaccgctgtcccgccttgttggtgaatgtcgttgctagacttcagacacatacaggctggtctgctgaaaatcagagatgtccacctgcgccctattcgaggtctccggcgtcttctttggcgtcgtctttgccctttcagaagcgtctgcacatttttccaggtgtcatttctccaacttgaacacagggagcgcactgggcacgcgggcacgtggctgtccccaggggcctggcttgggtctcgcccctgggccggggcgcactcgcgggcgggacatctgggggcgcccacgcgctctgggacgagtgtcgctggccaggcccggactgaggaaaggcgagtgagacactactcgcctggggtgcaaaatttaagggagtgaaaaaaaaaaaaaaagaaagaaaccaaaaccacctcgagtcaccaaaataaacattttaatgcagtattttttaaaaaatcaacaggaatcctccaaagcccactatgaacaaaatagcaaaatggtagagaaaggatctgtgccgctgcgtcgggcctgtggggcgcctccgggggtctgaaactggaggagactcggggctgtagggcgcgcggatctggggcgcgccctcggtcccggcgcgcccagggcctcccgcgcggggcccggcacagggaggcggggaggcgggcggggcggggcggggccgggcggcacctccctcccctgcaagctttccctccctctcctgggcctctcccgggcgcagagtcccttcctaggccagatccgcgccgccttttcccgcggcccgcacggggcccagctgacgggccgcgttgtttacgggcccgagcagccctctctcccgccgcccgcccgccacccgccagcccaggtgcccgcccgccagtcagctagtccgtcggtccgcgcgtccctctgtcccggagcccgcagatcgcgacccagagcgcgcggggccgagagccgagagacagtcccgggcgcagcgcggagctccgggccccgagatcctgggacggggcccgggccgcagcggccgggggg

SEQ ID NO: 81 - DNA, 1300 bp, Homo sapiens
acaaaaactaaaaattagccgggtgtggtggcgcctgtctgtggtcccagctactcaggaggctgaggtgggaggatcgcttgaggccaggagctcaaggctgcagtgagccgcgattgcgccactgcactccagcctgggcgtgcagatcagagcgagaccttgtctctaaaggaaaaaaaaaaagaaagaaagaaagaaaagaaaagaaaagaaaacctagcgaggtagataattttccctagatcctgcggccgccggaccacgaggccggcgctgtgcgttgttaaaaggagaatagcagatggtggcgcgcagccccgcgaggagacatccagcaacgaaatcgggagatggaagggacagtgagaaggggggcctggctgtgcgcccccgcccgatgccccactcctcgccgacgggcgccgggcacctgcgggaagggcgggagaatcgccgctcctttcccgccgcgccctttccgccctctccccgcctccttttcgggcgtcccgaggccgctccccaaccgacaaccaagaccccgcaggccacgcagccctggagccgaggccccccgacggcggaggcgcccgcgggtcccctacagccaaggtaaggcaggaatctcctggactgggtcgcggtcccccggcttcccggaagcgcagtgcgcgggtggcatcactgtgcccggagcccctgcgcgccccggccatccccaccccgagggaccccctacggaggcgacctgggggctgaggtgagcgcttgggcagcagcgacggggaggggtgtccaccccacccctggtgcgggccggggcgcgcaggcctggaactcggggttcagactccccgcgactcggaccacgcggctaagcgcgctcagggtcgcgtgcccccgccccgccgccatgctgggcgccgtggtggccgcgcagctgggcgacagcaggcgtgggcgggggtggggagcggcccctcagcggtccctaccgcctgaggccagggcccggggacttttattgtgacacggcgggcgcccggctctgcttagtcatggtgacctgcgcgcgctccgcgcctcccccacgcgcagcgatggaggcgccggggctcgggcggtggaggcggagccggagcgcggccatggcggggtgagtgaggcgggatgtgcccgggctgcgggcatcgcgggccgcgagcgcccctgcggccgtgcccggagaccaggaaaacgggcgccacggcccagggcgcctccgagttccccgccaggactcggagggccaggaggg

SEQ ID NO: 82 - DNA, 1300 bp, Homo sapiens
ctggtaggtaggtgctattatattattactttttatagagaggaaactgaaccatagagaactaagtaagcgcccacgggcactgagctggtaagaggcagatccagggtttgaaccccccaaagacgggtgccacacgcctcttgataggaagtaaatcaaaaataaagacaaggaaggccgggcgcggtggctcacgcctgtaatcccaacactttgggaggccgaggcgggcggatcatgaggtcaggggtttgagaccatcctggccaacatggtgaaaccccatctgtactaaaaatacaaaaaattagctgggtatgatggcgggcgcctgtaatcccagctactcgggaggctgaggcagaattttttgaacccgggaggcggaggttgcagtgagccaagatcgagctactgcactccagcccaggtgacagtgagagactctgtctcaattaaaaaaaaaaaaaaaaaaaaaagacaaggaaaacctgaggcctgggcacagcgcctcacacctataatcccagaactttgggaggccaatggagtcaggatctcttaaacccaggtgttcaagaccagcctgggcaacattgcgagaccccatctctacagaaaaacaaacaaacaaacaaaaactaaaaattagccgggtgtggtggcgcctgtctgtggtcccagctactcaggaggctgaggtgggaggatcgcttgaggccaggagctcaaggctgcagtgagccgcgattgcgccactgcactccagcctgggcgtgcagatcagagcgagaccttgtctctaaaggaaaaaaaaaaagaaagaaagaaagaaaagaaaagaaaagaaaacctagcgaggtagataattttccctagatcctgcggccgccggaccacgaggccggcgctgtgcgttgttaaaaggagaatagcagatggtggcgcgcagccccgcgaggagacatccagcaacgaaatcgggagatggaagggacagtgagaaggggggcctggctgtgcgcccccgcccgatgccccactcctcgccgacgggcgccgggcacctgcgggaagggcgggagaatcgccgctcctttcccgccgcgccctttccgccctctccccgcctccttttcgggcgtcccgaggccgctccccaaccgacaaccaagaccccgcaggccacgcagccctggagccgaggccccccgacggcggaggcgcccgcgggtcccctacagccaaggtaaggcaggaatctcctggactgggtcgcggtcccccggcttcccgg

SEQ ID NO: 83 - DNA, 1400 bp, Homo sapiens
accacagaaacacgccaacatgtctggctaatttttttttttttttttttgaggagtcttgcactgttgccccctggagtgcagtggtacgatctcggctgactgcaacctccgcctccagggttcaagcgattctcctgcctcagcctcccgagtagctgaaatcaggcgtgcgccaccacgcccagctaatttttagtatttttagtagagacggggtttcaccatgttggccaggctggtctcgaacacctgacctcgtgatccgcccgcctcggcctcccaaagtgctgggattacaggcgtgagccaccgctacctgggtaatttttaaattttttgaagagaggctggtctccaacttctatccaaattaattctccctcctaggcctcccaaaatactgggattacagtcgagagccaccgcgtccggcgggaaaacccctttagcatcccctctcccagtccatagaaagtgccagggctcgcccctccccgcacaacggctccgattataaagtggttagacacaagaatttacttaaggccgggcgcggtggctcacgcctgtaatcccagcactttgggaggccgaggcgggcggatcacgaggtcaggagatcgagaccatcctggctaacacggtgaaaccccgtctctactaaaaatacaaaaaattagccgggcgaggtggcgggcgcctgtagtcccagctactcgggaggctgaggcaggagaatggcgtgaaccccagggggcggagcctgcagtgagccgagattgcgccactgcactccagcctgggcgacagcgagactccgtctcaaaaaaaaaaaaaaaaaaaaaaagaatttacttaagttgcagggaaaagacgtgaatgcgcttgtgtaacagggtggagcacctccgtctcaaaaggatcttgaggacctcccaccccaaaaagggccagggcgaggatgggaggtgggaccaccctcggatgcacaaggctgggccaggctgacccctagcggcagggcgggcgcccgaacggtgcccggatccaagatggcggggctggaggcaagagcgggcgtagggaggagattacgttccgaggcggagcctgggcttgggggcggggcggggcctgcgcctaggggggcggggcggggcggcgctctaggccgagcgggaggtcggggctgcgggcgctcgctggtggcggacccggaggctgctgcggcgccggggctccgtggcctggattgaatccgatcgggagccatgagcgtggacaaagctgagctatgcgggtctctgctcacctgggtaggtcgtggggcggggctaggggaaggtgagcgcccgctcctcttgcccgggatccctggccctggttcggtcagtctc

SEQ ID NO: 84 - DNA, 1300 bp, Homo sapiens
agagctgaccccagctaaggcatggcaccgcttctgtcctttctaggacctcggggtccctctgggcccagtttccctatctgtaaattggggacagtaaatgtatggggtcgcagggtgttgagtgacaggaggctgcttagccacatgggaggtgctcagtaaaggagagcaattcttacaggtgtctgcctcctgacccttccatccttcaggtgtcctgttgccccctcctcccactgacaccctccggaggcccccatgttgacagaccctcttctcctaccttgtttcccagcctgactctccttccgttctgggtccccctcctctggtcggctcccctgtgtctcatcccccggattaagccttctccgcctggtcctctttctctggtgacccacaccgcccgcaaagccacagcgcatctggatcacccgctttggtggcgcttggccgccaggaggcagcaccctgtttgcggggcggagccggggtgcccgccccctttcccccagggctgaagggacccccctcggagcccgcccacgcgagatgaggacggtggcccagcccccccatgccctccccctgggggccgcccccgctcccgccccgtgcgcttcctgggtggggccgggggcggcttcaaaaccccctgccgacccagccggtccccgccgccgccgcccttcgcgccctgggccatctccctcccacctccctccgcggagcagccagacagcgagggccccggccgggggcaggggggacgccccgtccggggcacccccccggctctgagccgcccgcggggccggcctcggcccggagcggaggaaggagtcgccgaggagcagcctgaggccccagagtctgagacgagccgccgccgcccccgccactgcggggaggagggggaggaggagcgggaggagggacgagctggtcgggagaagaggaaaaaaacttttgagacttttccgttgccgctgggagccggaggcgcggggacctcttggcgcgacgctgccccgcgaggaggcaggacttggggaccccagaccgcctccctttgccgccggggacgcttgctccctccctgccccctacacggcgtccctcaggcgcccccattccggaccagccctcgggagtcgccgacccggcctcccgcaaagacttttccccagacctcgggcgcaccccctgcacgccgccttcatccccggcctgtctcctgagcccccgcgcatcctagaccctttctcctccaggagacggatctctctccgacctg

SEQ ID NO: 85 - DNA, 1300 bp, Homo sapiens
tcgagaccagcctggccaacatggtaagaccccgtctctactaaaaatacaaaattagccgggtgtggtggcgcacacctgtaatcccagctacttgggaggctgaggcaggagaatcgcttgaacccgggaggtggaggttgcagtgagctgagattgtgccattgatcgcgccattgcactccagcctgggtgacagagtgagactcagtaccaaaaaacaaacaaacaaaaaacaaacaaaaaatgagaaaggcttttactctctgcccccattgctgagtccccaacatctcagcgtctctgtctttctaatatctctgtctccccttttctgtccctggggcctctccgtccctgtcactctgccccgtgtctctgtttgcctggtgcctttcttcagctgcggcatcctctgtctcagagtcttggtgtctctgttcctttcccctcggggtctccctgggtctccccaagtccctcctgctgtcttcctcccgctctctgatctctgactcccagaacctctccctctgtctccagggctgcccctctgatcctctttgcttctctggtgtgtctctctggctgcctccatctctgtggatctccatctccctgtctctgtctcagtctgtccttcactctgtgtgtgtgtgtgtctctctctctctccttcccttccactccctcttcctcctgcctccacctctccaggcccctgtcttgtccctccgtccggcctttctctgcctttccgtcctcctgcctccccatctctctctgctagtcctggtccagccggacccccacccacagtcgggccccagcgcttgagcctgagtgtctgctccggcccgtggaggtggagggaggggacgccaatgacctcaccagcccctctccgaccacccccccctttcccttttcaacttttccaacttttccttccgtgccctcctccgagcgcggcggcgtgagccctgcaaggcagccgctccgtctgaatggaaaaggcaggcagggagggtgagtcaggatgtgtcaggccgccctcccctgccgcctgccccccgcccgcccgccccagccccctatataaccccccaggcgtccacactccctcactgccgcggccctgctgctcagggcacatgcctcccctccccaggccgcggcccagctgaccctcggggctcccccggcagcggacagggaagggttaaaggcccccggctccctgccccctgccctggggaacccctggccctgtggggacatgaactgtaagttggttcat

SEQ ID NO: 86 - DNA, 1300 bp, Homo sapiens
cctcgctttccaacttcaagttacacctgtgaaactcatgggtccttccacagccttcaaaaactaagggcgtcccctgtcctctccccagatgtcccttccccatcgccggtagcgagtgggagacagctcagcgcggggcaggggagcactgggcccggagatggaaggcagcgtcaaaagcgccgctggaaaatccctgagcgctaaccgttgcctgtgtgagcccttaaatctacaaatttccaacacctgtagcctttgggtttcccaggacttccatcgaccctggcggcagagagggcaggcctgagatgcagtgacttgagggcacatggccaactcttgtcactccaagatcacactggggaaccagactgacttctccaattctgaactcgccccggcctcgggcggctcaaagggcctcctctgccgcatccccgccaaaaccaaaccgcctggcacaagccggtaagcaaccaccctgctgggagagggaaggaagagtaggcgcagccctagatcaatttccttgcactgcttctcccagacggtcaagtcagctgcgtcccaccgaaaagggcgcatcgcccacgcccgaaacgcagccgctgggggccgagaaattatccccacctggcccgagggccagggacgcaggagcgcagcagcgtggaggggctccgcgctggcccggcgctgcccgcggtcctgccctcgttccaagggcacggcgccggtacgaggacaccgacgctgtggcgcaactgccgtcccccgcagcaatcccggagcccggctcccggccgcccctcggccctgcgcaggctgcctctccccgacgcggagtcccaccccgctacccgccgcccagacgacctcataaacaagtcctcgaagtgcggaggcaggaggcggggcgcagcgcgggggcaggaggcgggccagggtcagggcagaggctgcggccgcgcgtccccattggccgggacgcagtgagccgcccggagctcggcgcgggcggggcctgccggcgcgtgcccgcccacacacccgcgccggtgcccgccccccgccctccgcgcccgccccgtgcccgccccaagccggccgacggagtttttaaagtgggctgccggccgcgggagctttacactcgcgagcggaccgccacacgggtccggtgcccgctgcgcttccgccccagcgctcctgaggcggccgtacaatcctcggcagtgtcctgagactgtatggtcagctcagcccggcctccgactccttccgactcccagca

SEQ ID NO: 87 - DNA, 1300 bp, Homo sapiens
tgtgtgtgtgctgcgagtgtcccccctgccactccctggtctgcctcctcggcaagagaatagcacagaggcaagaagaaaggactgctgagggtggtgaccagaaactggattttcagactgttgaatcttgaggcagtctgtgtttgcatctgtatgtatgtgtgtgttctgcatgttctgtgtatgtgagcataggtgccaggtggttcagcctttcctccctgctgccaggaggcatgggggtcagcaaccccaggctcttcctgaagcttccacatacctgtgctgcagcccgcacctcacgctttcctctttcttgggtctcagcaccccacctgaggcagtggttctggaggcagacacgttccccgggcatgcagcaggccgtgggacagacaccactgaaggagcagagtgaaattagggctgctctattggtatcccccagtcacaaagaagtagacacttttccaaatgttcgatttaggcctttaagttatggtaccaacccttctttcaggcatggcaagccggctgctcgggccctcatttgagtcctacctgctgcccgaactgaccagatatgactgtgaggtgaacgtgcccgtgctgggaagctccacgctcctgcaaggaggggacctcctcagagccctggaccaggccacctgagccaggccttctacctgggcagcacctctgccgacgccgtcccaccagcttcactctctccgtctgtttttgcaactaggtatttctaacgccagcacactatttacaagatggacttacctggcagacttgcccaggtcaccaagcagtggcctttttctgagatgctcactttattatccctatttttaaagtacacaattgttttacctgttctgaaatgttcttaaattttgtaggatttttttcctccccaccttcaatgacttctaatttatattatccataggtttctctccctccttctccttctcacacacaactgtccatactaacaagtttggtgcatgtctgttcttctgtagggagaagctttagcttcattttactaaaaagattcctcgttattgttgttgccaaagagaaacaaaaatgattttgctttccaagcttggtttgtggcgtctccctcgcagagcccttctcgtttcttttttaaactaatcaccatattgtaaatttcagggtttttttttttttgtttaagctgactctttgctctaattttggaaaaaaagaaatgtgaagggtcaactccaacgtatgtggttatctgtgaaagttg

SEQ ID NO: 88 - DNA, 1300 bp, Homo sapiens
caccccatcccatgtccaagatcacccagttacacacttaccatctacccagttcattcacatcatcagtcccagagctgcagagatgctctttttctacctcctacttctctggctcttagagaggcagcatgggataatggggcaagcgaatagggccttaaagtagagggacaagggttctcttccctatctgccacttattagctatgtgacctcgtgtaagtctcttttctttttgagacagggtctccctctgtcacctaggctggagtacagtggtatgatcatagctcactgcagcctcgaactcctgggctcaagctatccttccaccttagccttctgagcagcagggactacaggcacatgccaccatgtccggctgatttatttatttttatttgggaagatgggggtctcactatgtcgcccaggctggtcatgaactcctggtctcaagcaaccctccaaccttggactcccaaagtgctgggattacaggtgtgagccctggccttgcctcaatttcctcatctgtaaaacggggttagtgaaactcacatcctatcagtggttttgaggatgggccgactcttgtattgcctgctctagtacaatcagcagctaaggcggctcactttccggccgtgctacaataggtaagaactaggatgctttagacgtgtgactgggcagtgggagcccctcacatgatcccgagatgccagacagtgtctctccgcacagggcgtgtgctggtccagaggcccgtttttccagtcgccccacaccccgggtccgcgatcacgctccccccacccatagccgagcctgacgcggcggtggctcatgcgcctttccgtcccagcctttagccacggaccacacgtcccatctcaggcgccccgcccctcccccgccccccgcccccggcgcgcctccccaggctgccggctccggtgtctgagcggccgcgcccgcgagccgtgagcgatgattggctgcgccacggcggcgggcggtccgtgggcgcacacaccctccccgcgcagccaatgggcgtgcgcacgtcactgatccggaggcccgcgggccggcagcccctcaataagccacattgttgcatgaaactccggcgcaggagtcccgggctgccgctggcaacatcgtgtcacccagctaagaaaatccgcgggcccgagccacgcgcctgtgaatcggagaggtcccactgcccgagtggagccgggctgagattcttctcaagttgagcctcagtgatcctgtggccgaagtt

SEQ ID NO: 89 - DNA, 1300 bp, Homo sapiens
ttctgcatccagccctctctcttttacctcttgtccctttgccttcaggtttcaaacccagaataagaagcaggactgcctgcctgattcctcttgtaccttccctcctttagccctggagcccaaagggtctttttcttctactgacacttcctaccaggaaggaacttcccctgcatcatattcacttcctttcctctttctgaggaggcctttgctctctccctttcctggggctgtagtggcagaagaatccagaatatcaaggaggaaaacacattgggaggtaattgcaatattaccttcattgcgtctgtgttgcatgtactgtcccatcctagagaaagaggagtttgaacaaaatttaaactgttctttgtgattcaaggaaatcattaggagcatcaattgttttgtgctttaatgtcctgatatactcagtagggcacagtaacatggaagggactgctggtgtctgcgcttaaaatcccgaaatggctgtgtgctttggttctcgcacctgccttaatggttttcctgtctcctctgttactgggcaatcagctgccgcttttttcagtgtgtgttttcttctcctagccttctccctctttccaatttgccatctggaatctgcttttgattgagcattctgttcacctgttgttgcatgaaaaactatcccaaaacttagtggcttaaaaatgacaactattttatgataactcctagtttctgtatgtcacgaatttgagggctcaactaggtgattcttctgctccatgtgtctgattgagttcaaacagtggtgctcagctggtgaatggactcatctggagggtccacgatggcttcacttacatggctggtgcctttgcagggttcctgggaggctgagcatagctaggattgtcaaccaatgccctacatgtggcctccctagcaaggtggtctcagggcagttggactgtcttcgtggtggctgactttccaaggaagccaggcagaagcaagcaccccttggaaaccaggtggaggctgcatggatttttctgatctagctcaagagttcacacagcatcacttctgctgcattgtattggttacaccaagttacaggccagcccacattcaagggaggtgagttagactccacctcttggtggcagagtggcacagtcacattctagaagaccatgtgggatgggagatactgttgtggtcacctctggaaaatacattctgctactcttaaaaactagtgacgctcatacaaatcaacagaaagagcttctgaagg

SEQ ID NO: 90 - DNA, 1300 bp, Homo sapiens
gcaagggcctgtgtaaatgcatgtgatttacagagcattttatgtactgcgtgtcattcatgcttccggtgagccctaagtctaagatagggcagatagcatcaggtccattttgcagctgtcaaaatgaggtctgaagggcagaagtggtgtgcccacacacacacaactggttggctgcagacctggggactagacccgggacttcgtcctgcccaggggtctcttgccactgctccccatcaacttggatggctttaagcatttgtgagttgtctgctccctgatggcagaatgcagagacatgaagctacaagcaggttcgctcccaacggcaaaaaggaggaggggtgttcagaacatcaggtgcttctagagaaagcagggagagagtatctggccttgtggacaatgtcacggcagaggccaggtatagggcatgggggtaactggaagcgggatggaccctgttattccctaagacatggcttccacgtagtgctcaaacaaggcctttgcccttgctgttccctccacctggaatattcttccccttccttgacattgctcaggtctccactcttatgtcaccctctcagagagggcttccctggccactttccctaaaatagccacccactcctaggtccctcaaaagcatatcctgctttggattttccctatagcaatatgccctatgaagttattttatttgctaacttgtttcttgtctgttttcctttgttagagcgttggggaccttgtctggcttgttcccaatgcctggaagagtgcctggcacacaggattaagccaacacatatgttttgaatgaatgtgtgcacacatgcatgagctggcggcagtcggggttggggtaagcacgaaggcccagctcagttctctgcatgtgacctcccatcttacgcagataagaaccagtttggtttctgctagcctgagtcaccctcctggaaactgggcctgcttggcatcaagtcagccatcagccggcccatctcctcatgctggccaaccctctgtgagtgtgtgggaggggaggctgggctcctccttgtactctctgaggtgctctggaaggaggggcagctccaccctgggagggactgtggcccaggtactgcccgggtgctactttatgggcagcagctcagttgagttagagtctggaagacctcagaagacctcctgtcctatgaggccctccccatggctttaggtaagctccttccactctcattttttcacctgagaaatgagagaggaaaatgtctacaat

SEQ ID NO: 91 - DNA, 1300 bp, Homo sapiens
atgcttctgcaccagcactgtccatcctgtagatcatgcagaaattctcttcaactttttcctacccataaaataggagcatgcttacctttttcctaatgttccaggccccgggtctagaatattgtaagtaaggaagttaatgtgtatcagagcccattatgggccagaagttctcctcttccttcctacacctgcttcctccctccctccctccctctttcccttccttccttccatccatttgtgaagaagacatgatcaccctcattctgagagtgaagagacagaggctcaactaatgaaatgatttgttcaaggtcacacgggtggcacaaggcaagtggcagaggttgaatttagacccattcctgtccaaatgctgagtttatgtcatcgtcccgagaccataactttaaagatgtaagatagtgggaaaagagttgatttcaaagcacctctcagaaggactcactttacatcaggggtcagcagactcaggccaaatccggtccattccccgcttttgcaaagaaagttgtagtggaacacagctaggcttattgatttatggattgccaacgtccttttgtgaaacagacagctgagctgagtaatcgtggcgcacaaaacctaaaatatttactatctcgtcctttacagaatgtttgccaatctatggtccggagtccaaggctgtccatttttcaaagaacacaaagtgacatgagactgtcccatgtgcagggagccctatcattttattatgaaaaaacggcctttctgctcaaatctgttttttaaaaagtcaacaaacagactctgggtacctgtcaggaacagtagggagtttggtttccattgtgctcttcttcccaggaactcaatgaaggggaaatagaaatcttaattttggggaaattgcacaggggaaaaaggggagggaatcagttacaacactccattgcgacacttagtggggttgaaagtgacaacagcaagggtttctctttttggaaatgcgaggagggtatttccgcttctcgcagtggggcagggtggcagacgcctagcttgggtgagtgactatttctttataaaccacaactctgggcccgcaatggcagtccactgccttgctgcagtcacagaatggaaatctgcagaggcctccgcagtcacctaatcactctcctcctcttcctgttccattcagagacgatctgccgaccctctgggagaaaatccagcaagatgcaagccttcaggtaaggctaccccaaggaggagaaggtgaggg

SEQ ID NO: 92 - DNA, 1300 bp, Homo sapiens
gaatgcagcatgctgaaactcactgtgcaacccctgccttgtgtgtgtctgtataccatgcaggtttgcttgctaaattgagcctgtaaaccaaaaagtacctcaaacaggtctcaattaatttagaaagtttttgttgccaaggctaaggatgcacccgtggtacagcctcaggagggaggacatccttgccaagctcaagggtgcacccctgaccacaagggcccaaggtggtcggggcacagcttgcttttatacattttagggagatatgaggcatcaatcaatacatgggagatttacattggttccatctggaagggcgggacaacttgaattggggggcttccaggtcataggtagatttaaacatattttgattggcaactgactgaagaattattatcagcagaaaggagtgtctgggttatgaaataggggttgcagggagcagatgatgccttcaggtagcgggatttagagagaaaatagatggtaaatgcttcctatcagacttaaggtctatgtcgatgttaatgctgggggttatgatgtggcatggcctgaacgtcttccgggttaaagtttagagcaccctggcggacagggaaccccattcagatggttgctggggggccttcgaattttatttttggtttacaagccttcccatcagctgcgccagggtcagcaaaccacagtccatgggcccaatctggcctgccacctgctttttgtaaataaagttttataggaacacgcccacacctctggcagctgctttgcaagcacgcagcagggttgagttgttgcaacatagaccacagggcctgccaagcctcaattatctgtgctccgaccctttaagaaacacttctctcacccctgagctaagcagaataagaggggctggacgtgcaggactcagagtgggagcgaggagggctggggtgaggacagctttgtcacactctgtttttctgtcactcagccctgggggctccctctgcctgagggcttcgtcccctgctgcctggccgtgacccgcagcacaagcacagataagcctcagggaacaaaaggcagggctgccacggaagcccatccaccaatcctcacctctcacctctgtgtccgccctgctgggaaatattccaggctttggccaaggccagtgcagccccaggttcccgagcggcaggttgggtgcggaccatggcctctcacaagctgctggtgaccccccccaaggccctgctcaagcccctctccatccccaaccagctcctgctggggcctg

SEQ ID NO: 93 - DNA, 1300 bp, Homo sapiens
cgtttatgtgatcctggttactgttctcaggaatagcaggacacaatgtcagctttaacccaggctagttcctctaaactgccttcttatcggtgaaatgaaaataatagggttgctatggggattaaatgagatgatactcaaaaaaatgataattaatgataaatcataaggtgtctgccacaaagtgcccctattataaacaaacagtggcctggagggacagtttataaatactgctcctttagcattccactaacattgactgagtgcctgttctacactgtgtagaggccctggtgaaaaagatctgccttccagtttattatctagtcgaaagaaccgcaaaagataacaaaacacaatagactgaacgccctgagaggggcataagtgcagtgctctaggagctgtaaaagaggtctcgatatccactggaggaaagtgcttactggagttcatttctggagtgggtttaaaagatgaacagagggaatctaaaacattcacacaaaatcaatactacacgtacacattttattattttgtggaaagaccacttagaaacaccgcaatcacttctactactcagcagatactgagcagtaggtttcgtgacagagcacctgtcttttgtccagtctgtttactatacattgcgtgctctgggcagtccttatcttcgtgttcaggaacaaagtacacacacccctttccgaaacgaagggcccagggactccgagaagggtgggagccctcacggccaggccacacaatggggagcctctttaccctagtcatcacccacccttgcaggccccactttgccagggtgcgacttctcgggccccttcgcccctcccctgcagcccccaggagcgcagccacagcccggccgggcgccctccctgtctctctctctctttctctctcgagctttcctcctccttcaccgggagccggaaaacccggagcgaaccagcccagcacggcagcgcatgctcagtagcgagcaggttcagttcgctagtaggaagctccagcgctacaccggcggcggcggtggcggcggcggccgcggcggcacctcagggcagccagattccccaacaacgacctccggtccttccccttccccgcgagacctccgccccagctccgccccgcccggggctcttgcgtttcggagtcccaactacgcggagcgggcgccgcggccggagcgtccctccacacgtcctcccccagccgccagctccgccgcggggccagaccgggcccgggagtgcagccccggcgg

SEQ ID NO: 94 - DNA, 1300 bp, Homo sapiens
cagttgatgctgtgattcgagtccaagccagtttccctgttacctcctttgcccttaatggaggaaactgaggcagctgcggagacacaagaagccgaagtcctaagacccaggctgcgagcgctggctccgggacccgggctgccgctgacgggctgggcccgcgggcggcagcagggggcgctcgcaggccgggacgcgccctcctcgcgcggcgctggcccgacggagctggtccgcgaggggcagcgcctgggaaagggtcgggaccggctccccgctccccgctcccccacctctccgcagggcgtctccacggccgagccgggcggggttgtggtgtattgcgacccggcgccccagccccacgcccgccctgccctccctgcgggctcccgagcggcggaaggcagagcagggcgcaccggcgccgggcccagcccggttcccccgggagaagtgtcccgtcccggtgccggcccgcgcgctagctccgcgtcccggctcccggcacccaccgacccctccacagctgcgcgcgtcctgcctgggggccggagaccccggccgccgggcccctccgctctcccgaggcgcggccgccgggaggaaggcaggtagaggcgctgggcggggtccgggcgcgggaagtcccgggctcacgcctcccgcgaagcgcaccttcagcccacctcggtccgcccaccgccccgcctcccgcccgctcccgcgcccgcctccagtctccgccttcctccagccgctctccccgctccccactcccctgcaggcgcggctggggcgaaagcctgcgagctgagcgggcgcaaggtcctccgcgcctcctttaagaaccggcccagcccggcccgcgcccccagagcgtacggcatccgcgtggcgggagggcgcgactttctccggtcccgggcgggacggggacggcggcgggacaacttgggaaacttctctggggcggacggcagggaccccgggcaccggtggaggaggatgtaggagggcggctgctggtcctgggtgttcccgacctcctaggccccgctcgtccaggccatggggctccagcgccctcggcgccgcccgaggggcgacgctcttgtctagccgagccgggcagcgctgtcgtccacggtgcgcactgggcgggcagcgctccctctgcccacctcccgccccgtcatggaccaccaggacccctactccgtgcaggccacagcggccatagcggcggccatcaccttcctcattctctttaccatcttcggcaacgctctggtca

SEQ ID NO: 95 - DNA, 1300 bp, Homo sapiens
cccaaaacaatgcaaggacccacctctctctgaacctcacccaccctagttttcctttaaaaatcaatttacaagaagatcatgtgaaggaaaaggttgggtgatattctaacccaagttagctgtttctcaaccaagttctctttgaaaaattcaacaaccacctttggggaattatttacaacagaggagtgaggatgggaccaggataggtattgcctatgttggtggaaccagggtttttttcctggattaccaaagagatggtatgcattgctcccagaagctaaatatcttcaggctttcaatggtggccttcacctgaaaatgttatccctgttgaagctttcaagccagtattttcataagaactatattttctttggtgaactgaggcattataatgatgactatacaggttcttgagtgactgaagccatcattagcattgtcattatttttgtttagttgcatctccatagcagctcacattcacaatgtgctttgcaattgttccttagcaatagccctcacaagattctcaggaggagagggttaatcaggattaacatttctgtgttgcctaaagaggaaccaaggtaagcagaaatgtagccagttggctggcatcactgttgcttcaggattcatccttagacacccaagcttctaccctagtctggtgctacacttacattgcttacatccaagtgtggttatttctgtggctcctgttataactattatagcaccaggtctatgaccaggagaattagactggcattaaatcagaataagagattttgcacctgcaatagaccttatgacacctaaccaaccccattatttacaattaaacaggaacagagggaatactttatccaactcacacaagctgctttcctcccagatccatgcttttttgcgtttattattttttagagatgggggcttcactatgttgcccacactggactaaaactctgggcctcaagtgattgtcctgcctcagcctcctgaatagctgggactacaggggcatgccatcacacctagttcatttcctctatttaaaatatacatggcttaaactccaactgggaacccaaaacattcatttgctaagagtctggtgttctaccacctgaactaggctggccacaggaattataaaagctgagaaattctttaataatagtaaccaggcaacaccattgaaggctcatatgtaaaaatccatgccttcctttctcccaatctccattcccaaacttagccactggcttctggctgaggcctt

SEQ ID NO: 96 - DNA, 1300 bp, Homo sapiens
ggtgaaaccctgtctctactaaaaatacaaaaaattagccgggcgtggcggcaggtgcctgtagtcccagctgctggggaggctgaggcaggagaatggtgtgaacccgggaggcggaacttgcagggggccgagatcgtgccactgcactccagcctgggcgacagagtgagactctgtctcaaaaaaaaaaaaaaagtgttatgatgcagacctgtcaaagaggcaaaggagggtgttcctacactccaggcactgttcataacctggactctcattcattctacaaatggagggctcccctgggcagtaccctggagcaggcactttgctggtgtctcggttaaagagaaactgataactcttggttggtattaccaagagatagagtctcagatggatattcttacagaaacaatattccacttttcagagttcaccaaaaaatcattttaggcagagctcatctggcattgatctggttcatccatgagattggctagggtaacagcacctggtcttgcagggttgtgtgagcttatctccagggttgccccaactccgtcaggagcctgaaccctgcataccgtatgttctctgccccagccaagaaaggtcaattttctcctcagaggctcctgcaattgacagagagctcctgaggcagagaacagcacccaaggtagagacccacaccctcaatacagacagggagggctattggcccttcattgtacccatttatccatctgtaagtgggaagattcctaaacttaagtacaaagaagtgaatgaagaaaagtatgtgcatgtataaatctgtgtgtcttccactttgtcccacatatactaaatttaaacattcttctaacgtgggaaaatccagtattttaatgtggacatcaactgcacaacgattgtcaggaaaacaatgcatatttgcatggtgatacatttgcaaaatgtgtcatagtttgctactccttgcccttccatgaaccagagaattatctcagtttattagtcccctcccctaagaagcttccaccaatactcttttcccctttcctttaacttgattgtgaaatcaggtattcaacagagaaatttctcagcctcctacttctgcttttgaaagccataaaaacagcgagggagaaactggcagataccaaacctcttcgaggcacaaggcacaacaggctgctctgggattctcttcagccaatcttcattgctcaagtatgactttaatcttccttacaactaggtgctaagggagtctctctgtctctctgcc

SEQ ID NO: 97 - DNA, 1300 bp, Homo sapiens
acataaaacatacgcactgcagatttaaagcatacttggaagtaacaaggagaaacataaaaatcgttgattccacagcatttaatatattggtaaccttcaatttttttctaggcacgtttttataaaatgagccaatactatacaaacgtttttgtaactttttttaatttgtactattttgtgagtacgtgaaaaagaaatttgtaaagagtaaacgattacagcatgttgtggtattacacactgttgaagggcgccatctgtggcgtggtggctgcgctttggtgggaagaggttctcttggggttcccgtttttctcccagctctgggtgggcaatactgaccactctccgacctaaaggggcttctccgtttgcctttgacgacctgagcttaggagaatggagacacgtgggagttcagaggagggcgttcagggtgactgcgaacacgagctgccggagctgtccacatctcccctaggcagggcccactggccccagcccgggaagggagcaagggcgggagggcagttggcagtggcacggtctgggtccaaatctttagccccccccaccccggctggcgccattctcgggcggtaaagtgagataaaagcagggcaaggttctgcaactccaaatcagggaggcgcagctcctacaccaacgcctttccggggctccgggtgtgtttgttccaactgtttaaactgtttcaaagcgtccgaactccagcgaccttcgcaaacaactctttatctcgcgggcgagagcgctgcccttatttgcgggggagggcaaactgaacgccggcaccggggagctaacggagacctcctctaggtcccccgcctgctgggaccccagctggcagtcccttcccgcccccggaccgcgagcttcttgcgtcagccccggcgcgggtgggggattttcggaagctcagcccgcgcggccggcgggggaaggaagggcccggactcttgccccgcccttgtggggcgggaggcggagcggggcaggggcccgccggcgtgtagccgattaccgagtgccggggagcccggaggagccgccgacgcagccgccaccgccgccgccgccgccaccagagccgccctgtccgcgccgcgcctcggcagccggaacagggccgccgtcggggagccccaacacacggtccacagctcatcatgatggacttggagctgccgccgccgggactcccgtcccagcaggtgctgcctcggccctctgggccctgcggtggtgccgggacgggggcgggggagct

SEQ ID NO: 98 - DNA, 1300 bp, Homo sapiens
gccctgtccgcgccgcgcctcggcagccggaacagggccgccgtcggggagccccaacacacggtccacagctcatcatgatggacttggagctgccgccgccgggactcccgtcccagcaggtgctgcctcggccctctgggccctgcggtggtgccgggacgggggcgggggagctagggaaccgcggcccgggagggacagccgcaaccggcttcccccacgtctggccagagccaggaccgcggcgctgggtagagccgccgcgcttgcgccggggcagggcggggaggggcagcggggacgcggccgggtgatccgaccgaccacgagcccgagggcgaacgggtgggaagttgcgggaaggtctggggactgagcccgctcgcgtgggccttgggggagaatccagccgcgtccccgggcccgagagctgggactccggagcccctaagtttgagcggcccggtgggcggcggggcaagagggggcggacgctggccgtctgagccggcgcggcccggcccttccggggctgcgcggctcccccgcctcggtgccggcaaaaatgtgcctagtcacggggccgctctcgggggaactgaggtcgccttcgggctgggacccggagccccttcgccgcgccccaagacctccttgagtgcgggctgcgacgcgctcaccccgctgggccgtctgtgggcgcggctttgcgaagtcatccatctctcggatcactctctggcagccttgagctctcttgaaagcccagccccgggacgagggaggagcgccttaagtgcccagcgggctcagaagccccgacgtgtggcggctgagccgggccccgcgcactttctcggccggggaggggttcgggctcgggcacccggagttggcccctcgtaacgccgcgggaaagtgcgggcgagggcagtggactctgaggccggagtcggcggcacccggggcttctagttcggacgcggtgccccctggtggcgctcaccgcgcgcgtggccttggcttccgtgacagcgctcggttggccgtcacagcagccctcggttggccctttcctgctttatagcgtgcaaacctcgccgcgccagggccaagggacaggttggagctgttgatctgttgcgcaattgctattttccccagagcggctttgtctttggatttagcgtttcagaattgcaattccaaaatgtgtaagacgggatattctcttctgtgctgtcaagggtaagagttgcgagtgtagattagaatttctgttgcttttagtctgtta

SEQ ID NO: 99 - DNA, 1300 bp, Homo sapiens
tacaagtgtgagacaccacccccagccagcacattgtattaatccaagcaggagaacgcagacttcaaaggcttatgggcagcagagagaagtagatgaagcaaagagatgcaatcagcgggactagtgggaaatgagggaaaggaaggtgtcaggatggggctttttctagctgagtggagttcagttcattcccagagaagcttgagaggtatccaactatagatgcaaggtagctggctgttggtcccttgtctttaggacagtttgacttttgtaatacaggcgacctcacagagctattgtgagaattcagagctgggcacagaatagatgctctataaacggtagttctattccccatttgccccgtcctcccagcatgccagggatacaggggcggatagagacaggttcagttccctttggtctcttgcattcccccttccctcagcacaattcctgggctcatagcggatgctcaataagtatttgtagaatgaaccaaagaaatcagacccttggtgacccagggctacatgtactcggcggaaaactggggttaaaccggacccttggttggttgaaaaattaaaataatttttaaaaagtgggcgtgaaataatccagaagttggagggcctggacaaaggctggggaggggactcctcccaccaggcggcctcagggtcggcttagcaagaaaggaggcgctggggagacctctggggtcccagctgccaaggtactcgccgctccaaggagatgcggacgccggataccagctctgcccaagattgctgggtcccgccgcggcctttaaaggcccaccacgtggctgcgcggccagccctggtccggaggcggtgcccgggtggcgcctgcgcactgcctagcagaggggctggggttccgagaaaaagcgtctggagaggaaggggaggctgcttggggtgggacgccgtgggaggagtcggctccttatgcaaatcacagcggagcgcgcacggtccggaggcggggcttgcgatgcaaagacaggtccgtctggcgaacagcgagggggcgggccgcaaccctctgcctctttccgcgagcgctgacgtcgccgacgtgttgtttaaaagcggccgcgcaggcgcagtgagcccaaatgcgaacttaggctgttacacaactgctggggtctgttctcgccgcccgcccggcagtcaggcagcgtcgccgccgtggtagcagcctcagccgtttctggagtctcgggcccacagtcaccgccgcttacctgcgcctcctcgag

SEQ ID NO: 100 - DNA, 1300 bp, Homo sapiens
ctggctcttgagttctcttactgaagaaattcccactttatccctgaatgtgggggaaaatatcacaaactggcagatgagaaggcagacagtcaggctgcatagagagtgggtgagcacttctattgtgtgtgttatggatttttctcttcttgattttcactggatagctcctttcaggccgtttataaaagaatcaggaaaagagcagaaaacttgggcagtgtgcttcgctctggttgcaataaacttagtctttttgtgggggggttcccatgcccaggaatccctgagttctctttgggaaggtttttattattgtaaaaattaaagtgaaaagggaaagtgtgagaacagaaaaatgtcttttcctgatctattctttgtgtgcatgactctattttttggtctgtggctatagttaccttttatgccgttaaaaaatacatatccatttaagtcaggggtacttgaatatgcagatgagccgatatgtaatattcctggttcatttgagtaataaattctgcagcccgctctttatgatggtagatcatattcctcaccaccaataaatattgtaaagtactttcgctgtagccatgctaacccggggcatctgtcattccggttgctgctattaggaattattggactgaaccactggcagagaaagcagaggggggtgaatgtggtggttgtgatgctctctgcccttttgtgtgttttgctttttaaaaaaactcaatcatgctgcacattgagtatgaatcagtgtggacaaacataggcaccttctgttggccgaggctcagagcaggacacaggactccaccggactgggacacctctcacccccaattcagcagatccatctttctgatgctatactgtaaatttatttcacctcagagagtaaacagatatattggagccccaagggttcatgggtagcgtatttacaaaggagcctcctccgccagcccgtgccaccgctgctaatgagagcagtcattaagtaaatgagacgtcgcctttagctggcttaggagttcgcacactaaggggagaagatatttaattgaaacccgcacgcaggcttccccacatgtgaccgctgtacgggaggcagctgccttccctctcctcccccagtccaccctgcaccccccatgtaaatttcatgattgctttccgtgatgtcattttgaaagaggacagacaatagctgtggggaaaggtaagtcaacgttacgttctttctgacaaaggcagatacccaacgcttggcttttcctct

SEQ ID NO: 101 - DNA, 1300 bp, Homo sapiens
gccatactcaatattaagtactaggctggacgtggtggctcatgtctgtaatcccagcactttgggaggccgaggtgggtagatggctggcttgagctcaggagtttgaaaccagcctgggcaacatggtaaaaccccatctgtacccaaaatacaaaaatcagccaggtgtggtggcacatgcctgtggtcccaggtacttgggaggctgaggcaggaggatggcttgaacccaggaggtggaggctgcagtgagctatgatggcgccactgcactccagcctgggtgacagagcgagaccctgtctcaaaaatcaaacaaacaaccccctcgccccggacaaaagtagtttgcactattttctcatttcacaatatgtttttgaaatatttcccttgaaaggtaagtcatatttatcattcctgttgtatggaggcatcataaattatttcaccattctaccctccttgagtgttgtggcctttaggccagacaaaaacgcaggtgatgcctagaagccaactagttgccgtttggttatctgtagggttgtggccttgccaaacaggaaaaatataaaaagaataccgaattctgccaaccaaataagaaactctatactaaggactaagaaaattgcaggggaagaaaaggtaagtcccgggattgaggtgtagcgactttctataccctcagaaaactaaaaaacaagacaaaaaaatgaaaactacaaaagcatccatcttggggcgtcccaattgctgagtaacaaatgagacgctgtggccaaactcagtcataactaatgacatttctagacaaagtgacttcagattttcaaagcgtaccctgtttacatcattttgccaatttcgcgtactgcaaccggcgggccacgcccccgtgaaaagaaggttgttttctccacatttcggggttctggacgtttcccggctgcggggcggggggagtctccggcgcacgcggccccttggccccgcccccagtcattcccggccactcgcgacccgaggctgccgcagggggcgggctgagcgcgtgcgaggcgattggtttggggccagagtgggcgaggcgcggaggtctggcctataaagtagtcgcggagacggggtgctggtttgcgtcgtagtctcctgcagcgtctggggtttccgttgcagtcctcggaaccaggacctcggcgtggcctagcgagttatggcgacgaaggccgtgtgcgtgctgaagggcgacggcccagtgcagggcatcatcaatttcgagcagaaggcaagg

SEQ ID NO: 102 - DNA, 1300 bp, Homo sapiens
gattctcctgcctcagcctcctgcatagctgggattacaggcgcacaccaccatgcccggctaatttttgtatttttagtagagacggggtttcaccatgttggctgggctggtctcgaactcctgacctcagacctcaggtgatccaccccccccccccccccccaccccacgggcctcccaaagttctgggattatgggcgtgagccactgcgcccagcctgtgtttttcttttatagtagccatcctaatgggtatgaggtggtacctcattgtggctaaaccatgtacgtttaagaatttacacacacacacacacacacacacacacacacgtgatgaagctgtaagaaaagggagagaataatgacccaaaatgtcagcacaaggatgcctcaggggtagacacaggtgtcttcttagcgccttttagcccacgcatatgtgcttgcgcagtctctcggtgtgttttctaacatttcacaattaaataaggagtagttgatattcacagccaccatttccaccgtatatgtagagaaaaatgctcaaatcctagcgatcagcccgctgagctttcacaaaccgaacacaccgtgcggtcacgaggcggctctcccgaacaccggctctgcacccccagggcccggggaaccaagacttccccaagggcccagcaaaagtgagggaggaggggaggaaaggagggagagggagggaggagtgctggctgctttccgccagcgcctcgtttgggtttcgctctgctgaggcctgaaggcgccctgagggcccctggggggcagggaggggcggtggctgcggccgacagcaaggaacctccggagaagcgaagccgggccagacgtgccaccggggcctcggcgctggcgaaggggcgcgtgcggccgcactggggccagccccgccctggtccccggccacatcctcgagaccaccggggtggaggggggggtctcactgctcagggcccgcgtgacattgcacaggtttagaaacgcacagcgggaaggtggccccggcgggccgagggcgcaggatccctgctccgtccagggtccgtcctgcgaggaggcgccgggggcgggcccggggcggggcgggcggaaggcgcgcgcggggcggggcggggacggcgacgcggcgcaggcggcgggagtgcgagctgggcccgtgtttcggccgccgccatggccgcggtggacctggagaagctgcgggcgtcgggcgcgggcaaggccatcggcgtcctgaccagcggcggcgacgcgcaaggtg

SEQ ID NO: 103 - DNA, 1300 bp, Homo sapiens
acctcgactgggctcaaagcgctcttcccacctcaacctcccaaagtactgggactacaggtgtgagctaccatgccaggcctgaaagccatcttaaaaaaaaaatcttagaatgagaatcacagtattgggaaaggactgtatgaatcatctggtccattcgttttgtcctctgggttcacccagtgaccctatttcccccgagttctaaggagtccacctcatgcagaattgattcaataggcgatcagcaagggccagctctgctctgggccctgagcaggcactgagtataagtcagacctgaatgtgcctggaagagtgtcccacgcattccagcagggaagcagtttgtatgacaggtgtcccagtccaggcggataccaggtgctgccagagtgtggaggaggcaggcggggacttagtctcctccctgggtttggacactggcatcctgctttatgtgtgacaccactgcacccctctgagcctcggtttccccatctgtaaaatagaagcgatctaccctcacaggtcagttgtagggatgaaccatgaaaatactagagtctctgttttttgacaggaactcaaaaaacagatcctaaatgtacatttaaagagggtgtgaggaggcaagcagtcagcagaggattccagcaggtgacattttagggagctggagacagcagagcctggggttgctaagttcctgatgttgcccaccaggctattgctctgagcagcgctgcctcccagctttctggaaccttctgggacgcctggggtgcatcaagtcccaaggggacagggagcagaagggggggctctggaaggagcaaaatcacacccagagcctgcagcttctcagatttccttaaaggttttgtgtgtgtgtgtgtgtgtgtgtgtgtgtgtatgtgtgtgtgtgtgtgtgtgtgtgtgtgttttctctaaaagtcctatggccagactttgtttcccaagggtcatatgactgctcctctccaccccacactggcccggggcgggctgggcgcgggcccctgcgggtgttgcaacgcccggccagaaagtgggcatcagctgttccgcctggcccacgtgacccgccgagcataaatgtgaccggccgcggctccggcagtcaacgcctgcctcctctcgagcgtcctcagcgcagccgccgcccgcggagccagcacgaacgagcccagcaccggccggatggagcgtccgcaacccgacaggcaagcgcggggcgcgggacgcgggacgggcgcctttctctcccaaccct

SEQ ID NO: 104 - DNA, 1300 bp, Homo sapiens
ttaaaatcctccccactcttaaaatcctcccctttaaagggagccacagggtgacgccgggggagtttgcggaagcgctaaccgcgttggggcctagggcggatcccgtgattgggacaggccccgcccccggctccacttcccccattgtgtgagcggctcgggcctaggccccgcccccctccggaggcccggccactccccttttccacccccccttggctcatttccggccgccgccgctaccgctagcctgtaaggaggattcggcagagggaagaaacaacagccgccatcttgtttgtgtgctaggctgggggggagagagggcgagagagagcgggcgagagtgggcaagcaggacgccgggctgagtgctaactgcgggagccagagagtgcggaggggagtcgggtcggagagaggcggcaggggccgagacagtggcagggggcccggggcgcacgggctgaggcgacccccagccccctcccgtccgcacacacccccaccgcggtccagcagccgggccggcgtcgacgcctaggggggaccattacataaccccgcgccccgcggcgtcttctcccgccgccgcgggcggccccgaacggagccccggggggcgggcgctcccagcacctggccgccggcggtgggggccgtagcagcggccgtatttatttattttccgcgggaaaggaaggcgaaggaggggagcgcggcgcgaggaggggccgcctgcgccgccgccggagcggggcctcctcggtgggctccgcgtcggcgcgggcgtgcgggcggcgctgctcggcccggccccctcggccctctggtccggccagctccgctcccggcgtccttgccgcgcctccgccggccgccgcgcgatgtgaggcggcggcgccagcctggctctcggctcgggcgagttctctgcggccattaggggccggtgcggcggcggcggcgcggagcgcggcggcaggaggagggttcggagggtgggggcgcaggcccgggagggggcaccgggaggaggtgagtgtctcttgtcgcctcctcctctccccccttttcgcccccgcctccttgtggcgatgagaaggaggaggacagcgccgaggaggaagaggttgatggcggcggcggagctccgagagacctcggctgggcaggggccggccgtggcgggccggggactgcgcctctagagccgcgagttctcgggaattcgccgcagcggacgcgctcggcgaatttgtgctcttgtgccctcctccgggcttgggcccaggcc

SEQ ID NO: 105 - DNA, 1300 bp, Homo sapiens
tgaaagcacgtctccgacctcagctgcaaaactgtggagtcccacacactagactttatattccagcatttcctctcaccattacatttttgcttttttccatccttacattacctttaccacatttttgtttttcccataattacattagataaggcaatggctagacgtggtcttttactaacttgttctattgggagcggacgagaaaaaaaaaaaagacaaaccctagaaatgtcttcaggtcccagccatgtttaggaaaatacttgaaggcttctgcggtgagagtgctacctggtaagggcgtatggacacacgtggagggcaagaaatgaatttgggtctggtgccgaaacatctttccactgctgtgattttgttttctggtcagagtaataatgctcgttgtaaaataaataaataaataatacataaaaaggaaaaggaaaattcagagaaaatgaaaacaactcgtaatcaacgtgctttttggatgtgaactgctccctttgggagggcaatggagaagtgaggacgcactgggtatctggcccggaacagccggcagtgggtacaccctgcctggtgaattcgaccggggttttgggggacccgccacccaagggccgaagagcagggccgccctacgggcgctcccatttggccacctgagtggcgacttggcgccttcctcggagcagctccggggttccgtcgtcccggttcccactggtcccttacgcagagaccaaaggcaggaaccttccctcgtaactatccaccgactgaaaatagattctgagtccgcccccgcccctccccccttaaaatcctccccactcttaaaatcctcccctttaaagggagccacagggtgacgccgggggagtttgcggaagcgctaaccgcgttggggcctagggcggatcccgtgattgggacaggccccgcccccggctccacttcccccattgtgtgagcggctcgggcctaggccccgcccccctccggaggcccggccactccccttttccacccccccttggctcatttccggccgccgccgctaccgctagcctgtaaggaggattcggcagagggaagaaacaacagccgccatcttgtttgtgtgctaggctgggggggagagagggcgagagagagcgggcgagagtgggcaagcaggacgccgggctgagtgctaactgcgggagccagagagtgcggaggggagtcgggtcggagagaggcggcaggggccgagacagtggcagggggcccggggcgcacgggctga

SEQ ID NO: 106 - DNA, 1400 bp, Homo sapiens
atgtatctctcatgtgtttcgacccaccaccccctaatcccttactctctgctttgtcctcctgcctcagcctcccaagtagctgggatgacaggcgcccaccactgcgcccggctaatttttgtatttttagtagagacagggtttcgccatgttggccaggctggtcttgaactcctgacctcgtgatccgcccgcctcggcctcccaaagtgctaggattacaggcgtgagccacctcgcccggacttaatttttgtatttttagtagagacctggtctcaaactcctgacctcaagtgatccgcccgcctcggcctcccaaagtgctgggatgataggcgtgagacaccgcgccctcccttctgctttgtacttcttcatcgtacttatcacaacttgagcattacacgtatttgtctgtctcctctctctaaaaggtaacttctataagggtggatccccaggaacatggagtgtgctcaacaaacatctgaactaacctgattggcgtatcctctcagtgtctccttttagtctcgacaattgtgtttcacactttctcagtatgcaaatatctttctcggtctgggtcatgcctttcggtttctgccccagtgcagaggcctctaagtttatcagcgtgtggaccacagattcgcagaggcctgagctgcggcgctgccgggatatggcgcgtcgtcgggcctcaagcacagcccggggtccctcgctggctctgttcggaccctgctcggtcgctcgcctgggccccagccatctctcacttcagcccatgagttctgccccacgtctgtctccctgggtgtcttaagagacgcgacccgcaccgacgcccccgcgaatgcaccgcgaatgcacgtgaccgcgcctagtggcgccccctcagtcaacgccgtcgcagtgcccctcccgaagcccgccgcttccgccggcccgcgcggccccgcccccagccgcgaggaaccaatccgcatgcacacttcttgtccccgccccggcaccctcctcggcgcgcgcccctccctccgcccgcccgccggcccgcccgtcagtctggcaggcaggcaggcaatcggtccgagtggctgtcggctcttcagctctcccgctcggcgtcttccttcctcctcccggtcagcgtcggcggctgcaccggcggcggcgcagtccctgcgggaggggcgacaagagctgagcggcggccgccgagcgtcgagctcagcgcggcggaggcggcggcggcccggcagccaacatggcggcggcggcggcggcgggcgcgggcccggagatggtccgcgggcaggtgttcgacgtggggccgcgctacaccaacctctcgtacatcggcgagggcgcctacggcatggtgtggt

SEQ ID NO: 107 - DNA, 1300 bp, Homo sapiens
cggataacagagacagtgcaagcggaggagatgagggtgcctcaaagccgggaggctgggtgatgcaggagcctgcgtgtcccgaggggggtgctgggcccagtgtgagtacgtgtgactgtgactgagacagtgtgactgctgaaggcagggacacagcagctccctgactgggggcagaaggcgttaactgtgtgaaggctggttgtgggtgggtgggctctgggcctcgaacccgggggctgagggagatagtaaacagcagggtgactgacgggaagatcatgttggtagccctgcgaagatgctgcagggctgtgggggtttgtgtgactttgcagttcaacaaattcaaattcagccaacgctggcagggcctgttgtgccaggcaaccagctaggaggaggagactcggacccagcttgcagctgaagggcgctggctgccgggttctgtgggttcaccttgcggtgtcttcccttgctaacactgagtccttacaatagccccatctccaggttgaggctagatggaggggacagagggaagtgacttgcccaaggtgacccaagctcccgagtgccagggcaggatctgaattcaggctctcagactgcagagcctgagtccctccctgccatgcctgtgccagggtggaaatgtctggtcctggaggggagcgtggactcctggccttggctctggagacatccccctagaccacgtgggctcctaacctgtccatggtcactgtgctgaggggcgggacggtgggtcacccctagttcttttttccccagggccagattcatggactgaagggttgctcggctctcagagaccccctaagcgccccgccctggccccaagccctcccccagctcccgcgtcccccccctcctggcgctgactccgggccagaagaggaaaggctgtctccacccacctctcgcactctcccttctcctttataaaggccggaacagctgaaagggtggcaacttctcctcctgcagccgggagcggcctgcctgcctccctgcgcacccgcagcctcccccgctgcctccctagggctcccctccggccgccagcgcccatttttcattccctagatagagatactttgcgcgcacacacatacatacgcgcgcaaaaaggaaaaaaaaaaaaaaaagcccaccctccagcctcgctgcaaagagaaaaccggagcagccgcagctcgcagctcgcagctcgcagcccgcagcccgcagaggacgcccagagcggcgagcgggcgggcagacggaccga

SEQ ID NO: 108 - DNA, 1400 bp, Homo sapiens
atgttggccaggctggtcttgaacttctgatctcaggtgacctgcttgctttggcctcccaaagtgctgggattacaggcgtgagtgcttgcctggcctcttgtttccgttttaagatgggagaagtaacagcctgtgatgggaatgacccagggagaatggagagagggcagggtttcgggatcagtgttggcgtgaagggtcgggatcttctggagggggtggtcgtggccaggagctggacgggttcagcccggtcccaagagggaagggactgggtgctacctcagcgggtgggtgggggagctggtgggaattttctactgattccttcattcgaagtgtatttattgggcacccattgagtgccaggctctttctcagggctaggatagaggttccattttctcagtggcttgggcactgggtcatcagctgagtgagaggatgggcgtcagcactcaagaagtcacccaatggtttcattttttgcagtctttgttgtcccagaggagtaagaactaaaagcaccaggactgtgacatgctggaaacatggcatgttccaaagagaataaaatacagttttatgatacacgaattgtgtgtgatacattccaatttctcacattgaacaaattaccaatagcaatatgtgtgaagatggggcgaggtgagagtgaggaggaggagtagagaaaggacggggcggcgttaaggatacagcaaataactggaattccgcaaacactggggtgatgcaggcaatgcccttagcacggtcccggcaggaggcggtgggatcaggccgacccgggtcccaggggtgacagcgtcccttctccactgcagaatatcgaggtactcaaccctctgaacctcagttttctcatcagttcaatggggaaaacgggatggtaacccgtaatactggcggcgcggaggccggggagcgctccctacctgttggccggcggactggggactgtccgcacccgccccggggagcagcgagggcgcgcgggcggggtcgcggggaccccgcaagggctctggggaccgggacccgcagggtaggtcgggacgggcggggcggggcggcctgaccccgccccgggccggaggggcggtgctgcctcccgccgggccccaggcactgccctccggccgccgcgccgcccgcccgccggggccccgctgtccgccgcccgccgccgctggagctagaggtacgaggggccgcgccgatgttgcgggggacgggggctccagggggatcctgcggctcgcagtggggaggaggcgcctcgggaaggcaggggcaggggcggaggggctgggccgccgccctagcccgggccacctgttctggaggcgacatttgtgcgcgcacgaaccccg

SEQ ID NO: 109 - DNA, 1300 bp, Homo sapiens
gctggtctagaactcctgaccttgtgatcagcccacttcagcctcccaaagtactgggattacaggcatgagccactgcacccggccatagttgctattttatttgtgtgattgattaccgtatgacgcttttattgaagtgcagtgaaggcaggaaacatgaccggtttttacaatattttcaacacttatcaccataggtggtacatagtagggccttaataaatatttgtaaaatgaacaaagttaatgagtgtttatgtttgtagttttaattgctctgaagtaaatatctgattttccaatttccaccagagtgctctgcacatagtaggtctaattatttttccctctttactaatcacccatgccttgtaagaattcagttagttgactttttgtactttataagcgtgatgattgggtgttcccgtgtgagatgcgccaccctcgaaccttgttacgacgtcggcacattgcgcgtctgacatgaagaaaaaaaaaattcagttagtccaccaggcacagtggctaaggcctgtaatccctgcactttgagaggccaaggcaggaggatcacttgaacccaggagttcgagaccagcctaggcaacatagcgagactccgtttcaaacaacaaataaaaataattagtcgggcatggtggtgcgcgcctacagtaccaactactcgggaggctgaggcgagacgatcgcttgagccagggaggtcaaggctgcagtgagccaagctcgcgccactgcactccagcccgggcgacagagtgagaccctgtctcaaaaaaaaaaaaaacaccaaaccttagaggggcgaaaaaaaattttatagtggaaatacagtaacgagttggcctagcctcgcctccgttacaacggcctacggtgctggaggatccttctgcgcacgcgcacagcctccggccggctatttccgcgagcgcgttccatcctctaccgagcgcgcgcgaagactacggaggtcgactcgggagcgcgcacgcagctccgccccgcgtccgacccgcggatcccgcggcgtccggcccgggtggtctggatcgcggagggaatgccccggagggcggagaactgggacgaggccgaggtaggcgcggaggaggcaggcgtcgaagagtacggccctgaagaagacggcggggaggagtcgggcgccgaggagtccggcccggaagagtccggcccggaggaactgggcgccgaggaggagatggaggccgggcggccgcggcccgtgctgcgctcggtgaactcgcgcgag

SEQ ID NO: 110 - DNA, 1300 bp, Homo sapiens
ggcagccagttctgtgttcagaatgtgcttgctgtcaagagtgcaggcctggaattccagcctggccacaggccaaggagggaatggacccatcctgcgcatggtgtggggatgagaagcagagcccaccacgggtctcattcccagacccatccggtaactgtcagtttcagtaactgtgaagtctggggcttttggggtggggggctgcaggttaagtcctggggagagctagagctaccttaggaccctccccttgaatgttccaggcagcaacccccctctcttatttcttcccccaccaaaagaatgcaggccactaggagtgagtgaccagcgcctgcgagttagagctattttgggcaggagagcaggcgtcggattccagtgttccaggcagggggaggggacgagggttaggcctgaggcgctttccgactccccagcctgctgtgggcgaggctctaggagatgagctagcttcccgctcctcctgtccctggcctcagtctcccatccgtgtaagggccgggcagcaaggctttcatcctttgcaattgagagaacgcttcctgattgttctcatggcttagaaataccccttgatttgcattcgaaggaaataaggagggctgaacgcagtcgacgggtggccagttgctgggccagttcgcagtcctgactgtcccttgattagtcttagaggcccaaaggcctgaagttgggcggggagcccctcccccacactactggttctgaaggctccgagtgaccgggaccgaccgccggggtgtgtcccgggacggacttccctggccgtgggggcgaggcttccataatggggcgtgacttttagggcgggggagtggctagccaatgagcagagaggtgctggccggggcggggcttgcgcgcgggtgcggcgcgctgcggagcggccgacgcaggcagaagccggcggcgcgcggacagccagtcggcgccgcgcggagctggccgctggattggctgcaacactcgcgtgtcaggcggttgctaggctccggccgcgcgccccgcccttgcgctcagcgccctctcaccgcccggtacgtgctcgcgcgaaggctgcggcgcggcgctcgcgcctcttaggcttggcggtggcggcggcggcagcttcgcgccgaatccccggggagcggcggtggcggcgtcctggggccaggaggagcgaacacctgccgcggtcctcccgccggcgctgggtgagtgcaccgcccgccctatccgctgtgcctggctgcttgggcccccatcc

SEQ ID NO: 111 - DNA, 1300 bp, Homo sapiens
gaccatctggtcaggttggataagaagtaacttttggcaaaatctctgaagtctggatttacacttcgtggaaggaatcttgacctttccccaagtatattatgccttgagataataatcctgtataaggccgcataagcaaaacgacatttgaaaatgagtttcatctttagctcatccttttacaaatttctattccttgtgcatgattgaagtgtacacattttttagttaaaatataagcatatagaaggcacaagttcaatatttttcatgataaggatgtgtaattaaactggttaggagactcatcgactagagggggacatggtggccccaggctgtaagaacaggccacaccgtccactgggccgcttgctttgtgctaagatgacactttgttctgagcctcacagtgtcttgaccatgttcctggaaccttcttgttggagggagttcatcttcccctatgactctgtccctagtctaaggtgtcccacaggaagcttgagggcgggaagttttccagcccaggagcctgagctcagcggggcaggaagagggagcagctcctccgtgggggacctttgagagcccaggagcaggatttcgagggacacctggtggggagcaaaaggtgctgagtctgtctttgaccttgagcccagcttgtttctcctgcatcctcccccaaaaggggctttgcctgtcattctgcagttctagtgtggggtctgggcgcagttcttttccctctccagcctcggagtcttcctctgtggactgcgcagataggactggtggcacggaccagctctgcagccctggagtcaggagcagagccccccggctcccagcccgccgtagccgctcctggcaccgagcgagccgcgatgacaatggctgcattgtgcttcatgtcccttcccatcaacatttctgtgctggactccttccactcgcgggtcgtctccagagctcagaaaatgaggtgatcagtgggacgagtaaggaaggggggttgggagaggggcgattgggcaacccggctgcacaaacacgggaggtcaaagattgcgcccagcccgcccaggccgggaatggaataaagggacgcggggcgccggaggctgcacagaagcgagtccgactgtgctcgctgctcagcgccgcacccggaagatgaggctcgccgtgggagccctgctggtctgcgccgtcctgggtgagtgcgggcacggggtagcaccgcagagtcgctggcccgcgcgttccctgcaacccgggcggccaccgcgca

SEQ ID NO: 112 - DNA, 1400 bp, Homo sapiens
ttgattagagttgccttgtccaatatggtagccaccagcaagatgtgactatttaaatttaagttaattaaaattaaactaaataaaagatgtatttcttcaatcccacctagctgcatttcaagtgctcaacagccacatgtggctccatattggtcagcaaagagaatgtttgcatcatcacagaaagctctttcagacagtgctgctctagacagcttcaacaatgataggttctggtaaccataaagttgctatgcatactactcatttggaacaccagtttctgagaactgaaatagaataaaacacatctttgcagtataactatgttgggtgtaactgagtcacctgaaaaagtttggaagctggggaataacatgtggtgtagggcagttagtctttccacaggagtatgcagataagggagtcttgatccttattaaaatgctgattctcagagccttgagatactgatttagaaagtctgtgctaggtcaggtatccgcatttgaaaagctgcccccatgtaattctgacggaagcagcaatgtgcttgtctaggttcgctattgtgagaatcaagttgatatttacctaacctatatcctccacaaaagcagacagtctggctctgctcttctttcctccatccttagcccacagcacagaaactggcacattgcaggtgctttttgctatgtcagttcctcacctgcttaaagaggtcagggaggacagtcttcctgggcgactcctggcctcaggaactcagatgtgtgagcctcgcccataagaaacaaggtggaggaccctgtagggcaggaaaatcatgttaacagctttggcgtggggcactccccaggataggcacaggagctgtgcaggcaagtagaaaagagcactgggagaacggcccagttcacagaagaggaggcagcaagtctgcacactttgtactatgctgaaattgttcaatcactcgacagttcagaaataaatataggaagattttgaaaatcctacctctctgctctgctccacagcactcctggaagcctgcactttccgtagaccttaaaatctcagaggtagggctgccaccaaggtgaagatgggaacgcagatgatccatgagtttgccctggtttcactggcccaagtggtttgtgctaaccacgtctgtcttcacagctctgtgttgccatgtgtgctgaacaaaaaataaaaattattattgattttatatttcaaaaactccattctttcctaaatattttcaacaaaggatttctttatgcattctgcctaaatacctatgcaactgagcccttccttctcagctcaagattcgtctggtctttccctacagctttgtgtgtgccatggccacatctcct

SEQ ID NO: 113 - DNA, 1300 bp, Homo sapiens
ttagacatatacttcctgactaaaaacagggttttaagaaaaagtcttccaccttaaaattcatatccacttcaaagagaaaaatttcagtctaatgataaactggggtactttctatttactaagactaatctttgcctctgaagacaggtttagttatggtttgtttatttgatgattaaaacaaagttattagcccctgttaggctctgctagttatttgcatatagcaatacagaatgatctggtaaagtttttatgcagatttggtccaagctcataaaacagataaattcttccaaattaaattcttatttttgtttacttaaatttggcatgctagatatcatgtttcatatcataaagctgcaattaatcatttgttagacttttagaaatagtcatgcaccacataataatgtttgagtaaatgacaaactgcatatgtgatggtggtcccataagattataataacatatttttactgtacattttctatgtttgcatatgtatagatacagaaatatcattgtgttacaattgtctatagcattcagcatagttatagactgtacaggtttgtagcctaggagcaataggtataccatatagcctacctagatgtatagtaggctatatcatataagtctgtgtaagtacactctgtgatagtcacacaatgacaaaatagcctaacaatgcatttctcagaacgtatccctgtcattaagaatgactgtagtaaaaagctacatgttttgattcattttacataattcttatcctgatttactaaaagtgcactgtttgcaggacactgtgctgtgacatattgtcagaggaacaaagggagcatttagacacgttctctgccctcctggaatttacacaatgaatggaaaaaggcacagagttatgcacaccctaatgcctccaacaataactgttgactttttattttcagtcagagaagcctggcaaccaagaactgtttttttggtggtttacgagaacttaactgaattggaaaatatttgctttaatgaaacaatttactcttgtgcaacactaaattgtgtcaatcaagcaaataaggaagaaagtcttatttataaaattgcctgctcctgattttacttcatttcttctcaggctccaagaaggggaaaaaaatgaagattttgatacttggtatttttctgtttttatgtagtaccccagcctgggcgaaagaaaagcattattacattggaattattgaaacgacttgggattatgcctctgaccatggggaaaaga

SEQ ID NO: 114 - DNA, 1300 bp, Homo sapiens
cactatgcctggctaattttttttgaaatttttttagtagagatggggtttcaccatattggtcaggctggtctcgaactccagacctcgtgatccgctcacctcggcctcccaaagtgttaggattgcaggcgtgagccaccgcgcctggcaactcatatgacttttaaacacttctctttggggagagagattttagagaatgggagtaaagagaaaggcggtgagaatcccaagtactttctctatcttagagcagaagaaataaagggaagagtaaaagcccaaggcccagaaacggatttgcttcttaaagggctgttctgtgtccctacgggcctgaaggtcagtttatgtgcaatgctttttaaggtatgggttgctttcttgcattgtagctactacctccctggcctgctggttactgaccagagggagggagagggtgtgattgtttggaaagagtttaaacagtgacaagaattgaattttatttatttgttattcattgcacaatccaataacagcgatggcaatgaaaacgaaagttaatctacaatcctatcaccctattaagtcacttgtttctattttcccttttattccctcatgcattaaacattacgcaaagcactccgctagtcttggttaaagtgcagcttgtatacattctgaataaaaatttgcattttgcttttcttttcctttttgtatttctgaggctgcaaaatacatcttcacaagagtggctttaatagttacctaacattccatcctgcacgtacatttcaaggcactgccgcagtgcaatatccaacatttaagcgtcaacgccaacagattggacctagcactgcagggactggaggttggtcaaggtcaggcggaggctgccaggctaccagggtggaggaaggcgccgaggcagaggccagtgcgcccatcgcgcggctcctcggggcacctgctgccttggcgccttttcccttggccttcgcctcgcccgcagcgccctccgcatagggccccgcccgctgcgcgcgcatccccgccccccgggcgatctgtcagagcacctcgcgagcgtacgtgcctcaggaagtgacgcacagcccccctgggggccgggggcggggccaggctataaaccgccggttaggggccgccatcccctcagagcgtcgggatatcgggtggcggctcgggacggaggacgcgctagtgtgagtgcgggcttctagaactacaccgaccctcgtgtcctcccttcatcctgcggggctggctggagcggccgctc

SEQ ID NO: 115 - DNA, 1300 bp, Homo sapiens
gcatccccaaccacatggggagtgccgcttttgcccgcctgcgacagtggttctcaacatttgctgtgccccgaaataaaaacagattgtgggccccgcccccagagctgtcgatccagtgggtcggaggtggggcctgagcacttgcatttccagcaagttccagggtgatgctcacgttgctggcctagggaccacactgagaaccactgtcctagaaatacggtcaacccaccctttcctccctcaccttcttcactctcttcctccccttctccgcctgtttctccttttccgcttcctccaattcctctctggtcctcttctcaccttccaatcagctggctctgccactgactggatgcctgactcgggcaagtcacctcccgtctctaggcccgaggagaggcagtcggctaggccgagatgcccctgcccggctcccccctcgccagggcgctcggcctgggctcccccgtatcccagatcctctgtgcagctgtggccgagatgcccctgcccggctcccccctcgccagggcgctcggcctgggctcccccgtatcccagatcctctgtgcagctgtggccgagatgcccctgcccggctcccccctcgccagggcgctcggcctgggctcccccgtatcccagatcctctgtgcagctgtggccgagatgcccctgcccggctcccccctcgccagggcgctcggcctgggctcccccgtatcccagatcctctgtgcagctgtgctgggagggagctgctgcgtgaatgagatcatcctccagctgccctccagccccgactctgggattctgacctctccttccttccacgtctgagcttttctctctccagttagacacggtatctggagtctttctagggcgcgaggaggggaggataccctggaacgcggggtaggaggctgaggcgagagccccgagcagcggcgcccgggcccgagcgggaggcctccagcagggggcgcgccggggccgcccaggggcggggtccggggtcggcgggaggtgacctgcgccccaggggcgtggattccgcccgggaactcgcggccgcacttaaggagctcgggccagcgcgagggggagcagggaggaagcccggctgctgcggacctcctcggacccggacccagccccagcccggccccagccagccccgacggcgccatgcggggtccgagcggggctctgtggctgctcctggctctgcgcaccggtgaggccccgctgtgagagccaaaggcgggcgggggtcccggggcgccgc

SEQ ID NO: 116 - DNA, 1400 bp, Homo sapiens
tatctgtatggctttgtctcattaagcaacatctttcaggcatttcagcaacaagtaattttactttatttttaattgttgtatctttctcttttcagacaccatcataagagcccagcaagaaacagggcaagaagactaaccaagtgctaagtaccatgctacactcacccatccactccacacctaaagtccttgaaaattaatgagcatcttcattttcttttccattgaggtacattccttcaggctgagttggggaaaaatataaatagaaacaaactaagaatccaagattccctccatatagaactgttaaatatacatttatacaagaaggaaagaaaacaaattagctgtggttatatcttgggcagtggggttcaattgtttgacaagtatttattgagtgctttctaggtgccaagtacaatttaagttattgaagatatggcagtgaaacacaacagagcaacatgtctaactttatggaattcagcggggagagacaagcagcaaaatacatagttagtgtatcagattgttccatgtaccacggttgaggcagaagaatagggtctggaggcagggaacctaaggctgattcacactgacttcctagaactaaattgaaaggaaaacaccaacttttcacacctaagtaacaaaaggaccagaggctactccctgtgcaactccctccctccccttttactgcatggcagatggaaaattgaaagtccctctgattggttgctttccacaaccagtcagacaaattgtgtgccaagtcttcatttgcataggcgtgtaactttataacttcaatttatcctctaattggcaattagacatttgcatgggtataactttgtaacttcagcctctgattggttgctttccacaatcaatcagactgatctcaggccactacttaatttgcatggggtgtacatcaagtggccaatggaaaacttctagagaatatttggacctcagaagaccctgtaaccagggcccttgagctgttgatcagcccactcctaccctatggagtatactttcattttcagtaaatctctgctttcattgcttcattctctccttgctttcctgtgcattttgtccaattcattgttcaaaacaccaagaacctggacaacttgtagtcaagacactccaccaatatcatggagaaacatgaagctgagatggaagctggggccagatgtgaaggtggaggggaaaggtgagtgctattgcaaacaacattcagcaaggaccccgctgacaagagagcatttgcgcatagggctgaaaaaggtaagggagcatccccagaccagtggagattgtaaaattccttcttggccctctctccttaaaatcctctagaatca

SEQ ID NO: 117 - DNA, 1300 bp, Homo sapiens
ccatcctggggtgggatccagagatttagattttttataagctttcctgccaccgaaacgggtgtttgggacctcacgaggccctgttcattcttcgtcgctgcgctccccactctgtactggatgcatttactgacgttgttgtctccgtccccagagtatgaacccccaaggtgactcatgcagctgtgggtgcccggcatacagcatggtgactggaatggatgagcacccaataaacatttgttgcaggaatgcaggaggacgggcaggccagcaagcaggctgcctggtttttcccacatgggcttttctgggaaagaagagcttctatttttggaaagggctgctatgattgagaaaagttcatggcagcaaaaaaaggacagacgtcgggagggaaacactcctagttctcccagacaacacattttttaaaaagactccttcatctctttaataataacggtaacgacaatgacaatgatgattacttatgagtgcggctagtgccagccactgtgttgtcactgggcgagtaatgatctcattggatcttcacggtgggcgtgcggggtggacagcctcacacccccattttacagatgatgaaaaggaggtgcagggagtggtgcagctgcttcaggcgtacacagataggaagtgacaaggctgggactctgcagcctgagtgtgtcatcacgacccacccgctgctctgctctcataggtatgacagcacagctctggagcaaatgccacgcacatttgcaaggtgcccatttccatgcagcaaaaataagtcaataagttattgacttacagaaaagcaaagggcctctcaataaagaggtcattgtacacctctccaaacaggcgattttctttctcatttttattcccctgctgtgtgctgaaggtcactggctacaagccggtgaagtcgcggaatggaatccttggcccgaaaacccaaaaatgggaggggcagaggaggtggggacagagcgggaggaggtggaggcgaagcaattctacaacccggggaggtctggcctgcttttcctccctgaactggcccaatgactggctccctcacgctgaccactcctctgggctggcctcctgcactcgcgctaacagcccaggctccagggacagcctgcgttcctgggctggctgggtgcagctctcttttcaggagagaaagctctcttggaggagctggaaaggtgggtgctaagttgaggttcattttgttcttctcggagtgtgcttattgagtctgaagctgggttgg

SEQ ID NO: 118 - DNA, 1300 bp, Homo sapiens
acctttttatgatttgttgaaatttctcactccatcccttttgctagtgatcatgggtcctcagaggtcagacttggtgtccttggataaagagcatgaagcaacagtggctgaaccagagttggaacccagatgctctttccactaagcatacaactttccattagataacacctccctcccaccccaaccaagcagctccagtgcaccactttctggagcataaacataccttaactttacaacttgagtggccttgaatactgttcctatctggaatgtgctgttctctttcatcttcctctattgaagccctcctattcctcaatgccttgctccaactgcctttggaagattctgctcttatgcctccactggaattaatgtcttagtaccacttgtctattctgctatatagtcagtccttacattgctttcttcttctgatagaccaaactctttaaggacaagtacctagtcttatctatttctagatcccccacattactcagaaagttactccataaatgtttgtggaactgatttctatgtgaagcacatgtgccccttcactctgttaacatgcattagaaaactaaatcttttgaaaagttgtagtatgccccctaagagcagtaacagttcctagaaactctctaaaatgcttagaaaaagatttattttaaattacctccccaataaaatgattggctggcttatcttcaccatcatgatagcatctgtaattaactgaaaaaaaataattatgccattaaaagaaaatcatccatgatcttgttctaacacctgccactctagtactatatctgtcacatggtactatgataaagttatctagaaataaaaaagcatacaattgataattcaccaaattgtggagcttcagtattttaaatgtatattaaaattaaattattttaaagatcaaagaaaactttcgtcatactccgtatttgataaggaacaaataggaagtgtgatgactcaggtttgccctgaggggatgggccatcagttgcaaatcgtggaatttcctctgacataatgaaaagatgagggtgcataagttctctagtagggtgatgatataaaaagccaccggagcactccataaggcacaaactttcagagacagcagagcacacaagcttctaggacaagagccaggaagaaaccaccggaaggaaccatctcactgtgtgtaaacatgacttccaagctggccgtggctctcttggcagccttcctgatttctgcagctctgtgtgaaggtaagcac

SEQ ID NO: 119 - DNA, 1300 bp, Homo sapiens
gctaccaggttaaatgactgaaattcctgagagaaaacaacatgtgtgtgtttctctagaaagggggcccaatactgaataccaggaagtcctatagtaaatggaatgtgactctatgtgggatccggcgttcctatttcatccgaatgcatgtctgctgcttcagtgggaagggtgcttgcacaccaggtacccactccctggtgtcatgtgctatgcagtccaaagacagaaccaggaatggtgagcccatgagcctgctggacccagcccctccgaggtccggagtgacaaccagtgccgtatttctagatcaaacctgaacccctcctacagggaaaagatttccaggggattttgaaagttccaacattttacagggaagaaggaagataagcaggatatgaaagaagagttcatgttatacagccctggcttccactgacgctaacactggattcagcttttgacactgataatctgttgccaccaaatggaaaacgtaaacaagatattctaagtgtggttagagaatatgcaacacaaggaacaagcagaacattcttctctggaatctgacataatggactgtactttcacagacagcactgatgttagatgtacgtgaaataggctaaactgaaaataagaaaggctgaggcagagaggataatatagctccagcctatctcccagcaccttgttaatttctctcaatctccagccacaaatccgagacacaacgctcttcctccaaagaggtcgcgccttctctgtggtggttctcagggatccgccccagctccttctccgttcccagccccacacactgggatcaccaggcacccaagatcccacctctcaggtggtatcttcagcgcaggctgccactcagcccccctccagggatctggggcagaaggcgaatatcccagagtctcagagtccacaggagttactctgaagggcgaggcgcgggctgcatcagtggacccccacaccccacccgcaccccaagcgctccaccctgggggcggggccgtcgccttccttccggactcgggatcgatctggaactccgggaatttccctggcccgggggctccgggctttccagccccaaccatgcataaaaggggttcgcggatctcggagagccacagagcccgggccgcaggcacctcctcgccagctcttccgctcctctcacagccgccagacccgcctgctgagccccatggcccgcgctgctctctccgccgcccccagcaatccccggctcctgcgagtggcactgctg

SEQ ID NO: 120 - DNA, 1300 bp, Homo sapiens
tgacttaagctgtttcaggaaagtgatccagtctttggagaataatcaggacataattaagtatgagtaaaaggcttagagttagtctgttctcctctgtaatggggtgttcactagtgtgacagttgtttttgtgactattgcttttacgtacatttttgaccagcacttggaacactacctcagggtaacttaaatgaaagtccattttccaggatggagtaaactgacagaaatttccatcgtgcatcaaatctgctataagttgtttgccttctgggtatttttgggccctagttgtactcctgaagaaataaccactgttgctccaagtagaaagtggttgaggagacagctaacagatacgtccagttcttattttctatcacagagatgtgaaaaaaaaaaagcctaaattatcttagaaggaaaagcattcctctgtgctggatttccagtgcttcccagctttgcactgttagcttattttttccaatgtccctataataacaatccactcctttctctgcactcctggcccctcgtgatgttttatcatgctcatgctgaaagaaaaggtgtctgtccatactgtatctcttcatttggcctcagggatttccctttgatttggaaagaataatctttcaaattccgctataaactatacaggagaaagagaaaaataagataaagctcctggaatgtgcactggtattgacatttcgttcaaataatgggctgaaggtgaactatctttactattgctcatgtgaatgatcaattattatcaatccaaactatcaacagtgctgcttattattgatttatactgcatggtttaattttgtctccatccttccagacattaaaacatagccaatatttagcagttcccgccattcaccatgagcacctccacagcccccaactcctctctcccagttctgcccaggatatttatggtgagtagcgagttatctcctctttggcagtcatccctgctttcctgtgtggaggaattgcccacattcgcatttgcaaacagaggctcactcaagtgtcactaaaggaaaggaggtggagcctgaagagctttaaaaagcaaagctgagtcattccacttttcaaaaagagaaactgttgggagaggaatcgtatctccatatttcttctttcagccccaatccaagggttgtagctggaactttccatcagttcttcctttctttttcctctctaagcctttgccttgctctgtcacagtgaagtcagccagagcagggctgttaaactctgt

SEQ ID NO: 121 - DNA, 1300 bp, Homo sapiens
tccatacttgcaactccttctagaagcttccccaaatctcctgcctccccacgctgagttatccgatgtctgaaatgtcacagcacttagtcttactcttctatggcctactttctactgctatttgtgttactcatgctacccatcttatctccctcagtgtgtgagacgctggcatcagatttggcatctcccacacactcaacattatgtgttgcacacagtaggtactcaatacatgcaagttttctgaatagatattttcctagtcatctgtggcacctgctatatcctactgaaaattaccaaaatgcaattaacttcaattttacatttgggatttacagaaaataactctctctccaagaaatgcataacaatttagctagggcaaatgccaggtccgagttaagacattaatgcgcttcgatcgcgataaggatttatccttatccccatcctcatctttctgcgtcgtctaattcaagataggtcagtaaaggaaaccttttcgttttagcaacccaatctgctccccttctctggcctctttctctccttttgttggtagacgacttcagcctctgtcctttaattttaaagtttatgccccacttgtacccctcgtcttttggtgatttagagattttcaaagcctgctctgacacagactcttccttggattgcaacttctctactttggggtggaaacggcttctccgttttgaaacgctagcggggaaaaaatgggggagaaagttgagtttaaacttttaaaagttgagtcacggctggttgcgcagcaaaagccccgcagtgtggagaaagcctaaacgtggtttgggtggtgcgggggttgggcgggggtgacttttgggggataaggggcggtggagcccagggaatgccaaagccctgccgcggcctccgacgcgcgccccccgcccctcgcctctcccccgcccccgactgaggccgggctccccgccggactgatgtcgcgcgcttgcgtgttgtggccgaaccgccgaactcagaggccggccccagaaaacccgagcgagtagggggcggcgcgcaggagggaggagaactgggggcgcgggaggctggtgggtgtggggggtggagatgtagaagatgtgacgccgcggcccggcgggtgccagattagcggacgcggtgcccgcggttgcaacgggatcccgggcgctgcagcttgggaggcggctctccccaggcggcgtccgcggagacacccatccgtgaaccccaggtcccgggccgccggctcgccgcg

SEQ ID NO: 122 - DNA, 1300 bp, Homo sapiens
gaaggcatcagctaaacaggcttggaaatgctttattgacattcctctagaactaaaatttcctcgatagctgtttctctagagggaaccaatcccaggatgctggtaaatacatatggcatggaaatgcaattatgttagcaatctagtatgtatatatcagacatgtctgcttgtgcttagagtagtaaacaagcggagtctcattccctgctccttttctggtggtgtctatggccttttctgcccagggacagcactagaaaaggcagacctcctgagcccaacaggcccctcgcagctcccagtgacttccatggatcaaaacacagacttccatacaacaaaaaattgatgctactggaattactagagttcgagatgttccaagatttcaaagagagaaaggatgggggattgcaacactgttaactaaaataaacactgaattgacccttggcaatggtctgttcccgcacccaacacctggctccactacgttgaaacacacacacacacacacacacacacacacacacacacacacacacgtgatatttgcttttaagatcataaaacaccaggaaggagacaaaagctcttatgcgtcatctgagatgacacatgtactgttaaagcgtgcgtttatttcaaacattaatgaaatttgcagaacccaaactaaagagagaggatagataagacatgctgcagttcttgccctaactttcaatcccaacaactgaaatgtcttccagagaagtaactccccccggtaaggatgtagcgcggtccctacgtgggtctaagggatctgacccacgacgcactgcactgggttcacgaagcgcctcctcgcaggcggttatctcggtatctctgagagcggcgggctctcgctcccgctccagggattcggggcagaaagagaacatcccacagttggcgggagttacgcaagacagtcagacccggacgtcactcgtgagtgccccgacccccctccaccccagaggcggggccatcgccttccttccgaactcgggatcgatctggagctccgggaatttccctggcccgggactccgggctttccagccccaaccatgcataaaaggggttcgccgttctcggagagccacagagcccgggccacaggcagctccttgccagctctcctcctcgcacagccgctcgaaccgcctgctgagccccatggcccgcgccacgctctccgccgcccccagcaatccccggctcctgcgggtggcgctgctgctcctgctcctggtggccgcca

SEQ ID NO: 123 - DNA, 1400 bp, Homo sapiens
tgtatatagcacaccattgacgtaaccattaataactccatcttaggagaagaccccatttttacatttcataaggcatttgccaacaagcatactatactttaataaacaaataaaaaaatagtccgcatccagccaggtaaggacacaaacaagcactctcttccattaccagttctcaccacaggactctgtgactataaaagatggggccttcggcagctcccaacagccggcttaattgacgccgtctttgcagaaggacctctcggcccaaaccaggcttcttttcctcttcttcactccctctggattggttcgttaatctctttgccccatctctttttcctcatgatgttaaatgctactttgttgtgggatgcttaacttgtaacatttatatgtggattaagtacactactatgatgcgtgagcggcttgagcctgtgtgtcaggctctgactacccagtgaccagcaagtgctgagaactgcctccttgggaactccacgcagctcgtggcttttgtgatcgaaagagcgtccacagcagcctgacatggtggaaaacacagcatgcgtggacctggttatttctagcctggcaccctgatgacaggaggttaaggcttttgatttagggagagagacctgagggtaacccaaagaaaggcctcaggtcatcgcagaggagacagaaattaccggtgggcgtcccggcctgctcctcttcttcccagagctcaaactgggcagcaggcctggctttgtctcccttctaggtacccgttgggcctggcgcggtttccaagtctccctcaatttccctccagaatcccgcgctgggagcggaagcccgcggactctcaggaagacctagatttcaaatccggggcgggggagccgggccgagcctcagggcgggaccaaagcgggaggactggcgcgggacgcgagggcgggaccagggcgtgaggacgcggggcgcgggggcggggcgcgctgcggtgggcgggcgcctcctggggcccagcctggggctgggttctcgggcgggcgggagctaggggacgggccgcagcggaggcggcgcgaggggccgacaggggcgggcgggaggcggggctggcgctggagcacatctcccggcggcgggccgcggaagcagtgcagacgcggctcctagcggatgggtgctattgtgaggcggttgtagaaggtatgaggaggctgtgcggtgactgccgccctcgctccgggccgtcagccctgcccccgctccctgcgttctcccaggccctgcgcccgcccgggtacctgcccggtctggaaggcggagtgtttgttttgccacctcgcccgggcgggggcgagcagtgaagcccgcggagcgagagactt

SEQ ID NO: 124 - DNA, 1300 bp, Homo sapiens
tggtggcgcgggcctgtaatcccacctactcggaaggctgaggcgtgagaatcgcttgaacacaggaggcagagattgcagtgagcggagatcgcgccactgcactccagcctgagcgacagagcaagactccccctcaaaaacaaacaaaacaaaacaacaacaacaaaaaacaatgactagggaaagtaggccatgaaaagtgttgtttccaacctatcaattgccagtactacaagcaggagttagacgtttggaggttttcacacggtgctataaatacagtttccagggccccggtacacgtggccttcctgctctgccaggatggagagtcttgctttccacattgctgatgtggtcagactaattaaattattgcaaaaagacacattccctagtcaaccttatgtgtctgccttcttcccttgagtcacagttgttggctttacaggccaaggcaagtaagtcttgaaccctcagcagaaacagggcaccagcatcggatgcctcataacctgaacagttaaggacgccccaccacagagcttctttctgagtgtgataaactataaggcaagactgtaaaggggtggatcttcatttcgatttagggtaggtgacacctcaagggtgtttcttcccttccagcgtaactggatgggaaacctacaccaagtgtgcttgggagggctgcttgggtcagctacctgtaagtggaaatagggggtgccaccttccgatgaaaacccggatcccgtactgtcaacggagggcccttgaattcacatccctcagcccgctagaaagcccctgaaaccacgtggcctttaacccattccggcaacagcgccaattcccggaagcgagagggcaagaaagctcggcgcgacgcttcccgcgtcttctaggccgcgcgctgaaatcaaacgcgacgccggctagctgtgggccgggccgagcgctcaacgctccagcggctgggtaagccgcggccgccgcccaccccgctgcagagctgggcggggccgcctggaggcagcggggagaggccagccgaaaaggaagaagagacgccggaggcgcgctctgcgcaggcgcgcggcgccccgcctccccagcgtcggctccccggcgggcggtgcgggccctcccactctaccccgcgccgtctcacggccccggccctagcttcaccccgactacccggcgtgcgcgtcctcctgccggcctgcaggcccggggcctccgcctgcttccccacagctgctccttgcggccccgcttgcgttcacgctgt

SEQ ID NO: 125 - DNA, 1300 bp, Homo sapiens
ccccccgccatcataatattgtgaatgtaaagagagattggttcacaatgagaatgtacagtaggctcctataagggtgacaggattatatgcagaatgactttgaagagccaaaattgatttatttatgttaagtagtgctaagaaggaatatttgtcccggagtgaggcatttgagatagagggggaaaagcaaaaaaaaaaaaaaaaaaaaaaaaaaagtgattacatcatcttcccgttcaagcagtattagtagcgaagatgggttcatcagtgaaatattttgcaaagataaatatacctccactctgcattctgatctatagcctctttctttttggaagaagcattttctttgcccagtttttttaggcagtcacattaaaattctcattaataatgttgacagacaattacgtttattatttctgctaataggcatctgcattcctattcagaattttcattgttagtctataaagtctagttttaactttggaatgtttggtagaggaggacatctatacattttcttttaactgtcctttctaatgtggtacatttgtgacagtgtttgaattctgggttttcagtgaattatggaggactaaaataccaggagtagtccgtactgcttctcttatacatgagagatatctaaggactataaaacataacttaagtatacccttttaatgcctttgtaagatttttaaaccaaggaatgactgggctatctataaacccagatgcactaagtggggagaaaagctcggagctgcagcatatcagcttttgtcaacctgccaacagcagagcgtaccatgctgcaaggagtaataaacaaggaattagaaaactcgctgctggagaacagtcaaattaaacacctttttgaaaggatgagcatgtatatattgcagttctattaaatgtagcttcttagtgaggttggcattatgttaaggctggtatggaagagaactgatgaagcaggagtggtctggtgacatttttctgacttgattggctggggcgtgtgatgtaataggtttcagtgcagccccttataggttttaaaatgaattccaagacaccattacaaagaaagccggactcttttcttataactgagctcagccaaggaaactcttgcacaaatgtacaatactgtttggaatatggaagacctggatttagaatatgccaagacagatataaattgtggcacagacttgatgttttatatagaaatggacccaccaggtaatactgcagtattattgtagagagttag

SEQ ID NO: 126 - DNA, 1300 bp, Homo sapiens
gaggccaagtgcttaggttttgtgtgtttgtttttaagagttttcttgcaaggaaactgggagggaactataaaagggctttaggcaaacagggtgggcgggtgcagggctttaagctgcagaaaggagaatctggaaagagcttttaggaagcagattctcacatgttttaatatgaaagagtggcacacgtggtgctggcattccatcttaccatcagtggaaggtttgaaccaacatcaaatttttctggagcaacttaggtaattattacttgaagaatatgcatttcaaaactaacacctttaagagacaatgtaattcacctgcgcttccccgccccccccgcccgcgccaaccccaccccccgccaaccccgcccccgactccgcgaacgccgaggggcccgtggtctgcctgagtgacctccatttgctctgtcatctcaggactagaagccatcagccagcgtacgccctcagaaaactctcttcccttctcgcgggtccgcctggctcccggaggcggcggtgccaggctgccggagttagccagcggcaggctgcgggcgcccgtccctccggttcaccctttcacccctccttcacccccggagcgccaggcgggtgccgcgggttttccgcccactcggaaggcagtgctggcgagaccaggaattgcagggcctctccgctttggcgagctctggaatccgagtcctccccaccccagccactctgctggggcgctaggggctcgaaaaagcctggggttggctgaaagacactcggattagagacgcagccagcctccagggaggtctgaacttgtcttcgacctccccgaacccctccgcctctgcgctgggagacgcccagcagccgggcgggcccgggacgtgtagagccagagcactccgcagcggaggcagcgcgcggcacggccgcccggggcatccccgcggctggggggcggaaggcgagggcggtggcaggaagggtccgccaggcctgagctcgctcccccactgccagccgccggctcggaggcccgagccgtgcggacggaaaggggcggagccgcgggctctggttggtgtgggctcgggggcggggcgcgcggggccgggccggaggcggggctagcgccgggcgctggagctgcgggcgcacggagaggagtcgccagcagctggagcggagttggaggaagcagcggcagcggcgagggcggcaggctagctgtcggagacggcaagcacggatcgggcacggccggcgggtcgcagccgggctggagg

SEQ ID NO: 127 - DNA, 1300 bp, Homo sapiens
gcagcacacatacacccagaaatgggcacgtgtgggcccacacccctttagctatgaaacccaggcatggggcagcttgagccagataccttgtgcaaacacaaactcgtgctgtcttctctgaactccattgtgaaaatcaaacacttgtcagcccctcaagagcctttagatttcctacttccacacttccacagaaaggcctctggagttgggggatgctggggttatgtaggaaattaagcctggagggccttgctggggaagccattgtccctgtacctgagatggatgcagccacagccctggagccagcctgaagctcctggtgtcttctgggggctacatataggagtgtagtccgaacctcagaggggcaaacctgctctgcagagggaatcaaggttcacataaccagagaggggagtcactcaggaaggtggctccagagccaagagtcagactctgggtcccgacttgacccagccacaccccctctgaagcttgctgagagtggctgcagtctcgctgctggatgtgcacatggtggtcattccctctgctcacaggggcaggggtccccccttactggactgaggttgccccctgctccaggtcctgggtgggagcccatgtgaactgtcagtggggcaggtctgtgagagctcccctcacactcaagtctctcacagtggccagagaagaggaaggctggagtcagaatgaggcaccagggcgggcatagcctgcccaaaggcccctgggattacaggcaggatggggagccctatctaagtgtctcccacgccccaccccagccattccaggccaggaagtccaaactgtgcccctcagagggagggggcagcctcaggcccattcagactgcccagggagggctggagagccctcaggaaggcgggtgggtgggctgtcggttcttggaaaggttcattaatgaaaacccccaagcctgaccacctagggaaaaggctcaccgttcccatgtgtggctgataagggccaggagattccacagttcaggtagttcccccgcctccctggcattttgtggtcaccattaatcatttcctctgtgtatttaagagctcttttgccagtgagcccagtacacagagagaaaggctaaagttctctggaggatgtggctgcagagcctgctgctcttgggcactgtggcctgcagcatctctgcacccgcccgctcgcccagccccagcacgcagccctgggagcatgtgaatgccatccaggaggcccggcgtctcctgaacctgag

SEQ ID NO: 128 - DNA, 1400 bp, Homo sapiens
ccaagccggtcctctcttcgcgcccagcccggggtccccagacagcccatagggaagcccctctttcggattcccgcagtgtgggccggccctccacctggactggataaaggggggaaagtgacccctcaccacaaggaccattatctcctggtgagaacaagaatcaggcctctcttggggcaatcagcttccccacttcggtcccccaaaggtgggctctttgccggcggggactagggaacagcctttcggttccgggggagcacaggggaccccaggcaccagcagccccatcccaccgacaggtggcagaggcaaggcagctcactgctatacagtgtcccaagaaccaagtggccgtgacttcctatcctcaatttcccagcgacacccggaaagacaccgtgccatagatcgaggcccggggtcaaggccccgcctctcctgggcggcccctgcccaggcgggcccagccgctcctcccccgcactcccggttcgctctcacggtccctgaggtgggcgggcgggccctggatgacagcgatagaaccccggcccgactcgccctcgcccccgctctgggtctgggcttccccagcctagttcacgcctaggagccgcctgagcagccgcgcgcccagcgccacacgccacgagccctccccgcctgggcgtccccggatcccgcgagcgctcgggctcccggcttggaaccagggaggagggagggagcgagggagcaaccagctgcgacccggaaatgccatataaggagcaggaaggatcccccgccggaacaacccttatttgggcagcaccttatttggagtggcccgatatggcccggccgcttccggctctgggaggagggaagaaggcggagggaggggcaacgcgggaactccggagctgcgcgggtcccggaggccccggcggcggctagagctctaggcttccccgaagcctgggcgcctgggatgcgggcgcgggcgcgggccctagggtgcaggatggaggtgccgggcgctgtcggatggggggcttcacgtcactccgggtcctcccggccggtcctgccatattagggcttcctgcttcccatatatggccatgtacgtcacgacggaggcggacccgtgccgttccagacccttcaaatagaggcggatccggggagtcgcgagagatcccagcgcgcagaacttggggagccgccgccgccatccgccgccgcagccagcttccgccgccgcaggaccggcccctgccccagcctccgcagccgcggcgcgtccacgcccgcccgcgcccagggcgagtcggggtcgccgcctgcacgcttctcagtgttccccgcgccccgcatgtaacccggccaggcccccgcaactgtgt

SEQ ID NO: 129 - DNA, 1300 bp, Homo sapiens
ctgcagatgcgcaccagcacgcctggctaatttttgtatttattatagagatggggtttcaccatgttggccagctggtctcaaactcctgacctcaagtaatccgcccacctcagactcccaaagtgccaggattacaggtgtgagccactgcaccaggcctggaacaattttaaaataatgtattggctctgcaaatgcagcttcagaacaagtcccttagctgtccccaccccaccctaagtcaccacccttaagcctcacccatgtggaattctgaaacttcctttgtagaaaactttggaaggtgtctgccacattgatcctggaatgtgtgtttatttggggttatataaatctgttctgtggaagccacctgaagtcaggaagagatggagggcatccttcaggagtgagatgagacctcatcatacttgactgtccagcatcatctctgagtaaggggaccaaaaaatttatcttccaaactaggacactttcaagagtggaagggggatccattaatattttcacctggacaagaggcaaacaccagaatgtccccgatgaaggggatatataatggaccttcttgatgtgaaacctgccagatgggctggaaagtccgtatactgggacaagtatgatttgagttgtttgggacaaggacaggggtacaagagaaggaaatgggcaaagagagaagcctgtactcagccaagggtgcagagatgttatatatgattgctcttcagggaaccgggcctccagctcacaccccagctgctcaaccacctcctctctgaattgactgtcccttctttggaactctaggcctgaccccactccctggccctcccagcccacgattcccctgacccgactccctttcccagaactcagtcgcctgaacccccagcctgtggttctctcctaggcctcagcctttcctgcctttgactgaaacagcagtatcttctaagccctgggggcttccccgggccccagccccgacctagaacccgcccgctgcctgccacgctgccactgccgcttcctctataaagggacctgagcgtccgggcccaggggctccgcacagcaggtgaggctctcctgccccatctccttgggctgcccgtgcttcgtgctttggactaccgcccagcagtgtcctgccctctgcctgggcctcggtccctcctgcacctgctgcctggatccccggcctgcctgggcctgggccttggtgggtttggttttggtttccttctctgtctctgactctccatctgtcagt

SEQ ID NO: 130 - DNA, 1300 bp, Homo sapiens
ggagaacaaaaggataagggctcagagagcttcagggatatgtgatggactcaccaggtgaggccgccagactgctgcaggggaagcaaaggagaagctgagaagatgaaggaaaagtcagggtctggaggggcgggggtcagggagctcctgggagatatggccacatgtagcggctctgaggaatgggttacaggagacctctggggagatgtgaccacagcaatgggtaggagaatgtccagggctatggaagtcgagtatggggacccccccttaacgaagacagggccatgtagagggccccagggagtgaaagagcctccaggacctccaggtatggaatacaggggacgtttaagaagatatggccacacactggggccctgagaagtgagagcttcatgaaaaaaatcagggaccccagagttccttggaagccaagactgaaaccagcattatgagtctccgggtcagaatgaaagaagaaggcctgccccagtggggtctgtgaattcccgggggtgatttcactccccggggctgtcccaggcttgtccctgctacccccacccagcctttcctgaggcctcaagcctgccaccaagcccccagctccttctccccgcagggacccaaacacaggcctcaggactcaacacagcttttccctccaaccccgttttctctccctcaaggactcagctttctgaagcccctcccagttctagttctatctttttcctgcatcctgtctggaagttagaaggaaacagaccacagacctggtccccaaaagaaatggaggcaataggttttgaggggcatggggacggggttcagcctccagggtcctacacacaaatcagtcagtggcccagaagacccccctcggaatcggagcagggaggatggggagtgtgaggggtatccttgatgcttgtgtgtccccaactttccaaatccccgcccccgcgatggagaagaaaccgagacagaaggtgcagggcccactaccgcttcctccagatgagctcatgggtttctccaccaaggaagttttccgctggttgaatgattctttccccgccctcctctcgccccagggacatataaaggcagttgttggcacacccagccagcagacgctccctcagcaaggacagcagaggaccagctaagagggagagaagcaactacagaccccccctgaaaacaaccctcagacgccacatcccctgacaagctgccaggcaggttctcttcctctcacatactgacccacggctccaccctctct

SEQ ID NO: 131 - DNA, 1300 bp, Homo sapiens
cctgaactcgggaggcagagcttgcagtgagccaagatcgtgccactgcactccaccctgggcgacagagcgagactccgtctcaaaaaaaaaaaaaaaattaaaaataaataaataaaaataaaataaagggtttagtgtctatccctctccacaccgcagattcctaggccgcactccctttcccccgcttcccagttaccccgcctcccccttaccccgccttccccgcctccccatttccccgacaggccgcactcccttcccccgcctcccccattctggctgctccgaccaatcaatctgaagccatcttagctttccccaagtgctcctcctacccggatcagccaacgcccacatacctcaggcttaaaccaactagggaactttccagtactttcccaaacaaggacctactgagcctttcaggttcacaatcaatcagatccctactggctcacctagtctcccgacgccttcgcttcagtttggaaacgtccagattacgcagccccagcgagtaggtgggggctccctcaatatcaaactgcacaaccggggtccccccaccccccaccccgtccctccctgcaaatttgagacggctccaactcagtaatctttttccaaactggcccatgaggtcagagacagtatctccattgtaacgtggccgggcggtgtcaacacaaacgcccccaccctcccctggacgcgcgtaacccgctccccgcaccagccccctgcccacaactgcgcaggcccagcaagcccccacaattaaaagcccagcgccgacccttcctgtcaattaggcgctgaagcgcaggcggtcagcatcgccatggagaccaacacccttcccaccgccactcccccttcctctcagggtccctgtcccctccagtgaatcccagaagactctggagagttctgagcagggggcggcactctggcctctgattggtccaaggaaggctggggggcaggacgggaggcgaaaaccctggaatattcccgacctggcagcctcatcgagctcggtgattggctcagaagggaaaaggcgggtctccgtgacgacttataaaagcccaggggcaagcggtccggataacggctagcctgaggagctgctgcgacagtccactacctttttcgagagtgactcccgttgtcccaaggcttcccagagcgaacctgtgcggctgcaggcaccggcgcgtcgagtttccggcgtccggaaggaccgagctcttctcgcggatccagtgttccgtttccagcccccaatctc

SEQ ID NO: 132 - DNA, 1300 bp, Homo sapiens
ttaaagagagctaaacaccccccgcacctccctcccagggtcaccatcttgttaaatttgacctaaaaacggtaacagcctaggggtttcagggacagacagaaaatcttactcgggactgtgaggtcctacttctacacaccgtccaggagtgaaccaggaattgagaaagtaggaaggaggtgtcccagaccccaagctaggaatggggagggaaatggaggaatcccaaatgccttaaggacggcctacatactaaggaaaatttttttctaactcctggttgcagctgaggggagcggctgagggcggggacaggggtgcggcggacccactgctcccattacccgaccagcgcctcccttcctccttggatgggtgcccctgtcttgctaagaactgcctgtttacacaactgctttccttgtgaaaatttaaaggctcctattcccagttgttctatccttgtaggttaaagattatgtcaaaaactatattgcattatctctttccttctccttcccattaagacggaaaaaacatccgggagagccggtccgtttctcaggcagactaggccattaggtgcctcggagaaaggacccaaggctgctccgtccttcacagacacagtccaatcagagtttcccaggcacatcgatgcaccgcctccttcgagaaacaaggtaactttcgggttctggttgtctccaaagtcatccgaccaatctcgcaccgcccagagcgggcccttcctgtcaattacctactgaagggcaggcggccagcatcgccatggagaccaacacccttcccaccaccactccccctttctctcagggcccctgtcccctccagtgaatcccagaagactctggagagttctgagcagagggcggcaccctgccctctgattggtccaaggaaggctggggggcaggacgggaggcgaaacccctggaatattcccgacctggcagcctcatcgagcttggtgattggctcagaaggggaaaggcgggtctccacgacgacttataaaagccgaggggcgcgcggtccggaaaacggccagcctgaggagctgctgcgagggtccgcttcgtctttcgagagtgactcccgcggtcccaaggctttccagagcgaacctgtgcggctgcaggcaccggcgtgttgagtttccggcgttccgaaggactgagctcttgtcgcggatcccgtccgccgtttccagcccccagtctcagagcggagcccacagagcagggcaccggcatggccaaagccgcggcgatcg

SEQ ID NO: 133 - DNA, 1300 bp, Homo sapiens
aggtcaggggtgtgaggtagatgggagcggatagacacatcactcatttctgtgtctgtcagaagaaccagtagacacttccagaattgtcctttatttatgtcatctccataaaccatctgcaaatgagggttatttggcatttttgtcattttggagccacagaaataaaggatgacaagcagagagccccgggcaggaggcaaaagtcctgtgttccaactatagtcatttctttgctgcatgatctgagttaggtcaccagacttctctgagccccagtttccccagcagtgtatacgggctatgtggggagtattcaggagacagacaactcactcgtcaaatcctccccttcctggccaacaaagctgctgcaaccacagggatttcttctgttcaggtgagtgtagggtgtagggagattggttcaatgtccaattcttctgtttccctggagatcaggttgcccttttttggtagtctctccaattccctccttcccggaagcatgtgacaatcaacaactttgtatacttaagttcagtggacctcaatttcctcatctgtgaaataaacgggactgaaaaatcattctggcctcaagatgctttgttggggtgtctaggtgctccaggtgcttctgggagaggtgacctagtgagggatcagtgggaatagaggtgatattgtggggcttttctggaaattgcagagaggtgcatcgtttttataatttatgaatttttatgtattaatgtcatcctcctgatcttttcagctgcattgggtaaatccttgcctgccagagtgggtcagcggtgagccagaaagggggctcattctaacagtgctgtgtcctcctggagagtgccaactcattctccaagtaaaaaaagccagatttgtggctcacttcgtggggaaatgtgtccagcgcaccaacgcaggcgagggactgggggaggagggaagtgccctcctgcagcacgcgaggttccgggaccggctggcctgctggaactcggccaggctcagctggctcggcgctgggcagccaggagcctgggccccggggagggcggtcccgggcggcgcggtgggccgagcgcgggtcccgcctccttgaggcgggcccgggcggggcggttgtatatcagggccgcgctgagctgcgccagctgaggtgtgagcagctgccgaagtcagttccttgtggagccggagctgggcgcggattcgccgaggcaccgaggcactcagaggaggtgagagagcggcggcagacaacaggggaccc

SEQ ID NO: 134 - DNA, 1300 bp, Homo sapiens
ggcttcactgagcgtccgcagagcccgggcccgagccgcgtgtggaagggctgaggctcgcctgtccccgccccccggggcgggccgggggcggggtcccggcggggcggagccatgcgccccccccttttttttttaaaagtcggctggtagcggggaggatcgcggaggcttggggcagccgggtagctcggaggtcgtggcgctgggggctagcaccagcgctctgtcgggaggcgcagcggttaggtggaccggtcagcggactcaccggccagggcgctcggtgctggaatttgatattcattgatccgggttttatccctcttcttttttcttaaacatttttttttaaaactgtattgtttctcgttttaatttatttttgcttgccattccccacttgaatcgggccgacggcttggggagattgctctacttccccaaatcactgtggattttggaaaccagcagaaagaggaaagaggtagcaagagctccagagagaagtcgaggaagagagagacggggtcagagagagcgcgcgggcgtgcgagcagcgaaagcgacaggggcaaagtgagtgacctgcttttgggggtgaccgccggagcgcggcgtgagccctcccccttgggatcccgcagctgaccagtcgcgctgacggacagacagacagacaccgcccccagccccagctaccacctcctccccggccggcggcggacagtggacgcggcggcgagccgcgggcaggggccggagcccgcgcccggaggcggggtggagggggtcggggctcgcggcgtcgcactgaaacttttcgtccaacttctgggctgttctcgcttcggaggagccgtggtccgcgcgggggaagccgagccgagcggagccgcgagaagtgctagctcgggccgggaggagccgcagccggaggagggggaggaggaagaagagaaggaagaggagagggggccgcagtggcgactcggcgctcggaagccgggctcatggacgggtgaggcggcggtgtgcgcagacagtgctccagccgcgcgcgctccccaggccctggcccgggcctcgggccggggaggaagagtagctcgccgaggcgccgaggagagcgggccgccccacagcccgagccggagagggagcgcgagccgcgccggccccggtcgggcctccgaaaccatgaactttctgctgtcttgggtgcattggagccttgccttgctgctctacctccaccatgccaaggtaagcggtcgtgccctgctggcgccgcgggccg

SEQ ID NO: 135 - DNA, 1300 bp, Homo sapiens
gttcagcacctgctaccttccatcatattcttttcaataaaggggcaactcccgccaatggcagtgtagatttcctaacctctacacatggaagattcacaccattcaggattgttgtttaactgttgagagagcacttgatacttaacagcttactaggctacaagacagcgcaggaaagaatcctctgttgtccttttatgttatcctgaacagttggttcacagagttactgtaaacacacaaaacatgactgccagggcttagtagtgaggaaggtgggaactagtcctgactcagttaactgtgcccaggagaagctgcttaacctcaaaggatttcactattactagaatcaataataccaaccctaggggtaaaaataaagataaatgtgtgcaaatcctgcctgcagtctcgggcacgtcgtgggtgtccaagaactgttcttaggcagccggtggggacaaagtctgtgtgcctcctgtcctggaataggtcccaaggtcggcttacttgcaaagcaagggtacggcgcaagagtactgaatacgggttggaagggcgctggctctaccctcagctcataggccggctgggcggcgctgaccagcagctaggccccgtcttccctaggaacggccacgggggccctgggagggtatgaatgtctttttgcagtgaggcctctggaccccgcggccccccggcagcgcaaccaaaactcaggggcaggcgccgcagccgcctagtgcagccagatccccgccggcaccctcaggggcggagccggaggcagggccttcgggccgtaccaactccacgggggcaggggccgcctcccttcggccgcgcgccactcaagtacggcagacaggcagcgaggttgccgaggccgaggctagcctgcagcctcctttctcccgtgccctgggcgcggggtgtacggcaagcgcgggcgggcgggacaggcacgcagggcacccccggggttgggcgcggcgggcgcggggcggggcccgcggggggggggggcggggcggcggtgcccttgcggcgcagctggggtcgcggccctgctccccgcgctttcttaaggcccgcgggcggcgcaggagcggcactcgtggctgtggtggcttcggcagcggcttcagcagatcggcggcatcagcggtagcaccagcactagcagcatgttgagccgggcagtgtgcgggtgagaagaaaggggacccggtcacggccccaagggcgaaggggctcgcggcgggcagggcctccgcggcaatggcgacag

SEQ ID NO: 136 - DNA, 1300 bp, Homo sapiens
ccagcttggccaagatggtgaaaccccatctctactaaaaatacaaaaaaatagctaggcgtggtggtccacacctgtaatcccacctacttggaaagccgaagcgggagaatcgcttgaaacccatagatgaaggttgcagtgagctgagattgtgccactatattccacagtgggagacagagtgagactgactcaaaaaaaaaaaagtaatcatttgagatatttgcattggaacctggctttcccaatttcctttgatataactatgggcaagcaaatttcaatgtcctgatctataaaatggtaatgggaataacagagaaaaatctggtgattatagcatggtatgggtaattcatagtgttgtttgtatctggcacagatagacaaacctacaataaatggtagctagtagtgtagtaaagattctaaaagagcatgtttagactaacctctaatgcttagttgtcccatgaggtaataatgtctttatctaatttcacctttccatttattagcttatcagaaagttgagtcctagaggattgccagagtgtcagaactcaatgacgccttcccatgtgaaggtcaagaactatctgcagccctcggtgggacccttgattgctgacatcagtccttctacttaaagcagttcttgtgcaatctttgatgcaaagtaatttcaaaagaattgcttcaaggatgttcaatggtgattattattgattgtggcctgggtaggtggaaaagctactcagagaccgaatacagcaacccaagctcccatagttattcattattggaacttggttttcaaactaggtcaaatgaaactgaacaacgtttggaataatccgtcactggttgtggacagggaagggttctagaagggactgggctggagaaccctgcaggcttacagtatgttatgggttggtgctcccctacctacagattcttttaaaaaactgtccctacaacttactgaactggaatgtcagctcagtggagtccttcttctctggccactcttaggggactgagggatggttggattcagaaaagggcttctaaaaattcaggtaatgtttgaactctgctgagccagtggcatgggtctctgagagaatcattaacttaatttgactatctggtttgtggatgcgtttactctcatgtaagtcaacaacatcctgggattgggacacactttctgggcactgctggccagtcccaaaatggaacataaggaagtggttcttctacttctgttatttctgaaatcaggtaagac

SEQ ID NO: 137 - DNA, 1300 bp, Homo sapiens
tctgaaccagcttgacccaataagaaattcttgggtgccgacgcggaagcagattcagagcctagagccgtgcctgcgtccgtagtttccttctagcttcttttgatttcaaatcaagacttacagggagagggagcgataaacacaaactctgcaagatgccacaaggtcctcctttgacatccccaacaaagaggtgagtagtattctccccctttctgccctgaaccaagtgggcttcagtaatttcagggctccaggagacctggggcccatgcaggtgccccagtgaaacagtggtgaagagactcagtggcaatggggagagcactggcagcacaaggcaaacctctggcacagagagcaaagtcctcactgggaggattcccaaggggtcacttgggagagggcagggcagcagccaacctcctctaagtgggctgaagcaggtgaagaaagtggcagaagccacgcggtggcaaaaaggagtcacacactccacctggagacgccttgaagtaactgcacgaaatttgaggatggccaggcagttctacaacagccgctcacagggagagccagaacacagaagaactcagatgactggtagtattaccttcttcataatcccaggcttggggggctgcgatggagtcagaggaaactcagttcagaacatctttggtttttacaaatacaaattaactggaacgctaaattctagcctgttaatctggtcactgaaaaaaaattttttttttttcaaaaaacatagctttagcttattttttttctctttgtaaaacttcgtgcatgacttcagctttactctttgtcaagacatgccaaagtgctgagtcactaataaaagaaaaaaagaaagtaaaggaagagtggttctgcttcttagcgctagcctcaatgacgacctaagctgcacttttccccctagttgtgtcttgccatgctaaaggacgtcacattgcacaatcttaataaggtttccaatcagccccacccgctctggccccaccctcaccctccaacaaagatttatcaaatgtgggattttcccatgagtctcaatattagagtctcaacccccaataaatataggactggagatgtctgaggctcattctgccctcgagcccaccgggaacgaaagagaagctctatctcccctccaggagcccagctatgaactccttctccacaagtaagtgcaggaaatccttagccctggaactgccagcggcggtcgagccctgtgtgagggaggggtgtgtggcccagggag

SEQ ID NO: 138 - DNA, 1300 bp, Homo sapiens
agcacacaataaatgtaatgtgcttgaatcatcccgaaaccatcccaccctggtctgtgaaaaaattgtcttccatgaaaccagtccctggtgccaaaaacgttgaggaccactgctccacagaatctatcggtcactcttcctcccctcacccccttgccctaaaagcacaccctgcaaacctgccatgaattgacactctgtttctatcccttttccccttgtgtctgtgtctggaggaagaggataaaggacaagctgccccaagtcctagcgggcagctcgaagaagtgaaacttacacgttggtctcctgtttccttaccaagcttttaccatggtaacccctggtcccgttcagccaccaccaccccacccagcacacctccaacctcagccagacaaggttgttgacacaagagagccctcaggggcacagagagagtctggacacgtggggagtcagccgtgtatcatcggaggcggccgggcacatggcagggatgagggaaagaccaagagtcctctgttgggcccaagtcctagacagacaaaacctagacaatcacgtggctggctgcatgccctgtggctgttgggctgggcccaggaggagggaggggcgctctttcctggaggtggtccagagcaccgggtggacagccctgggggaaaacttccacgttttgatggaggttatctttgataactccacagtgacctggttcgccaaaggaaaagcaggcaacgtgagctgttttttttttctccaagctgaacactaggggtcctaggctttttgggtcacccggcatggcagacagtcaacctggcaggacatccgggagagacagacacaggcagagggcagaaaggtcaagggaggttctcaggccaaggctattggggtttgctcaattgttcctgaatgctcttacacacgtacacacacagagcagcacacacacacacacacacatgcctcagcaagtcccagagagggaggtgtcgagggggacccgctggctgttcagacggactcccagagccagtgagtgggtggggctggaacatgagttcatctatttcctgcccacatctggtataaaaggaggcagtggcccacagaggagcacagctgtgtttggctgcagggccaagagcgctgtcaagaagacccacacgcccccctccagcagctgaattcctgcagctcagcagccgccgccagagcaggacgaaccgccaatcgcaaggcacctctgagaacttcaggtaggagaaaagcaaactccctccaa

SEQ ID NO: 139 - DNA, 1400 bp, Homo sapiens
gaactggaccccatcctccctgtgaccctcagccttcagtgctggctgtactgaactgtaacccatcctccctgtggccacagagtgctccttcttgcactcctccccttcacctagactgacttctttctgcccacacagacccatctagcctcagccaattcccttctcagtggaccctctccattgcctccagagcacagcttccagtccccaggcggctgcacacatttgcaacaaaacaagccaatgtatgaagcaatcccactcagtgcaggagctcaacccagcagaggatccccacagagaggaactgacctgtgtcttccagagcacacaggttcagagcacacaggttcatttaagtgagaacccacacttacagagcaagctgcccaaaaaccacgaccaggagggcccagagaaagagctgtccccggggccttggggacagggtgacagccacccagagatcatggagaaggggacgtaaggaagacctcacagaggagtcatcctgcgactgtgttggttgggtccttcaggaagcagagtcccaggagttggaagcataagaggaatactgcgggcaatgcctgagaaagataacagggaccgggagcaggagtgagttgggcaggggaaggatcaggcccacaatgccaggctcacacctgcagaggagggaagaagaagaagggcctcacatcagcccagcgggggatgttacgcccacagacgccccggggctcagttactgtctaagtgttagaaataaattttcggtgccacaaaagaaatagcactcagatataaatgttcccagcaaggcaattttacttctatagaagggtgcatctcacagatggagcaatggcaagagcacacctgaacaagggaagggaaggggtttttatccctaaggcaggtagcccctacagctgtgttgttcccctattggctagggttggaccacaccgtctgagctaattgttactggctattttaaagagagcaggggtaagagccggattggcagggtaagtagtttggcaggaaggacggtcacagaacaggtgactcaggatgactcaggtcagagcaggtgaccagtggtgactcagttcggagcaggtgatagaagctaggagggggttgtttactgaaactaggggcaaggagacgaagagaacatgaaagttaaactttaagatgaagaacaaagctgaacatactgatgcattggatctttggagaggatctcagaactcattgtacttaatttacaggctaaaaccttagaagaggaatttattatatcctacacaagactccagggaagcacatggccttggactgaaggctggcatctggaagctgtcagccaccagcaccttctg

SEQ ID NO: 140 - DNA, 1300 bp, Homo sapiens
ccgcctgccggccccccacccaggcccaccccaaccttatcctccactgcttttcagaggagtctggccaacacaaatcctcttgtttgtttgtctgtctgtctgctgctcctagtctctgcctctcccagtctctcagcttccgtttctttcttaaactttctctcagtctctgaggtctcgaaatcacgaggcttcgacccctgtggaccagatgcccagctagtggcctttctccagcccctcagatggcacagaactacaaaccccagcatgcactctggcctgaagtgcctggagagtgctggtgtaccccacctgcattctgggaactgtagtttccctagtcccccatgctcccaccagggcatcaagctcttccctggccggctgaccctgcctcagccctagtctctctgctgacctgcggccccgggaagcgtgcgtcactgaatgacagggtgggggtggaggcactggaaggcagcttcctgctcttttgtgtcccccacttgagtcatgggggtgtgggggttccaggaaattggggctgggaggggaagggataccctaatgtcagactcaaggacaaaaagtcactacatccttgctgggcctctatccccaagaacccaaaaggactcaagggtggggatccaggagttcttgtatgtatggggggaggtgaaggagagaacctgcatgaccctagaggtccctgtggtcactgagagtgtgggctgccatcccctgctacagaaacggtgctcaccttctgcccaaccctccagggaaaggcacacaggggtgaggccgaaggcccttccgtctggtgccacatcacagaaggacctttatgaccccctggtggctctaccctgccactccccaatgccccagcccccatgctgcagccccagggctctgctggacacctgggctcccacttatcagcctcagtcctcacagcggaacccaggcgtccggccccccacccttcaggccagcgggcgtggagctgaggctttagagcctcccagccgggcttgttcctgtcccattgtgtatgggataggggcggggcgagggccagcactggagagccccctcccactgccccctcctctcggtcccctccctcttcctaaggaaaaggccagggctctgctggagcaggcagcagagtggacgcacagtaacatgggcaacttgaagagcgtggcccaggagcctgggccaccctgcggcctggggctggggctgggccttgggctgtgcggcaagcagggcccagccaccc

SEQ ID NO: 141 - DNA, 1300 bp, Homo sapiens
cgcggaggtctcaccgcttcccactccacccccacaaactctttggaaaagtgccttgaaaaatttaatcctcaatccaatcctggaccaccagcgtcctctgttggtcaccgaagggagggggtgcgcagacaaaactgaagaaactcgagtgccagagaaggccgacaggagttacagcgacctcagcgcgcaattgcgcccccgaactttactgaaaagtgtttagattgcagagataagctagaatcccaacgcatcgagaatacagtaatacgaagtcgccttcaaaaaatgacaatgaaaattgcctattaaaggactatttggttaattacgtttcagcagtgcccagtttattgtctttattattcttttgtcatgggtgtaaactccatttgaaaacataatcagggagaatacccaagacaagaagaacagttgtcatttaaaatatttgaaaagccctgccttaaggacgcattcgcttgccggtccactcttaattggagacttgcggtgtagcaacacgtgagagtcttcttgcgttgagaagtaagcctggaaaggggcgaaggccccgggcgcatcttcagatgcgtatttgtgggcccctggggatataaacagcccagcgggtgtaaattaaaccccgcagtgccttggctccctgagacccaaatgtaagtcagaaatgtcccaagacttcgcctgccaacggaattaaattttagaaagctccacgaggtacacacgaatgcggagcgctgtatgccagtttccccgacaccggctcgccgcagggagacctcaccccgagagcggaaggggtaagggcggcggggtcaaggagatcgggggtgctgagttggccaggagtgactggggtgaccgggggtgctgaggtggcctggagtgccggggtggccgggcacaccttggttcttgtagacgacaaggtgacccgggctccgggcgtgcgcacgaggagcaggtgcccgggcgagtctcgagctgcacgcccccgagctcggccccggctgctcagggcgaagcacgggcccccgcagccgtgcctgcgccgacccgcccccctcccaacccccactcctgggcgcgccgttccggggcgtgtcctgggccaccccggcttctatatagcggccggcgcgcccgggccgcccagatgcgagcactgcggctgggcgctgaggatcagccgcttcctgcctggattccacagcttcgcgccgtgtactgtcgccccatccctgcgcgcccagcctgccaagcagcgtgc

SEQ ID NO: 142 - DNA, 1300 bp, Homo sapiens
gataccattattttcagtaatctatataaatcaaatagtataagagatacattttttaaaaatttcatctaattgtagttcttggccaagtttgttctacatttagttattcaattttctgtattcccaaacactctgttcatttctcactaatattaagatgcagattcaagtggattactgtgtttcattgtgatttatctgtttacatgtctctgagcagcatataagctccttgaagaaagggaccttgtctatacatgtttgatgcacagctcctggtaagcggtatgaccttacattgttgaataaaggaatggcatttatagatataatctggaacatgtatcaacatttacaataatactcaatttgtgtacgtatattccataatattcatccatatacatccatatattatatatagagttccatgaagttcactactgtattcaaaatgatattcaaatgctattcaaacaattctaaatgatatattttgaacaccataaaatgttacacaaatccataaatagcattactgtataataacctgtaaaccagagttactacacacacatacacaccacacaaattctatttaaaaagctattttaccacaaagtaattctaagaccttataaacactgcctaatggaaaagtctggagattggagccaggcaaaaaaatctgcatttcggttgtctagaactacctgagtgacttcggctgcttcctaccgaacctgaattttctgtgatgtggagacatttaataccacctttagggaactggcttaaggactggaggtaataacgtatgtgaagggctgatgaatgtttgcagtcacactgtagtctctctagagttccttcctcggttgcaaactaagggtttttttgtttgtttgttttacacattatgagtctcttatagtcaggaaaactacacggatctcaactttggcaatacagagagtccgaataacaaggtagagaccaaaaaaaaaaaaaaaaaaaaatcacctctacaactcggaaaaagcgctaaccccgcaggaagcgctgggccgacctccagtatcccagcattcctcgcgctgctcccgtattctttccccaagtctctatggtagcgtcagcgtcggaggcggtagtgacggtggcgtttccttgaggaagagtgagggttccaacttttctgcttatctgggaggtgttgggcgcggacagtcgagatgtcagagaaaaagcagccggtagacttaggtctgttagaggaagacgacgagtttgaaga

SEQ ID NO: 143 - DNA, 1300 bp, Homo sapiens
aaaaataagtttgaaaatcctagaaacagtgagagtcagaaaaaaaaactgtttttatatacatattctctcccccaccccctttctctccagttgaaatatgttgcagagctctaaatttagggatgcttttggcgtatttcttatacactccagaggcactcgagataaattatcttcaatgttagatctctcttagctttgctagttgtatttgttaatccattttgagttctctagcctgtgtccattttatgtgtgtatagaatgaggccatggagatgttgtacaactgtgtcgtttggcagcagagtcctaaggaattggtggtgactatgggatggtggtagccactggggctgcctcaaatggaaaggaaagggttctaagtatttataaaagaaaattctagtgtataactgagcatcttctatttaccagcacttgatactactaaatcgtcacagcaccccggtgttattattatctctgtttacaaatgaggaagctgaagctcaggtcacacaggtagacaggaagtgatggggtcagattcccagctaggtctgccttggagctttccttcttgtgagggtgatgttcagttcactctggaactggtgtagccatcgccacatttagagtgcattttagagtttgagccagttttgatgattttacttcaacttactgatggaactccttgttcatccctggaactctctaacacttctgctgggagtttagagggatggccacaccaagctgcttgggtacattttctaaaacaaaatttattgtaagaaatggaaattatgaacaaaatataccactatctctttttgctgtgaagttaagtttattggctactgttaacaatttatttacttacttacttactattcttttgtagagacagggtcttgccatgttccccaggctggtgtcaaactcctggattcaagcaatcctggtgcctcagcctcccaaagtgctgggattacatgtgtgagccactgtacctggcctcaactcttgttaaaattaaagcaccttaatacgtttagcaaactcatcagaccaataaatattttcaagatgtatgcagaattaccagtggcacatcccctttttctgtggctccaccccttcaactttttgtccaagaaaacttttcgtgtttgcctgtagctgatgtgcagttgtttctgctcccaaatcaacagggtttaatgaaaaccctagaaagtagaaacccgtgggagagaaaagaaaaaagacaagttcacaaggtatgttt

SEQ ID NO: 144 - DNA, 1300 bp, Homo sapiens
gaggtattgcagatagccctgaaacagactcacatttttgtggtcattcagagagtgacaaaggtgcaatttcaaatcagtgtagaaaggatggcttaaaattaatattattaggtcaatgggctacaaaattgggaagaattgaagttaaataatttacagcatatggaaaataaatttcagatggattagagctctaaatgtaaagttaagcctataagaaaattagaaaaagttataagggaattatagattagtaatcttggtgtgactgtctccccaagccatgtaagaatgataaatctgattacatgaaaaccttaagcttctacagagtgaaaaaaacaaattaaaagacaagttagagactgcgagaaacatatgtcactcataaatcagaccaaggagactggacgaagacatggagatgtgaagtaggaggtgtgctcaggaacatagtttaatgtcatccacgtacaggataaacggcttcccacgtcatgtcccagaaatcgattagtcgatgggatttgggtgagtactttcttctctctgttttcctgaatttttcttttttctttcttcccctttcttctttctctttttttcagaatgatggtgtgtttgtaatcgacattttaaaaattctgtaacaattaaatttgggggcggccttcccttgtttcccgtatggagtgttgatgtttcagcagctttatttggagtttacacgtggaggcacctgggtttggggattcctttgtgtccccaagacacctattgcagaagtgagtcctaagaggtagaaaacagatgcgtgcgcagggctgggtgaagcactgtggagcctgtgtgagaggaggcacgggcgcgaacacaggagcgcacttcctcattccgtttctcctcatcctctctcccactgccactggcatcactcatcccatccggtcatcccaagtcacacgcaagagttcgttcccggcgcgcgcgtcagcctgactcgagcgtctccacgtccggggcccgcaggggagcgcccctgccccgtccggtcgcttgttgtgttgtcatcacgtggcctgggcgggccctgacgtcaggggcaggggagggacggcgcaggcgcagaaaagggggcggcggactcggcttgttgtgttgctgcctgagtgccggagacggtcctgctgctgccgcagtcctgccagctgtccgacaatgtcgtcccacctagtcgagccgccgccgcccctgcacaacaacaacaacaactgcgaggaaaatgagcagtctctgc

SEQ ID NO: 145 - DNA, 1300 bp, Homo sapiens
tgtagacaattctggatccttccgtggtgcccgttaccctggtctttaacttttgtcctttgcaggggaggggtcaatgccttcttatttccttgctctttagaattctccaccagagggaggacaagggaaggagtaggtttcacgcgcagttctgagtaaagtttgaatctgagaaaccccacattcacgaattaaggatctccagttctgtgtctttattctacccctccctgcctgcttttccactcggcagaactgagtgactttcagcggctgcagtaattttaattattctgagtcgtgctccgaactatgttttttatcagttcctctgaaaattaagttgtagtaagagacgtagtttaagggcacccccttagaagaggccaggttattttttaaggaaaagctgaagatttctaacaggcacttactaaacacacacacacacacacacacacacacacacacacgcacacggcgcagacccagcaggagagcgcaacctagcatctttaaggttcgcttagcccttcctgtgcacctggaaggaagccttatcttaaactcccttccacctagagtttattttcgcctgcgtgcgacagggcttttgtacttaagtgagttaaggaatgaaccccgaactcttctgggaaagccaccaacgttccccccgcacccctcccagggttcctgaccacggagactctgcttggggcacaggtgtgggagtcgcaaacttttctctgcgccgtccttttccgcgtggaatgggacggagcagccctcccaggcgctgcctggctgcggaggggagcgggcagcgagagcctcgggtctccgcctgggttcccgggtctccggggcgctggcctcggtctccgcgcagcgtccagcgacccctgtcgggggttcccggcagccgcgccgccaccccccgcccggccagcgcgggaggaaaaggggctgcgcccgggagcgccgagcccaggctcctcccggtggcgtgtccgcgcctcggggtgggggtgtggtggggaagagggagggggcgaggccaggggagggtgcgaaggaggcgcctgcctccaacctgcgggcgggaggtgggtggctgcggggcaattgaaaaagagccggcgaggagttccccgaaacttgttggaactccgggctcgcgcggaggccaggagctgagcggcggcggctgccggacgatgggagcgtgagcaggacggtgataacctctccccgatcgggttgcgagggcgccgggcagaggccaggacgcgag

SEQ ID NO: 146 - DNA, 1300 bp, Homo sapiens
atttgttgaaaggaatatcccgggagaggatggattcttgttttagacatagctctttaaatttggcaggacatgtgggggtagggggacagatgggggtggagttgggggagcttggtattcaggtggcacaataccaggtggaggttaaatacctacaactccttatgcctgggatcttttgttccaatagccatagaagcttctttcatttcactttttatttttattttttgcaaaacccattagttgacaaagtgccataaactttgtacaaaatggcctcgttcagcaaatattttattcaaactatgctcctatcagcagtaccacacatgtcataaagtcatggtgaagcaggaatttcagtaaaagaaaaggcgggggtcatgaagaccgaaggatcaaaggagcatggagtagaggaggcgtcacatctgaagtgcacactgtgtgtgcgcgctgcaaggagagagagcgttataaagttgttgttttaatcgctgcttgtcgcctgcgaacatgttgctcccttttaagtgtcaagcaacgggttcacccaaaacttttctgcaccgaggacccgcacgcccggggtcccacctgcccctctctgcctgcctcccaccggcgcctgggcatcctgcgccggctacaggtccttgctcactgaagcgtcacctctcactccccagtaagcctccgcagcccactcggactgcagcctgtttgccgcccgtcctcccattgcagcactcggggcgacagagagggaggaggcgcgcggggacggggacgcccaggaggacccactcgcgggtcccgctccgctccggcagcagcatggggaaaggacgcgcgggccgagttggcaccacaggtaaacaggctggcgaggcgcaggacgctgtcgccgccgcggccacccagcgatttccaggcacgcaactccgcctccagggctctctccctcgcgctctctcccagccgcttgctcgcagccccagcagccgccgcagcatcacttcacacaaaggactgtcacccgcggagcagctcctccacctccacgtcctcctccggtgacagcagccccgacagcagggctcgggcgcggcggcggcgcggggggtggggggacctgtcactccctgtaactgaggcggcggcagcggtttttttgccttttctattttgccttttttttttttgcccttatacctcttcgcctttctgtggttccatccacttcttccccctcctcctcccataaacaactctcctacccctgcacccccaa

SEQ ID NO: 147 - DNA, 1300 bp, Homo sapiens
gtccagcattgacagacacacccacaacacacgtggcttcccctccttcctctgctcaagaatccccagcatcaggtctactgctccttattttctgtttccctgcttggctcagtttcccttacgtgccgttttctgtccctattgctgtcttactagagatacctctgtgtgtttcttcacagctttgttcccctggtctctctgtgtgggtgcatttccagttttgcctttcctttctctctgtctctctctgtgcccctatgcctgccttccctgctgatcttgatctctggctagttgggggcctgtaacagtgatgagatgcgggtctgccccggctaagagctccctgagagagggggcttagaccatgatgaagagttgcttttaggcggtgctgtgagccctggtaggggctgtgtgcgtgtgtgactgcgtgagtgtatgaatatgtgtaagtgtgtctgagtctgaggcggtgtggctgtgcccgtgtgactgtgagtgaccgcatgtgagagtgtatgagtctgagggtaactgtgggtcttgtgtatctggcaccaagggaccaaaggcatttcctggtgctggggcccaaagaatggagggggaggtgagaaatggctggaacttccaggggagggggaactggactctttggcctctccttatatcccccaacctggggcctcccttcccctggaagcacagccagctgtaccctaaggaaacatttggtgaggagtgaaaagagggggagtttgtatctgatttttcatttgattgtgtccacgtgtgttcaaaggcatgcccttttgttaactgtgcctcttgagtctgtgtgtgaatgtgactgtgtctggctgtgtgaaaacacagggcatctctcactgacagggacataagtattagccaccctcctttccctcttgctggccttggctgtgtctgtggcttcctttccagacttgggggaggcctcttcccttcccagggccttgggtgggagggaaggagggaggaggcaggagcagggagggggcctggctaggggcggcagagctccagggcttagagggggcggggcagggaaggggaaggaggggatggctctggggtcccagaactgagtggagtaggagacgggggctgtagctggtgagaggaagtcctagaggctatggacactctgctgctgggatcaccgaggtagggtggggctaagcagggtaagtgtggctgggtggccaggggtgagccaactggacacactcagacagacacacagacaggt

SEQ ID NO: 148 - DNA, 1300 bp, Homo sapiens
gtgcaatggtacagtctcagctcactgcagcctcaaccgcctcggctcaaaccatcatcccatttcagcctcctgagtagctgggactacaggcacatgccattacacctggctaatttttttgtatttctagtagagacagggtttggccatgttgcccgggctggtctcgaactcctggactcaagcaatccacccacctcagcctcccaaaatgagggaccgtgtcttattcatttccatgtccctagtccatagcccagtgctggacctatggtagtactaaataaatatttgttgaatgcaatagtaaatagcatttcagggagcaagaactagattaacaaaggtggtaaaaggtttggagaaaaaaataatagtttaatttggctagagtatgagggagagtagtaggagacaagatggaaaggtctcttgggcaaggttttgaaggaagttggaagtcagaagtacacaatgtgcatatcgtggcaggcagtggggagccaatgaaggcttttgagcaggagagtaatgtgttgaaaaataaatataggttaaacctatcagagcccctctgacacatacacttgcttttcattcaagctcaagtttgtctcccacatacccattacttaactcaccctcgggctcccctagcagcctgccctacctctttacctgcttcctggtggagtcagggatgtatacatgagctgctttccctctcagccagaggacatgggggccccagctcccctgcctttccccttctgtgcctggagctgggaagcaggccagggttagctgaggctggctggcaagcagctgggtggtgccagggagagcctgcatagtgccaggtggtgccttgggttccaagctgagtccatggccccgataaccttctgcctgtgcacacacctgcccctcactccacccccatcctagctttggtatgggggagagggcacagggccagacaaacctgtgagactttggctccatctctgcaaaagggcgctctgtgagtcagcctgctcccctccaggcttgctcctcccccacccagctctcgtttccaatgcacgtacagcccgtacacaccgtgtgctgggacaccccacagtcagccgcatggctcccctgtgccccagcccctggctccctctgttgatcccggcccctgctccaggcctcactgtgcaactgctgctgtcactgctgcttctggtgcctgtccatccccagaggttgccccggatgcaggaggattcccccttgggaggaggctcttctg

SEQ ID NO: 149 - DNA, 1300 bp, Homo sapiens
ctcgttcctgtgagcagcttttcaacctccacttccagccgctgacaggccctcctggctccacaaggccagctaacatacccaccttccacaatccccagccctgccagacataacctgcaacaggcattcctggatcaatgcaaactccgacttctgttccaggagtctgcctctgttagaagaatctcacacaagtgtgcgtgctgtgccattgtaaatgctgtataaggtggccaggcccaatcagtccctgcaagacaccgaacagtaagaactatctatggagtgtttactatgtgccaagcaccgtcctttgcaagcactattaaccctcaaaataccaccaccgtgagattgagaccatcatgattcccgttctacagaaggaaacactgagacttcaggaggtcaggacctttccagggtcacaactgcgtaactaagttgcagagctcaacccagtggcacttccatctcacacgcagctgtctgatggtcaagagcccaaccagtcccccggtcgtttctaccgcactaaaccgctgtgtcaagctggagcagcgggctcagcagtgaaaatgaaagaacagaaggaggttacagagaagagaacggtcacggtaaattccggagaggaggcaaggacgtacacaccgagatacttcccggtcaccgttactcagcactttgtggggttcacgtggctgggggggccggggcgtggcggcccttttcgaggaatccagccctgcctgggcggtccccatctcgagcgtgggcgtgttcgattcaggcccggcggacgcatccccaggtgacccgggagggaccttgtgtctctgggggtgactgtccgtctccccgcctcccaccgtcacgcgcagtgctgatccccacttccagctggagtgcgagctgggcttggggttacaggagccgaagccctggagctccgccccacgcttgcgccagccccgccccgatcccggctcgcaggctccaggggcggggcgtggccggggcgcagcgacgggcgcggaggtccggccgggcgcgcgcgcccccgccacacgcacgccgggcgtgccagtttataaagggagagagcaagcagcgagtcttgaagctctgtttggtgctttggatccatttccatcggtccttacagccgctcgtcagactccagcagccaagatggtgaagcagatcgagagcaaggtacgcgctaccggggaaggccagggtgccggcgccgcgcgcggcctctgtaactggggaaggcggtggcgggaggtgg

SEQ ID NO: 150 - DNA, 1300 bp, Homo sapiens
ggcctttcaaacagcttctaatgcaacacctctgaccccactgcacctgcccccccacagatggggaaactaaggtcccaagaagtaaggacttatctgacatcacaggtagcagagacccaggcctcctggtctcctggctgctgtggttgctgaggcaccaccactgaaggtggtctcaatctcctggtagtctcactctcttgctcaaatacctcctatggctccctagggcctataatacaaattccaagttcaacccacctcaccatctggggctgctgcctgggctcccatccctgcccggctacatcactgagcacctactactatgtgccagtctccctgcaaaacgctggataaacacgtggctttctaccagggaacctcccgcaaggtatttgacatgctcgcctcccgttctctgctgtgtctaaggattcacagatgcggctggagtctgctgcttagcacagtgagtgctcattatgggagctattcttcttatcaagaccgcaaatcccctctctggctatccacagccttctgaatgtcccgggcaactccaggggagcagggctggttttctataatcttctaccttactgggtggtctttggggtcctggcgggttccagtcccagaggagctcgaagggtccctcccaacaggggaagaggagtcccaggtgggtctcggccagggcctctgggcaggctctgagggcgggcttggggactgtggccagcaaagcccctgagtcgatgcctcagccctctcgctccctggtctggcctctctctggcaccaatgcgctgtgggattttgcggaaagagccgctcttctctgagcctcagtttctccagctatcatagggaaagcctggccttgtaccctggagtgtaccttgagcacagtcggggtatcgcaatggaaaactcttggcaaactgtaaagtgtagttcgcgtgtgtgggcacagccacctgggggtccacggtgcggggcacacggtgccgggtgcggtgtcgccgcgcacccgggctcgggctcggtcccgccccgcttcccggtccctggtccgctctccctccctccttcccgccctccctgccttcgggaacgccggctcccggcatgccgcgcgctgacagccttataaatagtcgcctttgccggccgccgcgaggacgggcagggcacgcactggccccggcgcccacccgcacccctccccaggtcagtgcgtgcccgcgcgtgtctgggggggcgcctctgcggggaggggcagcggcaccgg

SEQ ID NO: 151 - DNA, 1300 bp, Homo sapiens
atagtacacagaaagtgctcaataagtggctgccatcatcactacaattattattattgatctatcctcctcgaattaaggatgttaatcagaaccccagggaaggttcctgcattgtcagaaagctggtgggcaaggattgccccaccccaccccccaccaggggtacaggtccatggggagggggcagggcaggatggggtggggattagttttctactgacccactcacttgcttctttcaccatcattcatggccacccccttcccaatgctcattcattcacccgcaccattccctgcttgctaggacggtgccactcctgagttacaaccctggtgccaggtagcctctgtttgaatcccggccatgccctgtgatcttaggaaaattctacagttcctctacgccccatatttcctcatccgtaaaacgggaataagaaccggtacccatctcagagatttgttgtgagctttgagtgagataaactatgctgagtgcctggtatacagtaggtgctgtataaatgccggctatttgcctgtgttatttgagaccctggctttggctcctggccacctgagttccagtctcagttctgccatgtattgactctgtgatcctgggtaagtcacttaaccactccgtgcctcagtttccccattttgtattcctcccctttcacctgccttatctccctccactgctgctacttaatttgtttcctctctgccacccctcaccagcatgtcagacatacaaaacaagggatttttgtgtgcttggcacacagtagatgcacaataaatgttgaagggctgaactaatttgggtttgagtcatagggagcttgggggatgtgggtgattggatagattctggagactttaggggactgggccgggggaaatgcggcctctaagctctccgctgaggcggcttggaaggaatagtgactgacgtggaggtgggggaggtggctggcccgggcgaggcccagggagagggagaggaggcgggtgggagaggaggagggtgtatctcctttcgtcggcccgccccttggcttctgcactgatggtgggtggatgagtaatgcatccaggaagcctggaggcctgtggtttccgcacccgctgccacccccgcccctagcgtggacatttatcctctagcgctcaggccctgccgccatcgccgcagatccagcgcccagagagacaccagaggtaagcagggcccggggtggcccagcagggaccggagctgggctgcagcttgggtgctggccaccag

SEQ ID NO: 152 - DNA, 1400 bp, Homo sapiens
tggtctcccgcacagcgctcagcgtgaattattctttcgccattgcaattcccgtcttcataaatcagctctgtctaggcagcggacaaggtgaacccattgggcggttacactttcgttttcaatacatctctgcttttattgcttcattctttctttgctttgtgcatttcgtccagttcttagttcaagacgctaagaacttggacaccctccacgggtaacaggactacaggtgcccgccaccacgtctagctaattttttgtatttttagtagagatggggttttgctatgttgctcaggctggtctcgaaccactgggctcaagcaatctgccggccttggcctcccaaagtgccgggattaaaggcgtgagccaccgcgcctggcccactaaacttctctgtgcatcagttatttcatttgcctaatgaggataacagtagtcactactgcgttttgtgagcgttggttaatatatgaaaaatgccacgtgtttgccattagcatcaatcatgccataaccagaaaaattacattgcattttttattttaaaaaaggtgggggccagagtggacctgggcctcttccaacttctgagaggtctctattactaagtaagccttaagaagcagaattccatgaagggagctaggaaaccaggattttccaaaaggaggtggcatttgcattgatcctggtagggcagcctcgaattccacggggttggggttgcgccttttccaaggcagccctgggtttgcgcagggacgcggctgctctgggcgtggttccgggaaacgcagcggcgccgaccctgggtctcgcacattcttcacgtccgttcgcagcgtcacccggatcttcgccgctacccttgtgggccccccggcgacgcttcctgctccgcccctaagtcgggaaggttccttgcggttcgcggcgtgccggacgtgacaaacggaagccgcacgtctcactagtaccctcgcagacggacagcgccagggagcaatggcagcgcgccgaccgcgatgggctgtggccaatagcggctgctcagcagggcgcgccgagagcagcggccgggaaggggcggtgcgggaggcggggtgtggggcggtagtgtgggccctgttcctgcccgcgcggtgttccgcattctgcaagcctccggagcgcacgtcggcagtcggctccctcgttgaccgaatcaccgacctctctccccagctgtatttccaaaatgtcgctttctaacaagctgacgctggacaagctggacgttaaagggaagcgggtcgttatgaggtaattctgcacgtttgcccgcgtgctctctgtgctctgtcgcaaacctctttggccggagccgacttgttctctcgtctgctcta

SEQ ID NO: 153 - DNA, 1300 bp, Homo sapiens
tttatgaaaataaatttgaaagtagaaagaaaaagttactcataatactactagtttaacccaacggttacaattttatgtcctcttctgatcgttttctgtaggcatattttacatcattataatttgaatgtccttattgttttgtattatttgactttttatggcagcttactgtcgccttgctgggattcaccataatttacataatctagccaaatcatggggagtatggattttggagtagcaagagattatttttggagttagattttataaagctttggccatctgcaaaaatttgaaccgtatcctaaagacaagagaaagctttgaaggtttaagggaaaggatggacagagagaatcgcatttaagctccatttgaagtagagttatttttattttttgtataattccttgctttttggaatgtgtgtgcttcatatgcagaaaagtagtttcccgatctagactgccatctctttgaattccactgccacatctgtctctcttagttttctgtgtattttagagattccgtcagtttaacctgcctggctgacaggtggtgtcccaaatcgaaaccgttttttcccccgaataaagtgtgcccgtgtagctgtacagatttcgtcccctgaaaattcatctgaaatctcaattctcctgaggggagcaattaaggaagatacatgaactctcccctcctctccatcctgtcaggtgcccctcttttttgatggccccacctctgtctagacaaccctgacagtgtagaagtttccatctcctttccctttccctctccatgttccctccccttcagttttttccccctcccaggcgcttcctgcctggaaacaaaagattggtccccagtagcccactcagggcgattttagttttatgctcaccatctgattggcctaggtaaggtgcagagctcgggtgacgtaatagcagagaagggctagggagcggttgccgagcaggggctctaccgcgggcgggcagctgtgccagctaaccgtctgggatctcgcactgggggctgcagcttttccccgcctcgagccagtgtgcgggggcgggagaagagccagggggagcgggctgggcccggggctgcggctgcggccgcggggctgcggctccccagccccgccagctggagcgctcggaggtagaggaaaggtcttgacggggtggctggatccgtggcaggtaaatcccgcgactaactgcacccgggctaccgcgggggagggggtggctgttggatgatgctttaaggctgc

SEQ ID NO: 154 - DNA, 1300 bp, Homo sapiens
atgttaacttacatagcaaaaatgacttttcagttatgattaaatcaaggattttgagatggggagattattatgaattatctggtggacctaatctaatcacaagggtatttataagggaaaaggggaagtaagagggtcagagtcagatacgacaagggaagcagaggtctgagtagttccgcaacaagccaaggaatgtgggtagcctctagaagctggaaaagtcaaagacacagattctcccctagaatatccagaaggaatacatctctgcccacaccttgatttaagctcagtgtcacttctgacctccagaactgtaataaaataaaactgttaaatcactaaatttgtggtcatttttgacagcagcaacaggaaacgcctaaggactcttgttttccttcctcccagcctcactgaccctcataggcgcccaagtatcaatgtgtattcttccgattcacctcccatccctttgaaaaatatgtagaaagtttgtcgtgtgctttaaaaaatgcacgtatggtatcctccctcatgtttggaatgttccttttaaaatcaacattatgtattgccagctttcaaatatgccctttgtccttttcacaaagcacagtactgccagtgtccccaactccacccagtgaagtagggctggtattactaaccctggagtcagcgctagcaaacaagggctcagaggtcaagggctggaagccaggtctccagactcccaggccaaggctcttttccgcagatgactctgtcctggtgtccagcagggcacagcccctagcacctccgaggccccgcaagtgtgctggcagcggcgacgccggctccgccacgcggagggaggaggcccaggcagcgcccggagtgggcggcgacgtggtggaagaagttttgttcggtcagagaccggacgcgggagctgcgggtgggccaggtgtccagccttgggagccgtaggagccgccagagccgccagagccgccggcgccccgccccgcctcctccggccgctctcgccggctcaggttacctgaggccggtgggcggggcggcccttcccgtctgcgccggcccccagcctccagggcggcggagccgggaagtggaagagggagcgaaggaggcggggactgccaaggctccagcccggccgggctccgaggcgagaggctgcatggagtggccggcgcggctctgcgggctgtgggcgctgctgctctgcgccggcggcgggggcgggggcgggggcgccgcgcctacgggtgagtgcgaccct

SEQ ID NO: 155 - DNA, 1300 bp, Homo sapiens
tttatatgctgacctagaaagatggtgcaacaccataggggaacaagaaggctgcaaagtggcagcacagcaggagtctttaagaaataggtatttgtttcagcttaagaagtgtctggctgggcgtggtggctcacacctgtaatcccagcacttagggaggcttaggtgggcggatcacttgaggttaggagttcaagaccagcccagtcaacacggtgaaaccccatctctactaaaaatacaaagaaattagctgggcttggtggcaggtggctgtaatcccagctactcaggagctgaggcaggagaatcatctgaacccgggaggccgaggttgcagtgagcctagatcgcaccactgcactccagcctgggtgacagagtaagactcggtcaaaaaaaaaaaaaaaaaagaccgggtgcgaggtggctctcgcctgtaatcccagcactttgggaggcctaggcaggaggatcacaaggtcaggagatcgagaccatcctggccaacatggtgaaaccccatctctactaaaatacaaaaattagccgggtgtgatggcacacgcctgtagtcccagctactcaggaggctgaggcaggggaatcgcttgaaaccaggaggtggaggctgcagtgagccgagatcacgccactgcactccagcctggcgacagagcaagactccatctcaaaaaagaaaagaaaacaaacaaacaaacaaaatccccaaaaagcaaaagtgtctgcatggacttgtgcctaactactcacagtggctacttcttgggggaggtgaaaggggaccctgttaaagaatttttcttctgtattgtttttcttcaactgagtctgcattaattttatatttaatactctccccacccctgatgctcacaggttgctttagctggtggaaggagaacctgcacctctggttttggcaaagtgtagaaggggacaagggcactgctctgcacctgcacaggttcttgcctcctggggtcagtttaatgaatctcagtggtgtttcttgggaagaacacagtggacactcacttgccagtcagtagacaaatcactgaagtccatgtctggcagttctcaatgtcatggggactgtaaggttgtcatgtctcacagttccctgacttagaagattagtggtgacagacacttctcagctctgctcgggagagcagctctgtaatgcgcttgtggtttcagatgtgggcggcctgtgtgaacctgtcgtgcaaagctcacgtcaccaactgctgcagttatctcctgaatc

SEQ ID NO: 156 - DNA, 1300 bp, Homo sapiens
gttccagaatatagattcgaagagaagtgtatggaattgggagtagtagtttttcctgaaaagcaaagtatttttaattgagtagctatttgaaggcatgaatcctttaaattttgatcatatccgtcaagaaccaatatccaagaacagaaagatgactaaattgtattctatggcaatgaaatgctgttttagtttaagaaagagatgaaaagttcagatttgccctttagaaaggtcactcttgctgtatatggtgtggaaaatggatcagaggcaggaaagactgaataaggagatccctgctaagatcctccatttaggaagtggtagtggtaatggagagattagatgggagaggagttgaggaagactcccaggtttctggtttgggcaactggaaggatggcgatgccatttactaataaaggaaacacaggaaaaagtggaacaataatgagagtagatggaaataaaaaattttaattaaaagaagtaattaaaagaaaaaaggagcaaagaagaaagtcaatcgtccagcagggggcgaaagagctaaataaacactttttttaaactaaaaaaagaaatatttatgaggaaacagagcaaagttttgaactctctgaggcttcggtttaggttctgagctttctcagtggtcaaataactttctattttattttattttattttatttatttatttagagacagtctcgctctattgcccaggctggagtgcaatggtgggatcttggctcactgcaatctccgcctcccgggttcaagccattctcctgcctcggccttccgaatagctgggattacaggcgcccgccaccatgcctggctaattgtgcatttttagtagagaaaggatttcaccatgttggccaggctgtctcaaactcctgacttcaggtgatccacccgcctcagcctccgaaagtgctgggattacaggcatgagccaccatgcccggccgaaataactttcaaatacttttttctttttcttttttctttttttcccctcagaaaagagtatttgactgtgttttatgtgttgctaggggagacggttgctatggagatggatgatatcataactccattgtgaaccagtaagaacactctcgtgagtctaacggtcttccggatgaaggctatttgaagtcgccataacctggtcagaagtgtgcctgtcggcggggaggtgaggagctacaagggtttttgcttagctttgtttttattcttgtaagcaggatgagactagaatcctttctttccaatta

SEQ ID NO: 157 - DNA, 1300 bp, Homo sapiens
aaaaaccgtaagttgaaccatgcttaagtccagatgctcctcgactgacatggggttaggtctcattaaacccatcataaagtcgaaaaattgtaagtcgaaccattgtgaggggtaagtcggggaccatccgtacttttcatacccaacagagccccttttatagtacaatccaagaggtaagtgctcaataaatacttgttaaatgaatatgtaagctgaatctttgaaacaggcacattgtatgttctgcatgcagccaaaacattatttccaatttagcttatatctggcagagtcaaaacacttatttacactcagcccctcaccctactcccataactgaaagttctgcttagcagacttctcttcccagaaagtccgagaagcacgaacgctttttgctaacatcctgctcccaagcacagaaaccacagcaggagactgtgtgtatctgtagcacctggtatacagcatctaggacacacaactgaactaataaataaaggtgacaggcgggaagaagagcgcagaattacttgtccaggaaacgggttgggtgggaaagagccggcaactggtaaaagatggaagtacacgccggatctgggaagccaggttccgcgcctcggactcatggaaaaactggatctggatcactgcaaaagaatcaggaaggcttcggtatcaagtaactggtgtcctaaaaccaaaaaacaaagtgcgatgccggggctacgctgttgtgagatgctgttatcagttctcgtcaccaacacagcggcagcaccaggcacaaccgccaatcaaagcggccccacgagtccctccttgaacaggttccttaactcgttcagtccaacactgtgccacaaactcgcgaaaaccggctacctagagccagcgtctttgcgagcttgcggccagctagtgcatgcgcaaatcctctcgccgtgcggaccaatcgcaatgcggcagcgagtgctacgcctgcgcagtaggcctccggtcgccgttccccttccccggctctagcaggccggcttctctgtccaatgcccacccggagctgggaggaggagtctgcgtaatgtgcgtgtgaagagactgggggagctggccggggctcacggtgtttgacccgtcggtcgtgcgtgagaggaaagggaaggaggaggtcccgaatagcggtcgccgaaatgttccggtgtggaggcctggcggcgggtgctttgaagcagaagctggtgcccttggtgcggaccgtgtgcgtccgaagcccgaggcagaggaaccggct

SEQ ID NO: 158 - DNA, 1300 bp, Homo sapiens
tgcatttctggcctcaaaacctcttctttcttttcctccagaataaaatataacacagggagaggacagaacttgttaatagactgaggccagcaaaaagccagactggttcctgaattggagggaaggaggctgcctgactttggaggagcagaaaaaaataagttaggagattagagatgggccacagcttaaatagagaggttcgactctgcatttcccaaatacgtaatgcttacggtacacgacccaagctctctgcttgaatcccaaatctgagcggacagatgagggggcgcagaggaaaaacaggttttggaccctacaaattggcttgaaatgaaaagtcagcaaaaaccactgggtggcagcgtggtgtgcgggcgcagctctgcagtgtctgcttctgctgctaccgctggggctgaacccgtctggggactctggcctcctcccctgaatggctacaagtgtcgccaagcaaaatacctctgcgcgggtgggtgagggttctccgggttgttggtgcgtccaagcctgaggcagggatctggcgaacttctgaggggctccagcccgagcacaatctggtcagctcaaacactgaggaaacacccccaccactccatcccccaatgccgagcaaacccccgctccgtcagcccaactacctcatctcagttcctcctccatcactgtttcctcccgaagctcctttcgggaaaaggaggggagaaggatttggacgactggggcagtgcggaagcccctacaggtgttagccggaacgggcggccggggacttgggggggtgggggtgggggtgggggtgggaggggcggcctgcggctccgagcctacgggctcagccccgggagggaggggccgtcgcgggagggggctgcaaggaggctgtcgcgctgttccggagggtgcctgcggcggctgaattcctgtgctgcgactgtgccgcgcccagagcagcagcaacagcgaagatgcgaggccattacctgtttgatccctgtcggaaacctggcacgggccaacttttcccgattatcacgccaagaagttgcaaggactagtcgaagactcggaggggccagggcgagggcgcgctcccccgcgcgctgcctcgtccctcctccgtccggccgcccgagctcccggcctctctcccgcccgcgctcactccctccgcccgcctccctcctctggcccccatcagaagggcaacagggcgagggggtccggcgaaattcggaccggagcagctggacatgcacggtgtccgccg

SEQ ID NO: 159 - DNA, 1300 bp, Homo sapiens; identical to SEQ ID NO: 155

SEQ ID NO: 160 - DNA, 1300 bp, Homo sapiens
atcttgaacttttgggctcacgtgatcctcccacctccgcctgcagggtcgttgggactataggtgcatgtcaccatgccaggctctcaagttcacttgagataaagaatacccaacactgtgtaagcatagactcctgtccaaaagtggtggtgaagcgtgaagggggctgtcctatggtggtggtgtagagaaggggtatgaaagaaagtgccagtgaccttacatttgatcctttccaatggtagtagtggggtgggggggtatgaaacagagtcagtgaccttgcaattatcctgtccactggcattggggaggtagggggtgttattgacccttgacctcacaatggatcccgtccaacggtggtggtggggggacatgaaatgcaatcagtcacttaatcttgtgcgggaaggaggggaaaggaaccacgaaaaagagaatcagcgaactaacaatccagtccaaaggtgttccaaaggtgttctcttgggagtcaggcagggaggtgggggtggggctgggccacgaaacagagtcagtctagttaggctgtaaaatctaagtgtcaggatgcagcgaacggcaagtcctcctcccggaaaaggcgcctgcggttgagaagggtcttgagcagcgcggaggatcggattccgggctcctggcctcttcccggtccgcgggcacctcggctacctttcggcagcggagaacccagccagaggcggagctgaaagcggctgcacttgctgggctgggctgagtcccatgagccagggaggggggtctctggcgccgcgcccggacaaaacacaaacgtcacagaggcagcggcggccaatcagtggagggcgcgcgcggccgcgtgcccctcgcgctcctcgcctcccctcgcgcgccgcgtacgtgcagcaaccgactccgcccagcgaggcggagcctagggaagccgcgggcggcccgccgctgtcctggagctgctgctgctgctgcggcggctgcaccggcggcgccgaggccgagatcgaggccggggtgcgcgcttcgcaaacgtgccctatccgtgcggcttggctgcgccagcccttgcggccacccgggcgtctaggcgggtctgtgcgccgcccgggcgaggatgcggctgttccggtggctgctgaagcagccggtgcccaagcagatcgagcgctactcgcgcttttcgccgtcgccgctctccatcaaacaattcctggacttcggtgagtacggggccaagggtccccatgggcccggggccgccgccattcgggctgcc

SEQ ID NO: 161 - DNA, 1400 bp, Homo sapiens
tacagtgaatatcaaattcatttaaagatagaattaagacaacatctggaaaaataaagttgcagagcaattgcaaatgttctcattgctaggaagccgaaagtaacagaactaatggaaattgagaggcagggttaccccctaaaggtaggtggaggtgtatgatgctaattaacctcatctttcagagctatgagactttctaaacccgaacatgtagtgagctccttacacctctcttaatctttttacgtaatgcttataggccttttaaaaagcacgtcttttagggaagaaagcaatagagattcccttcagtttatttttcttaaattccagtaacatgaaaaatttgaaattatatgaagcagacgtagtgtgataccgtaattagaaaattacttctgtctaccctttctgcgtcttcgtttcttcagctgtgagacgggtatttctcccagtgttgctgtgaggattacacgtatttacctgcaaagtgcttaggacagtgcctggctcacggtcagtgctcacgtttgggcagctgcacttgggcgctgctggcacaggaggtaagttagtttggcctattgcagcgtcccagcatctgtcgcgtttctcatgtgtgattgggctctggcggcccatcctggcggagacttcggctagcaggccccgctgcagaccccaggccggctcgggtctacctgcgccagcgctgtacctgggcgaccttggctttgcccccaccggtgacccggcccgcaggacgtgtgggtgccgctcagctccccccgcctcggccgccgacccccagctccccggcggggcctcctcctgccacgtgacgcccccgccaggggccccagcgccctcctcgcggccgcgccgttccggctcccgagccccgcctgcgcgcggcctcctcggcgcagccatcctcttggctgccgcgggcggcaaagcccacggcatctgccatttgtcattcagcccgtcggtaccgccccgagccttgatttagacacggctggggcgtgctctggcctcactctccgggcgggtgctggacggacggacggacggggcagccgtgctcacagctcagcagcgcggggccttggcgcgcggggcgcttccccgggtcgccgtcatggccgcggaggtggcacgcccgagcggcctcgcctgagctccgggggtcgtcgccccgcagggtaggtgtttgggtgctcgcggctgcggcgggcgggctgggggcagcggtggccgtgcattgccgcgctgcgaggacggcgctgggttcgcggccgcgaggagggtgtgcctttgccgcgccgcctacgtgcgggtccgggctccgcggggccgggtgcgggaccccgcagatcgtcacccgc

SEQ ID NO: 162 - DNA, 1300 bp, Homo sapiens
accaggctgttaagctgtggatgggcaaccgcacagtgcattggatgtgagtatttcagtacgtggagctggccagtggagccggccgaggtcaggcagagcgtacagcagcgcgcgtgtccgtggggagggagggtcctcccgcctccccgcctccccgccaggccagtcctgttgcgcctcctcctgccccactctgactttccagcgcccaggccggggcgccgccagggcgtctctgagggtcgcgccccgataccttcctccaccccacggcttcttccccccaagggcggggctgggggcccaggagcaccacagcccccatgggcccgggaaatggcagcttcgtcatggcccagcccgccacgctcaccttttcccaccacctggaggatccactctccgtccgtccttcccgacctcaggctgcagaggaaacctgggggcgggggtcgaggaagccgagccccgaggctcccagcgccgccccaggaggaatcttgcgggccactagaagctgtgcgcgcggccgggctcggcccccacaacggcccgagcggccgggcctgccgcgagcctccgcgtccaggtggggtctccgcgcccccattccacccctccccgccatcggcgctccccgcaactgcggggtttccacccgccccggcgctcgcgcccactcacggtctccctcgcccccccgggagatgctcccggcgttctatcccgccccgccctggcgcgccccgcaaacgatgtgaccccggccccctgcggtctcccctcctccggacgctgcccctgccccacctgtggcgctcccgtcatctctagagcccccaaccagagtcctccagcccacccgcgaggctcgcgcacctgcgatgcggccccactagcagggacccgcccacctgtggcgctacccctgcctctgccgcctcccgcaccgctagcgcggcccccacctacgacgacccccgcgtagatgctcctgcccacacccgccccagccccggcccctgcccctagccgcgcccgcgccccctcccccgcagcccctcccatacgctcgggccccgcccgtcaccgcccattggcgctggggccgggcgggggcgcgggcggggcggcggttccgagtcaggcgcgcgcgggcagggtccccattgcctgctgcgcacccggacgtgcggctcccctcggcctcctcgccatggacgcggacgactcccgggcccccaagggctccttgcggaagttcctggagcacctctccggggccggcaaggccatc

SEQ ID NO: 163 - DNA, 1400 bp, Homo sapiens
gtgctataaaatgcaaaggtgtcatcatccttgcctaattatacaacaagcccgtgtaataaatgctctaataattataaccgtacaaaactagaggtactgcagtcacactcataggaagagtaattctgattaggactaaagggttggttgttcgggaagttctcagagatggtgacatttaagatagcattccagagagagaacgggtaaggccattccaggcagcaggaaagctgaagcaaaggcgggagcagggagaaccacaaaagcacagtgtgcctcctgggtactaagcagagatcgcgtgggctcctggacctcactgagtgtttgcagaagaagccgcagagctacctggggccaagttaggatcctcgactgctttgctagggaatttcgtaattatactggaggagcgatccacgccttagcagcaatcactcacacagttttccagtttacgacgtgctatcccatcccgtaccacatctactccttacaggagccctcagagacaatcagggataagtcattgactcattcaactgaggccccgagtggtggctctgactttataatgcaggaattagagcagaaagaagaggcagcgggcgaggaggccaatgatggaggctcaggccacagcctaggccaggaaggccgtgagtctgcagcaggggccaaggcggtgcggaccgaatgatctgagcctccccagccaggccccctcctactcaccctcgcctcctccaggactgacgtcccgggggcggctccaggaggcgcaacccggaccgggccgcccctcctgccgggccggtacactatatccagccaggtcagaccccacggcgctgaagctagccgagcccctcaaaaggccgcccgaggctttcggccgcacatccttctgggaattgtagttcccatcctctgaagcaccgcgtacacccgccctccgcccttctatcccacaggaccccgcgcgcagaggactcagtggaccggggccgagagcccaatgggaaaggaagttctagatgacggacgacgtgcggggtgaggctagtgcaggactacatttcccgaagtgcaccgaggtgggcaggacccggaagtgagggtgtgagaggcctctctggaagttgtcccgggtgttcgccgctggagcccgggtcgagaggacgaggtgccgctgcctggagaatcctccgctgccgtcggctcccggagcccagccctttcctaacccaacccaacctagcccagtcccagccgccagcgcctgtccctgtcacggaccccagcgttaccatgcatcctgccgtcttcctatccttacccgacctcagatgctcccttctgctcctggtgagtgagggaatgacagacccatc

SEQ ID NO: 164 - DNA, 1300 bp, Homo sapiens
ctcccaggccaggctcttcatgagaccccgcctctcctcaaggccatgcccatcccctgagggccccccacctcttctcaaggccacgccctctgaggccctgactcctcccaggccaggctcttcatgagaccccgcctctcctcaaggccatgcccatcccctgagggcctcccacctcttctcaaggccacgccctctgaggccctgactcctcccaggccagaatctcgagaccctgcctcttttcaaggccacgcccatcccctgggtccccacatcttctcaaggccacacccttctgtgaggcgccacctcctgtcccagccactctcatctgaggccccacgtcctctccaggccatgcctcttccctgagactccaccccctctctgagagccctcccctccctgaaagccccccaccctcaatatccttctcctctctgaatcccttgtcctcttgagaacttttccacctcctcgttctgatcccccaccctctttgagtccttccctttttaaggtcccctcctcccagaacccctccgccaccctgagcccctgtcccctctctgcaccccgcccctgccctttctggcgtgccccctctgctcagccccggctcttttgggggttcctctctcttctctgcagggtacacccagcagctggccttcagacaacccagctctgcctttgcggccttcgtgaaacgggcacccagcacctggtgagtcccaacagccagctcaggccatgcatactccccaccctcaacccccagcagggcccggaccctggccaggggtggtcccttaggccagccttgcccaaacagccctggacctgcagagtccaggcaagcgctggctgagtggccggcggtcattaagcatccttaagcacggaccgcatacaacagctgggtcctggggcctgggaaggcaaaccaggcaaactgggccaggccctggtccctcccccacgctcattggctggttgacatggcagtctctggatctcagagccgattggctcatgctctgtgcccactccaggctgaccgcctacgtggtcaaggtcttctctctggctgtcaacctcatcgccatcgactcccaagtcctctgcggggctgttaaatggctgatcctggagaagcagaagcccgacggggtcttccaggaggatgcgcccgtgatacaccaagaaatgattgtaagaggctgggatttagggcaaaatggaagagaggggctcctgagtctcgcaggatgaacacgagagagagccccac

SEQ ID NO: 165 - DNA, 1300 bp, Homo sapiens
acccattactctgtcttaccaacagatggggtgacacccctgatgtcagcagtttgctgtggggaagtacagtccgggaccttccaaggggcatggttgggatgtcctgagccctgggaacctctgctggatggaggggcctgtccccaggctcacaccgtgggcactggggagacccccctgcacctggctgcccgattctcccggccaaccgctgcccgccgcctccttgaggctggagccaaccccaaccagccagaccgggcagggcgcacaccccttcatgctgctgtggctgctgatgctcgggaggtctgccaggttagcacacactgaggtccctacagggaatggggcgagcttacaagtaaagctggacagaagcatcccctagagtttgacaaggaggaaattggtgtgattgggaacctgacagggaaactgcggaggatggctgaatatggattgcgagtggggttaatagtgtaaggaactcgagttggcagtccaaggtaccccaggggtcactggccctctgtctccccagcttctgctccgtagcagacaaactgcagtggacgctcgcacagaggacgggaccacacccttgatgctggctgccaggctggcggtggaagacctggttgaagaactgattgcagcccaagcagacgtgggggccagagataaatggggtatgtagaggaaggggtgatgtatgctatagagaagttgagcagatggggtgggagatagcgtgcaaaatataggtgcagcagaggggcattccctctcatcctgctgttacggcggtcaatctgagatgcggtggaagtacgggccgcgtgagtttccccccccaactcccaccctcaacaccacactggccctccgctccagcttactggggaactggcatggaacacagtgtctgtggaaaggggggggaatctcgtggggggagactgtctcccggtctcaccgaccccagaacaatgccccattgtccctcccgcgcactggtgacgtcaccagggcaacacttcctgcaggccggtggtctcctgggcaacgcttcccgcctttgagggaccagccggcccgaatagcccttcccccaaggccagaacccgtgggaaaccggaacccaggcgtctggcccccaactggggtaacaacctcccacgtcgtcccctagggaaaactgcgctgcactgggctgctgccgtgaacaacgcccgagccgcccgctcgcttctccaggccggagccgataaagatgcccaggacaacagggtta

SEQ ID NO: 166 - DNA, 1400 bp, Homo sapiens
cacaggaatttatcagaagaataacaggaagtactgtattcacaacagtctctgaaaacaggcaggaatttaagacaagatcagaccatcagatggctggtggatcatatgatgccataatcctatacccttgccccaaccaacccacatatatctcaggccttcactgcatcttttcattactcctccaaaactgaaaacctatgcgtgagcctctggcttgctgagcctaggcaaagcctacatataataactcccatggagatggaagaggcaatgtgtttcattggcttctagatgggaggtggggcccccaaatgaccaatgttcccaacaaaacctgaacaatctgaaattattcagatttctgcttgtcattctaacctctgttcaggacttccaagatccaggacaggcccagtgtagatacctgtgtcccaaaccactgatctgggctaggaagactgaatcacaggtgtggaaggtcacccgggttcaaccatctaggtgatgaattaggccaggacctgggcaggtagaccatttattctggggagatatgatgcgagcttgaattacatgggagaaatatttgtaaggcagatgggataacaggacttgataagtctgtagtgtggaaaggctagaaaagaaaggaatcaaaggaatcctgatttctgacttgacagggtagaaggaggtgtgtgtgtgtgtgcgtgtgtgtgtgtatgtttatgtagggacagtgacacccaagagaggctaggaataggtttgttttattcctgtttggggtggttgggtaggcagggttaagtttttgacttggtgaatttgagatgatggccaatatacaattgacattccagctggggggaccattgaagatcaagtctggcaagtctactagctggcgcctgggtgagctgagcccagcaggtgagggaaaacgcgggaagagggtcttgcagattccaaacttaggaagggtcgcggctccgcgcacgtgctctcggggtcaccttccccgcgcctgtgagggtgccaggagttcgtctccaggtcccgcccctgtgggcggggcgaggcagcgtcgccgcgaggccacccggaagaccaagccgggtaggcgctgtctccgtcgcctccaacccccccggtccgaccagggaaggtgggatgctctgatggccgggcctgcggcgctgagcgcggcggcggcggctgctctggcggccgccctgctcctgctgcgtcgtgaggacccggggccgggggctggccccaggtaacccctccgcgtatgggaccgagctgggccaggtctcctggccgggccggggataccgtggggtatgcccagtgatgccagcagcttgtggcacctgggcgcaccctcc

SEQ ID NO: 167 - DNA, 1300 bp, Homo sapiens
aaaatgctgcaaaaatacagcccgtttgtttttaaacaggcgcaaccacatgtaattcattttaagtttcttttcccacccaagtaaaaatcaagtcataaattaggaaaagcattaacagaagtatgtttcagccccagcgcgctgacctgtggttggaataccggccctggagcccggaggtcggggcccacccgccgagggaggtctgggcgctgtcctggtctccacggagctcgcgcactcacggggccgaggcaccaaggcgaccggcgcagagccagcgccgtctccacaacagggcagggcgcgcagctgcgggggaggcctcgcccctccgctcccctcccctgccctccgccccggccctcggggcgcggcgtcccccacgtgctcccctcacgcgaccgcgagggcagtgggcgtgcggcacccgggagcaggaaactccgtggcctctgcggctctgtggagagctcccctccaccgccgcagcccccgagcccgtgtatcttcctgcctttaaggcatcgcagcctcctcggcctggaggccccgggctcgctccgtgcggaccccgctccagaacccgcccagcgcgcagatgccgtgtcccggcgcaaggccagagagggcgcaactctggacgtggggccgccaccgagcctgcccttcccggctcccgaaaggccccgggctcagagccaagactgcgcttgcccgaggcccgtcgggcccgccctccctcggcgcccccagcgcagctgcccgccgcccgaccggaagcccgcactcgcgcctgcgccccaccccgtccgcgcgccggccgcggcactgcggcggttaccaggacgctgaagcagcgcagccaatagcgccagcctggcggcgtgctcccggcagccagccaatgagacggcaaatcaatcatttgaaacacccaatggacggagcactgcggcgccaggagggggattgtgatagggagataggaggctgcggctgaccaataaagaccaaactggcttaaaaaggcggaccttaggcagcttgattgacgggggcaaggccaatcaaacgagggagcttgccagcctcgttctggcagcccattccgagactagcggaggcgggcagggagggtatataagcgttggcggagcgtcggttgtagcactctgcgcgcccgctcttctgctgctgtttgtctacttcctcctgcttccccgccgccgccgccgccatcatgagggaaatcgtgcacttgcaggccgggcagtgcggcaaccaaatcggcgcc

SEQ ID NO: 168 - DNA, 1300 bp, Homo sapiens
ggtttctcatggtctcaatcatgacccagcccagattccagggtcaaggaccataaaaggctacattgatggaagacatgtctcattgagggacaccagagtaacaactaccagacaagaaggggcaggtctgtgtgagcgccatttcctaattctatattgcccactcttcagagaagatggttggagggcaaattgtggggagcaaggtaactccaaacttttacagaattaaaggtagggggtctggtcagctacagtccatctgttatcaagaggcctggctgtgtgtcttcattcagtttattaggcatttactgagcacagcctacatgccaggttcttcattttttgacacagggtcttgtgttgcccaggctggagtgcagtgctgcgactgcggctcactgcagccttgacctctccagactcaagcgatcctcctgcctcagcctctggagtagctggggatacaggcgcgcaccaccatgctcggctaatttttgtatttttagtagagacagtgtctcaccctgttggccaggctggtctcggatcccagagatcaagtgatccgcctgcctcagtttcccaaagtgctgggattacaggcgtaagcctccgcgcccggcctatgccaggttctacatgtgttctttcttgactcttgtgttacagaggctcgaatgaagcctggcttctacagtaccgcacccagcacctcgctgcgatgcagcctcctgtaccctttccgtccggcagctggagttagggcagagtgccgggtctctaggagggcaacactcaacgcagtcggctcctaggcatccagtggggctgcaaccccgccgccggggacgaaaggcgaagggggaaaactagagctttcgccggccgggacagcgcagccgggtttcagctcgttctacggtccacgtcagaagatcgcctccggcgccgcggacgccggagaccactgtctgcgcccccgcacgcacgcacccacgtactcgcgcacgcgcgcgccggccccgcccaccgccccgctgtggcccctttggaccgcacgagccaccgtccgcacagccccgccccgcacggccaggcgaagcggagccggccgtgcggtgtgtgtgtatgtgttcgcggggcgccgtctcagccccgggaagatggtggctgcagcggcggcaactgaggcaaggctgaggaggaggacggcggcgacggcagcgctcgcgggcaggagcggcgggccgcactgggactgggacgtgaccagggctgggaggccggggct

SEQ ID NO: 169 - DNA, 1300 bp, Homo sapiens
gaggattagggatgtggaacagggtaggagaaacagccctggatttaaggtaaaattctggtttcaaatctcagttctgtcatatgttatacaattcacatgacattttcttgtgtaagggaggaacaaggatgcttgctctgcttcatatctcactttgtgaaaatcaaatgtaattatgaacataaaaggtagattattaacattaaggcagttgaattttaaaagcttgttttcttcccttatacatattcctaaccgtggagacagctaggttctgtggcaatgaagaaaattgatcaatgactgtttttggtattactttgggaagtagggatggaataggggcaagggaagggcttagcttcaaactgtagacagaagtgggaagcccaaatctttgcatggtgagaagtgggatggaatgtaggtgctagagatggtgcaccagtagggactgtcactggattggggaaaaaaatccggggctgtccttatctgctcccttaggcaaaatcgttctgtgttagtctggagggtgaacctattttaatgcaggagggcatagacttttgggtggaagcggaccctggagatgtactggcaggtgaatagagtgtggaaaagtggggaaaggagaagcacgattcatgagcctgagttcgggcttccatggatggaaaagcatcaggagtggaatttaaagacggtgtgtttcaggtgatgtgaggtcctggatgcccgaagcttcaagaaaatactggttgggcacttagctttccctgtggttgccaatcccacgcaggccgcctctagcgtctcgattcgcttttctctgacctggaacctccgccaagcccccagctctcttcttcgacccagccttgcacggggcagctgtcggggcaggacccgcctctggcctgtcgcagcctagctcacggtcaagggcgggagcctgctgggaagcacggccgcgggggctcgctcggggccacctgcctggaactcagcgcgaggtccagagttccctccggctgcgcagcggcgcacgtgccccgtggaaggggcggttcccgcaccccagaaggagggggcgcccggccgcgcggactttcccttttgcttacttcctagtcccgggcaggccggctcggaggcagcgagaaagcgcagccaggcggctgctcggcgttctctcaggtgactgctcggagttctcccaggtacgtcgtgcgctccccactcgtgtggtctctctgcaccccttcctggggtcgggtcgggcaggggcggaggg

SEQ ID NO: 170 - DNA, 1300 bp, Homo sapiens
atttttagtagagacggggtttctccatgttggtcaggcaggtcttgaactcccgacctcaggtgatcctcccgccccggcctcccaaagtgctgggattacaggcgtgagccaccgcgcccggccgatttctttctttctttttttttgaacaaacatcagcccccaaaattattgtagatatctaggtcaatcatttaacatgttctgtttcttcctctgggaaatatgtataacgacaattctcactcaaggggctcttgcaaaggttaagtggcatggctgacatgtgtcaagtctgtaccatcctgcaagcagcagcccagtctggcatttgtgtaaggcggtttcagtggagagatgtgtggaagggtgcaccccacgatgctcacctggtgcttcctcggtggggaagggaaattcagaagtggtggaaagagatgattgtcgtttcgtatatctttgtattgtttcccggatgttgaaattgttactgtagtaactttttatactcatgtgttattggtagtttggatactatcaccataaccacaaacactgaattaggaaaagcagaaacctagaaacatgccatgattcaaagtctggtatttttggaagaggaatttaataacgaacgttttaagaggaaaaagtcaggagagtcctaacccaggccaaccttgtgtgtccacagcatctactgccgaggatgttccaagccgctgtgctgctcgtgcgcgctccttgacagcagccacagtgagctcaagtgcgacatcagcgcagagatccagcagcgacaggaggagctggacgccatgacgcaggcgctgcaggagcaggatagtgcctttggcgcggttcacgcgcagatgcacgcggccgtcggccagctgggccgcgcgcgtgccgagaccgaggagctgatccgcgagcgcgtgcgccaggtggtagctcacgtgcgggctcaggagcgcgagctgctggaggctgtggacgcgcggtaccagcgcgactacgaggagatggccagtcggctgggccgcctggatgctgtgctgcagcgcatccgcacgggcagcgcgctggtgcagaggatgaagtgctacgcctcggaccaggaggtgctggacatgcacggtttcctgcgccaggcgctctgccgcctgcgccaggaggagccccagagcctgcaagctgccgtgcgcaccgatggcttcgacgagttcaaggtgcgcctgcaggacctcagctcttgcatcacccaggggaaaggtaagcacgcacgccaccttcc

SEQ ID NO: 171 - DNA, 1300 bp, Homo sapiens
cgataccagcctggacaacatggtgaaaccccgtctctactaaaagtacaaaaatcagccgggcgtggtggcggctgcctgtaatcccagctactcgggaggctgaggcagcagaattgcttaaacccgggaggcggaggttgcggtgagccgagatcgcaccactgcactccagtctgggagatagctccgtctcaaaaaaaaaaaaaaaattgtaataataaattgctgattggggctcggagaagaacaggcagtgactagaactcgccccttcctgaaatatttgaagggtcctagcgtttgctttcttgttggaggcccagaaagcactgacttaacgtgtgtgaaagattgtagacagagacgggataaagagccccgcgctggaaaaagagcaggctttggaaccagcagggtcacgggcagtttccttacgtgtaaactaggagtaaaaagatcagtgtcctgctgaaatgagagagtaatagtaaaaactactatttaccgagcacttccaggtacccggtatttatgatcacattttacagatgaggctgagaggtttcccgacctgcccaaagacacaaagcaagtagaatgtacgagtgaagactcgaacacaggtccgtgaatcaatctctgcgtggggatgggagcggttccagtgataagggccacttaatctggccgagctgctccggagcagcgcggcagccagcgaattggggccgcccccacaacccgccgcccgccgcccgccgccctccgccctccgccctccgccctccgccctccgccctccgccctccgccctccgccctccgccctccgccctccgccctccgcgtgcttacgtgcgctccgtgactgcggcgaccgacgcgggactggagagggaggacgcatgcgctctgccgtgccgaagcgcgccccctcctgtcgggggccgcagcgccaggatgcagcgcatgcgcacacctggagggcggagagcggtccagagcgagtggaaagatttgggcgagaacttgcgcgggagccggactgagcggtgcgagcgcgcaggcgcggccgacggggcgggctgctactccggaatctgctaatcccagtcggtgccgcatccccagcccgccgccatggccgcctacaaactggtgctgatccggcacggcgagagcgcatggaacctggagaaccgcttcagcggctggtacgacgccgacctgagcccggcgggccacgaggaggcgaagcgcggcgggcaggcgctacgaggtgcggaggggccgggtgt

SEQ ID NO: 172 - DNA, 1300 bp, Homo sapiens
tgcgggtgaatcacctgaggtcaggagttcgagaccagcctgaccaaatagtgaaaccccatctctactaaaaatacaaaaattagctgggcgtggtggtttgctcccgtagtcccagctacttggggggctgagacattaaatggcgccactgaagaagaatgaataaggtctagtaatacaacagggtgactacactcaacaataatttattgtacattaaacaaactaaaagtataattggattgcttgtaacagaaaaaaaggataaatgcttgaggtgatggatagaccgtttaccctgatgtgattattatacattgtatgcctgtatcaaaatatctcatgtacctcttaagtatatatatatatttacctacttcgtactcataaaaattttaaaaggtacataaatgttatcattgcatcctcttaattttatttttcagttccagagggataatcctgtctctgccgcaaatgcagcaccttcctcagtcttggggcgtccatcaagcggagagctggaatgtgactgaaagtaacagagtataggtggaactagaacaaggtcacgagctggtgcccaactcgtgtaactcctggttccaggctgtccctctaggatgctgttggcgccagccgtggtagtaggacagagtctgggtaaaggtcgcctgctgacaagatggtagctaggagacctctaggtgcgccaaaattagggcgtcttttcctggaccggcaaaacgccctgctcaaagctcattacatcaccacgcccaagaactgatactttagcagggcaacgcaccaaccaagcgactccgccccaccctccccgctcctccagcacacgcaagcgcacagaggcccgcgagtgacgtcacctctcccgacaccacctcgttgtcgtacgaccaaaggcctgtcgtaacggccgggaaaagcctcgagaagaagggcacgcacgccgtacaccctaacatgctcgccagcatgcgcgcgcaggtccttggcgcaggcattgggactggagccaatgaggtgcggcgacgttactgcgtagccgccagctcggccgcacgtcagggcgcgggagcgcggagcgagtttggttgcacttacaccggtacttaagcgcggaccggcgtgtccttggacttagagagtggggacgtccggcttcggagcgggagtgttcgttgtgccagcgactaaaaagaggtgagagcgggtcgcggaggccgcacctggttagaggcagagctgtgggaggcgcgcacttgcgagcgaccga

SEQ ID NO: 173 - DNA, 1300 bp, Homo sapiens
ttttatacatttgagggagacatgagacatcaatcaatacgtaagatgtaggttggctctttaggaggtaaaatgtgaagtggaggcgtccgggtcataggtacatttaaaggttttctgattggcaactggttgagagttatcatctaaagacctggactcagtagaagggaatgtccgggttgcatgaaggagttgtggagaccaaggtgttatcatgcagatgaagccgggaatacactgcaaatgtttcttatcagagtcctctattagtcttagggtctccgtgcggatgtttgtgaggccatgtttgacttccgcttcccatcaaggcctgaactagtttttcaagataacttagaaggccacaggcggaggggagggtccatccgttggctgcagggcttagaattttatttttggttcataacgaggagggcagggacagaagccaccgtctctgctccccagcgctggccctcactcggaaagcaggctctcccctcgcatcgtcttttaacaaattcctgctctctcggcccccgtcgctgccatctgggctctcctttccgcgcttcattaggcgctgccgcggcaggggctgagggcctcaggggacggtcgcctccctgccgggacgccccggccctggcccgcactgtggggcgcagtcacccagccgtcgccgcgtagccaggagcccggctgagcgcgttcgctgcaggagccatcctcagctgggccctacttaactttccgcaactccagtccccgcagccagtcggggaccccgcctccctctccttccttctccctctcacttcttcaccccttctctcccctccctcctccgcccccgcccccgcccccgcccccgcccccggccacagcatccgacgtggcgcggccggctgcgcacgcaccgtatgcttggctcgcggcccagcagggcgggcgggccgcggtgacgtcagtgcgcatgccgtcggtgggctcggctgcgccacgtcggcgcgcggcggccgcgcccccttaacggcagtggcactcacccggctcgcgcggccccggcgccccacgcgcgcgcgtcgttctcccgcccgctcgctccccggcgctcacacctgagctcactcgcgcacgcccgcccggcccgagaaccgcgccgccgcctcggccccgcggaagccccgccgcgtcatgtcttcgcctcccgaagggaaactagagactaaagctggacacccgcccgccggtactgactcttttcctctctctccacgcgcgggtgccgggggcg

SEQ ID NO: 174 - DNA, 1400 bp, Homo sapiens
gtaaagctgtaaggaaatgatcacactagtcaggctaggagacaatcaggctccgaaaggagcacagggcatgggtgagaaactcctggggtgccggtaatgcccttttcgtttttatctgggtgttttattaattcttctttaaacgtgtatgtcgtatgcacttttctgcgtatgctatatctgttaaaaatttatcggcagcccagcagacagattcgtgcctctaaagaggtggaagctccagaacgatccgcctcgccattaagcgaaggcaactccgaacgctgagaaacgcaggcccggggtcggccggtgtccttacggattggcgagcgggcgcacacccctcctgcattaaggagagttctcagggtcacgctccgagcgaccctagagggagcggcggtgtcctcgccgccgccaaacccacctagagccgctctccgcgtcggcccctccaccgtcgccggcgactccggacagccgcggggcgattctggggcttccagacgagggaggggcccggggggaaggaggcggcgactcccgccgccccgcagagcctcggcggccagagctaccccaagaaggccagaccccgccgtccgcggctccgcgggccccgatagggtgggcgtggccgccgcgcgccggacgtacctctccaccgcgaaggaactacctcgccagttcccggcgacagaggacagattatttccaggaccgctcccgccacccctcccgggcaacccactagacgtcccctttctaatttggagtgcgggtgcgggcgcacgcgcactgccgagcttccgcgagggcgcgaccggacggcggaggaggacccgtcgccgcagcctccagggcggagcgcgtgctcgcctcgacacgcagcgaactggtggcgggggcgcgcccggcggcagcggcggcggcggcggcggcggcggcggcgcggcggcgcgggtcggccggggcgcgagcgtgcgcagtggctcctcggcctcggctccagccagggcggcggcgctggggaggagcggtgtgggcggccgggggcggggacgcggggcggcgggcgtgtccgaagtcgcgcgcggctggcgcgcggtcccgagtgaaaggagaaggaggggcgctgggggtgacggtgcggagccgctgccagcgctgggcgagagtcggcggccggatccgaggagcaggcgggcctgaggccgagtcagctgcgcgggcccccggatcccccgacagagcggcggcggtgtctggccaggcggtaggcgctgcctggccgcggcggggaagatgttcagcgtagagtcgctggagcgggcggagctgtgcgagagcctcctcacttgggtacgtgggggccgcgggccggcgggaagacc

SEQ ID NO: 175 - DNA, 1400 bp, Homo sapiens
ccagaccccaaaagaggattcgtggatcttgtggaagaaagaattccaggccagtccacagagtaaagtgaaagcaagtttattaaggcagtgaaggaataaaagaatggctactccatagagcagggtgttcccaaaagcacgaggaggaaggcgtccacctgggtacgcttgtttatatgtaagataaaagccaaaaaacatcacgggggagacgtgctgtactacctgggctcgtcaaaggattgccaatctttgcataacgcctgtcctccgcaagcatctgtatcattatctttaaagcgaaacttcaactaagaatgcttcttgttcttaagatacccggacatcgggacctaagttccgggtctgctgcgtaaaagtttattaacctgttcccgtgaccgtaaacgcccgactcctggggatgcagccagcggggttcagcctcagtttacccagcgctgttcgagctggagtcgctctggttggagcgcctgaccgcgagggccgaggtcaggccggactggggttctccggagcgagcaggagaggagcggggctcctgcggagcggcgcggcggggaggccgagggcagggcgggctcgagctcgggctcttctggcagcgcctccatccccgttccgttcacccggcagccgccccgtggaggaaccgcgccccatctttagccctgtgaaacagaaaggcccttcctccggcaggcagctgagggaaagatcgccctgcaggggatgtcgggcctgtcactgctttgttgcgggccacagttccctcccttctccgagcgggtcgcacgtccgaaggtcacccccgccaggtggctaggccctgtcgccactcgacagaggaccgaggaggaaccaacccactgcccagactgcagcgccgccacgctagggcccgcgccgacaaccgtcatgactgggcatgcgcaaacggccccgccgggagccatttcgccgggctgcagggctcgaggagagagcaggtgcgcaggcgccgggcgagaggctgcgcctgccctaccctggagcgcgcgtgcgcgcgagagccggaaggggcggtgcctggcgcggcgcctgcgcagtggggcggtgccgggggcggggcgcggcggctgtcagctgactgtggcggcggcggcctcgaggtgacaactgtctccgtcgcaggctccggcgggggcgcaggaggtcgcccggcgcgtcactgtcgggtcggcgagccacgggggccgccgcagcaccatggcgaccaccgtcagcactcagcgcgggccggtgaggcagccgggcgagggtcgggcgggggcggtgacctgcggttgcgggcggggccttgggtcagggctactgctcagctgcggctggcgggc

SEQ ID NO: 176 - DNA, 1300 bp, Homo sapiens
gaatctggtcggcgcgggaaggggccaagcaaagtccggctgcacagagagtcacagatttgaccgagttggaaactcaggaaacagggtaggtcatgctggatctggagtcggcatccctctggcagacattggccacctcagaggatgtgaatttccaggcatttcccacttccctagaatcttggtgactaagtggctccggcaacttgagggtacaggcgatggctgttgggacttcaaggccaccgagagctgatggaaagcggtcctgacagcatctgctttgctctgtcaagacttgtcatggactgattgattgattggttgattgattgattttaagacagggtgttgctctgttgcccagcctggagaggcagtggtgtgatcacagctcactgcagccttgaactcctgggttcaagtcatccttccacctcagcctccccaagagctgagactacaagcctgcaccaccacgcctggctaatttttttattttttatagagatagggtcttgctttgttgcctaggctggtctcaaagtcctggcctcaaatgatcctcccacttgaaacttccaaagcacagggattacaagcatgagcccccgtgcccagctgacctctcattgtctgttacacacacttgatcacaaatctgtctccccattagagtcctcccagtgcctggcacagaccacatgcctaataaataattgggtgaatgaatgaatgaatgaatggaagggagaagatagggatgactctgcccattttcagctgaagtaactgaggctcagggaggtgagtgacttatccaggatcccacagggagtggccaacacagccaggatcccatgggccttctgacaatgcatccaacacctttgaacttggcctaggtggggtgatgtcccctcccccagttctttcgttcggagcccaagataacccttgactcagctgggcaacaacgggacaacaacttcctctttccagaccacaggcctcaggattttcaaggaagcgtggagggggctcgggggcgtgtttccttctagttgccccataaagggcagagggagggagtttggggtactctgcaaggacccgagctatttatccctaggtcctttcctcctgcacgtcagctttgagccccgagctggtgcttctgctctctgagacatggcaggcctgatgaccatagtaaccagccttctgttccttggtgtctgtgcccaccacatcatccctacgggtaagacctccgacaggatgcagttccaagggc

SEQ ID NO: 177 - DNA, 1400 bp, Homo sapiens
gcaggagaggaagatccagcacaaaaaatctgaagctaaaaacaggacacagagatgggggaagaaaagagggcagagtgaggcaaaaagagactgaagagatgagggtggccgccaggcactttagataggggagaggctttatttacctctgtttgttttttttttttttttttttttttttttgcgaggtagtcttgcttagtctccaggctggagtgcagtggcacaatctcagctcactgcaacttccacctcctgggttcaagcaattctcctgcctcagcctcccgagtagctgggactacaggcgcatgcaaccgcgcctggctaatttttgtatttttagtagaaacggggtttcaccacgttagccaggatggtctggatctcctgacctcgtgatctgcccgcctccgccttccaaagtgctgggattacaggggtgagccacagcgcctggtccctatttacttctgtcttctacctccaggagatcaaagacgctggccttcagacctgatcagactcccaggggcagccaccacatgtatgacagagaacagaggatgcctgtttttgccccaaagctggaaattcatcacaacctgaggcccaggatctgctctgtgccggtcctctgggcagtgtggggtgcagaatggggtgcctaggcctgagcgttgcctggagcctaggccgggggccgccctcgggcaggcgtgggtgagagccaagaccgcgtgggccgcggggtgctggtaggagtggttggagagacttgcgaaggcggctggggtgttcggatttccaataaagaaacagagtgatgctcctgtgtctgaccgggtttgtgagacattgaggctgtcttgggcttcactggcagtgtgggccttcgtacccgggctacaggggtgcggctctgcctgttactgtcgagtgggtcgggccgtgggtatgagcgcttgtgtgcgctggggccaggtcgtgggtgcccccacccttcccccatcctcctcccttccccactccaccctcgtcggtcccccacccgcgctcgtacgtgcgcctccgccggcagctcctgactcatcgggggctccgggtcacatgcgcccgcgcggccctataggcgcctcctccgcccgccgcccgggagccgcagccgccgccgccactgccactcccgctctctcagcgccgccgtcgccaccgccaccgccaccgccactaccaccgtctgagtctgcagtcccgaggtgaagcccccgccaggcccagagcccctgtggccccctcccttcgccgcggcgcccctgcctcctttacccggtgccgctgcgcacctctccgcatctctggcccggtgcagctgcgcacctgctccgccgcccgcg

SEQ ID NO: 178 - DNA, 1300 bp, Homo sapiens
tagctgggactacaggcgcctgccaccatgcccagctaatttttggtaattttagtagagacggggtttcaccgtggtctcgatctcctgacctcgtgatccgaccgcctcggcctctcaaagtgctgggattacaggcgtgaaccaccatgcccagcctatccttttgttttccatcctgtgttggcttggtgggggagaggaggtgttgacacgtggaggacacacatataaggcattcttgggtgacttcgtcatcactggaccctatctctcaaaattccagcgaaatctgctcttccctttaaggagtgaaagaagggtcagcattccagaagttcctggtcatacccaggcttttaatgaattgccactggggaatcagcatcccgttgctgtaaggactataagatggcggattgtgagagcatagggaaaggtctcggaggtctcttgtccttgctccacgcaggtctttctggcctgaaaatcccgttgaagagagcagctcttgagagtttgctccaagttccctcggggtgatcagcaccacggacagcggccagggcgcccccgaggacccgcaggcaggcagggtgcacagcggcgagcaggtgctgcgctacgtgcgggccagggaactcgcgcggggaggggagaggcgccgcgggtggcggggtcttggccggggctgttttcgctgtgagtcaccccgtgctccccgcgctcacgtcggtcctcggaaagccggggtcctccctgccttttccagcaacggtggggtggggaggcaggaagaaagcgccaacctaggacacctggacatttgcaggaaaggaagaagcgggagacggggacttgtctgtgtctccagcgcgttcctgccccccggcccgacccggcccatttctatacaaggtcggctctgcccggtctccacctcccacgtcgcaggcgcggaggggctcattcccgggccctgatctcagaggcccggaatgtggctgataaatcagagataaccctgcatggcagggcaggcccgacactcagctccaggataaaaggccacggtgtcccgaggagccaggaggagcaccccgcaggctgagggcaggtgggaagcaaacccggacgcatcgcagcagcagcagcagcagcagaagcagcagcagcagcctccgcagtccctccagagacatggatccccagacagcaccttcccgggcgctcctgctcctgctcttcttgcatctggctttcctgggaggtcgttcccacccgctgggcagccccggtt

SEQ ID NO: 179 - DNA, 1300 bp, Homo sapiens
gggtggagtggttaaaaatgcaggcgctactactttctggaggtgtgatcctggacaagagcccctgtgtccctatctgtaaatggagatgataaaacactcctcaaagggcctccgtaaagatcacaggaaacaaagcatggacaacgtgcctggcacgaaggagagcttggtaagtggaggcaagtctgagtgccagagccttaaaaccatggactcttaggtttgaaggaaatcaaaatattcctctctaaaaacctgcggattttagttaaaggtaaaaggttaaaacccaggggcaccctctgccccttctctctgtcttgatcagctcagaagcagagctcagaggatcctggatcagacttgactgttcccatacattcaccttcccacatttccagccctttggaaccctgaagatatcctcttctctgtcctgtcactctatgggacttacggctctttgttaaaatactatttaagcaaggcccctaagccactgccttgagagagaaatacttctcaactgaggcctctactgcataatgggtacagcatgtgttaatcaactttggctgatttttcttttgttaagttgacttttgtttccaggggagcgtgtcaactaagaacctaaacagggaaagaaaagaaatgttttcacccctgcacgtcgtccaaacttcctcctgcgtgtttgagacgacataacggaggccagagaagaggacttgtctgagctcaccaagggtgcacagcccctttctgcacccactcatctgtggatgagaaggggagacaaacaaaggtgtcttctgtttcaaagtgctttcctgtctagggagtggacatttgcctgtttcttgaaacattcaaagagccttatgaatccaaaggcctgcccagaaacaagtgatgagggccctgggcagccaatgggatcgtgctggcctttctacctgcctggggagcccccccgccccacatcctgccccgcaaaaggcagcttcaccaaagtggggtatttccagcctttgtagctttcacttccacatctaccaagtgggcggagtggccttctgtggacgaatcagattcctctccagcaccgactttaagaggcgagccggggggtcagggtcccagatgcacaggaggagaagcaggagctgtcgggaagatcagaagccagtcatggatgaccagcgcgaccttatctccaacaatgagcaactgcccatgctgggccggcgccctggggccccggagaggtatgtgtgagcaccaggaaagggca

SEQ ID NO: 180 - DNA, 1300 bp, Homo sapiens
aaagctcctggatgtgcccacatctgcccagggcatccattctctctgttccctctgtctggaatgcaaagtggtataatagtaaagaggacaagcttgtggtcaaacaggccagaactggaaactccactttactacatactggctgtgtgaccttgggcagggcatttaatctctctaatccccatctgtaaaactgggattagagaaactatctcaaagggtgtgataaaaattacttgacatattgtgacacctgtcacacagtgagtgctcaatacgttggttctttgcccactatggtccaaatcgaatgtaccagtccaaagtccctccttcaaacaaaacgttccaagatgatccctgcccccacgtcttcaaagccggaactgacaccttcctatcccaaatgcttcctaatcaaagagtctttcaggggctcaaatcattctctgccttgcacttgaaaaggctcatgtccccgtggggactgtgagtcccaatgggcgggaccctggtctgatttctgtgccattcctagacattgtggcccgaatgtatttaataaatacccttttgactgaacaaataagtaaatgaaagcttctgggaaagtaagagaggctggtaaggctctcatcaccttaggggcttcactcacattcataagagacctcgtggggaaactaaggttcagggattgcagaggcgtattgggggcgcagggggcgggagcaagacaaatgggcggggcttaccgtgggggtggggcttacctgctagactcatgtagattggctggcgggagcggaagtgattcagagcgcccccagagcagttctgctcttcgcactgcagtacgcagtcgcggtacaccggctcacggtcgccctgggagccgctcgccagcgccgctgccccagctagcaggaccaaccgcgccgccaggccggccatcctttctccctggctcgccgccgggggaggagcttaggagtatgaagcttccacttccggagtaaccggaagttcctgtgttctttattctactctccgctgaagtccacacagtttaaattaaagttcccggatttttgtgggcgcctgccccgcccctcgtccccctgctgtgtccatatatcgaggcgatagggttaagggaaggcggacgcctgatgggttaatgagcaaactgaagtgttttccatgatcttttttgaggtagggctgtttactgtcaccacccctgtcggattttacttcctaaacgtacctgtaactatccacttctctccatctc

SEQ ID NO: 181 - DNA, 1300 bp, Homo sapiens
ctgcccaaggatttttttttcttttaactccaagaatacggggggagttgggcaagtcattataatagggctcctcttcttaccccactatccgatgagacatttgatagggaaacctctgaaacttgtaaagcaatttacaagcaggccacctacttgtatttaacaaataggctagaaatacctatttgtgggaaatcgagtccccaaaacaccccaacccctccgggtccccgccagcacagcctctcttctgactgtcgcgcgaagcggcggttgactaacgcgagccagccgttctgatgaacacaggagggccggacggccctgctggctcggacaccacgcggagggagagtgctgcctgagccacagttgaagaaaccgctctcgggctggacgaaggcggagcagcagctcagactgggccaacagaagagccttacaatgcctggagcagtccgaggacagcccccggcgcgaggaactctgggacttgtagttcgctttcccagacagcgcttttccccacttggtctccccgcctttcaatgtcgcttttattcttccctttacctcccagcccgccgacttcctggtcgtcgcacgtcctcacgtatgactacactacccagaagtctcctcttcacgtcccagcgcgggtgggcgccggcggctcctcttaaccacaggttccagaagtcctctgcagaagtgcttccctctctcatttccaggaccacaattcccagagacttcggcttcacgacgtttctctttttgcccgatctctcccggagctggctgggcttcggccggccagaggcccacagcgacgacgtgatccgtcgtgagcgggtcccagggtttcctcggcggcccttttttctctcccctcggtcgtcccccttgcaggctgtcgcggctggcctgagcggtgacctggcgggtcgcgcctgcgctctgccctgtttcctgcctggctggtggcggcggccattttgttcatcctcctcctcctcctgctcctcctggttggagcgcagtgtccggagcgggctggggggagagagcccgagagcagggttcggtgccttttcctctgtccccagccggtgcccagagcccccctccccttcctccccaccccctcccctccccaaccctgccctcccccttgtcccgggatcgctccgtcgcacccaccatgatggaagacgacgggcagccccggactctgtgagtacccgagacgaggggtgccaggcgccaagaggcccgggcaccgcgggacgctaag

SEQ ID NO: 182 - DNA, 1400 bp, Homo sapiens
tgttaactgttttcatgtgcgtccatgtgaagagaccaccaaacaggctttgtgtgagcaacatggctgtgtatttcacctgggtgcaggcgggctgagtccgaaaagagagtcagcgaagggagataggggtggggccgttttataggatttgggaaggtaatggaaaattacagtcaaagggggttgttctctggtgggcaggggtgaatctcacaaagtacattctcaagggtggggagaattacaaataaccttcttaagggtggggaagattacaaagtacattgatcagttagggtggggcaggaacaaatcacaatggtggaatgtcatcagttaaggctgtttttacttcttttgtggatcttcagttactttaggccatctggatgtatacctgcaagtcacaggggatgcgatggcctggcctgggatgcgatggcctggcctgacaactattacctatgttatgtttattattttaagctttattattactattttatttattttattttattttccttccacacacccgtttccaccctggagaggccagatgagccagactccagggaggcctagaagtgggcaaggggaaacgggaaaggaggaagatggtatgggtgtgcctggttaggggtgggagtgctggacggagttcgggacaagaggggctctgcagccattggcacacaatgcctgggagtccctgctggtgctgggatcatcccagtgagccctgggagggaactgaagacccccaattaccaatgcatctgttttcaaaaccgacggggggaaggacatgcctaggttcaaggatacgtgcaggcttggatgactccgggccattagggagcctccggagcaccttgatcctcagacgggcctgatgaaacgagcatctgattcagcaggcctgggttcgggcccgagaacctgcgtctcccgcgagttcccgcgaggcaagtgctgcaggtgcggggccaggagctaggtttcgtttctgcgcccggagccgccctcagcacagggtctgtgagtttcatttcttcgcggcgcggggcggggctgggcgcggggtgaaagaggcgaagcgagagcggaggccgcactccagcactgcgcagggaccggtgagtgtcgcttctgggggcagcgcccagtaaccgcgctaggagcgcggagaagggcattgggagagcggcgttcgtggcggagactagcgctccggagcacgggcacgacgggggcaccttctcggctgctagtaactaacaataataataatcataatcatagcaagggcgctgatgggcgggctcggagcacgcctgattctggttcccaccaggctgcccaggctcctgatgacgcatcagaaacatccccct

SEQ ID NO: 183 - DNA, 1300 bp, Homo sapiens
tgcagcacttcccgtaaaccacctgcagtgcccgccgccttcccgaggctctgtgccagctagtctgggaagttcctctcccgctctaaccacagcccgaggggggctcccctcccccgacctgcaccggagatctcaggcacccggctcatctcagacctcccgctcccgaccctacacagagattgcctggggaggctgaggagccgatgcaaacccccaaggcgacgcacttgggagccggtggtctcaaacacctgccgggggtcctagtccccttctgaaatctacatgcttgggttggagcgcagcagtaaacaccctgcccagtgacctggactgaggcgcgctgggggtgggtgcgccgtgtggcctgagcaggagccagaccaggaggcctaggggtgagagacacattcccctcgctgctcccaaagccagagcccaggctgggcgcccatgcccagaaccatcaagggatcccttgcggcttgtcagcactttccctaatggaaatacaccattaattcctttccaaatgttttaattgtgagagtatctgatattcttgactgaacaatgtaaaaaacccaaagggggctgcgcacggcggctctcgcctaaatcccagcactttgggaggccgaggtgggcagatcacctgaggtcgggagttcgacaccagcctgaccaacatagagaaaccccgtctctactaaaaatacaaaattagccgggcgtggtggttcatgcctgtaatcccagctactcgggaggcttaggtaggagaatcacttgaacccgggaggcggaggttgtggtgggccaagattgtgccaccgcactccagcctgggtaacaaaagcgaaactccatctcaaaaaaagaaacgcaaacggtgcagctgcccctttttcgaggcacgtccacctcccattacccacttccttttttttttgagactgagtcttgctctgtcccctgggctgtagtggagtggctccatctcggctcactgcagccactcccaacgccctccactcctccctactccgcgctggccggggcggggttccgctggtcgcatccaataataagaacaggcggcgcgcgcccttcccggaaactcccgcctggccaccataaaagcgccggccctccgcttccccgcgagacgaaacttcccgtcccggcggctctggcacccaggtactggggaccccagacccacgcggtgcaggccgggagcgagagcctccgtgggggctccgtgaccccggaggggtagagccaagagctg

SEQ ID NO: 184 - DNA, 1300 bp, Homo sapiens
acattcgaatgtccctcagtcttccccgcgcccaagccccggtgcctctgccctagccgaggcctctgcggtcttcccgggcgaggagccgattgggggccgccggacggcggaggaccctgctcctgcttcccgaactacagatcccagggtgcctctcggactcgcgctccctccctcccttgctccctcccttcgtccgtctcctcccccggcccttgttgttttggctggaagcactccggcggagtttcagagaaagtctgggcagaaaccggagccgggcctgaacgtgggaaggggaggaggagagggaggaagaaggagcccggcggccgggagagggagggagggatcgggatctggggccgagccgctcaggacctgccgcgagccccggggtgggggaggcggcgggggaggagcgcgaggggacgggacagcgggatccctcccaggagccaagccgccaagcgcctcgttcctctgctgctccccgccctcttcggcggccgcgagagcggacccaccctccggcttgacctgcgacctccctgcgcccgccgctcagaaacgccccgcgcttcgctgccaaccctgcggctccctctgtgacccgggaccagccccgcgcccgctgcccgtaggcggctcgcggcttcccctttcctcggcgttcaccgagcgccgcgaagtgacccaccctcccccgaggagagggaaggaggatcgctccgggcgcatcgaaaccgagggcgggtgggcgggcgagcgggcaccgcgcggggcattgtgtgtgtgtgtgtgtgtgtgtgtgtgtgtgagcagcgctgtgtctgtttcggaaagcgctctggggaggtcttgtccctagggggcggagcgcaaaggacagaagctccggcaccgagtcggggcagagtcccgctgagtccgagcgctgctgaggcagctggcgagacggcacgtctggaggcgaggcgggcgcactgaaaggaggccggcgcgcccgcggccccggctcgcgttctgttcaggttcgtgggcctgcagaggagagactcgaactcgtggaacccgcgcaccgtggagtctgtccgcccagtccgtccggggtgcgcgaccaggagagctaggttctcgccactgcgcgctcggcaggcgtcggctgtgtcgggagcgcgcccgccgcccctcagctgcccggcccggagcccgagacgcgcgcaccatgagcggtggtgaagtggtctgctccggatggctccgcaagtcccccccggagaaaaagttgaagcgt

SEQ ID NO: 185 - DNA, 1300 bp, Homo sapiens
ttgaacttttttctcaataaaaccacagaagcccaggccgggtgcagtgactcatgcctgtgatcccagcactttgcgaggccgaggtgggcagatcacgaggtcaggagatcgagaccatcctggctaacatggtgaaaccccgtctctactaaaaatacaaaaaaattagccaggtgtggtggcgggcgcctgtagtcccagctacccggcaggctgaggcaggagaatggcgtgaacccaggaagctgagcttgtagtgagccgagatcgcaccactgtactccccgcctgggcgacagagtcagactccgcctcaaaaaaacaacaaaaaaaaaaacaacacagaaacccaacagagacctgaagacgtgcctgcctcccccatctccgggacctctcccacctgggtgaagggggcacgtgagcctcacctgatcttgaccatctcagctaaaacactgaaccacccttggcacccaccagcagcagacggagaagaactgtatagggtgcaaaagcgccccgccaccatcaggtccagatgaaaacctacaagttgaatcagcaaggtgctgacggatacgcaagcagaaaccctcttataggaggttcaaggctgggcgcagtggctcactcctgtaatcccagcactttgggaggccaaggcgagcagatcacttgaggtcaggagcctcagaccagcctggccgatatggcaaaaccctgtctgtactaaaaatacaaaaattagccaggcatggtggggggtgcctgtaatcccagctactcggaagcctgaggcaggagaatcgcttgaacctgggatgtggaggttgcagtgagctgggacagcaccatttccctccagctcgggtgacagcaagaccctgtctcaaaaaaaaaaaaaaagtttgagaatgtcagacaaggcagcaccctgtgtaggtgctcaggttgggcggagtctctctcgggggaggggggtaacaggacagcgcctcccggggcctccttgcatgtctgtgtcctgatgcacagcaggcgggggctgcggggaccagagaaggaagaagcgccccagctgggcacttcccgaggaggaagtggtgccggaatttcccccaggtgtggcctcaggtataagagcggctgctgccaggtgcatggccaggtgcacctgtgggattgccgccaggtgtgcaggccgctccaagcccagcctgccccgctgccgccaccatgacggtgagcctctccacatgccgctcggatggatgctgcttggatgtgcagcctg

SEQ ID NO: 186 - DNA, 1400 bp, Homo sapiens
gacagggacactccactggggcataggtatatcactcacaggttgaaggtaggtagactgaggctcaaagagcaagcggaggagctaatgttcaacccaggtggtgtggagtctcagtccagtggccttaccctccacggccacgttgctagttatactggacagagctcagactgtgccctggcctgtgtagatgcaccagaggttttatctgggggtcacagccgctgggaacgggagagttgctggggattgccaggaagggacaaggcatttgtagccatgcaccatctgcttttacactaccctagagtcaagtggaccccctccagcatttttttttccccgagatggagtctcactctgtcacccaggctgaagtgcaatggtgtggtatcggctcactgcaacctctgcctcccgggttcaagcgattctcctgagtagctgggactacaggcgcatgccaccacgaccggttaattgcccctccagcattgtatgtgtctgactgcaatgaagtgtgagtgtgtctgtgtgcgactgtgtgtgtatgatgtgagtgtgtctgtgtctatgtgggggccaggtgtatagtctgcatatgtctgtgcacctctgtgtctctgtgggttgtctgtgcctatgtctcggcttgtgtgtgtgcatgcatgtgtggtctgtgtgtgtctgtatgcatgtggtatctctgggatgtgtgtctgtatgtccctgcgtgcagtgtagtgactttgggagtgcacatgtgtacacgtgtggtgagtgtgcggccctgcgcgagttgtctgtgtacgtgtggtgcctgtgggtctgtgtgcgcgcgtgtgcccgtgggtgtggtgtgtcctcccgcgctgaggctcccatgaacccagctcagttcaggcctccctgacagtcctcgggcggccaccccggggcgcggctgtccacgaggcgcggaggagaggagtgcgtggctgggtcggcgggcggcgcccccgctcctccccgcgggccgggcacacgtgggccccgggcgccgcctccccgcgccgcccgccgcccgccgggtcccgcgcgtccccacccacctcgggccgcccccgccgccgagccggcccagggataaagtggcggcgcagacgccgcaccctgtcgccgcgaagccggtcgcgcgcagctcgtcccggccctggcccgccgcaaacgaggatccgctgcgctcggggaacgcgacagcggcgctcgtggccccggtaactgcctcccggcccctgccccagcccgccagtgccgccgtcaggggtggggagcagcactggggtcccggacacgcccggcgtgggctcccgctacccatgtgtgcgtgtgtgtgtgtgcacggtgtgtgtgcgcgc

SEQ ID NO: 187 - DNA, 1400 bp, Homo sapiens
caatgactcatgcctgtaatccagcactttgggaggccgaggtgggtggatcatttgaggtcaggtggacgtggttgtgggggcccctctggaggagcagggggctgtatacatcttcaatgggaggcacggggggcttagtcaggagttcaagaccagcctggccaacctgttgaaaccccatctctactaaaaatacaaaaattagctgggcatggtggcatgcgcctgtaatcccagctactcgggaggctgaggcaggagaattgcttgagcccaagaggaggatctcaaaaaaaaaaaaaaaaataggagccaggcactggggctcactcccgtaatcccagctacacaggagtctgagacaagaggatcgctggaggccaggagtgtgaggatgcagtgagctatgactgcaccactgcactccagcctgagcaacaaagcgaggctctaacaacaacaaaagctgcaactttattatgaagcataataaaattcatgcaagcatcactgaaggcttaaacataagcatgaaagtaactcagtatgatttctcttcctaagagctttctcttcttcatggaaaatgggtcagaggctgctagaatgaactgggagccctaattagttatcaccattattggccaggcatggtggctcatgcctataatcccagcactttgggagcccaagccgggaggattgcttgagctcaggagttcaagaccaccctggacaacataggaaggtcccttctctacaaaaatttatttaaagttagccaggtgtggtggcacatgcctgtggtcccagatccttgggaggctgaggtgggaggattactagagcctgggaggccgaggctgtagtgagctgttatcatgccactgcactccagcctgggcaacagggtgagaccctctctcaaaataaataaataaaaagtatcattattattttccttaagaggagacagtgacatgttgaggtctgctttagggaaggagagttctctggctttgctggcgggagccccacatctgaggggggacgtgcagttgggttggagggagagagttggttgccttctgccctgcagctcccggcccgtggtggatatggtcaccctgatgtccttctctccagctgagatcccagtgcatgaagtggagtgctcctattcaaccagtaacaagatgaaagaaggagttaatatcacaatctgtttccagatcaagtctctcatcccccagttccaaggtcagagctctcctcctgctcccagggcagctgccgccccaaatccaggcttatggcctgggatcccccaccatttaactcttgccttttccgccctgcccaggccgcctggttgccaatctcacttacactctgca

SEQ ID NO: 188 - DNA, 1300 bp, Homo sapiens
gccagagcggcgcttcgggggcccgcggaggacgagggagggagagaatctgaggagctggtaggtttggggacccatctgggtgaccgggccggggaaagggctcggccgggcgtgcgaggggcgtagcggccccagggatgctggagcggagccttagggatgggcaaggccttgggggcggggggaggttctgcaaagggagccactggggtctgcctaggggcttgtgcggagattgcgggcgagaaggggcagaggacggtggaggagactcagatggggccctttttggcggcccgttttggggggtaggggagacggcggttgggggactttgatacatggagcgtggaggaagaggttaatcttgcgaggacagtggaggtcagcgggggagggaggcaaagtgggctttcaggagcgtggaaggcgtcgtccggttcttggaaaattcagaattggagggagtcagagatggttgggggtgggcgggggtgttccatcgatgagggtcttaagagacctgccgagggcaaggaccaggaggggttaaggtagtaacttgggaattttgatcggaatggcagcactttgggaggcctgggacgatcgcttgagccttggagttccaggctgcagtgagccatgattgcaccactgcactccagccagggcgacagagcgagactccttctcaaaaaacaacaacaccaacaacaaaagaagtagacttgagaacttcgttaagacattggccagggagtaaggtagccctgggatttgaggttgaggagaacgtgcaggaatggtgggggattttggctgagcaggttgagagaagtctaggagtgagaggcaaaaaaagacgcaggcagcgtcggggaaatcagaattatgtgtctggagagagttttgcggggtgaaggtggcccagtggggctgttaccaaacttttgagtggttatggggctctaagaggtgacatgacaggacccagcccagtaaacacagcacctctttttgtcgagtttggagcttcagagtggagaggtgggaggcttgtgtttgctggacaggtctgtccattaatctaggagaaaagggtggtgtctcagttcctcacttctgtctttccctgtcttctccagggttgccattaggggactcctgaggtcctatctccaggctgcggtgactgcactttccctggagtggaagctgctggaaggcggaccggccgccatgtccacgttcaggcaggaggacgtggaggaccattatgagatgggggaggagc

SEQ ID NO: 189 - DNA, 1300 bp, Homo sapiens
ggggaggtggtgatacacagcacatgcttcctccttatctaatgtcaccttcagttcagaaacgatatgttttctaattaaaagacaactttacaagagaagcgtgcctaacaaaatgtgtagatgactttttattcattgattcaaaagacatacattcagcccccgctatttactggatattaagctctggggctacatggaaggaccacgcagacactcttcatgccttcaacggcttacagttaagtttttcaaacatttgaaacataacgaagcttttggttacttaaaagaattctatggtattagggagcaacacctgttttgtaaacctatatcttcatacagggaatatgcttaatcttgctacagtatacatgaatgcgggaatgtatcttcctctgggctgcctttcgttaccacttggctgggtggaacacctgttcactccactttccacttgggctacaaacctgaaacgaaatctttgcaaccagtacagcctgcgcggggcgcggcccagtccatcccccttcggatgcgcagaagcagaggtcaccacgccggacccctcgattccctcgcgggcgattcctggctccttcaccaccccagcactccaagacccccgccctttggcctgaggctcccactgccctagccagttcccgggctcacttccagcttttccagaaagcttggccacgcccctcggcccagactctcaggccactcggccgcaattaacccgcgtctctgcgcctttttaggcccctccccctcggtcgtgcccttgtcatctcttaggccccgtctcaccctttcggatgcctcccctagaaccctaccactttccacccctttccgtctgttatttctcccaaacttgcgcccgcacaggcccctctggaacactcctgccccgtagtgcccctcgtccccgctccgtagagaaagagcgtgcgtgccgcgcatttctggcctggggagcgggtggagtaaacctgcgggaaccattttacgacaacgtgcggctgtgcggtgtggctgacggcaacgccgctgctcttggagaggtcactccggagacggcgttggttttggggtgtggggggttggtggcactatgtggcgcgtctgtgcgcgacgggctcagaatgtagccccatgggcgggactcgaggctcggtggacggccttgcaggaggtacccggaactccacgagtgacctcgcgatctggcccggctcccgctcgtcgcaacagcgtgactacagggtatggcggggtccgggca

SEQ ID NO: 190 - DNA, 1300 bp, Homo sapiens
gacttcaggagaagcccattagatgcaaaggaaacctatagagagtagtgtccctgaagaaaacaaaggagggagggagcgaccaagtctatcaaacattgatgggagagtgagtaggatggccccagatctgttgactttggcaagtgtgaattcagacaatggtggcaacaaaagcatgattgtagtggtttgagagctgacagaactacaggagcaccttgctcaagctcccatattaagtggtagagttagaagtgaaccaaagtcttgattgtggtgatagtttactgggtttatgcaggtcaaaacttatttaagtgatactttgcagtttattttgggtgccattttattttgtgtacagtttattgtatgtcaattatatctcagtaaagctgttaccaaaaaaaataaatgaaccgaagctccactgcaccgtgacttctgcatgttgggctccagttccctgtttacaattgtacacttcgggattttgtgacacatttcaacactggaccgatcagacctctcccttagccattggtctgcactgtcttttctgcccatgacccagtcagtctcgcgccccatgaccctctcctaaaacacgcgcagtctcctctctcttccccttcctctcgtgtcttccttgcctaccagcctcacctgatgggctcgtgttctctccgtccccgatccactcgggctccggcagctgctgcttgggcgccttcggcatcgcggtggcagaactagaaacgagttacagatagaaactagaatatgctttttaaaaaaacaaaaaacaaaacaaacaaaaaaacagtatgcctcaactccttcatactagtaggaaattattatgttcattccttgagtctcgcggcgtcgggaggtcacggcgtcaggcttcccagacagtcgtaaacgccatgtgtttacgcgactggagcaagcggacgccggccccgctccgtcattgcaggccacgcctccactgaaccagggccacgcccccgagatgacggcgaagctcgcacgtgcgcagcccgggggcggggttggccgcgccagcttggagagccagccccatcggggttccccgccgccggaagcggaaatagcaccgggcgccgccacagtagctgtaactgccaccgcgatgccgaaggcgcccaagcagcagccgccggagcccgagtggatcggggacggagagagcacgagcccatcaggtgaggctggtaggcaaggaagaaacgagcagagggggaagagagaggagactgcgcgtgtt

SEQ ID NO: 191 - DNA, 1400 bp, Homo sapiens
ggactagaaacaccagcttaattattgaccccccaggcctggccactggtgttttcttgaaatgttaagccatttgtaaccaaagaatgacttccttctctagttgaaaacctgggatctaatgatagcaatagctacaatatataattctcagttcattcgtcccggtgtgggaacttaattccctcacttactcctcccaacaactccttgaggtagggattattttctttttaactttttattttgaaataatttttgcctcccagaaaatctgcagaaactgtagggtttcctaatacgcttcatccaactccccctaatgtgaacatcgtctgtaacccctaggacaagccaggttatcaaagccaggaagtgaacacccacataatcctattaacaaatacacagactgatcgagcgtgatgactcacacctgtaatcccagcactttggaaggccgaggcaggcggatcacttggggtcaggagctcaagaccagcctggccaacatggtgaaaacctgtctctactaaaaatacaaaaattagccaggggtggtggtgaacacctgtagtcccagctactcgggaggctgaggcaggtgcatcacttgaacctgggaggcggagagtgcagtgagccgagatcgcgccactgccctccagcctgggcaacaagagggaaacaaaagcaagcatcctgcttctcatcctactttccctctgctaattttgaatatcgatgcacacacatcttggctgcaacgattatgagaagttcgcctaatggtgaccttcgatttccctcactccctgtacatctcctaactgaaagagctgcagtcagtcacacggctggtgagggaccctgagaccccaaaacgaactccattaccacctgagggaccctccaaggatcgccgggctacgcagggtccctagggtacgaggccgccccctcggcggccccgccccctcggcggccccgccccctcggcaaaagtcccgccccctcgacaaagtcccgcccccaagatggtggccccgggcggtggacagggcggggcgtgccgggtcacgtggacagccgacgccgacgtggcctccggcggacgctccacgtgtccctcgccgcgccccgtctacccgcccctgccctgaggaccctagtccaacatggcggcgcccagcggagggtggaacggcgtcggcgcgagcttgtgggccgcgctgctcctaggggccgtggcgctgaggccggcggaggcggtgtccgagcccacgacggtggcgtttgacgtgcggcccggcggcgtcgtgcattccttctcccataacgtgggcccgggggtacgtgccaccgccgtcccggatatttgagtgctggcaggcccgggg

SEQ ID NO: 192 - DNA, 1300 bp, Homo sapiens
atttctgtttgttgccaacccctgtttaccggaagtgtccccacaccattttccataagctgtgaaacaaatgtcataaggtctctaatttagaagggggaagacccaggtttctgggtctttgtttccttggttttgtgttatgtgtgccagggtgtaaagtggattttaagatgtggaattgggaggtagagtggtttagaataagaactccgaaaggttccttgtggatccccttttctggccatcgggatgtggatgtgcatttgttaaacttctcacacgctgcatccttcagcctggagaccctttggaaacacgaggtgacgccacggtagttattcagctaagcttccctctgacgggccctgaggctgccgccatagagcggcagaaccgtgcagttcctggaggagaagggggttttgattgcgaaatgttccagtatccagagtgaacactgaaggaggagccgttggctacttggtaagagagctgtgaagtcctggatttgggaaaacctgttttcatagaacaggatgggatggaagcctaaacccagcattccttactagcccctgaattaacagagcccaacgaagacaatcccctggcaacaggaagtcaagggagaaagaaggagccccaggctgggaggagtgcggactccccgagcaaaggaggagtgaccccccactgctcaccaaacactagctggggggcctttgcagttgaacggaggtggggcctgcagatgctgggcaagctgcttccctgcaggaggaagccagtcttgagtcctggctcacaccacagacagcttcagggcatgatggaagtttccagaagataacagggcagagctagacccatgaggaaacatttctcaggacaaaagccttccccatgtggagaggatggaagggttgggccttgtggtgtccaccaggagggcgggatggcagcggggacaccttgcatggaaggcggcccagaagggactgggcaaggcagctggacggctcagtggggattccagaaagagacacctccgcgctgcacgcacgcagccacgcagccacccacccacgcagccacccacccacgcagcacgcacagacccacgcacgcagccacccacccacgcagcacgcacagacccacgcacgcagcacgcacgcatccaggcacgcacacgcagccacccacccacacaggcgcacatacgctggcaccgctgaacagccaaaatatacacgatggttcttcttatggttcaggaggtggaaagttgaaacca

SEQ ID NO: 193 - DNA, 1300 bp, Homo sapiens
gcagtttttggagccaggctaggatgagagatggagggcaaatctgtcacttattctttcctggtgtgcctggaacccactagacactcaattcatgtttacgtgaatgaaggaatcacaataacgccctatcgcatctgtaaaaccgaagggtgattttcctgggctggaaagtttaagaaagaagagagagctgcgtacctagggcttaaggggcctcaggctggcactcgaaaccaggcgttctcatttccctttggcatcaccctgaacggctgtgcctggagctggcgcggggctgaagaggggaggaaatacatgtgaggaaaatcagaggagagggtcgggaacagatgtgggcataaagggaaggcctctgacttgaaataaacaaataggagtcccgcagctggaaggacaaatcctttcacgtcgcgggtgatgtgggattggggcgattttgctctccctttgttctttcccctgccttccacgtttccagggtatttgattgatgtctgtcttctctgttaagttattccaccgtgaggagagagccggtggcagtacctggcacgcagcgggcgcccagtatagacctgctgaacaaacgaatggattcaggggctgctgtgtccccctcacccaccccccgccccctatgtgtccacagcgccccgcacgtagtaggcgacccctaaacatctgtacagcaaatgatttgcaagttttcggcgctgagcacgtggagctttggaaaccaggacagcaaatgagtgtctcggagaccacaaaagcggttccggcgcgtgcgaaaggcggtggctgggcgacggcggagggaacggcgcagagcggggcgccccgccgggagcgctgcctgcgtggcgcccgaggcgggggcgcggggggccgcgcatagcacgtgctcgtctgggagccggccgggccgaggcgggcgcgcgtgtgcgcgtggggcgtggggtgtgtgcccgcgccgtgccccccgcgtgtgctgccgggcgggcgccggcgtgagtcacggcggggctagcctttataacggcccggaggctcgcgggagccgccgcgcccgtccgcccgccgctccgcgctccacccagcgcacccgggccccgcgcccccaactgcctccggcggccgcccagtcccgagggcgccatgaggagcctgtgctgcgccccactcctgctcctcttgctgctgccgccgctgctgctcacgccccgcgctggggacgccgccgtgatcaccggggtaagcggcccgggcgcacctg

SEQ ID NO: 194 - DNA, 1300 bp, Homo sapiens
caatgaaagcatttatttccctttagtctccgaacaaccctatgaagtgagaacagccctgtggtgatttaggggatgacaaaggctcagagagatgaagtgagctgctgtataagcagccaacagtaaagcaagatttgaacctaccataaaatggagatgatgataatgactccttaaatgagagggttgtggtaaggaggtgatgcagaagttgaacccaccacttacactcacacccctttggccagagcaaggttacgtggccttgccaactgcaagggcgtctgggaaatgcagtcggctgctggattgccatacacccaacttaaatgcaggaggtttaagtgccaatagatgccagggatattagcagcttgtgctgtgcagagatcagcagttcccactgcctcagggatgagaggatggagcttaagagagaggcctttggatgtgggcattagggacagaacggattttcccttcacatattcattctttcagcaaacctgaattgctgtctgtctgtgctcagctctggcaggaactggggcacagagaggagccagtcctgggctcgctgattatagcctatgttaaggatgtggtaaaggtggcatggaaggagagagagactgagcccagagaaggtgtagcggacatcctagaaatcttccaagaaggggcggctaaactgaatctccaaggataaaaataaatttctggcagagggaacagtgctgaggggagaagctggaccccaaaaaagctctcgttgaccatgctctgcgctttatacacctagtcatatttgctcctcactgtaaccgttgctacgagggagggatggtgaacaccattttacagacgcagaagctgggactcagagaggtggaatcactcagtcagtatttcacacccgctagagggcagaagcaggacttagggctctcttatcccagccaagcctgtaccttaatatctgtggcagcccaggtggagagtgggggagcaagtgggcggatggaagaactgagtgctgacagcctgaggaagcagaatggagtccatgtgttctgagcttgggctggggtcagagttgagatgggatagtcacgaagtctgtcttggttccacagataccatctatgatgaagatgaggtcctcctggccctggcagaacagctgggaaccttcactaccctggtgggaggcccagagtacgtgcactgcctgctggtgagtggaaggcaggaagtcctcttgcccaccccttagggtcggcccatggtcctgccg

SEQ ID NO: 195 - DNA, 1300 bp, Homo sapiens
ctgtcatctctcacagggcgaagcccacgccacaggacgggtcggttctgtacccgccggggcaggggagagccgcctctggtgagcagaaccccggagaagggacgacgcgggtgcacctcgcggcatggggacaccaagtcagacgaacccgctgtgcaagaacattttccacacagcggcgcatacccccgcccgggggcgctcggcagccgcacgcggccctcagagcgcagcccccacacgcctttacttctggaaggcggagaccgccacagtgaggagctaagccagctgaggcaacacagaaaaacccccgttcctacccaaaaccaaaaagcggggcgcggaggcgcgcgcctgcggtcccagctaccggggaggccgagaagggaggatcgcctgagcccgggaggcgcaagctacagtgagccgagactgccactgcactcagtctgggtgacagagcgagaccctgtctctaaaggggaaaaaagagctaggaagaagcgggctgcctcttaacttcggagaagtaaatgaggaactataaccagtgtctaccgtttaggaaccaaacaaaagctgacaggaatcccgccaccgacccagccgccccagactttgccctggcctatcccgcgccgctcctcaaactagacccgccccgacgtcgccctggcctatcccacgccgatcctcaaacgaggcccgcccccgatgcacaagctccgccctcgttgcaccgtcctgaccctcggcctcgcccccgccccctggctcttcccgcgcagccgaatgccgcgacctggctcccacccttcgtcgcttcgcgccgcataggaaccccgcccctagtctctcctcccgcctatcctgagcggcgcgcgcacaaatctctcccacggacccgcccaccctgatcctcaacctggcccctggcctttcccgcggcgtcgagtccagtacaccgacgcacgagtcccacccccgatctctccctcggcctatcccgcgccgctccgcgcaggagtcccgcctcccacttcgcccgcagcctatgacgcgccgcgtcgctccctctcctcaaacccgctctcgcccgcggatgggcgcgcagctgtgacgtcacggcgtcgttggtaaggggctggcggccggggagctgcgtagctcccggccccgcggccatgcccaagcggagctgccccttcgcggacgtggccccgctacagctcaaggtccgcgtgagccagagggagttgagccgcggcgtgtgcgccgagcgctactcgcagga

SEQ ID NO: 196 - DNA, 1300 bp, Homo sapiens
aaagactgaagattcctacttaataatcaaatccccttggttgaccttgctatcccccgtgaaacttttccagccatgtcagtccttgtttgttgatctcctcactttatttctattacatgagtaactggctaattttgatggtgttcatacttatccttaccatatatttgctcctacatttgtcaagtcctgcttgtacatttcctagttgccaacctggtgtcacagcgggcaaatcatgggaagagccctggttttggagccagaccacctgaattggcctcccgcatggacttagctgtgtggcaatgagacaaggcattttattctttgaatttcagttttgtaagcataaaaaggggaaaaataaaacccagagtttagtaaggtttagaaacgctacactcagcaagtcatagctaagtcaccgtcaccaatggtagtcaagtgtgtggtgcagcaggaaacatttggagtcgactcctttacggaactcaaatgccctcacatttagggagaaatagaaagaattacgactcatgaaatcgagctggggctggcacttctgaccctcccaacaggtttccagaaagctatttacacacgatgcattcgccaaaccactggaaatcattctaccctgtacttttttccaccctgcctcacgtccttgccctatgaccgggttcctaccccaacctctgccccaacacttagaggaggagttgcgggcctctttttacagtggataggattccgaaggggagagtaaatcagtaaggctccacccatttcacaggaggcctagagaccggcgctcccctttcccctcccgccggacctgccaggaggtgggctggcgcggagggagggccctgtcccctgtccctttaaggaggagggccaaacgccggcctagagtgcggcgtagcccccacccgccgtgccctcaccccagagcagctgcagcctcagccggccgcccctccgccagccaagtccgccgctctgacccccggcagcaagtcgccaccatggtgaagatcgtgacagttaagacccaggcgtaccaggaccagaagccgggcacgagcgggctgcggaagcgggtgaaggtgttccagagcagcgccaactacgcggagaacttcatccagagtatcatctccaccgtggagccggcgcagcggcaggaggccacgctggtggtgggcggggacggccggttctacatgaaggaggccatccagctcatcgctcgcatcgctgccgccaacggggtaagggatgcgcggcc

SEQ ID NO: 197 - DNA, 1300 bp, Homo sapiens
aggatttcactctgctgcccaggttgaagtgcaatggtgccatcatagctcactgcgccttgaactcctgggctcaagggatcctcctgcctcagcctcctgagtagctggtactatcagcacgtaccaccacacccagctaacttttaaaacaattttttgtagagacagggtctccttatgttgctcacgctggcatggagctccttggctcaagtgatcctccctcctcggcctcccgacgtgctgggattataggcgtgggccactgcacacctggcttcaaaagccctttcttgagaaacacagtttgggcattgggtgtgtggtggtgggggtgtggggagagatcgaatgtgaatttactgacgaatgtgaaaaggattttaacaaggaatgtgagggtcccacaaaagcctcaagaaggaagcaagggagtggccttgagtcggaaagcccttcagccctgaattgctctgatacacatgtcagcatgtgattaattttaagaagatttcaacctctttatctgccaatttagataggaagtgaaggtggttggggaggtagaggttttatttctggctgtgatgtgtgttttctagatccatcaggtgaattcccactctaataggattctgtgcgtagaattgatttttacgtgcagtttgatgatgatcatgatcatataaaatacacccaattgagaattgttcaactgattttgtcatccctgaaagtgatttcagtaaccccagactatgaaatatctttttgaaacacatcctcaaagaacacctgcttgaaagggggttttacgatcctcacttacaaatgagagaactgaagctcctggcagagaggtaagaaaattagtgagtgcccaagctggaatctgaaacaaatctttctgcctccaaagcccaaaattatttcgtctggctgcagggccctgtgagtaatcgagcccttcatcttgggaaaggcatatacagacctggagcaaaacagtacgcagccatgctctgcatttagcaatactttggtttatttttgttctcacagaaatctcctttgctcttcccctcattagctgcttctggttgggcccagacctgccttgaggagcctgtagagttaaaaaatgaaccccacggatatagcagacaccaccctcgatgaaagcatatacagcaattactatctgtatgaaagtatccccaagccttgcaccaaagaaggcatcaaggcatttggggagctcttcctgcccccactgtattccttggtttttgtattt

SEQ ID NO: 198 - DNA, 1300 bp, Homo sapiens
ttagtggagacagggtttcaccaagttggccaggctggtctcgaactcctggcctcaagtgatccgcccgcctcggcctcagaatcccatgttttaaaaaagtttgtctcctacactgcatttatagttttattaatcaggcacatagaattaccatttcggagcttgtgatcaccatatgtagttatcactccaagctgcttaaattccagtctaaaacaaacaaaacattctaattattctgtgctaccctgacaggggtaagtgaaaactttccattcaggtttgtaagaacgagctcccagacctccacctcttccccttgctgcctctgaggactcttggaggtctagggaggccagtttgggttttcttgctcaagaaagtagccaccccacccaatttggaaggattaaagcttgtcctagttttgcttcattgttgtacttctagcatgctaaagagctaaaaaatgggaggaagaaaatacaacagaaggcaccattccagtaccaaactgaaaagaaacacaaaaacaagagagcagcatgtttttaacagcttgcgtggaaaaaatattgactggggagtttggacagcactgttcattttctctcaccgcccgcgttatttgtcttacggagcaggagccagataccattctggagaaagagccgcgggaagaggtggaggggttctgtggaagtttgagtctgagcggagaaattagggctggagatccagtggctcagggccaggaagaagtcaggggaggtgctaaagcctttttcctcctggcctcgggcactctctttggtccgcctgagtcttaagagggcacagcgcagatcattcaggtaggttcctggctccttcagactacaacgagctggatgaatccctgtccctgtttctttcggctggggaaaggacgcaggggttccattcgctttcttagcccacccgtcttcttgagttcagacctacaactcctgcagtgggggtcagaagggagccttaatcatcgggacagaaacgcggctccccaacttcggctaaaccagcgtggcggccttcgtccctactgcctgggcgcggggcggggcctgggcgcggggcgggaggcggtgaccagcagcaggaggagaaagaacatggcgggcgcatcagagctcgggaccggcccaggagcagcgggtggagatggagatgattcgctatacccgatcgcggttttaatcgacgagctccgcaatgaagacgtgcaggtactggactgaggccggggacccgaggcgag

SEQ ID NO: 199 - DNA, 1300 bp, Homo sapiens
tggtgaaaacccgtctctactaaaaatacaaaaaattagccaggtgtggtggcggatgcctgtaatcccagctattcaggaggctgaggcaggagaatcgcttgaagccaggaggcagaggttgcaacgagctaagttcgagccactgcactccagcttgggcgacagggcgagactccgtctcaaaaaaaaaaaaaatgtaaacacacattccctttaacccagcagaacatgggaacccaagggcattcagcctgtggcgcgaccaggcggcctgacttgagctcacgtagaaattcggcatttttgaaccaagagacagcacttgggatccggaatgtctggacttgggcacggcgctgtggagctggcgccgttgggagccatgcgagttctgggtcggtaggtcacctcagaggtggggagaaggttctctgagaccgacatgggggctagtgctggcaccaccggacatggggcatttcagacacagggcgagcacattccctagttaccagggttcattcgagtcagtcacgtcacaggctggcaatgggctaactcctcctcaacaatcacacggggcttgcctcatagaatgttttaaaaaaggaaaggaggctggcgcaggcgccaaccgtctcagaaccctgagcactgccccacccccaccctgcccgccatagcctgggctgttgtgggggaggggtgaccatttatcacgaaacaaaaaattgcgccacagcagctccctccctcccccacctttacggttgcagctgcacgtcccacgtgcagcaccaccccctgacacgtgcggcaccaccccctgacacgtgcggcaccaccccctgacacgtgcggcaccaccccctgacacgtgcggcaccaccccctgacacgtgcggcaccacacagctagtgccggaactttttgtgcagagaaagaagaccctgcacccgcgcggagggagcccttttgagattgcaggagagaagatgagaatgggactattttcaataactgtgcacatgcaagtcacaaacattccagatcccttgacttgcttgcggagggagcggccggcggagggagcggcaggtggagggagtggcacgaggcatgcggagggagctgcaccgacatcacataaacgcactgggcagctcgcaggcgccattcgctcttcagacgccggagacgtaggagtgggtcttcagactccaaaggggttggactaatggcggatgctgaggcgagggctgagttcccggaggaggccagacctgacaggggcac

SEQ ID NO: 200 - DNA, 1300 bp, Homo sapiens
aaattgaggatgctatgagagtgtgtcatggagagctgcctggagattgagagaaagcttccttgagggaagttacatttcagctgaaacacactgccatctgctcgaggttttgtaactgcattcacatcccgattctgacacttcacatcccgattctgacacttcacccagttactgtctcagagcttgggtccgcatgtgtaaaacaaggacagtatgcacttggcagggttgtgagaagggaagagaacacaagtaaagcacctgtatcaggcatacagtaggcactaagcgtgcgatgcttgctatgattatacatcagtgtaagcatcaaggaaaagctgaagaaaagtctgaccaacagcgaaagataaatgcgcagaggagaaatttggcaaaggctccaaattcaggggcagtccgtactctacactttgtatgggggcttcaggtcctgagttccagacattggagcaactaaccctttaagattgctaaatattgtcttaatgagaagttgataaagaattttgggtggttgatctctttccagctgcagtttagcgtatgctgaggccagattttttcaagcaaaagtaaaatacctgagaaactgcctggccagaggacaatcagattttggctggctcaagtgacaagcaagtgtttataagctagatgggagaggaagggatgaatactccattggaggttttactcgagggtcagagggatacccggcgccatcagaatgggatctgggagtcggaaacgctgggttcccacgagagcgcgcagaacacgtgcgtcaggaagcctggtccgggatgcccagcgctgctccccgggcgctcctccccgggcgctcctccccaggcctcccgggcgcttggatcccggccatctccgcacccttcaagtgggtgtgggtgatttcgtaagtgaacgtgaccgccaccgaggggaaagcgagcaaggaagtaggagagagccgggcaggcggggcggggttggattgggagcagtgggagggatgcagaagaggagtgggagggatggagggcgcagtgggaggggtgaggaggcgtaacggggcggaggaaaggagaaaagggcgctggggctcggcgggaggaagtgctagagctctcgactctccgctgcgcggcagctggcggggggagcagccaggtgagcccaagatgctgctgcgctcgaagcctgcgctgccgccgccgctgatgctgctgctcctggggccgctgggtcccctctcccctggcgccctgccccgacc

SEQ ID NO: 201 - DNA, 1300 bp, Homo sapiens
tcagtgtagtacttagattttcattttcttagatctaattataaaagagacttaggaggtggaaaataaattcaataagtcttcaaagtttttcctttctttattttataagctaagtatcactgcattgggggtatactaagaagggtatcaatgacagaattgctagtttcctcaacctgcctcagcttaccaaatttaactctttttgtgaaactattaccacatgtaaatatattttaaaaattagaatttctttgaagaaacattttcctagccaatcaaaagcaagagctagtgaggcttcaggatgatttggttttcagactttttttttctaatgccacaatccttagatatggtgggaaaggcacttcaaagtgagtactccagatttaattcaaatgcacccatttaagtagctcagaaaattgcatcatctagggttctggagtgacagtgttttatatgttgaaatcttttggagtgggattgaaacagcaaaatcattttatttcattaaaatcggtctcagcctcttctttttcctctcattcaccgcaggcctttccatctaagaaacaattcatagctgcttcttcagaggatgtctaattttccctcattcagagggacacatttggtactttgccctgtgttttaattagtaagcttcagagaaagaaagtcgtcagagccagggcccccagttgtggaagtttctatatccggtaaattggatccattccagggcagaatcatttatcaacaaatgaaacaccagccacttcccacacgtcctctgattgcattaaaaaatcactccccttcctacccaaattgagtatacttagagtatggagctgacaaacattctctttccttctcctcctcctcctcctcattctgttgaattgctggtttctgtagtctattaggcttcttattaatagtaataaaatgttcattcattaactctctcatgcctgcataccagctatagtaactgtctttgcccccaagttatgcagtctttataaagtcgttcagtagcagggcaatgagttgggaaaactgatattgcatctgtagcatcaggtactatttaaccagtgggagggactgataaaattagcaagttgactaaccacttcccttccttgtggctctttaatattataacggatacagaaaagttcagaaggactgagctagtttgcgaaaccacagcacactttggcaaagagggaatgcacaacaaaacgggtaagtttctttattttaatcttttaagagaact

SEQ ID NO: 202 - DNA, 1300 bp, Homo sapiens
tgatctagaatagaaatttagagctgtaaaggaacttaattgatttctgcaggtcggttagttgcttccgcacattatgtgaagttactgccaccttgtggcaatacctaagcactacactttctgactttgaataacctagaaaaatataatgcataagacaacaagccctttcgctaaagcgccttaaatattgcctaacagtttatatctgtatagatctgtggcttatattatcacttacatggtttcatctcgacttcatagaaatcatgtaaacatagaaaccatgttatccatgttgcgtgcctgcgtgcgtgcgcgcgcacacacacacggagtaaaagatgtcgtataagttttgctgttagagttgaacttaaaaatctctaaattgttacatttggaggctctcattttgggggatcctagtgtgagatgctcctttgttggtcaattttaattatacagacataaataaaggatatattaattatagagaaaaagatcagaaatgtaaacaaaatgcagataagatggagacattcaatgatttgtccaataatataaaaacagtttttgtgtgcgggtagtttgttgtcattagtggaaggaaatagagagaaggataaataatatttgaatttgaaagagcggatgtatgaatacaagactcccttgaagaagaaaggatcgtctgggaccacagcaggccggggacagggagaagaatgagcaggctgtgtggaagaacaaaacgacctagtatcccagtttattttttttccagtgctatgatttctttcctttatcttaaaatctttggtaaacatgtaaatgaggttttgagaagttaagattgaaattccatgttcatgttcgctgcaattgaactggagaagtgaaaatatgacaaatggaagtggcagccctaagggctggaacaagagatgcaaacaaaggctgggatggatttgtggaatttgtaacaaacacttcctaggagtgatttctcagtaaaagggggcaacgaggctggtgtagtaagttagcaaacaaattccagcagccttccctgggggactttcatgctgaaatgcaatccctagtgttggaggtggggcctgatgggaggtgtctggatcacggggggtggatccctcatgaatagcttagtgtcatcccgtttccctcatcaacatgcattcccagaaatgccatgaaaggaaagaccaagtcttgactgagaaacggaccgggcagatgagggactcccacatatacctgtttcctgctcttc

SEQ ID NO: 203 - DNA, 1300 bp, Homo sapiens
gggctctggtgccaaggctgaaggggaacaacttggccagccgctctgtggccggcatcgtcacgcggcctccaagagctccggctgccctgcactggttcccagagactccctccttcccaggtccaaatggctgcaggagcgaagtgggcggaaaaaaagcgaaccagcttgagaaagggcttgacgtgcctgcgtagggagggcgcatgtccccgtgctccgtgtacgtggcggccgcaggggctagaggggggtcccccccgcaggtactccactctcagtctgcaaaagtgtacgcccgcagagccgccccaggtgcctgggtgttgtgtgattgacgcggggaaggaggggtcagccgatccctccccaaccctccatcccatccctgaggattgggctggtacccgcgtctctcggacaggtcagagcgggtcgccgggtggggtcgctgcaaaaaccctgccccggccgcagccggagaggcggagcctcgcggggagggggcgggaccgccgagacaggcctggaaactgctggaaatgccgcagtgccgccgccgcgccttccgccgcatgtcggcaaagagtccccgccagccccggccggcgccctccccctacgctgagctgcccctcagcgcgaaccctccgcccttcctctactcctgcgagagtcgggatctggggctacccaaggttgggtcccgaatgccagtccctctgtcgggacgcgagatgtgtagggcagatgctaggaagaagattgggtctgggagcggtggtccgcgtggttagctgcctccgctctttttcggtgtcccccccagtcccgcccttgggtgtggggacgcctgccccacaagtgtttagggaggtcagtgggttcctcgcccgtagagacaccgtttatgccaaatgagcactcctcatccccgctcttgatggagtcatgtcctagacgtgaaactatggggctgtgatcacaagcaaatgtgtgggcggatccgttgcttgggttcttccccgccccctctttttttcggaccatgacgtcaaggtgggctggtggcggcaggtgcggggttgacaatcatactcctttaaggcggagggatctacaggagggcggctgtactgtgcttcgccttatatagggcgacttggggcacgcagtagctctctcgagtcactccggcgcagtgttgggactgtctgggtatcggaaagcaagcctacgttgctcactattacgtataatccttttcttttcaaggtaaggctgagatctccgctag

SEQ ID NO: 204 - DNA, 1300 bp, Homo sapiens
cgtctctggtggaagttagcagggctggggcagatgcacagagcacggtggcgggggtgagcccaggatcggattgatgcccacccaccacctggcaccctgcagtcccagctggccagaaggcaagcatgctggaccacaaagcaaagatcctccagctctgctgctggcaagccttggggccaggggactcacagaagagcaggtttgggcctgtgccttcctcctgcccaaatgggtctctctccccttccccttccagccagggccgcagctggggctgcagcttgagtgacgggaaaagaaaggtttactccaccagcgcattagcggcactcacagcattaaaaatgcaggaggtggtgggaggagcgggccagggaggaaaactcatgcagctgcggggcgcggggaagagccgggcttctgcctcctcagcccggatcagagccgaagaacgagggcagtttgggttgagaaggattctccagtgtaaccgagaagcgagcgtccaggaggctgttggggaggtcggcactgtgggcttcctggccttcgtttgctgtttcgagggccaggacctcgtgtgttcccgtccgcccctctgggacggcgccagcccggcaggccgccgaccgtcctggggctcccgcgcagcgcgatgccggcctcgtccaccgtccacgtgctgcagctgctgcgggagctgctcgccttcgtgctcctcagctacacggtgctcatcggggcgctgctgctggccggctggaccacttacttcctggtgctgaagtgacagcgccgtcgccgcgcccggccccgcctcccgcccggccccgcctcccgcccggccccgcctccctaactcaccaggaaattcccttcaagccctggcccgaactgagtccccgcccacccgccagcgtcacggcgcccgactcagctccgcgccggacccacctccgcgccctcaggccctgcatatgccccgccccgcgcggaagttccggcggttggttgccttgcgcggccgttacagcctttgccctaagcctcgccccctttccccctgcctgcccaatcccgactgcttccttgggtgggggcgtggctatggggcgaggcgctctcaggtggaggccgtgccccgctccgcgctcacgaagctgcgtcacttccggcgtgtgcgtctggcgtccgcgcgctgcacaatggcggctctgaagagttggctgtcgcgcagcgtaacttcattcttcaggtaccgctgcggccgcgtagaggggacaggaccagaggg

SEQ ID NO: 205 - DNA, 1400 bp, Homo sapiens
tccccacccaaaatttgagactttcattgtatttgtgagtttttttttttttttctgagagggagcctttctctgttggtcaggctggagtacagtgacacaatctcagctcactgcaacccccatctcccaggttcaagcctcagccttctatgtagctgggactacaggcgtgcgccactacgcccagctagtttttgtattttttagtagagacggagtttcactatatgttggccaggctggtctcgaactcctgacctcaggtgatccacccgcctcggcctcccaaagtgctgggattacagacgtgagccaccacgcccagccgtatttgttacttctatttcgggaccaactccatcagttgcacctgtaagctgcgtcaccaaggaccgggagtgggtgcaaggctgggaacgtgcggtgcaagcccctgccctctgtccacccgcagcgtcccaggccgggatctgtcttgagagctcgagtgtagaaaaatgttttattttattttatttatttttttgagacggagtctagctctgtggcacaggctggagtgcagtggcgggatctcggctcactgcaacctccacctcccgggctcaagcgattctcctgcctcagccttccaagtagctgggattacaggcgcgtgccaccacggccagctaatttttgtatttttagtagagacggggtttcaccatgttgcccaggctggttttgaactcctgacctcaagtaatccgcctgcctcggcctcccaaagtgctgggactacaggcgtgagcaaccacgcctggccagaaaaatataactgaagcccaaggtcagaagccaagctaggcagtcccacttagcgctgcccgagttgatggggacctcagtttccccacctgagcctggatcggctgaacctgggagtgcctcccctgacccgctctggcaacagcggcagtccaggccccgcccctcgcgactctgtctcctcccgccccagaccacgcccaccacacctccctggccccgcctttacctccccgccccgacctcgactccgccccacgcccaggccccgcccactgcccgggcgcctcttcccctccccccaggttcctgtccctcacccttcccccttctccaaccgccaacggccgcctgcgcctgaggcccggcccacgccccatcccgctcgctccacgctgcggcagccccggcggccccaggtgcgtccctccgaggaggaatgacggggcggtccccgggctgggcctcggctctgcaggcggggatgggggctgccgggccgggtcgggcccctgcgggtgggcggagggcggcgggccgtgggcgaggccgcccctcacctggtcgcacctcacctggccccccct

SEQ ID NO: 206 - DNA, 1300 bp, Homo sapiens
tgggcccatcaactcctttattcttgagaacatctgcctacccctcgggatcctggggagaggaagggaccctgtgagaacctaatgaccgccccaggcagcaaggccttcatgagccagggtgctctctgggaccgtttcttacgcagcaggagagtcgtgggccaaccaggcctgccctgaggactgggccagagcccttgaggggcccgcagggaaaggccaaaaggaccaagtgctcattaaagaccaaggcaggctggactgagctagacacccaggctccaggttccttcctctgaaacatctgcaggtttttgggaggcgaagggctctcagctgccatggctgatgtctggggactttttcttcagctccagatggtctacacagggttcgtatacacaggccccctagccgcacgcatgcgtgcatgcacgcgcgcacacacatacacacacacaccccagagtaaattcactgatatacaccactatgaacacacacaatgacttacctatacacacatattaatagacacccatactgctcttaacacacaccttcagacatccacacagactcacactcacccacatacacacacactgacacagcatattcacatacaaagatacacactgatatgtaccacacagagacacgctgaaacacatccatatgcacaccacacacactgagatacagtgacacacacagtcacagatgcacagacatatgctgatgtaaatgtacaaatgtggtcacactgacacatacatgcaatcatctacgcagactcatagaaaccgacacaaatacctgaaatacacagccacagacagacacacacggaagcactctatgcacaaaacactcacacagtacacaccatgctgcacataccctgacccaaacagtctaacaagccctgagggtctccagggctgccctggggctattgcccacccctcccaccgtccccgctagggtgagatggtgttccccagggaacagaagtctccagtcccatcttaagctctgccggatcccgcgtgacatcagctagccccctcgcggctgccgggagctgtgagctctgtgctggggccaggccggcaccaggcacagacacttaggcccttgttgggagaacagagagaggctctcttgtccactgcctgtcttcggttccaactgctggttctcctagaggcctctcctcagactcgcaggtatgtgggaccagggaggccgggtcctggccaaagggccactggggtcagcccaggagagggtg

SEQ ID NO: 207 - DNA, 1300 bp, Homo sapiens
atggagaaggcttcatcttttccccctcaccagtggatgtctgaatacattcaggggcttggaagtgccagctttactacccattccctttactgcctccttcccatgtcaggtggaagatcttaaaaacaagaatctgctgcttcgagctcagttgcggcaccacggattagaggtcgtcatcaagaatgacagcaactaactatggggattcaggggctttgggcccaagaactgcagatagcccaggagcaacagcctaatcccgtgcccctttccttcactgccccacttctggcatgggacagggggaagttcagaaggtgtgtccttgaactgaggccctgtgatatggcggcctgcagtggtgtgaaacacacaatgtggacgtgcactgacagccttgcccacccccaccatgcagcccctgggcccttgtgctcctctcgcacaatgcatgtgctgtctccatgctggatactggacacactaaactctggggcttgtcctgtgcttgcttagagtgcccagcagaggtttgctgacaggtgatgctctggcttgccccaggactctggcacttccattggttcttcctttccctggagctgaggtttagatgtgcaacctgtggctcaggggagcaagcttacacaagaagtgagggaaggatgtttagcagtggctggtgcccatgaagaggagattggccagtgagaagctgaggcctatgcagacatctctggagccagagagaacaacaggcaggggcccacttggggccttcccccttgtgggggtcgttttttttttttcttttcttttttttttttttttttttttttttttaagataaaattgttcaaagccacagttgtctgtttttcttccttttgtgggccacgggctggaagggaggggcacattgctcttcgaccagtaagggctgtgccaagttcagggtggggtgctgctcctgcatttattacccggagtcctggttcctgggccagaccggtgtgtcgtttttggcccaagctagagaatgttaagggcttctgcggtgggttggtgctagaggcgccgcgaacaggtgctgcgggggcggcgcgggaggcggtgcccttgcttccggatccggtctcagctctgggagggaacgggagatgttgcaggcgccgagagggcgggccagggccgcactccggagactcgcggttgctacgcgcaccatggctggaggtacctgcgggggattcctggggccgcggttctcttggtcctctgggttgaggcgtgg

SEQ ID NO: 208 - DNA, 1400 bp, Homo sapiens
tggtgtgatttggtttcgatttttaaaagatcactctcattgccttgaaaatgaactatgcgacattagggagaaagaaggatggaagcaggtggtccagttagtaaactatcacaataatccaggtaagagataacgatggctcaggccatggtggtaaggtggaaatagagagaagtgatcaaacgccgcatctagtttgaaggaaaagacaagagggtttactgacaaactggagatgagcatgagagaggaatcaatgctcatcccaagatttttggcctgaacagctagaaggaaggagatgaagaaaactgagacggggaaagctgggtaggagtgcattcatgaagaccaatcagcaacttacttttgtgtatgttaagtctgagatgctaatttgacatgtaagtggagatgccaaatgcatagtcaaatacaccagtctgaagttcagggaatatttggaagctagagatacaaattctgtagtcatgagcatatagatggtaattaaagtcgtaagaccggatgagaggacctcgaaagtaaatatagagacgactacagacaatataatagtgtctatttcatagggccggtgtgcagggttaataatatttatacaactctgcctccagacccctctcccagtgtacggagatcaggatctcatcacccctccccaccacgtgaagtcctgcttacagctcaaatgccttttattaaccgaagtgcctccagacccctcccctcctcaccacgtgaagtcccgcttacagctcaaatgccttttattaaccgaaggtcagcttttgtgactctcagacgctcaacaggtgcgcaactctgctaacgcagtaggctgtcctggccaaagggtggtgctgtgagtcgcctccagcctccgggccgtcccgaaagctgcaccttctccccctgagctgcagagggcgcgcgtgaggcatcgggcgctcaggaccccgcgggagctcagcgagggggcgggcggccacggagtgaggccggggcggggtcgggcgcggggcggacgtggggaggggttggccggggccagaagcagggtgcagggcaggcgcggggcggtcacgggggcggggccggtcgcggggcgcggggcgggcccgagctaccggtagtctgcctgccgcagtccgagcgccgcgctggggagagcgggtgtttgaaggctccgcggaccggcactaggagccgggggcgggtccgtgaccctccggctgctcggagtgaacaggcggccaggaaagaagcgggcctgaacaccatgatccctttggagaagccaggcagcggcggctcctccccaggcgccacctcaggctcgggccgggcaggccggggtctgagcgggccgtgcc

SEQ ID NO: 209 - DNA, 1400 bp, Homo sapiens
tttatatggcaagggagaaatgtgactacatgtgagaaaacaggaattagtgagcggtaaggatgaggacttgttcaacaggcagcaggtggctggttaggcaatcatgatgggtgaggggtatggtgcctcattgtccagatgcagtgatctggtaagtttcaattccttgatactatctgggaggcctcatggttggtttcccaagaaaggaactcagataagaaagatgtaactttctgaagttttaagactgggagggtaaatttccaggtttattcaaaagaaaccataaacatcagttctataggacagttgggctgatttcacaccaaccagcattccttcctgataagagaccaccaaccacagagaagttctggccaatctaccagggactcacagcgagggttttcatgtcctctgctttgccatttgacatcagagggctgaaaacttcacactgggatcatgctaacaccaccattttttgaatatgggtcccatagagaggcaggaagcttaattgtgcatgtgcatatttctcctttcataaatattcatgaatcctcctacagctcattgaatatatttggccaccctgctcagcataaatttctgttccctttgtccttccttccaagtgtctgttctcagcttctgaccagaggctatgcttccaagcctgtcagaaaggccaccctgcaggctgtaacccttcatgagaaataaagcccttttctaaatttattaacctcctcattcttcagttgacataagtagagcatcatagtccccacaaatcatttctgggatactctgttcttatttgtaaaacaaggagataggaaatgcatgctatactaaaagtttgttcaaagaacatccgcacgtgcaaatgtctgagaccagaggctgcaagcctccctgtcgctcttagggcttcggtagccacattgccacagctctccacgccctcaggtaacgcccctccgcaggccgagacgtcggcacgtacactgtcaggtcttcccgctttccgtcgcttcctgttccgtcttggtcccgcctgccgctggcgccgttgtttccggctcaactggggagctgctggagctcttctggcctctggttttccgactgcttatccgacgctcctccctctgtctctgtagctggagaaggtagtttccaggaaagttttccggtttgcaggccgcgcacatcgggcaggggccatcctcggtccccttgctcgttgctcgcagccccgttcggctacaagtgagtttcagggcgtcatggccaggggccaccgcggccagccgggtgtgaggctgcctttcgctgcccgcgcgctccagtggtctctgggtccgccggcgtccgtttcggcctga

SEQ ID NO: 210 - DNA, 1300 bp, Homo sapiens
atccatcacagtgcctcagtctccccagtattcaggggagggcagagatgttgtctttttgtccttctgttccatggcgtgcccagatcctgtgatggcaggtgctcactatatctatggaactgaaaggccagaccctggggagaggacagagcaggtttgggagccaactgtgaaaccttggcagtgggagtcaggaagagcaacctaggtctttgcatcctcatgcaacaaggatggaggccacctcaagtacacattatgtgctcagcaaagacgagatttaaaagtataaaacattcacatttgagcaacttaggtcattaagaatttggcctctttataatgatagcagtgtccacaggaagagagtgagtgggacatgaaatttctggttctgcatgcagacttctacatttctaccagctaattattattatcattaaattattaagcaaagagcttactcgcaaaggtcaactttttataaagcataagtcatccttggaagtgtcgtttggtcattctagtaattcttgcttttaattctttaacaactatgggtagaactgcagtgtaccattattccacctttgtttgcactgtcaaaatacccaagacgttgccaaggacgactgaattcttaggcttggccgcagccacccacagggcaggtgctcacttcctcctccggggtagaagagatcatgggtccctttccagtccaggctggaatggagaagtcgtccctgaccacagtgcgccaggcagaggccaaggttctaaactgatagaacccacccaccagggcggtgccaagtcccagtaagggccgcatctccccagcttggctgatgaagaggcggggaccgaaccctccagtgcaggagcctgtctggtgcctggctctcccaccgatccgcacgtacctcttcctcgcgggtcctaccccacgcaggtatctagcgcccagccctgttcatttcccacacctggcccgctccgccccggggccgaggagacgcacgtctgattggccgagggcggcgggggcggggccggggcgcccccagaggcctagacagaggtgcgggcggggcaggccgcgctcagcaggcggggcgggagccgcgtgcgcccgaggacccggccggaaggcttgcgccagctcaggatgaggacaggctgggcgacccctcgccgcccggcggggctcctcatgctgctcttctggttcttcgatctcgcggagccctctggccgcgcaggtaaccgcgggcacgccagccccgcagtccgc

SEQ ID NO: 211 - DNA, 1300 bp, Homo sapiens
cagtcccctgatttgaattcaaacacgtcatttttccagacagacaaaaatgaggcccagagaggggaagagacttgcccaaggtcacacagtggaggagtagggctagaacccgggactcctgcgtcctggtccagtgttccctccgcgggctttgcttctgcctctacagaggacccaactggccagcgctggggaaagggcctaggggaagaggttcagctaccatcccgctgtccgctggggcagcctgacccaggcacaagactcctgtggggtcacctaagggcgccagggagaagagcgagggagggaggaagaaggaggcaggacagctggctccagctccacgtgctcccagcccctggctgggagcccacgtgagggtcgccctaagaagtcgggggcgaggagagagggtgcaaagccccggcccgggctggacggagagaagcgcggtggagacttccctgcgccccctctgggcccgtacggcccacctcccacaccagagtgctgcgccgcaaccccttactccgcgtcctctgacccctgatccctgccctctccctcgggccaagccgtcgcatccctcggattcttacacgcgccgccccagcaacccggaccgcgcgccggggtccgcaccgcgcagcctagcccgccggcgccgccgccaaaaccccgagcccgaagctgttgcagccgccgcagccgccgaagccgccgccacttcagccactgccaccagggcagctgcgccagctctcctatccaccgcctaccgtcctctcaaccccgctggccccgccccatttccccttcacagcgtcctactggctaactgggctaccgtgatgaactctgattggccaactatcacgtccttccgcaggtctcgcccgccgccgatgcggtactccctgcccgcctccttaagaaggggcgggacgaagaatccacgccccttactcctcccttgttccccgccttactcgttgagtccaacccagagggagtcccaagtctttccattggtgaaaggtcaaaatggcggtgcttctgattggtcagacttcaggaggtggggacaactgagcggaacaataaattgaatggtgaaaagaaaggtcagtcagacaccgagtctcgccttctgagattggcgggtaacctagcaacgcagggaccgcggcggtaactgtggctagggaaacctggagcggtcagagcaggtgagtagccagttgggaaagggtcgcggatcgggggagatgtggaatagggttcagccctctgt

SEQ ID NO: 212 - DNA, 1300 bp, Homo sapiens
cgcggaccaattgggaacgcgggcacccggcgccagcggcgcggggaggtcggcggtgccggcggcggcgggcgcagagcgcgaggggaggagcgggaggaggcggaggatgttcccggcggctgcggccggggcagcgcgggccagaggcgcggcgtgcggagccctcggctgcccggcggagcgcggcggcgggctggcgggaaggcgcgggctttgcgctgcgccggggactctgaacccgagtcccgggctttgtctcctgcgctgctttcgtggtgacggtcagggggcgcccggtcggcgaagggcgcgggccggacgccgcggggcttggtccctggcccggacgctgcgctctgaagggaaggcgcggacgtgagtttcggtgtgattgccttctgaggggagggtctgtgggatgaaggcggcgcggcgcgcaccggtgtcgcctagcctgcggacctagttgtagaccttgcaggcgttcgcttcgtcgccctccgccgccccctccccatttagagatgtgcacctcacggtgtgcacctcagagaagttctgtctgattcggtgcggcgtgcggtacgggagcgggagggagggagcacgggcggagagagcgccagagccgggccgagccgcgctggagttacaaactctattgtgacgcacttactacgactgacggccgctgccagaccttccccagacttgctgccctcagcattttcggcaaacaatggggccggagcagggaacgcggccagccgcctgcaatcgctgcatctgcgcccgctcctgtgctccggcgtcctacctaaccccgggaagtcagagccgctgggagtttctgacttactcgaagaagtctgtcctgggcaaagagcacacacgaatagacttcagattagctgcttctctggaaacgcatgtgtgtgtgcaccagttccgcaagctgttgacattgttactgtattttgtttgggggtaccctctaccaaaaaaaaattacacctttattattttaggtgcaatttttttatttgggagattgtcagaaaagtatagaacaaagtatttgggattaaccctaagaatttttaatcgctaggtgagagctaatttgtttattcatcgatttttttttttgcttaaaataatcttagtttttattttacttgcagaaaaaaagaccaaatggcaaagcaaccttctgatgtaagttctgagtgtgaccgagaaggtagacaattgcagcctgcggagaggcctccccagctcagacctggggccccta

SEQ ID NO: 213 - DNA, 1300 bp, Homo sapiens
acactgccaggagatcctgggaagctaggtcacttccctgagcctcagcatccttatctgcaaaatagaaattgctaatagactaaaaggcaattctgaaagatggatgagaaaggaatataatgactcagggtagagcctgcaaaacaatatgggatgagaagatgcagggactggtttcatggagagagcagggttttaggattgggggagggtgccagggctaccgactgctttgggagatcccagagggggcattctgaagtcctgcagaagagatgctgtgccgtgaggggtgaggggtcgctggaggccagaccagggctcccaggagtcctgcattgagaagggagagagtggacacaggaaggatgcgcctctgtccagtcctgaggctgggcgcacacaccaggcccttcgaaaagctcacattttttccagcttttctcacccagtatcacttcctttgttaagaggagggggtgggggaggagacggaggatgaggagggaggggctggcgggtgccgccgccgcccccgccccctcccggtgtgcggagcccgattgtcactcagctcctgcgccgggggcgacagagccgcaggcgcccgagtcgagtcccagccagctaccatccctctggagcttaccggccggccttggcttccccaggaatccctggagctagcggctgctgaaggcgtcgaggtgtgggggcacttggacagaacagtcaggcagccgggagctctgccagctttggtgaccttgggtaagtctgagtctcggttcacccctggggctccccaatgggggtgcaggagagggttgaaagaagagaccggaatgcccccttggggcaggccatgggcaaggttccccgacagagctggaacgggaccagaggactgctaagatccaggcaccagacgggtctcaagtgggtgggcgcagggcaggtgcgggcacgctggggaatagggagaaacgccccagccttgtcctgggctccgtccccagacccacgtctgccaccccagtcccaggtgcgaaacaggggcgctacctctttaaaagcgtccggggctgagtctctgccgtaccatgtgattgcttgaaaggccgggctgggagcgctgcggcgggagccggaggactatgagctgccgcgcgttgtccagagcccagcccagccctaccgcgcgcggcccggagctctgttccctggaactttgggcactgcctctgggacccctgccggccagcaggcaggatggtgagctccctgcatcctgttc

SEQ ID NO: 214 - DNA, 1300 bp, Homo sapiens
tgaccacagcagtgtgacatttatgaacagtgtggaaacaacggcaaagcccctaaattaaaaacttcctggggaaataagccactccacatatcggttgctgaggaaagagtggaggaggctgttgacccgtgtgtgtccccatgactcaaagagggaaaagtctagctgtttccaatatcccgaaatcagtcttgctgggagaactgggaaaataaaaaagagatgacccccgtaggaagctacctttaatcccaagtgcccaaggctaggagagaagatgctccaggcgatccaggacaccagtgactgacacagccagaggtgggaaaggggaggataaagatggcacaaaagtgaggagtgagcaagggtctgagagggaaggccatgtgggcagtaggtggcacccacatcagagactgacatgaggattaaaggagagcataggtgatcggtcagagtgtgacagaagagaggcagctctacaccccttgcttgcaattctgagcattctgtagcaaactcgtttggccatcaaaccagacctcaattgagacaaggctatttaagcttcctcccagttggtgtaaatattcaatagttttgctgcagaaatgttgcgtttgattatgagactaccccaactccccaagggtgttttgtggtgctggtttctgtataaacctgaaaaattctgaattccaaaacttatctgacccccaaagtttcagataagagcttgtggacctgtgctcaattctggttctccttccttctttcaactgttgtctgtgaaaggagggatgcaggtatgggagacaggagtcctgcgaattcgtctgtaaactgtggacgggggggtgggtgggggggggtaacgtgggcacctttgtgcacaagtgcatgaataggaggggtgagcaactgtgtgtccatcacctttttgtcaaagaagcaggagtcagtgggctacgtgcttcatgagcaggagaggcggaaactaaggaaggctcatgtgttggaggaagcatgtttgaagagcagcaggtctcacagagtttgctctttaatactctccccagcacacggaaggggaagggggtggaggttgctgctatgagagagaaaaaaaaaacagccacaatagagattctgccttcaaaggttggcttgccacctgaagcagccactgcccagggggtgcaaagaagagacagcagcgcccagcttggaggtgctaactccagaggccagcatcagcaactgggcacagaaaggagccgcctgggcagggacc

SEQ ID NO: 215 - DNA, 1300 bp, Homo sapiens
gcggtggctcacgcctgtaatctcagcactttgggaggccgaggcgggtggatcacgaggtcaggagttcgagaccagcctgaccaacgtggtgaaaccccgtctctactaaaaaaaaaatacaaaaaattagccaggtgtagtggtgcgctaatcccagctactcaggagaatgaggcaggagaaccacttgaacctgacaggcagaggttgcagtgagccaagatcgcgccactgcactccagcctgggctagagagactccgtctcaaaaaaataaataaattcatacatttaagtaataaactcattgtgagcaaggaattctactcgactttctgtctgcgtaaactctacaaatccacttggcctcagccacagtgtctttattcgtaaagcagaaacagtgggaccgtcagagcactgccgggcaggcgagagaagacaggaactgtatgaccacggaagttgttgtccctacaacctatttgctcatctggaacacagaatagtggtcctctaaagcttgcagggctggaggtcgccattatcagcagtggtgtcactaaacctgaacccaagggtctctgcaacttgggaaacgacggcccggatctgaggagatggccccttcctcccaccccgcctaaggactctcagcctccctgaccctacctttccggagctcagagtcccctctggcctccaagggcagaaggaatgggtttggctgaggtcgggggctcgggtctgggacgcgctccacctccccggctgcgcgactatggccaggctccctgtcggagcctctgcctggggccccacctggaaaaatggctcctctaaggcgcttccagcctaaagcccgtcctcttccacctcttgggtgcagactggccctcccactccgaccgcaggtcccccaccggccacacagacggctacgctagaacccagccaaacaccggggttgccaggatggtcccacagctttcctttccgactcccggaagtggccgtgatctcacgagatcccggaggcgagcgcgaccggaagtccggtcactctcgcgaggccccagagagcaggcgctgggcagtgtggaggtcgttggagtcacttccccgtcaccagctcctgtgcctgccagtcggtgcccctcccgctccagccatgctctccgccctcgcccggcctgccagcgctgctctccgccgcagcttcagcacctcggcccaggtaggccagacgaggggcggcctgcaggcggaggccccccggcccgggccacgtgcgtccc

SEQ ID NO: 216 - DNA, 1300 bp, Homo sapiens
ggcgctccttcctcctcggctcgcgtctcactcagtgtaccttctagtcccgccatggccgctctcacccgggacccccagttccagaagctgcagcaatggtaccgcgagcaccgctccgagctgaacctgcgccgcctcttcgatgccaacaaggaccgcttcaaccacttcaggtgcgggcgggccggaggcgggggctgccacgcgcggcgcccggaaccgggcacgcgggcctggggtctggaggcgggggcagcggtgcccggggaccccagtccccgacctccaggccacggactggggcccaggccgagtccgcacttcgtccttggagtctccttggagtgcgttcctgggggcttgcagcctcgccgggagtctcggccccgggtctgcttcgttacgaggaaaaacgggcccctccgtggggacatttcccctcctcctccccgtgcagctctggccatttgagcaggggctcctttcgcagttgtgaagagaggccttggctgacgcagcaagcgggaaagggctgtccctttccatccgctcctggccacatgagcttgggagcgtctgcagggcgggcagcccgggcgggggtgtttgagggagctgggtggaaggatggagacgtcgggcgtgattcctgcagaagacacctgtgcacgaccgggaagtgggaaggagtgtttgagcaaatcatgggcgggagtgcggccaagggagctctgatcactgatactggtggaggcgggggaggggagcgactgtggctccgggctagacgtcccgatggccatccctgtcatctggatgggtgcctgagtaacttacggcagaaagtggaagccctgggaaggggtggtcccccacttcagtccgggctcctcatccagggtctgcctgcatctacggtctgtgaggatggcttctttctctgggctgctgttgcagatcatcctggtgggccagcaggtgacagacaccaccactgtgctgggtggccgcggcccttgtggggcgtgggtcagggaggatgtttcttctgggaacagctcctgcttagggcatggctccccgctagggagaccagggtgtggtcagcagcatctccatctttctgcagcttgaccctcaacaccaaccatgggcatatcctggtggattactccaagaacctggtgacggaggacgtgatgcggatgctggtggacttggtaatgttctgcttggggaggcataactggtaaccgacagagtggtgggtgagctgggctcctgggagtccccagga

SEQ ID NO: 217 - DNA, 1400 bp, Homo sapiens
atttttagtagagacaggatttcaccatgttggccaggctggtctcgatctcttgacctagttatcgagaccacctcagcctcccaaagtgatgagattacaggtatgagccactgcacccggccaagacctttaattaacttacacaacaaagtctggagataggcagttccaagcatggtacagcagctcaatgatatcatcaagtatttgggtgttttctatctttgccctcaaccatcttcagcacgtgagtttttctttcctttttttttttttttttgagacggagtctcgctcttgttgcccaggctggagtgcagtggcacaatcccggctcactgcaacctctgcatcccgggttcaagtgattctcctgcctcagcctcccgagtagctgggattacaggcgcccaccaccacgcccggctaatttttgtatttttagtagaaatggggtttcaccatgttggccaggatggtctcgacctcctgatctcgtgatccacccacctcggcctcccaaagtactgggattacagacctgagccaccgcgcccggcctgcacgtgagcttttcatctggaaacttgtcccctcatggtcagtcctcacaccaccccacttacagaagaaaaaaatggaaaggtgaagtctcctctggaagcttcgtctttttatctgggaggaaaatatttcccagaagctgccttcttttaatttctgtcagactctagactaccctcaaatttcactggacctgcgattacaatattacctagcaataagaatcaaaagaatcgaacatcattgagtgggaaaaatcctctgcaagtacagccaagccttttctgaggctatttttaaacttacaaatcagaggacaatcgcgacattagaggaaaattacccaggtttacgccatcactaacgatgatagcttacgatgatagctaacccagctcttcaacttcctttcaatctccagaaaaggctctctgcgtgctaatggtaacgtggctttacagatttttacccacttcaaatatggccgccaagctccgttctcttttaccgcctgatctgcggctacaattctggcttcatgcccgcctccaaaagtgcttcctctcgaggggttgtggttcttactgcgcaggcgcaaaagcaagtcctcttccgggcaaaatggcgatgggactaatgtgcggacgccgggagcttctgcgcttgctacagtccgggcgtcgggtaaggatgccccggggcagagcaccgggatgctgccctgacccagtgaaccaggccccaggacagctcgtgctaggggtatcagcagacgctgacctgctcaccgggacctgaatgtcatgacctcgggtcatgtgaggacgcgctag

SEQ ID NO: 218 - DNA, 1300 bp, Homo sapiens
ttcgcctgcaacttgcttttaagcctgccgccccctgctttccttaatcataataataaaaaaaaagtgcaaagaaatccagctcgctggaggttttgcatttggcgtgcaacttccttcgagtgtgagcacattgggcgggaggggtgggggttgaacttggcaggcggcgcctccttctgccgccgccgccgcctcgcagactcggggaagagggtgggggacggtcggggcgcgggggagggtgggttctgctttgcaacttctctcccagtgcgagagcgcggcggcggcagctgaagacccggccgcccagatgatgcggtggtgggggacctgccggcacgcgactccccccgggcccaaagtacgtatgcgccgacccccgctatcccgtcccttccctgaagcctccccagagggcgtgtcaggccgcccggccccgagcgcggccgagacgctgcggcaccgtttccgtgcaaccccgtagcccctttcgaagtgacacacttcacgcaactcggcccggcggcggcggcgcgggccactcacgcagctcagccgcgggaggcgccccggctcttgtggcccgcccgctgtcacccgcaggggcactggcggcgcttgccgccaaggggcagagcgagctcccgagtgggtctggagccgcggagctgggcgggggcgggaaggaggtagcgagaaaagaaactggagaaactcggtggccctcttaacgccgccccagagagaccaggtcggcccccgccgctgccgccgccaccctttttcctggggagttgggggcggggggcgaagcgcggcgcaccgggcggggcggccacgccaggggacgcgggcgtgcaggcgccgtcggggccggggtggcggggcccgcgcggagggcgtgggggcagggaccgcgggcgcccctgcagttgccaagcgtcaccaacaggttgcatcgttccccgcggccgccgcgcggcccctcgggcggggagcggccgggggtggagtgggagcgcgtgtgtgcgagtgtgtgcgcgccgtggcgccgcctccacccgctccccgctcggtcccgctcgctcgcccaggccgggctgccctttcgcgtgtccgcgctctcttccctccgccgccgcctcctccattttgcgagctcgtgtctgtgacgggagcccgagtcaccgcctgcccgtcggggacggattctgtgggtggaaggagacgccgcagccggagcggccgaagcagctgggaccgggacggggcacgcgcgcccggaacctcgacc

SEQ ID NO: 219 - DNA, 1300 bp, Homo sapiens
ctcaaaaaaaaaaaaaaaagcagcagcagcagccagaggccactccagcatctcccctacctggcttgggtcagggagagggcagtgagaagtgaaaactcccagctacagaaaaggaaatatgttggggggaagggagaaggaaaggtgtcttcatcaatgccggggcagggtagatggagccctgggcagggagtttggaccaggaaatctcaatgagggaaatgtgctgtcctcacctctccaagaagcgactggccaaacagagtgacagaggggataaaggttatgcctagggaggcatgtgtcagaggctatcatccactctgttgaacccacagtgaccagcaccaccatcacacaaacatgcctgcatgtgtgcacgcacgtgcagtgtgcaaacctgatgtcagcctcactccctggctcttctgtccacaaacgctgtttctttaagtaccactttcagttcctccaaagaatctacttaaactcttaaattcctgatctctatagattttactaaagatttcaaaggagataagatgagagggttacgttgcacattctaaagcaaacaaattaaaatgttttgttagacatttccatatttttaagggcctccttggagctgccaggctgggagtgaggtttctctccctttctaaaccctgtgcccatcttgtcaccctcctggagctgccagcagacttcagattcttctccgatctacagagcagaaaaattcagccagcccttccttgtcttcctatccacagctgcctgcccagactcatgaaacctgacaaaatgcaaggtcttatcattacctgaaccttggacctgttcaaaaatactagttcctgagaataaatatccctggtgtcttcctgcccttcctgcacacctccagtggcttatcaaaatatttgtttcatgcgcacactgggctctcatttaagaggaatttgggagaatgttattttctaatctgcatttcacaccaggctccccctccttcctggggtgctagtgtcagcagaacctgatggggaagtgaggtctgggaggcagaggaggaaggaatgaggggaaaggggaagtttgggaggaaggcttctgagaagactggtgggagagaaggagagcctgcagacagaggcctccagcttggtctgtctccccacctctaccagcatctgctgagctatgagccaaaccagggatttacagggtagggagggtgggataggcagcggcattagatcggaggaatgagatggacagacctgggctgtgg

SEQ ID NO: 220 - DNA, 1300 bp, Homo sapiens
cagaatctgtatgagtcacacgtttaggtagctgaatatcctctctgcccccaattcccccaagtcaaaggcagaagggatttgttccaccaaagagtttacaccagccacagctgcccactgcagtatcctcccaggaaaagcccttttgtgcgtggaggaggcagatggcgaggaggcagatgtgcactttttttttttttttttttttttttagagacagggtctggctgtgtctcccaggctggagtgcagtggcgagatcaaggctcactgcagcctcgaacttccgggctccagcgatcctcctgacacagcctcctgagtagctgggactacaggtgcacatcaccgcgcccaactagttttttaaaattttagtagagataggctcttgccatattgcccaggctggtctctaactcctgacctcaaatgaccctaccgcctcccgaagcgtcgggaccacaggcggcgagccaccggccggcctctgtgtgcaccgaggagccgggcagccaccgccacgatccagctttaggacatttccatcaccccactcagccttcctgcgcccctggttcctcatctataaatagagataatatacgcctaaccctctaggtcaccagcacattgcacccataattattatacttgttgatgccacactttcaggttttaacctttccaaagcgcagccccgccccagcgcagcccaagtccctgcacgcagaggcgccgatcacgggtgggaggtggatcccggaggccccgccccaggccccgcccctccgtgcgcccaagctcgaccgcctgaaatcggggaatcgggcctctgccggcgccctggcagcggcgcggggcgtggctccgggctggattggtggcgcctgggccccgcgagcgcctgcgcagtggtcaaggccgcgctcgcgccgaggggctgcgagagtgaccgcggctgctccagcgctgacgccgagccatggcggacgaggagcttgaggcgctgaggagacagaggctggccgagctgcaggccaaacacggggtgagcgcatcagcccccgccaggcttggccctcgcggggcgccgccctcgcccggagtgtagggcgcgcctccggggcggaggctctgggcgcctccccggggccccggtcccctgcgctgccctggcggcctcgtggccggctcagaggtggcctcgtcgctttcctcgtcgcgaggggcccaggaggctggcggcgggggccgccacgtgcgggacctgccctggcgttggggtgtggggtcc

SEQ ID NO: 221 - DNA, 1300 bp, Homo sapiens
tttttagttactgatttctaacaattgtttcttattatcttcctgattttacaattccccaaagtaaaggtgcgaaaaacaaacatctaccctccttttcgacaaatgccatgatagaggggagacctgtgtggtgtaaagacaaatgcagacatttggaagttgatggttttaagattcagtaaaaacttgagagttttggcttcaaatccccacgctagttttagttctaccggatacgtgtcccctacccatttcaaaggacccagtcacctcggctcttgcctgagtttcagagtcccgccggagttagagctggcagagtccaattgctcagagcgccgaggcgggggcggggcagggggacgcttgcaggtccggtggtcccgcgggctgcgagcccccacggccgaccctagctgcagaccctcctggagaacctcaggcctttcccccagaaacatccctaaaaggcgttccctttgttcattcattcaacaaatatttgttcaatctcatatgcccttctgtcttgggaaaaccaattagggcctctgcagcctcaacacaggggcactgttcccgcctattaatgacgcaatgaacccgggaagacgaatctcgaccactgtttcgcaaataccgcgtgtgatttattaaatgccgtctctccgagtcccaagcggccgggagcattatgccacctcccttgccctcatctctcactgccatgcaagaaagcgttaatggcaaatagggcacgtagccacactccgtcgttcctgcttccaagcaaaccttgtgccaggttcctcatttcgcgaggctccactctcttgggcttcaggctgccgctgggcctccagcaccaaagggcaataggggtctgagagtccgggcctcaggcatcttcaggccgcaggtgggtggagaatagcgcccgcgcgtggcagcggcccaggccgtctcagccggatttttccatccccggggtaggcttggtcccctgtacactccagcggaactacaactcccagcaccgtggctgcccggactcccggaagccgaatcccggctgggaggaagcagctgagacccggccaacagactgggggttaatttagccagaaaagggggcgggaagggctgtagggtacttgtcaattcgccgccatgaacgtggtttttgctgtgaagcagtacatttccaaaatgatagaggacagcgggcctggtatgaaagtacttctcatggataaagagacggtgagtttgcttttgctcagcatttgtgaaggaa

SEQ ID NO: 222 - DNA, 1300 bp, Homo sapiens
cccaaggtcgccctgggagttcttcgcaggcaggaccgtgactcgcgtggctttcgggaggctgattacccacgccccatgcccgtgcagcgctgggtgcagaggaaccgctggaaggacctgtcccccgtgggacccccaccaagtctcatcccgtgtcatgtgccagatagtctcccgtggtttaaggactttcaagactcttaacaggttaggaaaatccagaagaaaggcagaattgggtccctcgggcttgcctgacaccagggacggtggagttgaggtgacatttcactggcatggagacctgaaaccaaaagcaggatgagccgggcacggtggctcacgcttgtaatcccagcactttgtaaggccgaagcgggcggatcacgagatcaggagctcgagaccagcctggccaaaacagtgaaacccccgtctctactaaaaatagaaaaaaaattagccggacgtggtggcgggcacctgtaatcccagttactcaggaggctgaggcaggaaaatcgcttgaacctgggaggcggaggttgcagtgagccgagatcgtgccactgcactccagcctgggcgacagagcttgactccatctcaaaaaaaaaaaaaaaaaaaaaaggcaggctgaatcactcgcccggtagtgacggaggaggccgtaaaagcctcttagaggccagaccccgcagtggcctctgtgtccttcattccgccacccatccgtccaccgagcgcctgctgggtgccaggaactgggtcacagaaaggctgaggtcaactcccgaccgagaagcctggcgctgggaccaagtggcaaaacgactccgaatgcagcggcatccacgcggcggccgtggttgaggaacagaagctgagagcggcaagggcggtcacagaggaaggaagttcagggttagccaacaggagccgcaggtgccccgaaaagggggcggggtcaggggtgccctgaactccgaatgcgaagttctgtcttgtcatagccaagcacgctgcttcttggattgacctggcaggatggcgccaccaccagctagagtacatctaggtgcgttcctggcagtgactccgaatcccgggagcgcagcgagtgggacagaggcagccgcggccacacccagcaaagtgtggggctcttccgcggggaggattgaaccacgaggcgggggccgaggagcgctccctacctccatgggacagcacggacccagtgcccgggcccgggcagggcgcgccccaggacccaggccggcgcgggaagccagcc

SEQ ID NO: 223 - DNA, 1400 bp, Homo sapiens
ccaaagacccccgagggtcaccactccctgtccaggggtgtggcctcatagctccttttgaacaggggcacaggaaggacggctttagagcattcaaaaaataactttgccaaaataataataataataatagaaaggaagaagaggctgagcatggtggctcacacctgtaatccctacactttgggaggctgagacaagcagatcacctgaggtcaggagttcgagactagcctggccaaaatggtgaaacctcatctctactgaaaatagaaaaaaaaattagccaggtgtggtggcgtgcacctgcagttgcagctactcaggaggctgaagcaggagaatcgcttgaacccaggagatggaggttgcagtgagctgagatcatgccactgcactccagcctgggcgacaagagcaaaactccacctcagaaaaaaaaaaaaaaaaaaaaaagaaggaaggaaaaagaaacactcctttatgtcttctaaggatagacatgaaatgcgtgagccttggaacaccttctccctctcctgccccacgtgagctggagcttacatgccttcttgttttcagtactgccgtaaccctgatggtgatgtaggtggtccctggtgctacacgacaaatccaagaaaactttacgactactgtgatgtccctcagtgtggtaggttgccttctttttggtaaggaaactgcttacttaatatggatttgcaacaaaaaaggaaaagggcttctgagcagactgcttctggggaggagatagctgccctctccatcagaccccactcttcatcatgggcatcttgaatctgccctactattggccacatttgttagaggaacacctgcccatcgccccaggcacacataaataaaataaatgtaaaattcccaaagagcaagcttagaggtaatctagtcagccccaggatggtcccactgaatgctgccatgtctagcgtgggatgcatgaaaaatttagagtcattcggatgaaaaactttccctttccacagctgagaagtaagaaagaaaatacaaacagcaggaaacaggtaagcatgtaacgcacattgtaaacctcagatggccatcctaggaattcaatgaaaggtagtgcagctctttagccccagatggcctttcttataagtttactactcacaagtcacattagtgacatagcttagagactgcttgttgggttccatcctcattgctctgagactcttgttgggagtatgaggcttggatcaggggaaggggagttgacattagttcttaaagaattggaataacaaatccatgggtatttctgaaaaaaaaaaaaaaaaaaagaaaggaagctacttggaattgtcccatatttaacattctgctgacca

SEQ ID NO: 224 - DNA, 1300 bp, Homo sapiens
aaatgtcacacagccaagacagaactctggatctcctttcccagccacaagctgcccctcttccagtctgtaagttcttacggagcatatatatgtgatctgcctacttttctccaacctcaccacagtgacatgagcccaaaccaacttctcaccttgcaacagcctcccaggtgggaaggctgagtattctggcccttaaccagttagaactccccagttatctgtcctgctgatggggttgaaatctacattcctgaccctggcccaccaaagcccctcccttagctcccatctccctcctctctccctgtcttctcctctgctccagacactctggcttcatttctgcgttttttgtaccccataagctccttcccaccccggggcctttgcctttgctgttccccctgcggggaatgccggatctctgctcagatatcctcttctcagatcagcaagctaaagcagccacctgtgtctgcctaacccaccaccgtagtttaactttctgcctagtctttatcactagctgatatttctcaggatcctttagttacttctttttcgtcttcccctcctagaatgtaaactcttcccctcctagaaggtaaacaaaagacctgttctgttttgttcttcggcccatcccaagcctagcgtagtgcctggtatgtggtggtgtccaaacccaagcgtggagtgaatgagggatgaatccatgagagagtgagcggctccagtgggtatgcgcgagtgtctcactcggtgtagatgtgtgtgttgtgtgtgttgtgtgtgtgcgcacgctggggaggccagacaagtgtggaccagtgattggggcacctcttccctgcaaagaggccaggggaagacagtgcgtgtggggtcttctaccagggaggatggcttgctggtgtgtcccccccaggggaggactaccaacgaaggggacccgggagatggcgggtgggggcccccgggaggacagtgggcgagggagggggtccttgccaggcctggggcggccgggggcggtcctgggctcccctccgtcccgcctccaggcctcggggcctggctggccgacgtggcgttggcggcgctgcgcgcgggagggcagggcaggagggacagaggcgggggcgggccggaaagtttgtccggcggcagcggcgttggggactccggcgggggatgcgcgcccggcccctcagcgcccccagcacgccgccgagtcccgctcgccatgggtaagtcccgatcgggcgctgcctgctggaagcccgaccccttc

SEQ ID NO: 225 - DNA, 1300 bp, Homo sapiens
aaatcagacagcagaggtgggggaagtgcctgaatcacatgaccttttaatcttgtaaatcagaaccttcgtggtctcagtgcctttgcacaaaggtgttcttttcatctgaagtgctcttatttgcctggaaattcctactcagatctaaacattcaatcgaatgtcatcttccttgaaaagtgttcctcctatccctaagggagtttgctactgcagcttccctgctccacagggtatacctaggggcccttacctcacactagactggggctctttgagagcaggaacccagtctcacttactcaatgtccctaatgcccagcatagttaccggcataaggaaaatttctgagaatattcagagtgaaaaaagctcgcagtgcaggggaaatgctaaaagctaacaagaactgtttcaagtgctttatatttaataattcatttatttcccacaaaactttttgaggtgggtaccattattctcatcatcacgggcagaactgggattctaactcggagtctggcttcagcacctgcgctcttcaccacctatacttactcttgatgattataatgacttctaataatggttaacatttacgaggtaccgggccctgtgctaaactttttatttatcgccgcttcggttaatacggataaccattatcagccatcttgcagatggaaaaactaagtcttgtcagcacgtccggcttccaggcacccgcctttaacacgtgcgataccatctggcttccagaaaagcccaacagaagtgagatgaggccgactgcctggattagttcatcgggaagcgggtgagggtaaaagcctttctcgtttccgcattttaatgacgcagaaaggtacctgtggggattatcccatctcagggcagatgaggaagccaaggttcggggcgcggagccccagaggagaacgccgaccgcggcccggacttagagattaggccgcaggggagcggggcctcgagagactacgaccattgctccacttactcaccgagaagccgtcgccgcccgtagttttcgactttcccgccaggcccgacgccgctctgacgccaccgaggcgcgccatgacgtgacgccaacttccgcgccggaagtggaaggccgggcagcccagctgaaggcaataagctgggctcaccgctgcagcagagttctgtgctagccgggcataggggcgagagaaggcccagaggcgacgtcagagagaagcaactgcgccccggtgaagagaagctcgcccatcaccggctgggagccagctt

SEQ ID NO: 226 - DNA, 1300 bp, Homo sapiens
ctttccaagacgtgggggtcaccatgggcagaggacatcggttcggagccagatcacgggccccataagcatcagaccataagcagcgccgccactgagagccgctcggaactcgcccagcatgtcgggtcccctagccagggcctggtgtacgtggtcgagggccctggaagccccgatggcctaggaggagcaggcgggcggggcggcgggtgtcgctggccggtagagagcttcggcctgacctagcgcaggtctggtgcgcgcagagaacaactccaagcgcaccgacgcccgcgagctccttccaaacaccgaacgggatccagagcccgagcccacaggcggcggccgggggagggagcagggtgctggccgccgcccgggagtgttcgcgtcctgggtgacccctggaaggacgtggggcccaaactccggctggggttgggagagcagcccccagaggctctccgcgggatcctctgccgggcgggaccgtggctccacaggagaagtgggtggcaagccctgcttggcggaaagcagccgttcccctcctcctgggcctggggcggcgcccctcacccctgttccccgcccctcacccctgttccccgccggccacatcccctgccccttggattccaagcgccccgcgcgccgaggagcccagcgctagtggcggcggccaggagagacccgggtgtcaggaaagatgggccgtctgggggacagcagggagtccgggggaaacgcaggcgtcgggcacagagtcggcaccggcgtccccagctctgccgaagatcgcggtcgggtctggcccgcgggaggggccctggcgccggacctgcttcggccctgcgtgggcggcctcgccgggctctgcaggagcgacgcgcgccaaaaggcggcgggaaggaggcggggcagagcgcgcccgggaccccgacttggacgcggccagctggagaggcggagcgccgggaggagaccttggccccgccgcgactcggtggcccgcgctgccttcccgcgcgccgggctaaaaaggcgctaacgcccgcggccgcctactccccgcggcgcctcccctccccgcgcccatataacccgcctaggggccgggcagcccgccctgcctccccgcccgcgcacccgcccggaggctcgcgcgcccgcgaaggggacgcagcgaaaccggggcccgcgccaggccagccgggacggacgccgatgcccggggctgcgacggctgcaggtaggaggcccagggccggggggcggttcggctccgcgggcg

SEQ ID NO: 227 - DNA, 1400 bp, Homo sapiens
gcccaatttctgcctccaaagaaagaaaaagtaaaaactaaaaggcagaaatgaaatccacaaacagacagcctggtgccacaccctgggcctggtaaagatcgaccccgacctaatcggttatgttaactatagattacagacattgtatagaaaagcactgtgaaaatccctatcctgttccagtctaattaccggtgcttgcagcccctagtcacataccccctgcttgctcaatcaatcatgaccctctcacgcacacctccttagagctgtgagcccttaaaagggacaggaattgcccattcagggagctcggctcttgagacaagagtcttgcccatgcccctggccgaataaaccccttccttctttaactcggtgtctgaggagtttcgtctgcggcttgtcctgctacatccatagggccgcccttctctaaagttgttgtaaccttcccccaagcaggaatccacttctgctttaggaagcagtgggaaaaagaccatgctttagagtcaagacagtcctaaattaaaatatcggctcatttaatcaatttctgcttcagtttaaccgtcttcaaaatggagataataataacactaattacccaagtggggtactgtgagaatgagctatacagcacatatctcaatgcttggctcacagtaggtgcttaatgcaatcaatgaaagctatgatgtgcattataaggaatcaacagacagcactgtccagggaagactagactcactcatgaagtgttaagttccccatcagtagagcgtgtgcaagcacttcttggtgcccaaaggattccagcacccacaacaggttggcctaactcttaaggtctctccagcttccagagatcatgctcctcagggtctgacttctagtccccacgcttcaagtaacaccgaccaggcacgtgtgcccagcgtgcaccccgcctgtcggtcaccgcctactgtcaataaagttgatttgaggcggctccaggcagaggggcacggccacccacacgccacctcagcccggccccgcggcccctcacccggtgggcgggtgggcgggtcacgcagccggcgcgccttgccattggcccgcgccggtggaggcggggcctgctcacgtctgccggcccctctgttgtcgtttggcagcggatagaggacacgaccaagatggcggcggtgtctggcttggtgcggagaccccttcgggaggtaggcagcagcgcgcggcctgtattcccacgcgacccctgcccaccctgcgtcccgccgtcatcttcctctctccctgccaggtctccgggctgctgaagaggcgctttcactggaccgcgccggctgcgctgcaggtaacaggcgcgggtgctcgtcggacgaggg

SEQ ID NO: 228 - DNA, 1300 bp, Homo sapiens
gggccactccgcacctcttcccttaatcttcacctagagacctaagctgggggttgggaagggtaggggcggcgggacttggaagagccagtttgcagccagccggtcgcctctcgggtccaaacccgaggctggcccacggcgagtacccgggtggggccctaaaccacaggaggggccacctccaaaagaaaagagaaaacactcttgtttgggaacaaaagtgtgtgtgtggggtgtgtgtgtgtgtgtgtgtgtgtgtgtgtctgtttatttaaaaacaaaaccacgttaaaagagctgcccctcccccacaggcccgaccacccgccgggagtttgccaggaagaggggcaattctgaatgggagtcgccaacgccccactgagtgaagcctgtctcggaaccgctcgcccagaccctggaggctccagacagccagctcccggaccccgcgcgcaaacgctgcggcgaaggaggggacccgggtaccgccagagccccgcagcggcagcagcagcgcggactccccggtcgctgcctctcccagcccggcggcctgggccgtcaatcaagctggccctgccccgccctcgggctgcagggggcggccaatcagagctaagctccgcagcgatgagctcagccggctggtttcccattggacggctatattaagaaagtggccggactctttaaatagcgggcgctagggccgcagccctcatctgccaccgcagtctggttggagctgttgtcttgtatgctcagcgaggcccggagagacccgggagagagctaggccgagtccaccgcccgagtctgctgcccgagcccgcgttacgcacaaagccgccgatccccggcctggggtgagcagagcgaccaccgcccgggagcagcgcggcgagacgcacggtgcgccctatgcccccgcgcccccaccgcccccgccgcggcagccgaagcgcagcgagagaacgcgccaccgcggggcccgggtgcagctagcgaccctctcgccacctgcgcgcagcccgaggtgagcagtgagcggcgagcgggagggcagcgaggcgttcgcgggccccctcctgctgcccgggcccggcccgctcatggcggccatccgcaagaagctggtggtggtgggcgacggcgcgtgtggcaagacgtgcctgctgatcgtgttcagtaaggacgagttccccgaggtgtacgtgcccaccgtcttcgagaactatgtggccgacattgaggtggacggcaagcaggtggagctggcgctgtgggacacggc

SEQ ID NO: 229 - DNA, 1300 bp, Homo sapiens
cgtgcaggtagcgcacggcgccggcgatctgcgcaaagaggtcgcgcgcctgaactccggggatgcgcccgttgcgctgcacggcttgcagcaggtcggtggcggccgcttccatcacgatgtacagtttcccgttgcacacctcgatgaactcgaagacgtgcacgatgtgcgggtgtcgcacgccccgcaggatggacagctctcgcggcaggaacttgttgacgaagtccgggggcgctcgccgccggtccaccaccttgatggccacggtacccttgtacttcttggatgtggccaccttcaccttggagtagctgccctctccaattgtgcggcccagcttataaccgagttcgctcagaagtttgtctcccgacatggtggcgcctagggcgcacggggggcaggaggcggctgctgtcggggggcggccggactccaatctcgggtctaagccatggcgcttggcacctacacccccgcacccccatgtgcccactgccagacattggccgctgttgtgccttttattgccccgtaacaatttttgccttgtgaagtgactgcgggcgtcactccgccttagggtgggggtccgggaccccgccccggggccaccctagcctccctgctttgtgactcataatcatcctgaatggtcagtttccgatgagaggccactagcaagggatacccatcaccaccagggagcagaatccgttccagggattggggtgagtccgacttcgagcagcagctgccccccaacatcatgtacccagcccgtgactacgtggagccctgggcttcgcgtagagtccctagacggggcgaaaacgggaaaaggggccttaactggggcacctggctcctttgagagctcggagtttctgactggcctgcgcaacaccccagaggcaaggtgaacgcgagggcctataatgcaagaaccaaggcgagtcacgccctgtctgggcaaaagaggagtaaagacccctcagctgcagcccggcagcgcattcctacccagggtccgccgccagagctttcccgcgcggtcggatagttacactactgtccgggacttcctagccgtgccgcggaccatctcaagtgcttccgccacactcatcatggcggtggcagtaagtcacttccgcccgggaccggaagtgtgggatactgcgagtatggcggcgtcaaaggtgaagcaggacatgcctccgccggggggctatgggcccatcgactacaaacggaacttgccgcgtcgaggactgtcgggtcagtatcactc

SEQ ID NO: 230 - DNA, 1300 bp, Homo sapiens
cttctggttgagcctcccagtccttggtgttttgttctggcggccccagcgagcgggcgcgggatcgcagtgtttgcctttgcatctccagctccgcatcctgctcgctgtttattttgtgagcagctccggcggctgcccctgaactgctccgagactgagcagtttaactcacactcgcccacccgccctccccaggaagcctcccgcccgcttcctccagttccttccccacctgtccggcctcctagcccggtgctctcggcgcgggaggaggcggctcgcagacccccaggtctcggcttcccggatctcccccgcctactcactccccggtccccggctcccggcactggcaggcgctgtggcttccgcgcagtggctgcagcatttaaatgtccggcacttagggagaggggtgcagtcgcggagcagccgctgctcccggcatctagaggggcccaaacccccgcgtgcccaggccgagccccgcgcgcagcccacgtgggctgagggactgagtattggccctcgggcagctgcaaccgcgcacagctggagctggcggggcggagggcgggccgggaccccgcggggaaggaggcttccttcccagcctcctgctgcccggaaatccccccggctctcagacaacctgccccacggggtcctggggggaaggagaggggcgggatacagggatggggagggctggctgagccgaaggcccgggccgccctcccccaggccgcgcggcttcgagaaagcagaagcgagccctgccccggggagtcccacaggagcggggatctgggaagagaaacttgcggacgagggagttagagccgtggacccccggcccccgcccgggcgtcctgcgtcggaggagggtctctgggtcgggcaggggccacctcttggcccgccccttgtcgctggacgtccgaagattgggccatttcccttgccgcgcccttaccgcatatcggggtgcgcccggcccggcccggcccgccccacccagccctccgctcgcgcccggagaggaggggccgctggcgcagcgccccgggaccccgagaggccgccgcggcacatccagacctccgccgctcccgcgccctctcaaccatcctgggattcccgggcccacccgacccagcggcgcgaccctggccctccgggaccctccgctgactccaccgcgcacttcccgggacccccacacacatcccagccctccggccgatccctccctactcggtgccgggtgccccccgccctctccaggcccggatct

SEQ ID NO: 231 - DNA, 1400 bp, Homo sapiens
atcagagttctggcaagaaggctgtagcctgggccttggccctagaccaccaaaaaagtgaatacaggcttaggcagtgttcatagaggcccagcatctggaacaagggtgctgctgtagtctgtgctggtcagaccacacaggaagaattgtttattttccggatactatgattttaaaaggatacaagcaaattggtgtgtatcaaaaggaagctgaccagaatgttgaagggacttggaaaccaaatcactagttacttttcagtggtttgggctccaggactggagggggtttagggtggggggtagaggatggtgttaggcagcatagataattagaactgttttcagatatgcaaatgctgttttgtgaaaacacacacacacgcgaacacacacaaaacaagaaaaacttgtactttaggtaaggccagaaaacagaactgggacccgtgggatttaagctcaacatgaagaatctgtaaaccattatagctcttcaaaagtgggctagactttgtaagcacgcaaggtttaaactgttcaggtaaagaccaggaagccctccagctgctctgtccagaccgaggccggctctccaagtccgcgctggggacgatgggaggtgtgcacctgcgacagaacacaggtaccgccaggtccgggtagcggtggcttttcgccgaggtcccccgcctccgcatacttcttgccctcgctgcttccccggccgcctctcctggccccactcctcgcccggcgctcgccgctacaactcccgcctgggctggcgcgagacccgcgagcgccggagtgggcgcgcgggatgcgcgcgggccggcgcccggagctctgggcatgctcagtcgcgcgggcagggctccgggcgcgagctgggctccttctgcaccacattcagcggctgccaagaggagccgacgggcgctcgcaggctcagcgcgcgctgcccgcggcaggacccggccgcctccgccgccgccgccgcccctaagcctcccgaagccatggccgggctcggccaccccgccgccttcggccgggccacccacgccgtggtgcgggcgctacccgagtcgctcggccagcacgcgctgagaagcgccaagggcgaggaggtggacgtcgcccgcgcggaacggcagcaccagctctacgtgggcgtgctgggcagcaagctggggctgcaggtggtggagctgccggccgacgagagccttccggactgcgtcttcgtggaggacgtggccgtggtgtgcgaggagacggccctcatcacccgacccggggcgccgagccggaggaaggaggtaactgccgactcgaggggcgcggccggggcgcgcgccaggccctcccccgccgccggccgccgtgttg

SEQ ID NO: 232 - DNA, 1300 bp, Homo sapiens
taccgtgagctgactagtttacctacattatcctggtggctttcccagaccagaccacccaaaccaaagcagccccccagtcaccctctaggcacataaccctattttagttctctgaatacgactgattgctgtctaacatattttggtttgtgtgcttattgtctgtcaccggtttcccttcacaagaaggaaagctccaagaggacaggcatcttatctaccttgtacttggctcatagcaaataaatgaatctaagccgcccacctccctgggtgacagagttgacctgcacacagtaggtctcaaagagtatgttttaaattttatatttagatttcaagataattgtgttgaatattttatggttcataacaaacagaaaggggagggcagaataaaaataaataaaagtttagttacattaccctagcactgacattggtacgggaatttttgctgcaataagaaagccacttcctctgacataaggtcacccatacttctgggtcttgccacatcctcttagacagttcatcgtagctgggctggctggggcggtcaggactccagacgctcacactaaaagaggggtggtagtcgagcagtcactccactcctctgtagggagctggccgcgagtgggtgcgcagcagggtgcgcgcggacccgtgcagcgcccagggcggctgtgcgaagccgccgcagcctgcgcgcccaggcgattctccaccttggggctcgccttcctgccgcgttcctcttccttccatccctaaagcgcgtacgccctgcagagtcaaacctggcgcatcctcaagcttccagggggcaacgtgaccgagccccgcatcacgtgtgcagagacggcctatagtgtctgaaggatgccacctagtcgcaggcccggcggcgccaccaacagcgaccgcggtagtccagctcgcgccgcgtcccggccccagcccggcccggcccagccccgccccgcgcccagccccgccccgccccgcgcccagcccagcccccgcggcccggcccccagcggccggcctcccgcggccccgcccccgccgccccagtccccgcccctcgcgccttcgtttattcctccgcgcgctgggacaggctgcttcttcgccagaaccaaccggttgcttgctgtcccagcggcgccccctcatcaccgtcgccatgcccggaggtctgcttctcggggacgtggctcccaactttgaggccaataccaccgtcggccgcatccgtttccacgactttctgggagactcgtaagtggcc

SEQ ID NO: 233 - DNA, 1300 bp, Homo sapiens
tctcggctcactgtaacctctgcctcctgcattcaagcgattctcctgcctcagcctccctagtagctgggattacaggtgcccgccaccgtgcctggctaatttttttatttctagtggggacggggtttcaccatgttgaccaggccctctctctcactatatatatatattatttgttgttgtttgtttgttttgttttgttttaagcctcgggtgattgtgatgatctgtcaggtttgggatctgttagatctctcaaatgcccccagccagccctggccctacaggtgtggccccaagaagatgggctggcacctgcctggaccctgtttttaaatatccattgtcgaggttgggctactctatgatcacatcttgagaccatccagagctccacacagagataagcaatgcttagaaaggaaacaaaactttgcccaagagccagaaacctatcttcaacaaccaattgtgctataaagtaacttagttcagttcactggaatattacttaatttcctctgctttttctttttaaacaagaaagtgttgactcagccaacagcactgggaaccagactccctggggcctgcctgcccctgctcttctcccaaattctcttctttttttgtccctgttgatggaattcaataaagggatctctaccatctgtcacttgtttttttttgttgtttgtttgtttgttttttttttttttggcagagtctcactctgtcgcccaggctgcagtgcagtggtgccatctcagctcactgcaacctccacctcccaggttcaagtgattctcctgcctcaccctcaggagtagctgggattacagttgcctgccaccatgcccggccaatttttgtgtttttagtagagacagggtttctccatgttggccaggctgatcttgaactcctgacctcaagggatccgcccacctcggtctcccagagtgctgtgatcacaggcatgagccaccacgcccagtgccagattatctttcttcactgtctaatttcattcctatgagtattagtttacttttcctttgttgggtcaaaagtgctgcttctgttcccaaccacagaattctctggaattgttttcagggccgtctcagtctcataaaaggggatcaggcaggaggagtttgggagaaacctgagaagggcctgatttgcagcatcatgatgggcctctccttggcctctgctgtgctcctggcctccctcctgagtctccaccttggaactgccacacgtacgtagctggcccattcccctcctg

SEQ ID NO: 234 - DNA, 1300 bp, Homo sapiens
gagaggataaagggagtggtaagaatttgaggagagaagagagtgaggctaaaataggaaatcaggaaaagcgattcggtccccctgtccctcacatggggccaccctcttgttgcccagtgtggcttcttcttgagggttctgcatggttcctcaatcccagggaattccgcaggacattccacccaagaccattgggctcccacctctactcttttgccagttaatgaataggcaggaatttcactgcctggaaagaggaacaatgctttctggtccttatttcacatctaaaatagagaggtcaattgatttattcctaaatatctttgaacactaaaatagaagttttacagcatatatactacctggttgctctagacttaagccagggaaaagtacagattcaacatttaaaattgagatagacgctttccacttaatgctaccagtcttgctttatttcatgagaatgagaatataataatatggcatacgttcatttgggggaaagattgatgtcttataacataatttataattacagaaaacatgtgagttcactgggaataaataaattttgaagataataagatactttcacttatgtcgtaatttctatgtcatttggtgtaggatgtagagatattaacgtttacacctaacttaagtttgtcatctaagacctgaaggggttttgtctatcagctgcacccctgggtagagacacaaccttggggaaggcctcagccccatccctcgtacagcaggaatgagaacagccctgcctgttgggaagcttgagggaggctatggacgtgcagcgcttggcagagggtctcgtcatggaaggttccagcaaatgtgagatacttttatgatttcattttctccaaaagaaagggaataagagaagaggggaggaaataagactaattgcgagagataaagtacaagggtgagggaaggaataaggagacatgacggcagcgtggagcagccgaggggggagattgctttcaccacttcccagcatctattgcagattccaccctcaaacatgttgtaaggactctttattcaaggtaatgtttgaaccctgctgagccagtggcatgggtctctgagagaatcattaacttaatttgactatctggtttgtggatgcgtttactctcatgtaagtcaacaacatcctgggattgggacccactttctgggcactgctggccagtcccaaaatggaacataaggaagtggttcttctacttcttttatttctgaaatcaggtaagacata

SEQ ID NO: 235 - DNA, 1300 bp, Homo sapiens
acggaagaagggtggcgaggcgggaaaggaaaaggcctgagggtccaaggcaggaggggacacacggaacacgccgagggccaaccacgccgccgcgcgctccccggctaggacccacctgctgcaggtactggttaatggtaatgtgcgccatgggagcgccgccgaacggagagcgccaccccctacgcctcaagcgggccagctggcgtcacttccggccctcggtccgtctgggtcctggcgcccccggccccgccgcgggtgcgcaggttggttccggagggagaacctggggaccggctcggcgacgcgctcgggctgagggggcccggggtctttctgccggggccccgtcctctcagccgggacgccagcggctctgattgtgtgttcgggcccgcccgggctgaggggtttggggtccagtggcgaggacagccccacggctaaactgcctttcactgcgctgacccttcgtctgccccttgtgaaaaccaggccgcggaggaccctccgcgcctggctgggccagggcctcggggcgcgcgcgcccgaggagggggagggggagggacatggcgcgcgctcccgagctctcataaggtgcctccgccgcgcgctcccgagcctgcaggagttagggcacgtcccggcgcgcacccctgagccctcgaggtggtctcacgcccggggtgggggtgccgagccctcaggaggcgcgcgccccggggccctcaggagggtgtcccggctcccgatcccctcaggaggggtgcccgcggcacgcatccccgagccaggagggggtgcccggagccctgggggcagggtctcggtgcgccccccggagccgggggtgagggtcccgatccctcaggacgggagtcccggcgcgcgccctcgagccaggagggggtgtccgaatctcttagggggagtccgatccctcaggagggattcccggcgcgcgttcctaagccctcaggagtagccgggcgcggcggcggttgggctcgggcacgcgggcggggcggggcggggcgcgcgaggaggacggggcggaggccgcgcggaccggggcgggcggagcggagctcggcgggcggcggcgctcggggcggggcgcggcggttccggcccagccatggcggacgaggccccgcggaagggcagcttctcggcgctcgtgggccgcaccaacggcctcaccaagcccgcggccctggccgccgcgcccgccaagccggggggcgcgggcggctccaagaagctggtcatcaagaacttccgaggtggg

SEQ ID NO: 236 - DNA, 1300 bp, Homo sapiens
gggtgtgtgcggggtgtgcgcggtagagcgcgccagcgagcccggagcgcggagctgggaggagcagcgagcgccgcgcagaacccgcagcgccggcctggcagggcagctcggaggtgggtgggccgcgccgccagcccgcttgcagggtccccattggccgcctgccggccgccctccgcccaaaaggcggcaaggagccgagaggctgcttcggagtgtgaggaggacagccggaccgagccaacgccggggactttgttccctccgcggaggggactcggcaactcgcagcggcagggtctggggccggcgcctgggagggatctgcgccccccactcactccctagctgtgttcccgccgccgccccggctagtctccggcgctggcgcctatggtcggcctccgacagcgctccggagggaccgggggagctcccaggcgcccgggtgagtagccaggcgcggctccccggtccccccgacccccggcgccagcttttgctttcccagccagggcgcggtggggtttgtccgggcagtgcctcgagcaactgggaaggccaaggcggagggaaacttggcttcggggagaagtgcgatcgcagccgggaggcttccccagccccgcgggccgggtgagaacaggtggcgccggcccgaccaggcgctttgtgtcggggcgcgaggatctggagcgaactgctgcgcctcggtgggccgctcccttccctcccttgctcccccgggcggccgcacgccgggtcggccgggtaacggagagggagtcgccaggaatgtggctctggggactgcctcgctcggggaaggggagagggtggccacggtgttaggagaggcgcgggagccgagaggtggcgcgggggtgccaccgttgccgcaggctggagagagattgctcccagtgaggcgcgtaccgtctgggcgagggcttcattcttccgcggcgtccctggaggtgggaaagctgggtgggcatgtgtgcagagaaaggggaggcggggaggccagtcacttccggagccggttctgatcccaacagaccgcccagcgtttggggacgccgacctcggggtgccgtggtgcccggccccacgcgcgcgcggggctgaggggtcgggggcgtccctggccgcccagctttaacaaagggtgctcctctccaccccgcgaggaggggcagctccggagacccggtcttcagcgagcggggtcttagcgccggggaggtctacttccttttggggttgccattttactattattattgcctttttt

SEQ ID NO: 237 - DNA, 1300 bp, Homo sapiens
gaggcggctgggcgggctggctcttgcgtacgctgggctggacctttttgtgtatggggtcgttgaggagcccgcttctacactctgagctatctccggtgacttacaaggattttttaaaaaatatatttatgaactagtgtgtagacttttggtgtgcatgtcgcgtgtggtgcattcgtagagtacaaataaacgatttggggcacggatcgtagaataaggacttgtgcagatgtttttcgtttaacctaaaggatacgtctttttttaaaagtcaaaaatgcccacgtagcggttttgtcgtcatttacaaattagattaaaattatttccccttctcagttgttcggaatctgctcttgaatgtaggacgggggtaaatttgcatttcttccggagttagttacacctctcccccgtttgccatgaaacccatgaaaagtgaaacacgactgtggtccaccgtccgaggtgagagactcagtgcaaaccttttggtgcctgatcgaatctgtgagcatcagcttatcgaagttgtgcaggcaccaacatcttcgccgttcagtatttccacaccgcgataaccctgcccatcttgcggccagcatcttatctcgggtgttacctggtgtcgcgttctaacagggaaccggacaccggggctggcccagagcccggcgggcggacgcgcaggccagggaccccctggtaccaggcgccctgcccggagtcagggaggccacgccgctgcgctccttggagcgtcgggggctgtgcgctcctgccgctcccccttctccctcctctccccacttcttcctcctctcctcccttctccccccttctccctcctctcccgggccagcgccgcgctttgttgtcgttgagactctcgggagggaggaggagcccagcggggacagcagcgggagcccgccgagtcccggcccacggcgcgcgcccggacacccacgcccgcagccccgcggagccgggccgcgcaggcgcgcgcgagctcacacacgcgcactcacacacgcacgcccgccgcgcgcccggcccgccgcccagcccgccgcccagccctccccctgggcggggacccgcccgccgtcagcctaggttgaggcgccctgcgtgtgtctataactttgtgctgctgccgcggccgccctgctcgtggaagggaggaggaggaatgtggaaggtggcggcgcgcgagctgacaggcggttcctcgggcgggctgcggcgacggcccgagcgcttctccttcgccgaggttgcgcgccccctc

SEQ ID NO: 238 - DNA, 1300 bp, Homo sapiens
tctgccttatcatctatgctctggtaaacaaaagtaacctgcttttttgtgacccctttcgtgggtatttttactcccctctgacaagaatgcattattttttctcctttatctgagtctttaagactcagcctacatgttccctcctccggatattgactctagatccgtgaatctgagttagtggttccttttagaggacctcacaaggagccaggcatctgtctatcactacgtgcccccaccctattgtaactaagcactgcattctcacctctctattcaggtggtccgcagagcccatgtctgattgatctctatgtctccagcagccagcaaggaagcacctctttagagacctgcacctatacaatacctaccaccttttatttctcgatatgtgaactccattgagaacaaacgagtaaatgtaggtaatgtgccttcttcttttcttttcttttctttttttttttagatggagtctcgctctgttgcccaggctggagtttagtggcacaatctcggctcactgtaacctccgcctcccaggttcaagcgattctgccgcctcagcctaccaagtagttgggattacaggtgcccaccaccacgcccagctaattttttttgtatttttagtagaggtggggtttcatgatgttggctaggatggttttcaactcctgacctcaagtgatccacccacctcggcctcccaaagtgctaggattacaggtgtgagccacagcgcccagccagtaatgtgccttcttaagttctgtgagccattctaacaaattatcagaacagaggaaggggttataaacatccccccacccccgatttatagccagtcagtcagaagtacaggtggccacctgggacttggattggtgtctgaagtgaggacagttttgggagagtgagccctttaacttgtgggatctgacactaactccaggtagacagcgtcggagctgaattgaattgtgagatacccagtggtgtccccagagaactggagaattgcttgatatggaaaagacccacacatttgatgccagaagtactgcataagtcgagaattgagtttgacttaatcatcatatttgggcttgattgcgtggctgaaactcttcccacttcagtaattgtttctttcattttcatgaaactctgaagaaggaagggctggacattcagattccttgacccttgacatttggaagcatgaactccagtctctcacagaaggctagaggtgaaggaacattcagacacattggtttctaagaag

SEQ ID NO: 239 - DNA, 1300 bp, Homo sapiens
agagagagatgggattggagagacagagagatagatgggactggagagacagagagaggggttctgtggctctggaagcctagagaacagagcctgaagacagagaggaaagggagtaaaggggaggcatttatgcagagatctcagaagtgaatatgaaaggcacccctagcagaacgcacagcttgggcaaggaggcttgctggcatgaaaacgcaagaagtgctcaggcagctgtaattctccaggacatcagataaaaggtaaaaaacagatgggagacgcgcctagacagggtattgaataccagcccgaggggcttgggtttcatccaaacagcaaggcaactgagctcaacacagtgagactcggtctccacaaacatttttttaaaaattggccgggcctagcggcgcgcgccgatagtcccagctatttctgcaggctgaggcgagaggatcatttgagctcggggaggtccaggcggcagtgagccaagatcctgccactgcactacagtctgggcaacagagcgagaccctgtctttaaaaaagtaaaaaaaaaaaaaaaaaaaaaagaaagaaaaagaaaaaagagagaagggcaagtcgctcccttctctgggccttggcataaatcaagcacaaatcaaagtctcactccctcctcctgccgcgcaacggcgcggagagccagccagccagccagcggaaccacggcctggtaacccaaaacctgcacaccctccagctccccacaggacgtcacgtattaccaccgacgcacgcgcagaagccttcccggggactcaagaaagggcaggcttagcctcctccccatgtcgcccctcattggctagaaactactgctcgtctcggtcgttgttagcagcgaccagggcgggtacaatcttggtcgctaggacacggctaacttccgctttcttccccctctcctaggctcaaactagtcaaatcttgttcactcgaccaatggcaaatcggaagtgggcgggacttcacaagtccggaccaaagaaacgcgagcttagccctgggtagcgcggccaatggccgtggagcagcccctgtaaactggctcgggcgcccccacgcccgcccttccttcttctcccagcattgccccccccacgtttcagcacagcgctggccgcagtctgacaggaaagggacggagccaagatggcggcggccgacggcgacgactcgctgtaccccatcgcggtgctcatagacgaactccgcaatgaggacgttcaggtccggaggctacggggga

SEQ ID NO: 240 - DNA, 1300 bp, Homo sapiens
cccttcccacctctgcttctcactccttcacattagtctgtttcatttccttcattgcacttattatcatctgaaattatgtgttggtttacttattttctctcacacttgattttttttttttagaccgagatttgctctgtcgcccatgctggagtgcaatggcacaacttcacctcactgaaacctccgccttccgggttcaagctattctcctgcctcagcctcctgagtagctgggactacaggcgcccgccaccacgcttggctaatttttttgtatttttagtagagatggggtttcaccatgttggccagcaactgtgcctggcctcacacttgatttttaatctccatgagagcaagcactaggtcttgcctgggcctttatcaatagcagtgagcatagcacctggcacagaggtagttctgaacattaattattgaatgaaataaaataatgaatgtaggctgggcgcggtggctcacgcctgtaatcccagcactttgggaggccgaggcaggcggatcatgaggtcaagagatcaagatcatcctggcctacatggtggaaccccgtctctactaaaatacaaaaattagctgggcatggtggcactcgcctgttgtctcagctactggggaggctgaggtaggagaatcacttgaacccaggaggaggaggttccagtgagccgagatcatgctgctgcactccagcctggcgacagagcaagcctctgtctcaaaaataaataaataaataaattttaaaaataatgaacgcaggcccaagaagagttgtgggaaatggggtgatatttttgcatagacttctaaggctaagaaggaaaacaaacagacgtggtgggcacaaatctacccccaccccaactgggtcccaactctaggctctctggcctggcaccaccactgaaaggccccgttccccaaacctcagggtattcttagtccctcctgttcccagcgctgccaatcccccgcccacccccactttagttgcgtgttccagcctctccgccccgcccctccccgccctgaaacggacgtgctttttagaggagtccactgggcttggagtcagtggcaataaccaggggcaataaccaggcgtgtcccaggggggagccccgctctgcagccctgtgcgccgtagagagctggacttaggctggcagcatggccgagttcagggtcagggtgtccaccggagaagccttcggggctggcacatgggacaaagtgtctgtcagcatcgtggggacccggggagagagcc

SEQ ID NO: 241 - DNA, 1400 bp, Homo sapiens
aaaccaagctgttcaccccttgggcacgtgttctcaggacttcctgaggctgtgtcacgggcacgcgtcctcaaccttgtcaagataaactttatacattaactgagacttgtctcaaactttcggagttcacaaaactatgtacccgttacactttctaaaaccaacagtcagtgtgggagaactgctgatactcgaatacatcaaatagttataaaaccgccaaaaaccgttttctctcaaacttttggtaaaatgtgcttcagggaaaacgcagattggtggttctgataaaatcttaataatgaaataattttaaaaagcaataatggtaaaaataaatcccatttattatctggtatgtccccggcattgtgctaacacagatagctctactacccatgtcacagcaactgaaacagataatatgctcctttttcaggtaaagagacggaggctcagagaggttaaacagctcactcaaaggcacagagccagtacatggcagtacatctcttctcccggggccgccgtcgcggtgatactatttagggccacacgtcccagtgttcagctttcgtatttacgtactactgtttggcaagcggggactcctgaagctctctgaccctggaaaatgcgtggcttgcgtcacagaggagcgtttctggaacgcgctcgcagcacgacaccgcggtgtgtgcaagcggaacgccgccctgtccttgagccttttggctgagattgggagggcagaggaagcaggaaggtgggatttgtttcaaaagggtgcgggaaggggacgctccataccgcctcgcctcttagtgtccccagtcccatcacccgacgtgtacggggacggccgacacgctcaccccacacctcgccggctggggcgggatctgggcggcggctgcggcctggcgcgcgctccgcatctccttcctcgggaggctgggcgggactccggcgagggggcgggccccgcaagcgcccgccccttttctctccccgcctccttcccgctccgcgtcccgcccagcggcgcagggggccgggctccggctaggagggtgggggccgcgccggtgacagccgatccccgcccctgctgcccgccacgtccctcacgtaccactcggcagaggcgcggggaaacctggcgtactggctgtggcttctctagcgggactcggcatgaggctggcgcggctgcttcgcggagccgccttggccggcccgggcccggggctgcgcgccgccggcttcagccgcagcttcagctcggactcgggctccagcccggcgtccgagcgcggcgttccgggccaggtggacttctacgcgcgcttctcgccgtccccgctctccatgaagcagttcctggacttcggtga

SEQ ID NO: 242 - DNA, 1400 bp, Homo sapiens
ggggtgatgagagatgcggacccaggaggggttcaaggggctgtcctggacgcatgacagggaagcatagcttcttaaaggactcggcagtgcaccatgagaagacacgcaccagggagcagagagaaacgccagaaccctctcgaagaaggagggatgtgaggaggtcaggatagtcacctgtgctgagccatcatggagagtgagggcctgtaagggtggacacagtatgcaggagggacaaatcttcctcaccggacaggtggggatccctgcggtgcactaggggaatgcacacagggggcactatgacctggcggcccacggggcacggggacgcaccaggtagccttgggatctgcaagtccctcccggaccctggggagtgccatgacggcttccagcagcagtcactgtcctgggcgcgtcccgcgctctagcccaggtgggtcccacaacggtgtgaccaaggacgtcctatgaccaccccttgacaggtaaggaaactgaggcaggagaggcgaagcaactcgcccaaggaatgggctgtgccggtagcttctccaaggcctggtgcgccctggcctgtgcgcgtgatcccgggcggggtctcagtacgaacaggggcttcgcgatgtggccagcgcgggcttatctccgtgccgtgacgacaaggctagaagcctgggcggccgcggtggatcctcgtggcgaggcggggagggcgccgggcctcactggcccgctcgaaccagggctgcgcagggcagagcccaagggagagggccgcgcggccgccgtaacgtcggagacgacgcctggcaggcgccagcaaacgcagaagacccgcgagggcgaggcagggagggcgcgacgcgacaacgaccacgtgccccgcccgcccaggcgcgcggcctgccgggagacgcagtccaaacctttcgggagcaggactaggggtcccagagagcctcgcggcgcgcatgcgagccccggccccctctcgcgcagcctgccgggacttgtagtccaacgccagcaggcttccgggcccggagtgggcggtgggactcggggtcccagagagccgtgcgcgggccgcgacgccgagcaccgccctcgccgtcgcctccgggctttctccggtcgctgccgccaccaccgttgcttcgcgggctgggaggcccggggtccccgggcgaacagaggctgcgggtgggagccttcgcgggcgctgcagagcgggccgggggaggccgggatggagccccgcggaggtgggcgcgctgccgggcggggcgcttgcggcgattggggagggggcagagggaggggcccggggcggggctcggtggcggggacaccggggcgggggcaccgggaggaagctgccttggaag

SEQ ID NO: 243 - DNA, 1400 bp, Homo sapiens
ataaaaaaaaacccaacaatatgatcactgagcactctaatggtaagcagaaattaagaccagctggttgttaactttagccaagacaaaaatccctattcagctacttacctaggggtgcgtctcaggctgaaaacggctgtctaccatcccagaagtaggaaaaaaacccctcatcttccctgttggaagtgagctcaaactccataaaagagttacctgccttccctcgtcatggaagcaggaaaacttgccttccttgttggaagcaagtaaaactccaaaataataataataataataataataataataataatagagggagttgtacaacaaaatgaactttagatctcgaccaaattttgggagatcagggattctctggagggggtgctcctagaccttagcaaattgtcctgttggtttgagccatggagttagctcatgttggtaccaagcatggataggagatttgtcaaagatcagaggtatctccactcacaatccctccgtggttaccatccttcattcagtaaatatttacggactgattaccatacactaggcactattccagacattggagatacaatgatgagcataaaaaacggtctagataagaactgaggtctccagacatactttatgcccactcagttttgtcttttgccctagttgctaaacaaaacttaactttgctgtgcggtgcgacttcgttaacttaaaattacaggctgtcagctatgaccgctagactctaagaaagtccagtggaaatccttcaatgaaaagaatctgttcttgggtggaagccccgctcatgcaggaggaacagagggcttccattctcgcgtcacacaactgagggtcaaccccttgctccctgcagtaagcctgattagtgggcggagcttccttcaggatcgcaagaaagaaaggaggaaggggaccccgcctcctacgtgctcgcgggggggggcggggtcggtggactgggcgtgagttaattggctggggggcggggcaccacgggttggctccgcccaggcgctcgcgcggatcccgggtggaatgacgggagggagtcccggcagctcctacctcccagcgatggcgtcgctgtgccgcgcccagtccccagcctgccggccggtactcaccgctacccggagttcgctcagacggtgagatttggggcgggtccgaggcagcggcgggacgctacctgcgaccgggaccatgaggagctgccagacccgtggggccggtaacgagagcagtcgcggcacctgctgagaggaaagagggagcggtccggcgcggctggggcgcggcagaggcttgcccgatcctcggccatgtcactgctctgcgtgcgcggtgagtgcgcggactga

SEQ ID NO: 244 - DNA, 1300 bp, Homo sapiens
ctcagtgggtttagtctcctctcctggaacggaggctggcaccaggccctagaccagctcctgaagcctggagcccgctggttaggccgagggctgcagtacaccggttgtcacgggccctgggcacatcagcctttgtgggctcttcctccatatattaaatgttatgactgtcttggtttgaagacaaatataatccaggtgggatggtactggtttttctcctacttttataagaaagtaacacattctgttggggttaaaagtagtatggctgctaggcaccacctccacttcgtgctggatgagttggcccaggtgaagccctttatgttgcctgggtttaaattctagctcatcacttatgcatgtgcctcagtttccctcctctgtaagatggggatgactgcagcacccacgtgatggggctgtggtcctgcttgaaaggggcttggcacagcgcctggtgcatagcaagtacttggtgagggctggctgcctggttgcgtgtgagttttccatcctcctgtgcgggaggcaagagggacaccttctatcctcataatacaggcaggaaaactgaggttccaagcaagggaaaggacctgcccacggccgcctaatacgcagtggaaccaggactccaaggccacagacccagcgactcccaggccctgaacggtgacggaggtgcagggtcagtgatcccagtcacagaccagagcaggagggtcggggaggggaagcgccaggccaggccagggcctcctgcctccggttctgcccgggtggaaactctgaaacaggacggacttggccctgggcacctccaggctgtgagaactgaggtttttcagtctctctgagtctcagtcaagtggagatgaggaaaagataccaagaatgacaagcacctggcacagcccgcgcctcacagcgtggtcaatggatgattttttggaaagggtgggtgatgggaagggtgtgagtagaaagagccacgagattgcccgccatcccccacactgcctggaagcagagcccacaggccccagctggcccctccccggggacttggccaaagtgtcagacctggaagaatcgttgcatcactgggcactcacgggttaatgacagggagtggacaggacctgggtatttaactaattaggaggctccctgagatcagaggtggccctgctgctttcttctgctgccttttatgctccttgtgcacctcccttccccccaacctgggatgaaatctccccacgtgctggtgttcctttgcctcctgggt

SEQ ID NO: 245 - DNA, 1300 bp, Homo sapiens
agtgcccagcccctgggggaataagttctgagaggacacaggaaaactggggattgaaaagcaggttttcacaagagtggaggcagctggctctgtgggttcccagactaaggggatctgtgcttgacagaccagaggccagttctgtgaccatcatctcagccttgaatttttttttttttttttttgagacaaagtctcactctgtcgcccatgctggagtgtagtggtgtgaactcaggtcactccaacctctgcctcctgggttcaagcgattcttgtgcctcagcctcccgagtagctgggactacaggcgcccaccaccaccacgcccggctaagttttctatttttagtagagatggagtttcgccacgttggccaggctggtctggaactcctgacctcaagtgatccaccagcctcggcctcccaaagtgctggcattacaggcgtgagccactgcacccggcctagccttgtgatattaacagtaactgtcatttgcggtgtgcctactctgtgtcacactccttgcagttattccatttagggtagagcaacattattctagtttacagatgagaaaactaaggccccagagattgatttgcccaagcagccagctggcagtggaagtgccagtttcttcgtgtgtaaaacaagagaaggcaatctactgcctactggcttgtcaagggtcacttgagatcggacgacaggaaccacaaagaagtgaggccgggaatttgcggatccacagtaaagcaagtttgtctttttccagacgtgcattaagattcctttttcaagtgttctaaagcgcaggcgcaggctgttttgcggttgcctcccggcgcctcttgtgcaggccggggtcgccctctgccgacccagggcgggagcgcgctgagtgaacgtttccaggcctgagggcgggcggagatttttctcgcctgtagagggcgcagatcggcgtgcagagtaacccactctagttgtcccttccttaagcacttcctgtttgatctctatgatccatcctgttgggacttgattcgttcctcaaattttcaatttaccgtaaacaaaggggacgcgcgctgacccggaagtgaaagctggaacccggccggagtagctctgagcgccggctgtgaggaaggaggttctgggcaagctatagccatggctgtggctgtagccatggcgggagccttaatcgggtcggagccaggccccgcggaagaacttgccaaactcgagtacctgtctttggtgtcaaaggtttgcactgagct

SEQ ID NO: 246 - DNA, 1300 bp, Homo sapiens
ggggatgtctgggagaacagcattgcagacagggccctgaggcaaggccctgagttaggagcaaggagcacagcctggcagactggggggcaggtgaggaaagggcaggaggagttggggtcagagagggagttggggccattctaggggtggccttgtaggcattgtaaggatctgggttttcactggtggtgaggtggggacgccatggacagcatgagaaatggtctggtccggcgtggagaatgcactccaccgggagggcgtcagggggagcctggctaggaagctggtgggaggctgggaatccaggtcccggactcagctcttcttttgcattgacttggcccttggcccgccccaaacttgaggtttgaactgttgaggtcagaacctaccatgaactccagcctggaggaaagatttctaggaaggccttgaagttcagttataacctgagtgatggtctcattagcattataaaagttccaggatggggttctgcagcactgggcccgggcagtggtccagatgctgacgagtggtgtagcgtcgggcaagtcttctcacctactgagcagactcagttacttcatctgtaaaatgggactaaacgtcccggttgcctcagcatcaaatgagatcgttcgaaagcaccttttaaacatcattaccgattacaaaaagcaaatgggaagtcggagccgacctcagagggctgacttggcacagcacttcaaatttctcgttttacaaagcacgaggcgcgagtttgtctcgctgtcaggacctgcttccctctcacctagcacccgccccgggcccgagagccgcggtgcggccgtgcgtacaggagggagggaggcggtgtggggtcccgggcagagctgctgagagccccggccccgcatctgactcgcgctctctcggcgggactccgggccagggcccccaggccggcgcgcagggcggggagcggctgcgggcgggaggacgggcggggcggcgggcggctacgcggcctgggcggagccgcccccgccctggccctcgcggttgccctgcccccgccagccccaggctccccgggcccgcgccgcgccgctctttctccgacagccgccgggggtgccctgcaagctgttccgcgcgtcctgcccgtctgtccccgcgggtcgtcgcccgccacagccgcgccatgaccacccagcagatagacctccagggcccggggccgtggggcttccgcctcgtgggcggcaaggacttcgagcagcctctcgccatttcccgggtaaga

SEQ ID NO: 247 - DNA, 1300 bp, Homo sapiens
tccctccccacagacgcccgctctgtgctgaggcctgtgccctcccgcagacaccagctccgagtctcctgaccactacctggtggaccacaccctcgacggtcgcgtcctcttccccgccactggctacctgagcatagtgtggaagacgctggcccgcgccctgggcctgggcgtcgagcagctgcctgtggtgtttgaggatgtggtgctgcaccaggccaccatcctgcccaagactggtgaggggtaccccaggaccaaggcgggggtagctggggggcgggtgctgccctctgatctccaactctcccgctctgcagggacagtgtccctggaggtacggctcctggaggcctcccgtgccttcgaggtgtcagagaacggcaacctggtagtgagtggtaagcagggccggtggcacgggagctgcggaggctgtgcccgctggccatgccgcccgtcctcaggcccttccgcacctccctttccacagggaaggtgtaccagtgggatgaccctgaccccaggctcttcgaccacccggaaagccccacccccaaccccacggagcccctcttcctggcccaggctgaagtttacaaggagctgcgtctgcgtggctacgactacggccctcatttccagggcatcctggaggccagcctggaaggtgggtactgactacactgctgcccaagccaccggggagggcggtcgtcattgtggggaccacagagggcacccacagctaggcatgcagcttgggagggagcagaggggcccggtgggctctgggaggtggccccagggacctgggagttccacagcaccaaccaggccctgtgtgcaggtgactcggggaggctgctgtggaaggataactgggtgagcttcatggacaccatgctgcagatgtccatcctgggctcggccaagcacggcctgtacctgcccacccgtgtcaccgccatccacatcgaccctgccacccacaggcagaagctgtacacactgcaggacaaggcccaaggtagccccgccccagccccagcccagtgcccccacccaagtatgccgcactcacccagcctgtccccacagtggctgacgtggtggtgagcaggtggctgagggtcacagtggccggaggcgtccacatctccgggctccacactgagtcggccccgcggcggcagcaggagcagcaggtgcccatcctggagaagttttgcttcactccccacacggaggaggggtgcctgtctgagcgcgctgccctgcaggaggagctgcaact

SEQ ID NO: 248 - DNA, 1300 bp, Homo sapiens
tgctgaattgactcacagttcttaggtcctatagaggagtgcagtgaaaaggaagacaatttacacagtacagagctgaacataggacttacaaacaaaaaaaaagtcaaggaatacaaagtagctttcccaggtgtaaagtaccgggtctagaattctatgaggctagggagaagataaacgacaaaagctataagagatcagaatgaaaagagatccacaagcctaagaagcccaggcccttgaggagaaccatgaatttgagcaggatttcactaattcctttaaaaagtagccattgcctcaaagtacgactccatcagcataggcaggaaagtgggagtgaggaaaggcttagagttttccagcctggctggggtcagacaatttgcctggggaaatagtgggagctgaggttgaaaagaccgattggcttcacgtttgtggcaggccttgtccaaaaagcaataggaagtcgttgaaaggttttgtgcaggggagcgacaggattaaggcactacttagtaggaagtcatatcaaaagcagcaacctgacaaatggcaaatacgacagaaggaaaaaaaataacaggaattttcttcacaatgactcgactttgaggtaataaatgcctgagccacattggaagcaggggtctcagaaggaaggcgcagatgggaaaggcttttctgggcggtggcgtttcaatgcaaggagggcgcttgaatcactgacagacttcaagttaagggagttttcgtggctgaggttagtaagtcacacgcacagctctccaaaggcatgtatggggaacgccagccttggctaaaagactgattcaagttatgtccgtcaccctgagcaaccaaaaccacccactacagggcaggtgaccccacaaagcaaaccaagccatctggtccacgctccccacctcccggagggagatggaaaagtttcgggagtagtccccggccaatcggaaagacattttttcattcctcaaccactactctcaggtgctccagggagggaggatgacttcctgacggtcctcctgccgctcctccctcgggccaattatgaaactctgggcactcttgacctcaccccgttagggcccgggaggggctccctagtataaagttcgcagcaccagacagttgagctcacttgcctgatatttccagtgtcagagggacacagccaacgtggggtcccttctaggctgacagccgctctccagccactgccgcgagcccgtctgctcccgccctgcccgtgcactctccgcagccg

SEQ ID NO: 249 - DNA, 1400 bp, Homo sapiens
gctggtggatacttgaggccaggagttggagaccagcctggacaacatggtgaaaccccatctttactaaaaatacaaaaattaggccaggcacagtggctcacacctgtaatcccagcactttgggaagctgtggcgggcagatcacctgaggtcaggagttcgagaccagcctgaccaacatggtgaaaccccgtctctactaaaaatacaaaaattagccaggcgtggtggtgcatgcctgtaatcccagctactcaggaggctgagacaggataatcgcttgaacccaggaggcagaagttgcagtgagccaagatcacgccactgcactccaacctgggcaacagagtcagactcagtctcaaaaaaaaaaaaaaaaagaaaagaaaagaaaaaagaaaaacaaaattagctgggtgtggtggtgcacgtctgtaatcccagctactcggtaggctgaggcaggaggatcgcagaggttgcaatgaactgagattgcgccactgcactccagcctgggcgacagagtgagactctgtgaaaaaaaaaagaaaaaaaagaaaaaagaaaaagaaaaaaggaaggaagggagggaggaaagaaaatttccctgggggtaggagtctataagtttagcaaaatagtcgatctttcagtgtttccagcaacaacctaatcaagtttatcagtgtctgagaatgttcaaggtaccatcttgggttcaaacatgtaggcgaaaacatgcagctggccaggttacagagtggtgaaggcactctgcatttcttggttgagacagagaaaaaaagtggtcagaactgggtaaccctccccccaccatattatcacagtgatcccttttgtctttcttcaggctccagccccaccctacagcccctgctccctggattcactagagctaacttcagtaaagtacaaagaaaatggggccatatgactggccaaaaaaaaaatatctattcacgtggatgaccagatagtatgaatggattgaaaatttatcaggaaaaaaggatgagaggaaatgccaggagatgagggcagagagcaggccgttctgggggagggattctgtggggacagggtggcctactgggtgtgccccttttctcttctctgtctcccttagataagaccagcagttttgtcatcctctccctctcattccatggtcccgcagccccaggcccacactgaaagcatgtcgatccaggagaacatatcatccctgcagcttcggtcatgggtctctaagtcccaaagagacttagcaaagtccatcctgattggggctccaggaggtaagaaggggagacagaagccatggaacataggaggaaaatgagggtgaaaactaggagccagggtggagggca

SEQ ID NO: 250 - DNA, 1300 bp, Homo sapiens
tggcagcagaaggttcgctccgagcggagctccagaagctcctgacaagagaaagacagattgagatagagatagaaagagaaagagagaaagagacagcagagcgagagcgcaagtgaaagaggcaggggagggggatggagaatattagcctgacggtctagggagtcatccaggaacaaactgaggggctgcccggctgcagacaggaggagacagagaggatctattttagggtggcaagtgcctacctaccctaagcgagcaattccacgttggggagaagccagcagaggttgggaaagggtgggagtccaagggagcccctgcgcaaccccctcaggaataaaactccccagccagggtgtcgcaagggctgccgttgtgatccgcagggggtgaacgcaaccgcgacggctgatcgtctgtggctgggttggcgtttggagcaagagaaggaggagcaggagaaggagggagctggaggctggaagcgtttgcaagcggcggcggcagcaacgtggagtaaccaagcgggtcagcgcgcgcccgccagggtgtaggccacggagcgcagctcccagagcaggatccgcgccgcctcagcagcctctgcggcccctgcggcacccgaccgagtaccgagcgccctgcgaagcgcaccctcctccccgcggtgcgctgggctcgcccccagcgcgcgcacacgcacacacacacacacacacacacacgcacgcacacacgtgtgcgcttctctgctccggagctgctgctgctcctgctctcagcgccgcagtggaaggcaggaccgaaccgctccttctttaaatatataaatttcagcccaggtcagcctcggcggcccccctcaccgcgctcccggcgcccctcccgtcagttcgccagctgccagccccgggaccttttcatctcttcccttttggccggaggagccgagttcagatccgccactccgcacccgagactgacacactgaactccacttcctcctcttaaatttatttctacttaatagccactcgtctctttttttccccatctcattgctccaagaatttttttcttcttactcgccaaagtcagggttccctctgcccgtcccgtattaatatttccacttttggaactactggccttttctttttaaaggaattcaagcaggatacgtttttctgttgggcattgactagattgtttgcaaaagtttcgcatcaaaaacaacaacaacaaaaaaccaaacaactctccttgatctatactttgagaattgttgatt

SEQ ID NO: 251 - DNA, 1300 bp, Homo sapiens
tagcaatttatccatgtctcccctgtagtgcttaatgcatgttgcattacggttatttgtcccaaatggagctcctcaaaggcacggactatatatattcatctttatgccctcggcacctagtgggtgcttaatgcaccgaaggttctctggaaatgtttgctgacctgaagtttggtgatcttatgtcctgcttaggcgcagcgttggagaggttggcgctgcaatgccgtcaataacccccgatgaccattagagggcacactgattccacagcagtctgcaccgggggcccagctgtcaagtgctccaaaacccactccccaatttacgcctccagtggtcatctcccacagccttcattttaacaaccctcaacacaaaacagtcattttcttggggcgtccctgaggtgtgaacctcctccctcccagacacccacccactctccccatcttcctacaatttgggcgctaaagatttaattcctctctgacaccagatcattttttcacagctaatctgcacagtctggaaggtggcagggagggaaagagagggagatcatagaaggaatgggtaacaagcactctgggctcaccttcaactttaacggactttccagaaacccgtcaccttccaccccacacccaaacacacacatccacgcactcactcagtttcctgccaggatcccaaaccagcacacctttccctcttcccccgaggagaccaggtaggaggcgagggaaaaggtggggcgcaagtgggccccggttgcttccacacacaccctccgttcagccgtcctttccatcccggcgagggcgcaccttcagagggtcctgtcctccaaagaggtaggcgtggggcggccgagaccggggaagatggtccacggggaagcgcgcgggctgggcggcggggaggaaggagttaaagatcctggattggctcttctgtcactgagtctgggaggggaagcggctgggagggagggttcggagcttggctcgggtcctccacggttccctccggatagccggagacttgggccggccggacgccccttctggcacactccctggggcaggcgctcacgcacgctacaaacacacactcctctttcctccctcgcgcgccctctctcatccttcttcacgaagcgctcactcgcaccctttctctctctctctctctctctctaacacgcacgcacactcccagttgttcacactcgggtcctctccagcccgacgttctcctggcacccacctgctccgcggcgccctgcgcgccc

SEQ ID NO: 252 - DNA, 1300 bp, Homo sapiens
agcctgggcaacagagcaagactctgtctcaaaaaaaagactcttgtgattccatgggtcctgcccagataaccaggataatgtccccatctgaagtgccttcatttggtcacatatgctaagtctcttttgctatgtagggtgaaatgtcacaggttctggccattaggacatgaatatctttggggaccatcatcctgcctaccgcaaagtccctctcatgccactcttgtgactgagagaacagaaaaaaaatagcagacctacgtgaggtccttaataattctccctgaggctgggctcagtggctcatgcctgtaatcccagcactttggaaggctgaggtgggcggatcgtttgagctcaggagttcaaggccagcctgggcaacataagaagaccttgtctctaccaaaactacaaaaacttagctgggcatggtggcgcatgtctgtggtcccagctacttgagaggctgaggtgggagaatcgctggaacctgggaggcggaggttgcagtgagctgagatcacgccagtgaactctagcctgggtggcagagtgagactctgactcaaagaaaaaaaaaaaaaaaaaagccagggacggtggctcacacctgtaatcctagcactttggaaggctgaggcgggtggatcacctgaggtcaggagttcgagaccagcctgaccaacatggtgaaaccctgtctcttctaaaaccacaaaaattagctgggtgtggtgtccggcgcctgtaatcccagctactcaagggaagctgaggtgggagaatcgcttgaacctgggaggcagaggttgcggtgagccaagatcgcagagccagggccacagagtaagactctgtctcaaaaaaaaaaaaattctccctggaagaggcgcagtcgcagttttgataatacactctaccacacacactagtgaaatgaggaaaacaagaggaaagcggaaagagagtgactgttttgtcaagagatccaggaagagacagcagaagtgaaaatctttttcatcagccaagtggctcctcggatttcttaatctccccccgaacttcctcttctccacccagaacagccattggtgagtggggcagggcaggagggaactgaagagtgagaaagcattatttcagcaaaaggtctttcctcccttgctctctcctccaaccactggctcagcctctccgcccgctgcctgtgaatgatgcaatggaaggtgtgctggggtcgccctgtgtcccgtgcataggagcatctcagcctccaggtcctctcctt

SEQ ID NO: 253 - DNA, 1300 bp, Homo sapiens
ggactccctttgctccatgtgactctgagggcctcacaggtatttgcagcccaggtgctgtcggagcccagccgatgcgaccgacacacagcacaagcgtcatcctgttctgcctgtcccttgcgtgtggaggggactcgtgcccagggctctccttgctggcttgttggaatctggcttcaggtctacacggggcctctcgtttggtccagaacagcctggctcatcggctggggcttgcttgtgcagggctggagcgagcacgtgctagatggagacagcagactcggagtgtgcatttcttcgtgttgcaagcctggcctcacagtgccttcttcctttggttgtctgccaggggtagccctgcaccaggaggaagcttagaaatagcacaggtgggaaccggagagagagcactgttggggaagctgcggtcactcatcagccttcctggtgagaaaccaggggtttcctgctaattctggaaaggatgtttcagcagtgcctgcatgagacgcctcagatagaaaactggttatttttgtttcttagcactgccaccatagataacagctgtcacgatggacagtgtggacctggattagtccttcttgggaaaggagagtttgggttttgtaccgtggtggttctgggttctgggggaagagaatggaaccgtacgaggtaaaacaggagactctgaaggccacttggccatccaggcagaaagccagggatggagaggggcagcagggctgtgttcagtgctcccgccgtacgcttgtatgcgggaaaccactgcaggcggcccatgaagcctcctggccatgtgcgccctcccggtttggaccccctcccgtgtgtcttggctgcaggtttgaactgatgcgcatgtgctggcagtataaccccaagatgaggccttccttcctggagatcatcagcagcatcaaagaggagatggagcctggcttccgggaggtctccttctactacagcgaggagaacaagctgcccgagccggaggagctggacctggagccagagaacatggagagcgtccccctggacccctcggcctcctcgtcctccctgccactgcccgacagacactcaggacacaaggccgagaacggccccggccctggggtgctggtcctccgcgccagcttcgacgagagacagccttacgcccacatgaacgggggccgcaagaacgagcgggccttgccgctgccccagtcttcgacctgctgatccttggatcctgaatctgtgcaaacagtaacgtgtgcgcacg

SEQ ID NO: 254 - DNA, 1300 bp, Homo sapiens
cataccaccccgccacccccaccctcccccccacacacacgtttcttgcaacaagaaatttcccaagagtcaacaataacagattaaacccaccacttgctgtcctggaaagaaacaaaccaaaccaaaacaaatcctttgaacatttctctgaagtgcaggagagacacacttcagcaaaagtccaagggggaaaaagaaaattgcaccaaaggaaaaaaaaaaaaaaaaagtgggggctgggattgttacatatggccaaaaatttaagcttctttcaatagtattagtattgaaataatacatctttaaaacgcttgagggattagatagggaaagaaaaggcacgtacaaaaaaatccaaccgatgccgatcctgtgatttacgtaacaccacaaacttgcaaaaggcaaaaaatcagaagcaaaaatccataaaccatcaaaatacagaaaccaaaaatcccaagccaccacaccagaaagaaaaaaacccagaacaacagcaaaaacccctgtcctaaataaaaataaagcaaatgaacccaccgaaaactgcttggcaaatatttttctcgtggtgcctaatattctagttggaaagagctgtgatgtttattttattttatttttctcttactcgcctctctaaccctactatatatataacatacttttcccagtggttcaaacctctcgctcccttttgtgcatttagctcgatctgctgagtttatgggtaagaaagaaggaattagccccagaccccgggaaagcaaagcgcactccccctcttatgtcaccgaatagcaaattagttctcagaattccagaggccgagctttgctacagcgaaggcgccgacgtcacagaggaggagcccacgtgatggtggcggagcaggccataccatcgtcttgggcccggggagggagagccaccttcaggcccctcgagcctcgaaccggaacctccaaatccgagacgctctgcttatgaggacctcgaaatatgccggccagtgaaaaaatcttgtggctttgagggcttttggttggccaggggcagtaaaaatctcggagagctgacaccaagtcctcccctgccacgtagcagtggtaaagtccgaagctcaaattccgagaattgagctctgttgattcttagaactggggttcttagaagtggtgatgcaagaagtttctaggaaaggccggacaccaggtgattattgctgttgctgccgccgctgctgctgctactgccgccgccgccgctgttgccgctggtgccgctgccg

SEQ ID NO: 255 - DNA, 1300 bp, Homo sapiens
tggtttaaggcgcatcctgtttcttccaaaagggaatggacaaaactcaacattcacggagggcttagagcaaattagaaccgtatactgtgacctcctggaagggagaggctcacctcctacaaagtaaatgctcaataaatatttttgatataactctggaagagctccatttggggtcgggggtgcacctactccagggcaccaccccctccaaaatagctgcattcccacagccctcatactccgctcagaaaagggaccggcgagcttgcaggcatccgcacagcggataaaagcaaagcgggacggcgcaccaaccgcattccggatcctaaggttaaaagaaaaccccttgccctcgggccagggctcacctgtctcgggagtggggaagaagcgcgactcccggccgctttggagtaggcgtcccagcaaaactctcgcctcatcaccagacactaccccgggcagaaggttcctaggctaggtcctcggacccgagagggagcgacacgctcgcttggtctcttgggtctccaggacgccgccgccgccgccacagtttcctcaggtgctacaaagcagccagggtgtgcgtgcgctcccgcctcgtcgcttagcaacctgagaagctgtccggtcgtcccaacttatcaattcccccgcccctccagagtgtcaatcgttttttaaaagattttgtttccgggtcgatccagctttacgcagcggaaggtctctttacctcccacgtttaccctcatgggaggatgcagtctcagtcacgcgcgtgggggtgatgtcgctaaggggtgattctcccctccctagagttacacacgctatctctcccgccaattgccgggctccatcaggcaggtcctttcctcctgagcccaaaccatccgtttgttgtcgtcctccaatcacaggggctcatcctcagggactactttgcaatcggcgcagagcgcagtgagaagagcttgaaaaaaacctctggtatcgggaagtgtagttcaacacttgaaggaaatgctttggagattgcgccacaaccagggcagcgtaaactacagttcccagagagcgccgcgtcgggagcggagccttttctcgctaacaccgctcgccctctccgagtcagttccgcggtagaggtgacctgactctctgaggctcattttgcagttgttgaaattgtccccgcagttttcaatcatggtgagtgtgggccccgggttcctgcccacctctggccctcgcgcccttgagtggggtttcttgcactttaggg

SEQ ID NO: 256 - DNA, 1300 bp, Homo sapiens
cccggcctcggtctcccaaagtgctgggataacaagcgtgagccactgcgcccagctttgtttgcatttttaggtgagatggggtttcaccacgttggccaggctggtcttgaactcctgacctcaggtgatgcacctgcctcagtctcccaaagtgctggattacaggcgttagcccctgcgcccggcccctgaaggaaaatctaaaggaagaggaaggtgtgcaaatgtgtgcgccttaggcgtaatggatggtggtgcagcagtgggttaaagttaacacgagacagtgatgcaatcacagaatccaaattgagtgcaggtcgctttaagaaaggagtagctgtaatctgaagcctgctggacgctggattagaaggcagcaaaaaaagctctgtgctggctggagccccctcagtgtgcaggcttagagggactaggctgggtgtggagctgcagcgtatccacaggtaaagcagctccctggctgctctgatgccagggacggcgggagaggctcccctgggctggggggacaggggagaggcaggggcactccagggagcagaaaagaggggtgcaagggagaggaaatgcggagacagcagcccctgcaatttgggcaaaagggtgagtggatgagagagggcagagggagctggggggacaaggccgaaggccaggacccagtgatccccaaatcccactgcaccgacggaagaggctggaaaggcttttgaatgaagtgagtgggaaacagcggaggggcggtcatggggaggaaaggggagctaagctgctgggtcgggtctgagcagcaccccaagactggagcccgaggcaaggaggctcacgggagctgcttccaccaagggcagtcaggaaggcggccgccctgcagcccagccctggcccctgctccctcggctccctgctactttttcaaaatcagctggtgctgactgttaaggcaatttcccagcaccaccaaaccgctggcctcggcgccctggctgagggctgggatggaggacagctgggtccttctagccagcccccacccactctctttggctacgtgagtcaaggctgggcgaccaatgaggttgtggcctccggcaaacaatgaccactatttaggccggcaggtgtatagggcatgggggcccagctgccagtgctggagacaagggccgtccgagatgaaccctttctgctgcctgccaagccactgggaggggtaggtctcagcaggattcccagaaaccccgcccctgtccagcctaggccccccacccgg

SEQ ID NO: 257 - DNA, 1300 bp, Homo sapiens
ctcacgcctgtaatcccagcactttgggaggccgaggcgggcggatcacgaggtcagaagatcgagaccatcccggctaaaacggtgaaaccccgtctctactaaaaaaatacaaaaaattagccgggcgtagtggcgggcgcctgtagtcccagctacttgggaggctgaggcaggagaatggcgtgaacccgggaggcggagcttgcagtgagccgagattgcgccactgcactccagcctgggcgacagagcgagactccgtctcaaaaaaaaaaaaaaaaaaaacgctttcgggttctcctggcgagttttaagtcacactggatcgctgcttattttcagagatcacctcgcacccatgcacctggaaggcacccaaagagaatcattttaagaaattcacttcatctcaccctaacaacaaagcacagcctgcagcacatggatttcacccatgtgacatcaatgctaatcctatgtgtgaaacatctgggttcattcgattttttaaaaattagtaactgagatggggtctcgctatgttgtccaggctggttctccaacgcctgggctcaagccattctcccgcctcggcctccctcggcgctgagattataggcgggagccaccgcgtcagcctccactctttttgcggcgacaaagcccgcccgcctgcggggcgttccgttcgcagaaactctgtgagggacgccgcgggggcttccaagggacgcggcgaaaccaaaacagtcgccggtggttcacaaaaccacctcagaaaatgcttccaaaggcacgtctggcctccacaaggtgacggcttttcagcctccgactcgaacttgagtcgtccacagcactaggccgccgccagcccgggcgagctgcctagggaccgcggacgccgcagcaagcagctccctgctcccgccacacccgccgagccagccgcgcggaacccactcccccaccgtgggcccgcctcccgccgccagcctgcccacgattggtcgactgggctgcccgtcgcgagagaaggcggtgcctccggcaggccggcgctcccattggccgggatggcggcggcggcgcgcgcggccccggcgagcaggggaagccggtggccgcggctgcggaacgggcggaggctgccggtttcgtaaccgtcgctcctcctcgctgactcgcgggctgtgaggcctgggtcggctcgggccgcaccgcgcggggccgctcggagtggaggccgcctgggggcaggcgggctagaggagcaggtaaggaggctgcggcgggc

SEQ ID NO: 258 - DNA, 1300 bp, Homo sapiens
gcttgaacccggaggcagaggttgcagtaagccgagatcgtgccattgcactccatcctgggcaacaagagcaaaactccgtctcaaaataataataataataataataataataataataataatgtgtatacccatgtaaacaccattcagataaaaatatggcatatttggggcacccggggagtgtctcttgtggcccctcccctccataccctgctgatctatcagcacagattagtttctgccactttttaaacttcatattccttttctttttacacaaacacaaacattcgagtcatgactgggtggggtggctcaagcctgtaatctcagcactttgggaggccaaggtgcgaggatcgcttgagtctgggagttcagagaccagcctgggcaacatagagagacctcatctccacataaaaagttttaaaaattaaccaggggcggtgtagtcccagctactcaggaggctgaggtgggaggcttcagcccgggaattccagactgcagtgagccatgattgggccactgcactccagcctgggcaacacagtgagaccctgtctcaaaaaaaaaaaaaaaaaaaacaggaaaaaacaaacaaacagaaaagcaggcctggcgcggtagctcatgcctgtaatcccagcgctttggaaggctgagacggggttatctcttgggctcacaagttagagacaagcctgggcgtgggctatattgctagatccaggtctctgcaaaaaacaaaaccactcagtttttagtcatctataacgtcctgcctggaagcatgctattttgggcctctgagcttttgcacttgctaattccttctgcgctggggagagctcaaaccctgcccgaaacttctaaaaatggtgcctggataaatgaaggcattagagctgcgattggacggacggctgttggacggcgccactgctggcacttatcgggagatgctcattggacagtcacgtgacgggaccaaacctcccgagggagcgaggcaggtgcggtcacgtgacccggcggcgctgcggggcagcggccattttgcggggcggccacgtgaaggacgcacgttcagcggggctctcacgtgacccgggcgcgctgcggccgcccgcgcggacccggcgagaggcggcggcgggagcggcggtgatggacgggtccggggagcagcccagaggcgggggtgaggcgggaggcagacgggcgggaggagggcgagccccctcgccggcccgtccgggatccttcctaccggcctggggctgtgcga

SEQ ID NO: 259 - DNA, 1300 bp, Homo sapiens
gtaggaacagataaagaacacaagaggtgatttaacataagttttagctgtgaaacttagagtagataggttagcaacttaaattttgaaagaaaataggatgagtttcaatggaagaaattaagaacacacccattgcatgagctccttacccctcctacccagccccctcccaggagtgagatctttccccagatcctctgtaacttccagatgttccactgagaacatcagaagcactaatggcaattgctgccatgtagcagtgcattgagagtcagggcctctggcacctccatggggctcagggtctgaagacgtgatccaaacctgacaacttggtggcaggttctgtgagcattcatgatgttgtgaaaagggcttggggtctaggaggatggcagcagaggtttctgccctcaggtgtgagtgaggggcttttgaagtaggagagcaactagaaaaaaggagtggcacagggacagaaacttcttttctccattgtttgttcaaggccacgtgggtggagtcattgaggtggaggtttaactctgtgacataagtttccctgatttagtcaggctgtctgtcgttgggcttttcccacttccttctactacgtacttcttccctattcctcctactgaggccattaaacccttagttgtaattttccctgaacatgctttacattctgatgaattctgaaaaagaatgtggggtttccttgcagatgagttcatctgttgtttcatttcctttacaatgtaggttttcttctctgtctttttggattagtctgtttttggttctgtctaccaaggatccctttctttagacttctatagatccctttctatagaacttaatctacttaagtcagggagaccacccagaaggaaagagcccatactttcaatcttaggcataagttagcttgataagattttcagaaaaattcccttttaaccacagaactcccccactggaaaggattctgaaagaaatgaagtcagccctcagaaatgaagttgactgcctgctggctttctgttgactggcccggagctgtactgcaagacccttgtgagcttccctagtctaagagtaggatgtctgctgaagtcatccatcaggttgaagaagcacttgatacagatgagaaggagatgctgctctttttgtgccgggatgttgctatagatgtggttccacctaatgtcagggaccttctggatattttacgggaaagaggtaagctgtctgtcggggacttggctgaactgctctacagagtgag

SEQ ID NO: 260 - DNA, 1300 bp, Homo sapiens
ggaatgggggcaccctgctttgagcaggataactgggctgagagcaagggccctgtagagagacagctgtgtgccagcgaccccagcggcagtgcaatgctgggaaaggggctaagggcacacagcagggttcagcacacattacctggggcaaccaagaatgctccctaggggaagtgacttggggtcttaagatgggggcaggagttcaggaggtgggaaacaggaggtctatagagtggggagggccacaggagccaaggtatgcaattgtgaaagagcagaaggaaacagccaagggtggcttgggacaggatgtgggtaggaggagggcttctgtacccaactgcctggatttgaatcccgaggcctctacgtaccacctgtgtgaccttgggcaagttgtttgccctctctgtgcctcattcccctatgtataagatgggaataacaatactgtctacatcatagagccctgaacatcaaatgagttaatgtaattaagtacttaacaacagagcccagcacacagctgtgctcaatagatgcgggctgggactattattactattatctgtgaggatgtggggcagaggggcctaaggcctccttgaattatcaagaaggtcagtaggaggtcctctaagccatccctgcggcagacaggctccggctctgaggagcaccgggcagggacccaggaggctgcaaacctaagtgcagatccccaggctgggctggacaggctgaggtcagggcaggtgcagagaggcccagagctgcaacaccgcacttcatttattgcgtggctactgatttgcccgtgctgggcacacggacgtggtaaaggacagaagggctactcctggactgttctctgggcttctcaccctgcggttgtggtgagaggctgctgacagccagggcacccgggagtgggcgtggctggagaaggacccctgtccttttacagctaggcccactctgagccccacgcagtgttctagagcctgtccccccagggcaggatggtagtgggggcaggggtccctgagccattgcggcccttcccggcaggcgccaagcctaggggctgtggtcagcgtgaaaggcagggcatggaccctcactcagggctgcgtgtgcccgacgtgggtggggggggcgtggaatcggagcacaacttggccctgcgttcccaggaagggacccgaagacctccccaggccaccccgccatctgcgtgcgcgctggcaagaggaggggcgcggggtaatggtggccggcgccacagccccgc

SEQ ID NO: 261 - DNA, 1300 bp, Homo sapiens
tgctctaggataactacttatcctttttaatgtttaaggctattcagacttcataatttagcagtcttgcttgaaaaggcccttagtgctaatgctgactttcctgataagcacaatgagaatctgtcaggatgaaaacacactccagtgaagagaattcttgcaggaaggagttcagtttcattcattccaaagtgccctttcataaatggaagcagcatttgctagagggagtgggatctctaaagctctgttagagggttaggggtgggagacttttcaagacaatggattgtcaggtgttatgcaaatacagtgaggaaagtgtgggcccaacacgtacacaggttaatacatcaattattatttacaaaacactgtttttcctgccttatcatttcattattgtttccttcttaatgaagtgacggggggcgggaggggggaggaggggtgcagggacagtactggttgaactagagagagaatggagaggagggttcctggcttctgttgtggcgtcttttctatttgacttcatggttgtaagtatttccagatggtgaatcagacaccagacgtaacaatatttccatatttgggtatagcagtagcctgcgtttttaacatttttctgcctctgttatccaaccacaaagcattcttgacagcttcaaatgttgttaaatatagatttaacttctcttcccagagcaggaaattctttggaattccttgtttttcacgcaatctgtccatcatgatttaaaataaaagcacagtggatcatccaactggccgtatataccttaattggaggttggggatgggggacggcagagatccagtctgccgcactgcgttcaaacacacgccattccagagattcctttaaaatcacattaaagtttttttaacaagggtgtgtgggtttgtttctggacttcaactggggaatcttgaggatgagtttgccccagaagagaaatttagagaaccttaccgtcagctgcccatttaaagcagggggtgtgttgtgggatgggggtgggaagctggagcaacagggccaggaggtgtgggagcgggagacactagagtaacctatgtgcacagcctctccatataccatgtgctgttgcgcctgctagtaatcgacgacattaggcaagagaaacagcggctcctcaagtcctgcccaaagaccgtccagaaaccccagcctcccgtcgccttctcgccgcctccgctgggagccgcagatcagtccaagttgacggacaggaggcgaaatgtgcaa

SEQ ID NO: 262 - DNA, 1400 bp, Homo sapiens
gccgcgcttcagggctcaggccgcccaaggggccacgattcgaggaatcactcgggagggagggagcgcgcgagggccgggctgagcccccgcccgtgggtgcgcgcctggaaaactcgcagcctccgccctgggaagtggggcagcggctccctttgtccgcaccacaccaggtgggtgtcccggccgactccgctcgccacgtggccgcgcccctcccctccgccgagctccagcggcctggagtgcgctcgcccgttcggccctgcgcctcgtccgggtccccgggaagctgctaaggaggggccgtcgggtgggtggacgtccgtctcgggtctgggttccccgccgcacccgcgaggaaaaccggggatgcgctgcgatgaccggcagtaaccccggccggggcgcccgcggccggggtcaacgcccgcacttgcgccgcggcccgcgaggcatccgggaccgccccgccgcccgcccatcaccctatcgcctagcaacgcccacccgcgcgccgccattgggccggtgcgaacacccctggcgcccgattggttgctgctgccgccgcgccgcgcaacgccgcgccctcagccagctccgcgcgggcagcgacggcggcgtggagtcggcggccgaagtgcgggcacgcgggtccgtccgtccttccgcgcgcctgtgggtccgagcgccccgccgcagccggctggacccccggtgtggccacggggtagtccccagtgtggcccaagcattcccatcccgcacacgtggccccggcggacacgggggtcggggatggctcgggaggcgcgccgcgggctcggtcgcagccgcgtgcgcgtcggggcccgcggggcgggaggcggaagtcggggggcggtggtttcccgcccgccccgcccccggcgctcctcagtcccagccccacccccccaggcgcgttcccgcgcagggtcccggctcgggcggcggcgcgcacgagcatcaccccaccggcggcggcgcgccgggtcccggggcgcagccccgacgctcattggcctgggcggcgcagccaagctgtcagcccatgtggcgtggccgcccggggatggccgcggtttaaatagcgtcggcgccggcctagagggagccagagagacggcagcggccccggcctccctctccgccgcgcttcagcctcccgctccgccgcgctccagcctcgctctccgccgcccgcaccgccgcccgcgccctcaccaggtacgagcagccggcgctggggccggggcgcgggtcgtggtcggggctgggcccggggttcccggggtggcccggctcctcatcctccgctctcggggcgcgcgtggcccggccccgtatccaggggtcgcctgggcggcctgtccggg

SEQ ID NO: 263 - DNA, 1300 bp, Homo sapiens
tttttgctttgccatttatagctctgtagccttgcacaaatgacttcacttctctatgagtcatctgtaaaatggggctctttgtgaagacttaacgataccacgtgtacaaagcactgaatacaacatgcacattaagctccccgaaattgaaactcctataaaataggaatcggggattctcaagagcaggagttctgacttcagcagaggaacccagagctggtggggaaagcagacgtggctgtgacatccccagggacactaaacacatcctcccagccccatcttccccgcagagtcccgccaccggcccgacccctaacttgctccaaccacccgccgacgcccgcagcccgctgtttgggggccgccccctgcagcgccaggtccccgcgcggactacagttcccagcgtacatctcggtcggggggtccgaggggccgtcctgcctcagggataaggtccaggctgcgttcgcggctccgggcagtcacagtcatgcacgcagctcctatttttcgcgttgctaatcgcgtccgttgcagtccaacccatcctgggccgcggcccccacagggtctgtgaggagcgcttccccccgccccgggcgcccgctacgccgcgtccgaaggaggggccgaggccgggctcatctccccgggaggactccttcggcttcgtggggtgtcatgtccattgcggcccgaggctggccgcggggctctgctggagggcgctgagagccgggccccgaggccgcacggccggagactacaactcccaggaggcaccgcggcggcggcgcccacacgtcactcgggccccgccggtggcccggggaagcagcacgggcggggggcaggggctggggccgaccgggaggccggtgccaaggatgggggccgcccggctgccccgcgcgtgaggaggccgaggggcgcgccaccccggcccggggcggccgccccaggggccccgccacccccgcccggcccggcagtcgtggcccgggatgcggagccgggggccgccggtggagctgcgcggggtgagcggcgcggggaacggggactgcctgccgccctcgccctcgtcccccaccggcggaccccggcgggcattcgagagccgcgcggccaggccctcttagccctctgccgtttggggggcacgggtgaacctgccgccccactcccaccccgccccgccccgcccgtacagccaaatcggaagggacgagcctgccctttgaaagggttttttttcttgctcctgcggagggcgccccagccatgg

SEQ ID NO: 264 - DNA, 1300 bp, Homo sapiens
actctcaaatggttcagaaaaaaatacaaatgtgtatttatagagaaataatgataaagtaaatgtggtcaaatgatattagtggatgaatctgagtgaagggtatcctggaattctttttagtatttttgcccctttcccatgagattaaaagtattttaaaataaaaagctaaaaaaaggaagaaagtggtgctggtgaagtatattccccggtaggggaaggctctcaggtgcaccagcagcagccatgagtgcctcaacaccagggagagcacagctgccactgacaccttctgccaccctggactctcagttccctgtgctactaaaggaactcagtgtgtggttgaccccaaagttgtcctgggttgactcaagaaggtaggatgagcattctgaggcaaagaattctcttttgtgattttattgactccaattttgcattctgactggcattccctgcatcccaaggaccttgacagcggagggaggcagagatggaggaagtgaaaactacccaaattcagtgtttgttacagacaattcagactgcaaaatttagggtagactatgttcatttatcactgataatgacagtcttaacattcccctacaacaggaagaccaagatttccccaaaaccggccagcatcttgcccatttgccagaaggagaaaaataagtcctggcaagagccaagataaggcccagaagcccctgggttcctttagccaaggtgagtggtttcaaattatgacaagttgcaggttctctgagaagcatctgtaataacctggcaaattaagcatcctctcctgggaggaggaatacagaactctgtaaccacccaatacctgtttccaggtcctgcccctcctggggcacagggcagccaccttgcaattctcatccctagaaaggagagaccagatcaacaaacagcagggctgggactgcccagggggttccgagattccttctcccctcctatcacctgccctccaggcacaccgtcctacttccccctacttccccaggggttgtcagggacagaaggcccctccttcatcccccctagtgttcctccactcttcctccgccccccattactagggtgtccaggacattgtgtgactcaggaaacagctcagacgtgaggcttgcagcaggccgaggaggaagaagaggggcagtgggagcagaggaggtggctcctgccccagtgagagctctgagggtccctgcctgaagagggacagggaccggggcttggagaaggggctgtggaatgcagcccc

SEQ ID NO: 265 - DNA, 1300 bp, Homo sapiens
tgactaactcgccgttgcctgcaacctgctccgttgcctgcctcacaccaccccgctgtgctgcctgcaggcaccccctttcatgaggacctgggctgtgcccaggcggccccctgtgttgctggggcctgtgctgctctcgcacggcctccagagcctccctcggccccttgacccgcatgaaccggcttcccctggtgactcagtcccctcccgtcccttcctggacctcagcacaggccctggggctggcaggtgagcacccggcacccccgctaaccgcttggccctgctgcttcaggcttacaagagtgcgtgcgacatggccgaggcacgaggccgccaccaggagctttgcatccccctgtgtgtggtgccggccacgattagcaacaatgtcccaggcacagaaataagcctgggctccgacactggcctgaatgctgttgttgaggtaagagaaccccgtttcctctcattgcttttccgtcatttattttagcaacttgtttcttctgtgctaaggatgagccggatttattcttcttcttttctcccctttgttagcttggctttatgtcacactggccagaacagggtaaaatttttttagcttctctgccttagggagagcctgtctttattgattaaaagtgagatgatatatccagtccttgggatcgtgtttctatcccacctagactaggggagccgcaggtaccattgctctggaggctgcctctcctgcccacgctgagtagtgaggctgcagggccagctgtgggagcctgcaggaaggggtgtaaatgcccggtaagtacgagctccaggacagagccgtacccactgggggccgctgcctggaaaacagccttcctggtgagacaagaggctctttagagagccgaaatcacgccctcctgggcaggcggtttcaccaacatgtgccttgggaggggtggattctgccagtcgtgggtgtggtgctgacacccacatggtggcccctccggtccctgatactctgacctacctctatggtcataagctggacatgaagacctatggtagttccacaggcctttgctgcagagacggtcctcactcagctgcagacaggacggtggccaccgtgacatgtggggtcacgtccgtgacttggccacctggtgcgagggacccacagcaaagcagaactgctggccggggtaggcctgcatcgcgtgcggggacagcagccactggcctttaccttacatcttgacgtccaagccagctccggagtttgcagtgaaaactc

SEQ ID NO: 266 - DNA, 1400 bp, Homo sapiens
cagagcccggaaggcgggaggggctctgaagactttatcacactttacctcctctgttcctcccaacagcccagctcttggtaggtgctgttgtccatttcacagatgagaacattgaaggggaagtaattaccctagaggtgggaagaacagagtgagggtacccaacaggtagcaaacgacagagctgggggaggggaacccctgtccctgcccctcccctaatctctgaggggatcaagacagaagtaaacaagctttgccgtgcccaggacaattgttactttgttattccaggagcgctctgccttctcccacccccaatataccccagggctggagttaggtcctacccatccccgcgtagcaggctgcccacccgcccaccccgcctggaagctttctgatttctctgttcgccccgccaggcgctgtggggtccgtctcaccaggtctgcacgtgagccccctgcccccaatccctcccagtcccgcccgcctctcgcggacccggagccccgacgggagggggaaggcagtgggtgtgtcatgcagctggaaggctgcggacgggcggcagtggaggggcagccccctggcttcgggtatggatcactggatgctgctgctaaccaaatgtgaacctcggttttcatatttgtgaaataggctttaaaacacctaaatcccaaagctgccagcctaaggagcacacgtctttgaacgctggcttcacgctgtcatttaagtcatttcgtcctcttggagcctcggtttccacgtgggtaaaatgatcgtgaaaaaaagcaccgaggagtactttgagctcgaacggaggccatccgtgtaaagggccagattctgtcaatggatcgatccccccgatattgatggaaacccctgagtgcacgcccgtgctgggcgcaggggaaacagcgacgcacgggacaaaacaagcttgcagaacagcagggggcagagaggctgtaaacaagccaacgggctgcacttgtagcggttctgttgccaatgccattcagaccccagtccgggattccgcgctcggggtgcgagaggccgctcccggggaggggcgggacccgggcggggcgggaggggcggggcgcccgggcctattaggtcccgcgccggcagccgggccgcagacacgaagcctcccgggtggcttacagacgctgccagcatcgccgccgccaggtgagtgcccccgaccctgctgccgcccgctgctccgcccagctcgagcccggcggttagcgcccaggccgcggcccgggtgccgagcggctggaagtgtggggagccgtgcccaggttttaccgctccagcaagtcgctggcggggcgacgtctcgggactccggctccgaaacgtaccct

SEQ ID NO: 267 - DNA, 1300 bp, Homo sapiens
tcatgtctatttctgcaagacatctttaaaacagagtttaggagccgggagccatggctcacgccagtaatcccagcactttggaaggcagaggtggatggatcacttgaagccaggagttcaagaccagcctggtcaacatagtgaaaccctgtctctactaagaatacaaaaattacccaggcgtggtggtacatgtgcctgtaatcccagctacttgggaggctgaggcaggagaattgcttgaacccgggaggcagaggttgcagtgagctgagatcacgccactgcactccagcctgggtgacaaaagcaaaactctgtctcaaaaaaaactgaaaacataaaaataaataaataaataaaacagagtttagggtagtaatgtgtctgagtccttgctctgaagatgtctgatttgggttttttttctaggtataatctctttccctcctcttcctcctcctcctcctctcccttctctctctctctgagcctgtagtattttccctttcgtgttctgtggtatcctcctaatgtccctagttaacaggacctcatccatccatccctggggtgttcagtggcctcgcaatccacgtccccgcccagatccgcagccttcctcctgtgacctgagtgtctcctcctcgctgtccctgttctgtcccctcccgccctcacatgcaggtggatgtcaatgcgtgcacgcacccaggttttcttgcctgttcccacctctttatcctccttggctggttcctccgctccattctctggctcaggaatttgctccccagggtttttcattccgctctgtagcagaatgtgctactgttgctttccagcatcaaacttttcactcccatggcctctgtgttcttcttcctaatgggtgccctttctgcctggcgctcctggaggccgggcccctctcccaagtgtgaatctgatggaagcaggtccttctcgccgggacctcatgtgagaaatgacatgtcccacctgtctcaaggggccgctctctgacatcagagctgctgtagagcggagaggggcaggggtgaagggccacggtggtgcaacccaccacttcctccaaggaggagctgagaggaacaggaagtgtcaggactttacgacccgcgcctccagctgaggtttctagacgtgacccagggcagactggtagcaaagcccccacgcccagccaggagcaccgccgaggactccagcacaccgagggtgagtgtgcagaggccccgctatgtccacggtgatttttggagggaagcactct

SEQ ID NO: 268 - DNA, 1300 bp, Homo sapiens
tcatgaaactcgatggttccagaaacctgtggggagcattcctccctccgtgaagttgtttgagggaaaacagactgggtgctgttgtgctgccaaattgatacaaacccctacaagaagctttcacatgagcccttcaaactcatcagcctcccacagcatctccaaatggtgtcaaatacatatctggggctgggaacagagctggggcaggcctgggatccctggcaagctttagcctgcgctcaccatactacacctcacccccaacaagaccaaaacctcttccaattcaatagcatagcaactgccaatagcaaggtatcttccatggcaatttgctgggtgattttggaagatttttgtttaactacctggacacacgtatacttgctatatactacaagtacagaattctcagtaagcggacttaccaaagtaggtgatctgtaggggagttaacaaaattcagtggtcctttcaggccactgacttcaagtggcaagagacaagggtctcttgttatcatgttatcttggcttccaaagctggttgaagtccagagattcataaagtcattcaagaaacctagaatgacctgcctgcaaggaagacaggaaggactttcagtttatagcaattcaaacatgaataacatttcctgattaatagtaataataattagaaaggattgactttcagaaatttttctcaaatcaaggctcctgttactttggttccaccttttctctctagaaggagaggaggagcatctcccagagggctgcgtgcctcagaaaagccggcatccctagcccgctctggcacaggccatgaggccctgctgaatcctgctgaatagctactcccttctagctggagccacagctccctccaccgcggagcagggttacaacgtccctctcggtagaggtgcacgcagctcctcctggccaccctccccaccagttcccattgtctggcccccctcccccaacctcttctttccacactgccccatgagttcagggaatttccccagcatcccaaagcttgagtttcctgtcagtggggagagatgagtgtagataaaaggagtgcagaaggcacgaggaagccacagtgctccggatcctccaatcttcgctcctccaatctccgctcctccacccagttcaggaacccgcgaccgctcgcagcgctctcttgaccactatgagcctcctgtccagccgcgcggcccgtgtccccggtccttcgagctccttgtgcgcgctgttggtgctgctgctgctgctga

SEQ ID NO: 269 - DNA, 1300 bp, Homo sapiens
aaaactgattctgatttaattgtattttatgcatttcacaacattcttctgagaaacagtctaattgctttaccagagccagtgtggtccgtagcacaggaaacggcgagagccggctggaggaccgtgccctggcacatttgcatcgcaggccacccccaggaagagcgcaccctgaccagagctgagtcttgttttgccctgcatttccgcagataagatttggcctgaaaagcagttcaactcagcggagaataagatgggctttctctttctcctcagctgcctctttctcttggcattttggagtgccccgactgccaggccggtaactcgagcctccaaattaatcaaaacacacagcacccagttaaagcccaggcagacaagcccaggagccagacgcgctctcctctggtgacccccgggccacaactccccagctgggcccgccaccaccccttgaatgccacgctccctccactgcccctcccaggcaggtgccggggccccgggacagcggttgccccacctatgggcgccttacctgtggggacgcccgcagcgccaggagctgccgccttgccaccccacgggacgcgcacctccagccccaatccacccgcgccccgctgcctcttcgcggcgctctcgcagccaagcccggcggccgcaagttggaggcgggctggaggcggggaacgcggaccgccgcgggcgcggggaacaagcggggcctcccgagtgcagacgcccggcgcgcctcccgcttaatctgggcagggccgctggccactccctccaccctgcgcagccacctccccaccgcgcagccacctccccaccgcacacccccaaacgccccacctccgaccgcaccccacttccccgcctgggcccccggaccttgggagcatcacctccttaaccccttaccctggatccgcgcccacctgcccctcaggcgcccagccctttctcgcctcctgggcacgatgcccgggtagaagggacactgcctggtaagttgggagggagggggtatgagggcgggacctgagccacgtcttccctcccttgaagccacaaccaaaaagcctgggtggggagggacgaaccgcgcgaccgagccctacaaaacccgccccggccgagtggcgaggcgagctttccagccgggctcccagagccgcgctgcgcaggagacgcggtggcctgagagcctgagggtccccggactcgcccaggctctgagcgcgcgcccaccatgagcgcccggaccgcccccaggccgcaggtg

SEQ ID NO: 270 - DNA, 1300 bp, Homo sapiens
gagctatgaccacaccaggccattcaaatggctctgcattatcttcccttggaaggtggccactcctcggtggcagggcctttccctgaggctgcaggccgtgggctggcagcccgtctcttggcatttcaattgaaggtcaccaggtgctgggtttgaaaggaagtcactggagtgctgccaggggccgccctccaaggttaatgagaggcccacatccaggcaagaactaattcaaaaggcagatcagaaaccacaggagtcaaaattattgctccggcagtgcttcccttcctttcatccactggcctcgtgtggtccatgcagggccactgtctgccctttctgatgccacgtattaggctttcttactcagaattttgatagaaaaccatggggccaagagctctggaagcctggccggaaagaccaaggttcatgcagcccaacaaatgattgttgagcacctctcggagccaaagtccttaggcgagtgtggtgacttcctggaaggaggatgcagacttccagagagcccccccaacggacgtgctgagaagggagagggaggcgggggctgtagtcaggaaggagccagagaagaacagggtttgggtgcatccagaaatatgcctgcagtaggagggagaggaaggggtgccaccgtcaacggcttcccatcggaggtggttggtgcagatggaagtttctgtctgctggccctcaagagagtgttttgccagggacacagtctgttcctcctcagaaaacaccccccaaatgctaacaacatccccaccagctgctagaagcccctttcccctccccaccttgaagtagctcatagttctctgggcagagccagaccatccagtgtaccccagaggccagtaggttcctgcccattttcctctctggcttcctgccaagaattatggcagctgaggatgaatggagaagtaaaaacaactaacaccgcacaactaacaactaacaccgcagttcccacctgggttccacttagcaggagacatttcggagggttttttttgtttttgttcctgttttttttttttttgctggaatttgttttctcagtactgaaaagagaaaaagtgacaatcttgtatttttaaaagcctcggaaaggtgataccatctgacagtcattttctcacgttggtcttctaaagtcacctatttcttgtgtgtgcacatcacaccatttcctgtttctttataacccgacaagggtaggagtgcctgtttcccctgctgggcacaccagacaatcgtaatc

SEQ ID NO: 271 - DNA, 1300 bp, Homo sapiens
taaaaggatgtgtatgtgtgtttttgaagtatttagggctaaaatatgtccaggattggcttttaaatactacaaaaaatggagtatgccaaaacgttgaccattgttaaagctcagtgaagggcaggtagatgccaattgcactcttcacttttatgtgcaaagtttggaaaatttcacaataaaatttttgtgtttacataaatgaaataacatgggaaaatgttctaaggtatggcaagtgaaaaaagcctggaaaataactagtttgtcccacttaagtttttaaaggtgttaaaagtacatgtttcaaaaagtaaggatagactaaaaaagtgaacggtggtaagttctaagttgtgggcttacaggtgttctttatttttatgctttgctgtattttccaagtttttttttttaagttttccaagatgttttacatctctgttcttatttaccagataaactttgtggttagttactggataaactgtaaatagtgataaaatttttaagtttatatcaagatagcacttcattttaaaaccagtaattattaggttggtgcaaaattaattgcagttgttgccattggaagtgatggtaaaaaccgcaattacttttgcaccaaccttatatttctaaaagatcaagttgtaaacctatttgttttccctaagatccgctcttgcagagttggaataaatatgattgtttacacttaagagtccaggactacagcaggcctggttggaggggagttactaatgttcccagacttaaatccagctggaacaccacctaaaatatgcagtaacataagaccatcaaaagcaatgtcccaggacttacaatgtttgctaagacgcaagagggtgtgacacagacgctaagcgccactggcgaggagatgaaggggtcgtcttcatcttcgccggatgatttccgcccacatagagggcgccagtgacgcccacacacgtgctggtgtcccgggaagagttcctggcaaagagctcaggaacgttggatcttaatcaaggctttctccgtcggggtggatgggttggactttaggctccagcaagccccgccccactcggcgggtcggtgccgccgggtcccaggtgcccgctacttcccagaacctccgcctcccgctccgggccctcgaaccagcgcggacaccacaatggaccgggcgtccgagctgctcttctacgtgaacggccgcaaggtgagcgcccgcgggcttcctctgcccccagacctgcggccagggccggggcagagaggagcc

SEQ ID NO: 272 - DNA, 1300 bp, Homo sapiens
acgccgtgttcaggaggctggcctttatccctcaggacctggggagccatggaaagatctgaggagcaggcattgggcacagctggacactggggaacgggtgacacaggggcatggatccagcccaactctgataaggaacagcagagttccacaggaccatagtggcagaggcagcagtgaggacttcttttttatttatttgtttgtttgagacagagtctagctctgtcccccaggctgcagtgcagtggcgtgatctcagctcactgcaacctccgcctcccgggttcaagcgattctcctgcctcagcctcccgagtagctgggactacaggcgcatgccaccacgcccggctaaattttgtacttttttagtagagacagggttttaccttgttagccaggatggtctcaatctcctgacctcgtggtccgcccacctccgcctcccaaagtgctgggattacaggcgtgagccaccgcgcccggccggcaatgggggcttcttaaaaaagagggaggctgggcccggtggttcacgcctgtaatcccagcactttgggaggccgaggcgggcggatcacgaggtcaggagttcgagaccagcctgaccaacatggtgaaacaccgtctctactaaaaaatacaaaagttagccgggcgtggtggcgggcgcctgtaatcccagctactcgggaggctgaggcaggagaatcgcttgaacccgggaggtggaggttgcagtgagccgagatcgcgccactgcactccagcctgggcgaaagaccaagagtccgtctcaaaaaaagaaaagagggagtgtgggggtggggcccggagcgctccaaggggcggggaaggggactcccaggcccgaggactcctggaagggaggtgagtgtggcgctgaggaagcggcgggacggatgcgagcccgggaggagcgcgctggggggccgcaggcgggggatgtggcgcggtccaggcccgtcgcggcctcgtcctgacagggacacctgcgggatcgtccttccaggatcgcctgcgggcctcgcgggccgatgcctcgggtccccctccggcctcggtttctccgcgcagcggggcggggcgggggcagcgcgggtctcaaagctgcctgcagggggcgcccgtgagcggcgcggccggagccggagacccagcggccgccgagacagcgggagccggcgtgcgagcggcaggtcagccggggtgctaggtctggcgtgcggggtcctgggtgccgggtccggggtgcggggtgccgggggtccgg

SEQ ID NO: 273 - DNA, 1400 bp, Homo sapiens
ttgaaaggctgaggggagaggatcacttgaacctgcgagtttaaccagcctgggcaacgtggtgagacctcgtctctaaaaaaatttaaaaaataaaacttagctgggcttggtggtgcacacctgtggtcccagctactctggaagctgaggtgggaggatcgcttgagcccaagaggtggaggctgcagtgagctgtgactgtgccactgcactccagccttggcgacagagaaagaccctgtctcaaggaaaaaaatctgttctttgagggcaggtgctgaggctgtcatggtcacctttctgttcccaggggccagcacaggatcagacacatggtagatgccacatagctatttgttgaagaaacaaacaaaagctagcatttatgttttatttattagttattattattaatatttgaaatggagtttcgcttttgttgcccaggctagagtgcgacggcgccatctctgctcactgcaacctctgcctcccaggttcaagcaattctcctgcttcagcctcccgagtagctgggattacaagcatttgccagcacgcccggctaattttgtatctttagtagagacaggttttctccatgttggtcaggctggtcttgaactcccgacctcaggtgatccacctgcctcagcctcccaaagtgctgggattacaggcttgagccaccgcgcccggcctgcaaagccatttctaactcttgggcccagaaaggatcaccaatttccctgtcattctccgttagactattcgctactgagacgatttttttttttttttgagacgaggtggaggggcgggggttctcgctatcttgctcaagctgatctcgaactcctgggttcgatcaatactcagacaatcttggcaggcgcaggaggaccaaattctagtgaatgagatcgagtctctcggctctttcccttccatgttttctttttgattggccctcgacgatcctcagtgacgcctcccgcaccgcctcacccgagagtcagccgccctcgcttttccgtgcgcacgcgcagtatcccgattggctctgccctagcggattgacgggcaggttagccaatggtctcgtaatataggtggagcgagccctcgaggatgtccacgacccggcctctcgctgaatattcatgagggaggcgggtcgaccccgctgcacagtccggccggcgccatgaagtgagaagggggctgggggtcgcgctcgctagcgggcgcggggggtcttgaagatggggtcatcggtgggcgcgcctgggtccccaagggggcgaggggagggtgaaggggtgggacgggggcagccgcagggagcagcagtgatagcgaggagacactgagggggccccgaggctcctgaggac

SEQ ID NO: 274 - DNA, 1300 bp, Homo sapiens
gtgcaagcggcagtggggagttagaggggcctttggctaaagtgcagcattcagtgttcacatacttccaggcacatctactcaaagccctctttgtggcacttttgctggttccacagaaaactgggagtgggaagggtgggttgttgggacggtgtgttccactcacatttttcacacagtcttccgatggctgcaagatgaaagatggtaaaaagtacaattagaataaaggttttgagaaagaggagaagtacatcctcgagctgggggtagggacatgagtaaggactgcagtgagtgagacctgcggatagccattttatcattacaaatttccatatgaaccaaacctacatccaagcaccctcctgaatctcctccaacgccctgggcaagctcagagtttctctggacctggttcagaccccaccccccgatacctgcctggggctcccagcacgcgcacccccgccctcttctcatcagaggccacaaacctgcgcgctcctacaacaccccgcgcctgagaggcgggaaacgtggcgcctgcgaggcaagcccctaaggaagagacgggaacccccgaccccccagctcctaataccacccctgcccagacagccaggggtagggcgcagtctcaccaacaccagcctgcttgcggcaaaagatcaaatcaggatgatgtttagccatagctcctaactaagccggccaccggaagcttcgggaacttccgtccgacctttaacccccattgttcctgcctccacgtcgctgtgattggttctctaagcttccgtcagtttacaatccttgcaccaggcccgtcttgctctcgcgcgagtttttgtcgctgctgggcggccaggtcctggcaggtgcatgaaactcttaaaaactctcccagatttggatggcggagataactaaaatttgttcttgggtaaaacatctttgtgcttggtatctatttctgcaagtgtctttgggcagtccgatttcctcttgcgtgtctgttcgttgcacgtgagctccgcccattgcgttcacagggttctggcgcctctagggaggcctcgccttcaccgtgacgccccactcttccgggcacgcccctgcccaaaggctttaaaggcgccgtgtgggacgtcactttaatgcgacctcatctttgtcagtgcacaaaatggcgccctacagcctactggtgactcggctgcaggtgagcgagctcagggacctctgggttcacgggggcggggtgcctcctactgtgccggcggctgtgggcgag

SEQ ID NO: 275 - DNA, 1300 bp, Homo sapiens
agacatggtatggagtgccatcagttagggagccctgggcacaggtaagagaaggtgtgacaccaggagggaaagagtctggggcccagctgcaggaaccaatacccataggctatttgtataaatgggccatggggcctcccagctggaggctggctggtgccacgagggtcccacaggcatgggtgtccttcctatatcacatggccttcactgagactggtatatggattgcacctatcagagaccaaggacaggacctccctggaaatctctgaggacctggcctgtgatccagttgctgccttgtcctcttcctgctatgtcatggcttatcttctttcacccattcattcattcattcattcagcagtattagtcaatgtctcttgtatgcctggcacctgctagatggtccccgagtttaccattagtggaaaagacatttaagaaattcaccaagggctctatgagaggccatacacggtggacctgactagggtgtggcttccctgaggagctgaagttgcccagaggcccagagaaggggagctgagcacgtttgaaccactgaacctgctctggacctcgcctccttcccttcggtgcctcccagcatcctatcctctttaaagagcaggggttcagggaagttccctggatggtgattcgcaggggcagctcccctctcacctgccgcgatgactaccccgccccatctcaaacacacaagctcacgcatgcgggactggagcccttgaggacatgtggcccaaagacaggaggtacaggggctcagtgcgtgcagtggaatgaactgggcttcatctctggaagggtaaggggccatcttccgggttcaccgccgcatccccacccccggcacagcgcctcctggcgactaacatcggtgacttagtgaaaggactaagaaagacccgaggcgaggccggaacaggccgatttctagccgccaagtggagaacaggttggagcggtgcgccgggcttagcggcggttgctggaggaacgggcggagtcgcccagggtcctgccctgcgggggtcgagccgaggcaggcggtgacttccccactcggggcggagccgcagcctcgcgggggcggggcctggcgccggcggtggcgtcacaaaaggcgggaccacagtggtgtccgagaagtcaggcacgtagctcagcggcggccgcggcgcgtgcgtctgtgcctctgcgcgggtctcctggtccttctgccatcatgccgatgttcatcgtaaacaccaacgtgccccgcgcctcc

SEQ ID NO: 276 - DNA, 1300 bp, Homo sapiens
gcctgcccctctctgccttttcctcgggtgtccctcctcgagcccctgcggcactggcttgggtggcagagcccacttgtttcagggaccccaggaggtggtgccccctggctcctgggactgtgtgtgggtctggggggtgggggggtggggagaagcgtcgggcagggggtgcaggggaggaaactcctcaccaggaaagccaaagacagggttgtgccttacctcaggagccacccgttcccccttgccctgccgttcaccctccacctttccccccgggcggcctgctgctttttccttctcttcctcccctgccctgccctgagctgcatggttcccctaccctgggaagccaggaaggaatctgaatggagaatcaccaaccaccaaagaaaaaaagactgcggggccctcccctgccaactccccttccctggccgcccactcacccacacctctttcacgcaggacaggctgcccaccctgtccacgtgaagtgccaacgccctccccaccctgggccgagcccccacccctccctgggcccccaagtgagattgcacatttaactactgtaaggagaggagcggcgttggcaaatgtgaaccatgagaatatcggtgatactgatgagaataaacgcctttgtaaaaaaaaaaaaaaaaaaaaaagtctggagccaggcgtggtggctcgcctgtaagccaagcactttaggaggccaaagcggcaggatcgcttgaggccaggagttggagagactagcctgggcaacatggcgaaacccgtctctactaaaaatagctgcgcatggtggctccgcctgtagttccagctaccggaaggctgaggcgggaggattagagactgaagctatagtgagccatgatcagaccactgcactcaagcctgggtaaggcagcaagaccctatatcaaaaaataaaaaaaggaaaaccacaatgattacgcaagtcgccgccctccctcctgcgattgttgctatttccatccagctactagtctcctcctcccgcccgacacctggcgcgtctatctgacgtcacgaacgcgccacacagattcgggctgcgcaacctctgtggccgtctacacggcgcgcagatgcgaatattctcgcggcgccggaagtccggggcacgtgacctggtgacagtgctgacttggctgtacagctcgatctaggttctgcggcacgggatggcggaggcgcctcctgtctcaggtattgtcccggcccgagcgggactgggcccctttcagggagcggaaattgg

SEQ ID NO: 277 - DNA, 1300 bp, Homo sapiens
ggagtcccacaggagcggggatctgggaagagaaacttgcggacgagggagttagagccgtggacccccggcccccgcccgggcgtcctgcgtcggaggagggtctctgggtcgggcaggggccacctcttggcccgccccttgtcgctggacgtccgaagattgggccatttcccttgccgcgcccttaccgcatatcggggtgcgcccggcccggcccggcccgccccacccagccctccgctcgcgcccggagaggaggggccgctggcgcagcgccccgggaccccgagaggccgccgcggcacatccagacctccgccgctcccgcgccctctcaaccatcctgggattcccgggcccacccgacccagcggcgcgaccctggccctccgggaccctccgctgactccaccgcgcacttcccgggacccccacacacatcccagccctccggccgatccctccctactcggtgccgggtgccccccgccctctccaggcccggatctcctcccccaggtccccggggcggccccagccaggcccccttcgaaccccgccggcggcccgggctggggcgcaccatgcggctgcggctccggcttctggcgctgctgcttctgctgctggcaccgcccgcgcgcgccccgaagccctcggcgcaggacgtgagcctgggcgtggtgagcgcggggtccgcaggctcctggggtctgcagagagattgggagagggaagccgggcccggactcctgggtccggaggaggcaggggccagattccaatatccaaagagtgactgaggatggggtctgtgctcccggcttcttgggtctgtcgggaagtttggggctgggatttggagctctggaaaggagctgaggtgcggagctgaagtccagacaagactggcaaacccgggactgaagcggggacctatggaggggagcaggcaggcatccggggctggggccctgggctctgggtgcctgggaggggcagggctgccaggatggtggtgggcagagagagcccatacttttcacccagcccgcttcacctgccccctccgatgccctaggactggctgactcgctatggttacctgccgccaccccaccctgcccaggcccagctgcagagccctgagaagttgcgcgatgccatcaaagtcatgcagaggttcgcggggctgccggagaccggccgcatgggtaggtggcccccacccctccccagccctgcctctgcacccagcctgtccaccgcccaacagcctttagacctcagtgtgctc

SEQ ID NO: 278 - DNA, 1300 bp, Homo sapiens
cggcgatgagacgtgctgtttgctccccgcgcaggccagatcgataaggaggccgtgcagaagtacgcctacctcaacgtggtgggcatggtgggctccatcgacaatgatttctgcggcaccgacatgaccatcggcacggactccgccctgcacaggatcatcgaggtcgtcgacgccatcatgaccacggcccagaggtaaagcgctcagaggaaccggcgggaggccagtggggcccgacgtgtgcccagctcagacgttaccacgggctctagaacattctgcagattgggtgtcctggtgctggtctcgtaacttgacttttaggagctattgccagaacattgttctctggtctacttttcatttttaattttaaaacattccttgtttttaacctgatgatagaaaacagtttattagaatttggaaggaagaaacaaagtaattatcctctaaatgtcctacccaaacatctccagaaggagtggcaagcaggaaactgttgtgtggattttccacactactcattagaaacgcagccagcgatgtcctgccctgtgtaacctacggattcacgaagtgtcgtgggggccacagcgtttgatccgaggtgctctaggctcagcaggttatcactaaagactgtggggcgcaccgtacaatttctgaagcaatttgcatgaaaaccatgtggaatggtaaatagaataagtgtctcccctttaaggacgaggtgctcgagactgggagagtgcccgaatccagtccccagcatggcgcctcccagtcctctgtgtgcgtgtcctgttcccagtgacgcctcactggacattctcagtgcgtgggcgtgaaccccacagttggtggaaaatcaccgagttggaaggctgctcggagcagttggatttttccattccctgggaagacccacagtctctgggcattaagcacttagtgagtctggcactcacttgtttccgtgggagagatccagccgtggctgtcgacagcagctgccgactgtgcccaatagagaaggtatctgggaaagagcccagcacggggccggggagtgtgagtgtgtcctggcacaggcaggcagaaggtgtccaacgtgcaactggagagcgcagaggtggctcaagtccccttcctcgcaggagtctggaaggctactgcatagcgtttgccttagtagaaaatggaccatttttgaagcctaggtccctgcaggcctcctggctaactcggctgtcaaagccccttttctctgctttctgagctgtttccagga

SEQ ID NO: 279 - DNA, 1300 bp, Homo sapiens
agcactttgggaggccgaggcagaaggattgcttgaacctaggagttcaagaccagcctggggaacacagtgagactccatctctacgcaaataaaaaataaaaaaattatctgggcaaggtagtgcacacctatagttccacccactgtgaggctgaggcgggaggatcgcttgagcccaggagtttgaggctgcagtgagtttgcaccatggcactccagcctgggcaacagaatgagaccctagaaaaaaaaaaacaaaaaggaaaaattccctggctgaggctggaggattgcttgagcccaggagtttgaggctgcagtgagtgtgtgccactgcactccagcctgggtgacagagtgagactctagaaaaaaaaaaacaaaaagggaaaattcccctggcaggactctcagatgctgctgagtagctctcagtcctctctgtaacccaaacataacacatctatctctgtgcttacactgggtggctttcacttgtttatctgtgaattgaagagaagttgcttgaggtcaggcagtgctcctcattggtaactgccttctctggggctaaccaaggacctagaacagaataagctattgaaaattgttgaggattaaaaaaatagaaaaaatagaaatggcaaatatctaggccagtcactggacatagagaatgttatttaattcttatcgcacgtccttgagacatgtattgctatttgcattttgtgtgaatatgaatttgggtaagtttatgtaatccctcctctgcagaactgggattcaaatgcaggtgtatctctgttcaggtccagactcttctgccctgaagcagtagtacttggatggaatgacgtagggttggacaagccacacagaggccacttcctctcacttacttttctttgcttcccactcaaccaggacagttcccacgcactttttcaagattcttatctgctcccacacttagggaagttcccaatgcaacctatcaatccatcaccaccacgaataccagccaggagaggtggggaaaggagtttaccacatggtcgctgggtgtgagcaactgttccctgtccctatggcttcccacttgtggctcccaccatggcctggagttttgggtggagtttttcaaataaaagccctcagcattgcaggacggcacagtggtgagctcttagcttcaccaggctcatcaaagctgctccaggaaggcccaagccagaccagaagacatgcagatcatcaccacagccctggtgtgcttgctgctagctgggatgtg

SEQ ID NO: 280 - DNA, 1400 bp, Homo sapiens
gcgcaggccccagcggcctggtggagggtgcagggggcgcaggggcagccaggaccgccgaggacgctgggggcacgtggcaaactggctaccctgtccacccgtgagcaagacaccactccgggggcgtgggagggtccaagggagggagaaaggaaagtgccaccaaactaatgtggagccctgccctctgcatgcgaaaaggggctccacggcctgagtcaccctcagccccacctgcgtgtgcgcgagggtgcgtggcctggtacgcgtgcgcacggtgttggtgagcgtgtgtgtgcgtgtccgcttgaggggaatgtgaccgtcgtgtatgcgtccgcgacagtgcggggggccgcatatcggacccgtgcgtgtgcgtaggggtcgcgtgtggccatgggcacacgggcgtgcacgcacgggggctgcgtatgctatgctggcgtggggggtgcgggcgaggtggccgcggggaggagcggcgccagcacctctcggcccccacgcggcctgcgtggctttttgacccggaaaggcggggacgcggggacgcgcggcggcgggggcgcggcgggggcggcgcagagcgaggaggcccgcggggcgcgcggcggggacgggagggaggcggggggcgcccggggccgtccccgccccgcgccgcggcgccgccgttgctaaggccgggcgggcggccgccgggcgctagggcccttagcaacgggtcgcgggcgcgcgcggggggccggcgggcgcgtggggccggcggcgctcgcgggctcctgccgctcccacgcgcgcgggcggcgggggcggggcggcgggcgcgccggggatttccagcgcgcgagaggaagtgcctgcgcggggctgcgtgagggagcgagggagcgagggagcgcggcgcggccgccgcgtgcgcgagccggggttgcagcccagccgggactttccagccggcggcagccgcggcggccgccggctcttccccgccccccgccatggggcagcccggggagcagaacgctgcggaccgcggcggaggacgcgcccggcgcccctgagccggccgagcggcgacggaccgcgaggtaaggggccgcggcgggcgggcgggcctccggcgcgcggccgggcgcctccatccccgtcgcctccatcccgcgccctgggcggcggggcccgggggcctcggggctgcccggcgcgggcccggcgcggcgcaggcccggcccgtcccagcggcgacggcggggcgcggcttcagcctggccccgcgccccagccgggctgcctcccgcctccggacgcctcaacttcggcaaactttgtcccggaggccgggctcggggcccgagggggccggggcgcccgcaccttttcaggaaacgggg

SEQ ID NO: 281 - DNA, 1300 bp, Homo sapiens
gaggtgagcagtgagcggcgagcgggagggcagcgaggcgttcgcgggccccctcctgctgcccgggcccggcccgctcatggcggccatccgcaagaagctggtggtggtgggcgacggcgcgtgtggcaagacgtgcctgctgatcgtgttcagtaaggacgagttccccgaggtgtacgtgcccaccgtcttcgagaactatgtggccgacattgaggtggacggcaagcaggtggagctggcgctgtgggacacggcgggccaggaggactacgaccgcctgcggccgctctcctacccggacaccgacgtcattctcatgtgcttctcggtggacagcccggactcgctggagaacatccccgagaagtgggtccccgaggtgaagcacttctgtcccaatgtgcccatcatcctggtggccaacaaaaaagacctgcgcagcgacgagcatgtccgcacagagctggcccgcatgaagcaggaacccgtgcgcacggatgacggccgcgccatggccgtgcgcatccaagcctacgactacctcgagtgctctgccaagaccaaggaaggcgtgcgcgaggtcttcgagacggccacgcgcgccgcgctgcagaagcgctacggctcccagaacggctgcatcaactgctgcaaggtgctatgagggccgcgcccgtcgcgcctgcccctgccggcacggctccccctcctggaccagtcccccgcgagcccggagaaggggagacccgtgtcccacaaggaccccaccggcctgcctggcatctgtctgctgacgcctctggcttgcgccaggacttggcgtgggcaccgggcgcccccatcccagtgtctgtgtgcgtccagctgtgttgcacaggcctgggctccccactgagtgccaagggtcccctgagcatgcttttctgaagagccgggcctcagagtgtgtggctgtgtgtctgttcgactcccctcgccccattttcaccccacccccgcctctgatccccgggggcgagattggcgcgggagtgtggccgcgccccatcagatgttcgcccttcaccagcgggagcttgatatcccttgtctgtaacatagaccccgggtactgcgggaggggagggctgctggggaggatggggggatgttatataaatatagatataattttattttcggagctaagatggtgttatttaagggtggtgatgggtgagcgctctggcccaggctgggccagactcccgcccaagcatgaacaggacttgaccatctttccaacccctgggga

SEQ ID NO: 282 - DNA, 1300 bp, Homo sapiens
gctgtcatcacagtgggcctggcttaccttgttgctctctcccctttcgcctttctcctttctccctgttgcagtcatggacttcactcataatacatatacatatacatatacatatacatatacatatacatatacacatacacatacacatacacatacacatacacatacacatacatatacatgtttttaaatcgggcagccacccgctccccgccctcagcccggaataggttcagagaggtgcccgggttcacttgcggagcgtgtggcctctgcgcctaacgcgcgccccttcactacacgaatgggtgcgggcaagggtataggattttagaattccaagagttgtcgggggtcatcccgtggaatcctcttttttgcagatgctcttcctggagccttccgatgcaagctcttgggctcacgcagcccttttcctcttctaagcccagagcgctttcgctgctgctgatctccacggcctcggcagatagggaggggcaggcaggtgtcagcgtcctccctttcaccgttggggaaactgactcagagaaacaaggcgacgggcctcggcggggcgggaccgtaacgggaattcaaggctccaggccagagcggaatttattgtgtctcgttttgggaagcgtgaatgtgaaatgatcgacttcggagccccaggcggagacccttcagtccccgacaagaatcgggatggggtctgggattaatgcagtaattactcgcgcctgggcattgaccccttggcaacttcgcaagatccggcagggtccaccgcccttcccttcacagggtgaccacagggctgcggcctctttaaggcccagagctccgcccccggctcgtcgccaaccccctcgccgcagctcagccagttccagactttcctcagagatgaggtcatctccccgttgcccattggctgcgccgtgccgtcagtcacaggaagtcaggccgccgttttcgccttcttcatgccgcttccttctccgcccgccctttagtccgccgatcacgaccccgatcaggcctctgattggctagcgccgccgtcacttctccagcggacagtcttcaggacgggaggcgggcgtggtgggcgggcccgcagcttccgtggctgagaggagccggcggcggcagtgtctgtggtggccgcggcggcgagagcgacggtcccatctttcccaccctcttggttgccgctggccacacgccctccgctggcggcgacttctcagctccgtgcgcccgggctggacagtgagcctcgaga

SEQ ID NO: 283 - DNA, 1300 bp, Homo sapiens
acgattcactccatgaaaatgttgtcgtttttctagttcagctggtaaactggactgtgaagaaagaatgctctaagcacagtgttaaattcacaaccagggcccaatcctagtttcgattcactcactgacaccctggttgctaattacaagtctgaaatccatcaaggtagttaacatctctaaacatcaaagcaatagcggttttaggccctaagaaagtgcagcccggagaagtattaatgcaaaatgtgctacggctgttatttaaattctattcaaatcgaatgtggcttgcctatttataatctgacttataattctggacaaccaagctacgttgggctgtgttcctcggctgccacaaatcatcgtcacaggctgaaagctcaactgcttcgtgctctttattttttcatgcctatgccaacgttgccgatgtggtaaagctgtcatcacgccgccagaagggcggccttctttggcacgagcagcctaagaggtttccggctgctgcggcttgagctccgatttgatcagacgccacgaaagggatttagatcgtggccatttttcaactaagtgcgtctgccgaatttaatagcaaaccaaaagccacattttctaatctccagttaggcgtccaagaggaaaagtggcgcttgctggctgagggagcagcgtgtctgcaattacagccacgtcttgcctcctggtcttttcctcagtgtgggattgtctttttgttttttgcctggtctgagccggccccacagaaagaacagaccagacgagcttactgaggtaaaacgcaggggcggcggtgaggtctagggggtctactcagaacgaggcagagacaccagcgaaaagcgccgtatggcgaagctaactcaggcctgacaaaacacccaccctactctaccgcctctccggccaaggctgacgctacgggccagagggcggagccgtcacatcttcccgcgagaccagccacgcgacttcccagaaggccgcaggcaacatcttaatagcagccaggaagccggaccggagcggaagggtgggcggggcttgcccgcatatttagcggcacccgaggccacgccccagatcggaagtgacggagacgtgctagcgcgtcgaaggtagctctatggttttcctcgcgttcttgagtcgggaaatggccgctgtgtggttgcaacggagataaattcccggaaccgcgattcggcgtgtcaggtaggcctcgcaatgtattcaagttactccaggggcagtgaagaccgaggacagg

SEQ ID NO: 284 - DNA, 1300 bp, Homo sapiens
tgtgcagcagggagaggtgaaggccccactggagagaaggggagccccttgtcctgcctgcagcagctgccaatggaaagaaagaagagttgggagtctaagctggaggttgcggggccaattcccttttggcaggcgagaatccggactcgggcggatttcaggcttcagtgtttgtaggaggaaacacagcaatcacactattaatagtaaattaaaataaatgggcaactgctgcatggtaatacttttttttttaaggcaaaaaataaaaaatagtgaaacagagaaacaaaacatgaaacaccggcagtcaacaggcaggcaaagaacctgggggtgggggtagcagcggtcccaccctcaaaaggcccgggctgcccagaccaagagaaagcgatgaatctcttctggtaacgtcccttcctgtcgcatggattcaaggccgacctgccccagcaccaccaccagcagccttctgctggggccggcacagctgggagcaacctcctactctcaggcagacgcgcagcaccaagcagagaggcccggtgcaggatcccagcgccgaaccagcgccggctcagtggacgcggaaggggccggcggccgcggccggtcccatcccccactgcagacccccagcctgtggcggtggtccagttccgccaggaaaccgccgcctggagctgtgggtcgcgcacattaacgcatccagcggaaaaatgaaggagacccaaattcaaagttaaagtaatggtgacccgagaggtgccttgatgagaaggtttggggtcccggttactgatggttatcattcttacgagatgctggtcacctacgaagggagaaaggcacgaggagcgcctgaccaaagtggttttgccctgcttcccgcaagaggtggcacccacggctggaacgcaggagtcagacccacagtccccagctctggacgcccgcagcggggcctcgaagaggttcagggcggtgcccgcggcgctcgggccgggtctcccggggcgtggggcggggggcggggttgggcggcggccggggctcctccctcttctgccccgggctcccctgctcttaacccgcgcgcgggggcgcccaggccactgggctccgcggagccagcgagaggtctgcgcggagtctgagcggcgctcgtcccgtcccaaggccgacgccagcacgccgtcatggcccccgcagcggcgacggggggcagcaccctgcccagtggcttctcggtcttcaccaccttgcccgacttgctcttcatctttgagtttgt

SEQ ID NO: 285 - DNA, 1300 bp, Homo sapiens
aatatttgcacagtagggttttggccttatgaaccctctgaaggtccctaacagctttttaaagtcacggatagacttcggaatatgataagggacctctcatttcccctcccccatgccctcagccttaggtgtgagtccccccgtcacacggatgggcaaggggagcaggagaaaaggtgatatttacattttctccctacttgatcagcaactaattccacagcgccggacgtgagacacttcctggggatccctgttctccttttgtagtgaccataactgcccccagtcactgcccttgggcgtccctctgttccttccaggtacctcacggcagcaaatctggggatcccaaggtggaaggctggcccagaagtcctttagaaaaaccttaaaaaatacagatcccctcaccatggcctatcgccctgaagccgaaatctagcttttaaatttcctgggggaaacagccttgactagaaacctccctcccgtgggtcagtcttacctgataggtaagaggcagcccagctccggcgcccccgcctccccccggcctcccactcggggctctgtagccgcagtgcccccccgtggccccccaccctcactcctgcgtcttcccgagctcgccccctcccgttttcccagactcccctcgtgctttcgggtagccacccaaacacccccgcctgcgcccgccgcggggattcctgcgggccgggggcgccccggttggcgcgcgtgtagggaggcgctgcgccggagctggcggccgcgcaggggcgctgtcctagcgctgcgccggggtcggcgcgggcgccgctgcagcacggctggggggcggagaggggcgggcgcggggcgggctcggcccggaatgtagagacccgggcgggagcctcccggcggcggctgcccggctgccgagcgcggaggctccgtcacgtgtttttctcctccgagtgagacggcggcgcggtcggagggggccggcgcgcagagccagacgccgccgcttgttttggttggggctctcggcaactctccgaggaggaggaggaggagggaggaggggagaagtaactgcagcggcagcgcctcccgaggaacaggcgtcttccccgaacccttcccaaacctcccccatcccctctcgcccttgtcccctcccctcctccccagccgcctggagcgaggggcagggatgagtctgtccctccggccggtccccagctgcagtggctgcccggtatcgtttcgcatggaaaagccactttctccacccgccgagatg

SEQ ID NO: 286 - DNA, 1300 bp, Homo sapiens
ggccccagagagggcaggacaagccttgtcccgatgcctttgaccggcagctctgtgtattggtggatagatgcagaaacaaggaagaaatggagtctgctcctgagaagcttcaaattcaggccaggagagaagtcttaagaaaagacctccagcagttacacattcatatcaaccagcacaacacgggatggcgcccaaactccggcgttcacaagaggagacgtgacgtggtgggctgaggttaatcagggaaggtttcctgggggaggtgatccttgaactggctcccggggaacattcagagcatgattggtagacagaagggtgcagaggcgcccaggggagtacattgccccgtgcaaagcaggggcattggggactgtcttgagaccctgagggggtcaagcccctccttccccagctgcccctccttctagaacctctgcacatctagcctctggccctcctcttcactgcctccacctgctcccgcttgccatccctgtctcctccatcctggctgtgcagtaggaattccaggctcctccctgtgtctttgctgttcttcagactccatttatagagaatgagggctgataacaggaatacagtggcaaagactagactgtggaaagggttccagaaatcttttttcttttttaattaaaaaaaatatttgcagagatgagctcttgctatgttgcccaggctggtctcaaactcctgggctcaagcgatcctcccatctcagcctcccagagtgctgggattacaggtgtgagctactgcgcccagccccagaaatctcagtgctgtttggagctccatttctcatttgatgacttgctctgcgtggggaggtggggtctcattcccccaacttcctcagggaggacccctgccctccgctgctcctctgtcctgctagccttcctccaggaagcacactgggtgcagataatcaggacattccagagatccccaatttaagagggtcatttccatctcaggggactcccggatgggtgtttccgctctcaatagcccctcttgttttaccaggaaagatccagttaaatcacccactgaggtgacagctcattagcggggagagagatggagcatcgagtgacactgggccatccaggcggctctgctcccaccagacaggagctaggcctcactggcaggggggctgcccacagccttttcaggggctcgcttggcgggtgacggggccgcagccaggccttctctccctgccccttggtgaccccgtggcttcctgtctgctggc

SEQ ID NO: 287 - DNA, 1300 bp, Homo sapiens
gcctggtctgatcctaagtgttccatggagattttgtttttttaatgtaatgaatgattaagtcagcaaatactttacatctcttgtgtgctaggccctgtgccaggtggtgattatgggccctattctcaaaggactcctggtctccgtctgtcacttactttagaaacaagtcatctagccagagccagaagggcactggagatcactaatcaatcccatcattacatagctgaggaaactgaggcccagagagtaactgcaacatgttaaagactacacagggagcaaatttattttctgcttctaagccaggtggtttggccacagataggccaagaagaatacgaacagacaagccttgctgggtttcccactcagtttattactattagaccattccctttttccccactcacatttctgcgcatttccatggtcttcatagaatctaagcctaaaaatagagttttccttgagtctttgggtcttcatttctgaagactctcatgtcacagaaaactttaattaaataaatcgttatgcttttctcttgctaacctttttctacaggcatgtcagctgtgatccttatgatggggaggaaaggcaccccaccttctctgtccctacagtcctaatgccctacccagaatggggttttcaaaatcccaggacacccactctttgtttcttaagcactaaacctatatatagtaaatgtttctggaagtttaacttcagctcttgctgaaattttaaaccctcaatttccagaggaccatcgccaggtgtttttaaaacctcgataggaataagaaatgcttcccagaatggagacttccatcagttctagggagctattagcccccttgccctggctgtaatggagaccgctgtgtctgcctcctttcgcactttggagccaaaagaggaagggaccgcctcccacgtccacagggacctgacttccacctctctgcccagatttgcttatgtcactgtcgccccgggacggggaggtggggagctgagggcaagtcgcgcccgcccctgaaatcccagccgcctagcgattggctgcaagggtctcggcttggccgcggattggtcacacccgagggcttgaaaggtggctgggagcgccggacacctcagacggacggtggccagggatcaggcagcggctcaggcgaccctgagtgtgcccccaccccgccatggcccggctgctgcaggcgtcctgcctgctttccctgctcctggccggcttcgtctcgcagagccggggacaagagaa

SEQ ID NO: 288 - DNA, 1300 bp, Homo sapiens
atatcatgtgaacacagacctgtatatattgttagaagcagaaatctctaagtttacttttaaaacatgatccttgcctcgaaaccttgtagaataatataatgtccacataataccaagttatgaaaagaaacatacctaaataactaaataagtatattccttttttcccccagctttttttccccattctaggtttacccagttgtactgtgttgtttgtcataggccgggtgaggtggctcacgtctgtaatcctagcaatttgggaggcgaaggcgggtggatcgcctgaggtcaggagttcgagaccagcctggctaacatggtgaaaccctgtctctactaaaaatacaaaaattaactgggtgtggtggcgggtgcctgtaattccagctacttgggaagctgaggtaggagaatcgcttgaacccaggatgcggaggttgcagtgagccgagatcacaccattgcactccagcctgggcaacaagagcgaaattcagtctcaaaaaaaaaaattatctataaaagtataggtgcaactcctcaagtattaaagacaagatagctcggattggacttgactttcagagccataactattcttaatatgttggtttatcttggaatcagaccattttcagtttcaacctgtaaaacagtgtacaaaggaaacatggaaagttttctatatataaagggttgtgaaataataacagctcacagaaaatgctgaaatgatgatttgcttcagtaccctctgaaatttctcccctaccacccctccttcatccccattgctatcaattcaaattacaacagctaattctcaggagaacagtagaagcccagtttctctcctctttcccctctgaccctcctccaattaatctgactgcagcgtaaacctttgcggtttaatattgtgcaacttccacatttccctcgctctcccacccagccccctcccccaccaaattcaggggaactcccgttaccgcagtgccaccagcattactcattcatccccattcaggctttcctcagcatttattaaggactctctgctccagcctctcactctcactctcctccgctcaaactcagctcacttgagagtctcctcccgccagctgtggaaagaactttgcgtctctccagcaatgcatctccttgcgattctgttttgtgctctctggtctgcagtgttggccgagaactcggatgattatgatctcatgtatgtgaatttggacaacgaaatagacaatggactccatcccactgaggaccgtaa

SEQ ID NO: 289 - DNA, 1300 bp, Homo sapiens
aggtcccggggaagtagcatgcctggcacattgaatgaagagcaaggagggtggggaggctggggcggagtgagcaaaggagagaatagaataagacatcagcgtaggacctagggaatatctttatcatgattgcaagccttctgcgctgtctgtaataataatattattattttttgagacggagttttgctgttgttgcccaggctggagtgcgatggtgcggtctcggctcactgcaacctctgccttccgggttcaagcaattctcctgcctcggcctcccaagtagctgggattacaggcgcccgccaccacgcccggctaatttttgtatttttagtagagacagggtttcaccatgttggccaagctggtctcgaatcctgacctcaggtgatccgcccacctcggcctcccaaagtcctgggattacaggcgtaagccacggcgcccggcctgaaataatattaacaacagcaaaagatcattttgcaggccaggcacggtgctcacgcctgtaatcccaggaccttgggaggctgaggcgggaggttggctagatcccaggagttcgagaccagcctggacaacagggcgaaacccatctctaccaaaaattaggcgggcgtggtggcgcacgactgtattcctagctactcaggaggctgaggtgggaggattgcttgagccccattggtcgacgctgcagtgagccgtgatcgcaccactgcactccagcctgggtaacagagggagaccctgtccccgccccactaaaaaaaaaaatcatttttaaattgcaacctcccatctccatctgcaacaactccccgttctcagctcaactgataggtaacctctagagatggctgtagtacaagaatgaaaaaaggtactcattcataaatctgatccatagtggtggcatttccgggaaaaacgttccatacccctaccatccgggcgaccccaattgcacctggcggaccaggcaagggcggaaaggagcagcgcctgcgcgtggtgagcgcggccccgcccagcccgctagtgggcgggcagaaactggccacagagcagtctccggaagctgcctctggctgctctgttaacgtgtcccgcgagcgaggcgcgtcgcaaaaggtcgcggcggaacttccctgcgcttttcagaccatactctttacggtactaggcactgctgagctgggagatgtcggcggcgtgttgggaggaaccgtggggtcttcccggcggctttgcgaagcgggtcctggtgaccggcggtgctggtttc

SEQ ID NO: 290 - DNA, 1300 bp, Homo sapiens
aaagacatcattgttaaaccagcagggggagacaatatacaacagagcctctaaaaataaaatgtcttagggtactaaaactcctttggagttatggtgttgccatggagacctctgaactgttttggagagcagtgtgtaaattgacatgaggtgaaataaatttcaggagtttatgtaaaaaattaatttggtagaaataatgtctagattcttgcatgccatggtgtcttggttaagaacttggaatgtggagtcagctctgccacttacaagctatgtggctctgggaaaattacttatgtctttgatcttttcttcgctttaaaaagtaacctgtggtatagaattggaggggtaaagttcttggaatgctgagattattaaattattattcgttattaaaactctagttacttagcacttacagctctttagcttagaaatagtctaaatacgttgctatatttgcttttttaataaccagcgctcccgttattcaggtaaagaattaaaaacatctaaaaggtaattgctttgtaaatcctaacctctttcattcaaaatacctaaggtagatggctctttataaacgtgcccggctcagagagctctcatctatattatatctccgaatccaaatttcactgatgcccagtctaagagtgtttcctgggctttgagctttgagatagaacgaagcaggtggatcctggctttgactaggcagggccagaccaggcccgacccagccagcccatccgtagagtcagcatcagccgggcgtgaagattggtgtcggctcctgcgttccgccaagttcaggaacctggcatgggccggccgcctcccgcgaagggacacacctgttggtcaccgcgctcttactggccagacccggatattggccttctggcgtcagcggcaggggcatgtccctggccggagagcacaggccagagtggggtgacgtcatcgaaggcacgtcccagccttgcagagcggtgggcggggcctgcgaagaaggtgtgccgggggctggttggaggcgcgggcggcggggccaatgtggcggtgacgtcacggggcgggcggacgctggcgcgggtaggtaagagcagcggcgggcggtggcgctcactcccggcttccaaccgcgcggagcctctgccttggagattctcagtgctgcggatcatgtccctaaggggcagcctctcgcgtctcctccagacgcgagtgcattccatcctgaagaaatccgtccactccgtggctgtgataggagccccgttctcac

SEQ ID NO: 291 - DNA, 1400 bp, Homo sapiens
ctcttcaaaaaaaaaaaaggtgatgtctgtataatggactattattcggccgtaacaaggaatgaagtgccgatacatgctacaacatggatgaactttgaaaatattatactgtgtgcaaaggaaggtagttaccttcccgggttcaagcaattctcctgccacagcctccccagtagctgggacgacaggcgtccgccaccatgcccggctaatttttgtatttttagcagggacggggtttcactatgttggccaggctggtctcgaactcctgacctcaggtgattcaccagctttggcttcccaaagtgctgtgattagaggcatgagccaccccacctggcctagcagagagcaattttgaatacagctgttagattctgcactcatgccttctctaatccatgtcactggagtagaaataattgctttgacagaacctggtgtagatgtgtctgtaggaagaaactgtaaaatgaatggatcattttgtgaaatatctgccctttccccacctttcttttgcttctttgcctttttctccctagttttcatttctttcttttagggcgtcagccccccacctctgtggttgggagggactattgcacgtctacactctcgtggggatgaaatagtgtttgagttcgttatttgcatttgcgcgttatctccccgaggagatgacagcttctctgccagcagcgggcaaaggtgggctctgaagcagaggagaggaattatcaggaaaagctcattttcttctcctgtcctagggtttcactgatgaaggcctctgggacacccacgttgggggtgggggcggtgaggaccgccacctgcccgcggctcccctgcagccaggccacgcgcgctgttgctagggcaaccacccggccaggcctgcggctgccgggaagccccctcgggagcgcgcacgggaagggctgtgggggcgctggccggctgcgacgtcagacccccgcccctcggcgcctgccggacccagctccattcccagccgcgcctccttcggtgggcagccggccggaactcacgaatcagagcagccgacacatcgtccgctcagccaatcgtagcagatgtgtgatcccgccacctccccggaccctggcggttgtcgctgagttggcgaccgcgggagacgctgctgaggcggcttcggttgcgggtcggaacggcgctgctctgcggggccggtccaggctggcagctgccggcgcttggcggtgagggcgggctcccgagtggccccccaccgaaggcggtgggaccagcggctgaggccaggatgccgtccaggcggcgcggcggctcctcactcatcccaggtaagggggacgcggcgctcgctgcggctccgctcccctctcgtc

SEQ ID NO: 292 - DNA, 1300 bp, Homo sapiens
ggggctgcggatgcgaatgagccagcgaagggccgcccgcggcccctcggcacctctgcccagccgtcccgaccaggggaccagctcagccccggtcggggccccggcacccaggaccgctcaggatctccattccagtcccttcgcactttctgacggggaaggagagttgggagaacgagactctcaagtctggggacttctacccaccattaaagctttggcattctggccatttctttctttttaaaaaattattattattattttttattttgagatgggagtctcgctctatcccccagcctggagtgcagtgactcgatctccgctcgctgcaacttccgcctccagggttcaaacgattcttctgcctcagcctccccagtagctaggactacaggcttgcgccatcacgcccggctagttttttttttgttttttgtttgtttgtttgtttgtttttaaagtagaaacaggatttcgccatattggccaggctggtctcgaactcctgacctcagttgatccgaccgcctcggcctcccaaagtgttggaattacagcagtgagccaccgcgcaccaagcccggcccattctggccatatctatagacggatgcattgcacaggaggctcagcactaatcggtagatactgcgagatgctgggaggttaaggggcctacccgcaatatctctggccaatgccttgggctagaaatgccataattagccgctcttttgatcccttgcaaaatgcgaatcccaccgcacctccaccccacccgagtggtaatctcctagtggtaatctaagtgagcctgtgataagataagtagctcctggtggtgagggtgagaaattggggagctggagccccagccagggacgaggctgtaggggctagggcgaagatggaggctgctgggcccccagatggaagacggtaacgtgcgcccgcttcgtttttgctcgaggtcagtcaggtgcagactgaattcgaagtcgctccctcctccgctcaaccccgaccaggccaaaactaaagcagcaccgccccctgctgggccgacagggcatcagattttgctggacgcgggtgacaggcgagatagggagtgtccctgctgctagtgcccctgctgctagtgcctagttacctgcagtacttaccctccctgggcctcagtttttcttcctctgtaaaataaatgcgctgggccggatcttttctgagttctcttctcccctacgaattctagatccctcctctgtcctccctgcgccagggaccttcg

SEQ ID NO: 293 - DNA, 1400 bp, Homo sapiens
acacccagataatttttaaactttttgcagagatgggatctcactatgttgcccaggctggtcttgtgctatggggctcaagcaatcctcctgcctcaggctcccaaagtgctgggattataggtgtgtgcctggactcttctctttttctttttctttctttctctctctctctctctcttttttttttttttttttttgagacagggtctcgctctgtcacccaggctggaatgcagtggtacaatctcggctcactgcaatctctgcctcccaggctcaagtgatcctcccacctcagcttcctgagtagctgggactacaggcatgcaccaccacacccagctaattttttgtattttgggtagagacggggtttcgccatgttgcccatattggtcttgaactcctaagctcagatgatccacctgccttggcctcccaaagtgatgggattacaggcctcccaaagtgatgagcaaccacgactggccccattttcttttctttatagcacctttcactgtctgaaatgattttatctatttattttcttattatctgtctttctccactagaatgtcagctccttgagagcggcaactttgttttggtcattgctgtatccccagtgcctagaagagttcctggaacacagcaggcactcagtaaatgaacaaaggcactgattaacccctgtgcttgttcacaggctgtccgacatagaagagacacccaaataggcctagacaagaatacacgacagaccctagggtcatccacataccctggggacatctagaagctagggaccacctgcttccgcgcccgcggtgcctggagggtggagatcccgagttggagaccgagcactcccagggagggaggaaagatgctctggggggagccccgcccctccctgtatccccagcagccaatgggagcgcggtcctcctgacgccccctgggacgtgtagtccgggcaggggcgccctcgggcgccgccgcgcgcccctagactccacgtcccgtcgtgcgctgggaggcgcggggattggctgagccccgcccccggcccgccccgctccgctcgcgccgcagccccaagaatgaatgaaatcgtagcgcgctgggcggcagagcgggcggcgcaggccgggctgggcccgcgcgcggcggcagcggcgccccgggccggaggcggcccagccgagcgggccatggccaccgccattcagaacccgctcaagtcgtgagtgtccctgccgtccccgccccctgtccagacccccccaccaggagcccttcccccgcccgccctggggctgaggagggggacgcagcgcgcggaccgtagttgaatgggggcccccagcgcgaacccttgccccgggggtccc

SEQ ID NO: 294 - DNA, 1300 bp, Homo sapiens
tttttctctgaagcaatatcaaacattagaacaaattcacccacacacaatgatggcctctaaatatttgaagaccatgttggtctccatgagagggcttctttgcttcagactaaaccaaaccaggtccttgtgtgatatttcccaagcctctctttatcctgccaaccctccttggatgtcacacttggaattgtcaagggtcacttaataggcagtgcctggagtcaacactggccctctgttctggccagaaagacacactgtaattctgctgagtctgcaaagaatgttcaaggggtatttgtgtccgtagctgctcgtgcagcatctcagcctgcggtgtcagactcgaacccagagctgtgtcaaatgagtcaggactcccctctgctgcccttgtgcactggcaggggcactaggttactagtgctaggagactctggtcagtgcccatctgtgctgtcacatgcagggccctggcagtgaggtctggagaaggaagagaaggggcagggaaccccacacgttttgctggtcatttcccaccgtggtcctgccacgggaacccccttcttccacctccattccccactttaggcagaaacatctctcatcctttttcttttctccaagaatcttcccccaaaatcttggcatctcctatacacatctgtacctttgctatatctgtgggccttgttctccctgtaggactcctcttggaaagctaactccccctgacattggagaattttatcaaattgctgagtatcctcccttccctctcacagaccccatggcatgctcagatcacagtagaagacatttcctctgctgccaaacccatggcactctgaggctgactgtgtccacctcattccctcagctgtcttctctttgctgctattaccatgttccaagcagactttggagcatctcccccacagcagcatggactttggcagatttcttggggaccagcgatgtcctaacctgtttgcttttccagggctgatgtttgcagggtgtttttttttttcttttgaaccaaagcagaaatcatcctgtatccttatgcaattcttccggcaggctccaacagataaataaagcccaccaccctccatgggtctacctttcccagcagagcacctgggttggtcccgaagcctccaaccacctgcacgcctgccagggcctctctggggcagccatgaagtccctcgtcctgctcctttgtcttgctcagctctggggctgccactcagccccacatggcccagggctgatttataga

SEQ ID NO: 295 - DNA, 1300 bp, Homo sapiens
atgtcaagaaataaatctaactgaattacaaatactcagcagtaaagagagtattttaatgaatcagatgataaccatcagggtgcatttcatctccactaaatcttcgtaccaaggccagattctacatgaatgttggtacgtatttatgtaaatgtatttttaaaacaaaagccaattgatatcttatgctttaatacttattccactaatcatttacatagatgcatcacgtgcagtaatcatttttattacctattcacaagcaaaaatattagtataaactgggtacaataaaatagagaaaagaaatattcaaatagataagcgttttgttaaaaaaaaaaaaaagaagaaagaaaggacacatttatcaggattcctatttcccgtacataatatggatgtttgtttgtttttgtaagttaacgggaccggtggtttaacttgttattgaaacatgctcgaaaaaatcaggtagcttattttgtaattgcttgttatgaaaccactggcatttctctggggaaaataagttaaaaactctttagctatcaggcagtgggttttaattttttatattggttaaatgtaacagtggatttgcgtactctctcctaatttctaactttgtgtaatcattcttgaaaccccaaatctagattttaaaaaagaagccttctaaaagttttcctgaagtttacttttcagttacaaagagtaaaataactttctgaaatgccttctgtaaatcgtggtggtggtgcggtttgtttggggagatttgttttgtttttaaaagacagtgcactttcttatgaaagagacagggaaagttttacctgtctgtctcctgggtttgttttttttttctttctttctttttcttttaaagattggtgataaggaattctaactacttaatgagatgggagaggcctcactccattggagtggaggagtccaggtggaagttgatggattggacaggtaaagagaagagtcccgcctcctcatgcctatagttgggtatatattaggaaaccttaaattatgtacagagagagaaagagagagagggacttgagttctgttatcttcttaagtagattcatattgtaagggtctcggggtgggggggttggcaaaatcctggagccagaagaaaggacagcagcattgatcaatcttacagctaacatgttgtacctggaaaacaatgcccagactcaatttagtgaggtaaggattttagattttagcactccatttagagatgctttttaatttttatttttgt

SEQ ID NO: 296 - DNA, 1300 bp, Homo sapiens
ggtctggggcggggcctgagcttctgcatttccattgagctcacagctgaagcctaccctggaccacaccttccaatggaaaaggctccagtgtgatttctagccactagtattatctgcgaacttgggagaaataaaatgcaagttctcggcccccgcaagggctctactgaatccgaaacactgtggggaggcccaccactctgcagtgttttaacaagcaagtggttaaagtttgagagccacccgtaagtcacgggtttcctaacatgattggacactggaatcacctgcggattttttttttttttttttttttgagacggagtctcgctctgttgcccaggctggagtgcagtggcgggatctcggctcactgcaagctccgcctcctgggttcacgccattctcctgcctcagcctcccaagtagctgggactacaggcgcccgccactacgcccggctaattttttgtatttttagtagagacggggtttcaccgttttagccaggatggtctcgatctcctgacctcgtgatccgcccgcctcggcctcccaaagtgctgggattacaggcgtgagccaccgcgcccggcctgcggattttaactaatactactgatgccgcatctcaccccccctcccgagattctcaggtacggggcgtggccttggcggcggccttataaaagctctcccaggtgattccaacctgtagtaacacttgagaactgcgtgaggtggggacttcaactttaactggacttattttcctcctatgtaaaaggtggacaatatgcaagtggtcctgactttgcttccagattttggcaactccagagccctagttcggtctggagagccagcttcccgccccgtgtcctaaggcctctgtccgagaacccaaagtcctgggaatggacccgcgggagcggacccgcgggagcatctgtgacgccgctcagcaacccggcgccgccccggcggctccgacgtggcccagtgtccggctggcgtgggctctccaggccgcacccactaaaccgcgccggagcgggacacgcatgcgccggtctggacccggcacccagtaacggactcgagctcctcccaccggaagtgggcagccgcgcagcgggaagagccggccgaagcgtggcggccacagactgtgggtaccgggtccgagggactcgcgcttttctctccgtgccatggcgccagcgaaagccacgaacgtggtgcggctgctactaggctccacagcgctgtggctttcgcagctcggctccgggac

SEQ ID NO: 297 - DNA, 1300 bp, Homo sapiens
gtatagagtttcaatttcccaaaatgaaaacaactacagttggatgatattgatggctacacagcaatgtgaatgtacttaatgccactgaactggatactgtaaaatggctaagatggtaaattttatattatgtgtattttaccacaatttaaaaaaggaactcttagtacttgatttaggtggcacaactaccctatactgtgattttactttccatttaaatctcagtgaattaaagattgtttactgcatgtgtttagctctgtgtgtgccttctcaattctctcctattcttgtttctcacccaccaaggaatggtaaagcaattttcttatgggcacagttcatgctacaatctgagattcaattgtgtaaaaataccttgggaaatgacaatagttaacagcttcttgggcaataattataaatacacatgtgtaggtgtaagtattgttcattgatctgtgtacacgccctgcctaaaaggatagagctaccttgcctgtcattgcaagtgtaacacacattgcaagtgccaacgtgaggagccatggctggtgagtcttccccagtaagaggataggtcttagggaggaattagtttgggaaaggactgcctttctcattaggctttgtgaaggtttgtgtgggcagccttggggtggagagagaaagaagaagggagaggcagggtgggaagatgcccagacttgcacagcgtttttgaaggaacagataaaggccaggaagaatctgggatcctactggtatctgctataattttgctagtgttgtccacatttgaagagttatgtagttcaggatgagaatgggcacaggatgggtatcagtagctgttgttctcaaaggaaacagtcaattcccttcaaaattcatgaaactgtcaattcccttcaaaattcaagaaactgggatgtgtcagaatagaatgacttctgatttttaggagattcacagaaaaatcatgaagtcaagtttcccaggtcactcagtgagcatatgtaggtaatgctagaatcagaaggaagtacgtggagtaaatgcaaaggtataagaccgttccttgggattactgtacttgtggagagaaatgtttaaatgattgttaccctgttggtaaattgagagggaaattgtgtcatgttcattatttgaggaatctttgtgcttccaacagaccaactcttgcgtaaaaagagaagaatttttatccattcagtgggtgcaggcacaataaatgccttgctggattgcctattagaggatgaagttatta

SEQ ID NO: 298 - DNA, 1400 bp, Homo sapiens
ctgagccgaggccttggttaggggtgtggggcgggggttcggggcagtgccggggccttggtcccgggtgtggggttgggacttcggggccgggaccttcgtctcaggtgtggggcgggagttcgggacagggctggggcctgggtccctggtggggcgttcggggcagtgccggggccttggtcccgggtgtggggtgggagtttggggcagggccggggcctgggtcccgggtggggcgttcggggcagggccggggccttggtcccgggtgtggggtgggagtttggggcagggccggggcctgggtccccggtggggccttcggggcagggccggggccttggtcccgggtgtggggtgggagttctgggcagggccggggccttggtcccgggtgtggggtgggagttctgggcagggccggggccttggtcccgggggtggggtgaggggttcggggcagggccggggccttggtcccgggtgtggggtgggagttcggggcagggccggggcctgggtcccgggtgtggggtgaggtgttccgggcagggccgggaccttgatcccagctgtggggtgggagttcggggaagggccagggcgtgtcctgggtggccagggtcggggcctgggtcctgggggtgggatgaggggttcggggcagggccggggccttggtccagggtctggggacaggctagggccggggtcgccatccgtcctgggcggcgggcaggggtctttaaggggcgcacgcggtggcggaggaccagggcccagccctccggaagtcagggcccacacggccccccagcgtcaggcgctccggtcgcgccggggacggcgggcggggcgggcggggcgggcggggcggacgtgcggcgtgcgcggggcggggcgatgtgcgcgcacgcgccaatcgcaaggccgcgagcagggtgtacgcgcggagaggccaagaaggcggcggggcgggccgagcgtcgggtgcgcccaatcagcgcgccgcaacaccatgacgtgaggctctcccggggctgagcgccagtccgcgggaccggcgggtgagtgcgcgagttcagggcgcgaggcgcgggtccgcgcgggggcgggacttccgcagggccccggaagtgggagctgtgtgttctcatgcgaacgggaaggagcgttggggatctggagtcccggggttgagacattttcgggcccgaaaggggaagaatccgccgccgccgccgccgccagctcgcgcccgccctctcccctacctccggcccggcccggcccggccgcgccgcctctccctgccgtctctctcctcgccgtccccgcgtgtggcgcggccgccgggccccggggttgaggcgaggagcccgcgggcggccggtcgg

SEQ ID NO: 299 - DNA, 1300 bp, Homo sapiens
actggattacagtgattcttttgtaagtaaaaggtgactttttaaaagaaacaaccaatggaaatagaaattttatttacttcaaattaactgtactttactcaaatagaaaagaataattttcacattatgaagctacacaattccaaaatacacatgctgaggctctttttaagtccgaattgtctagtaattacaaaaaagtgaagagtttacagatatacaaggaaataaaggcgaattattgcaaagaaaacaagtttaatttcactttgaatgacaacgatttttctggaaagcagatacttcactcctttaagtttccacccaagccacaataatttcaaacggtcttgcggatgacccagctggtcactcttgtttatgtggggactggaggtaatgagagccaaaaaaagtgctataaacctaatttggctagagcaagttcacacgacacgaccgtgctttaaaaacttgctctccattatgtacttccttccatcaggttggggaaaaaaaaatggtggggatggtgagtaaacacaccagtggtttcatcagaggggaactcactactcaggaggtgacggtgacgtggtgccggtccctgaagtacgcgcacaagctccggaggttgcgggagctgagggaggaaacagggacacgatcagattcgctccaggtggcgggagtgaggaggggaggagtgacgaggcggacgtgcgggggcgggggtgtccaacacaaacacaaacacaaacacgaacacgaacacgctcagcgtccccggggagggcggactgaagccacctcaccattcatcgcccctggaccccgcagtccccctcggactcagggccagagccttctgcgaagcaacctagccccagggaaacggtagcggccgcagaagccccgctctctgtaacggccgcggaggagcagcaagcctccctgtgagtcggtgggagacaagacggagcggcggtaagggcggtagggaagtgaagcgcctctctccaccttgttagaagcgcgctgaaagcggcctgcctacccaccccatcgctgccgttttgcagtcgtcgctcccaccttccgctgccgcctggagggaagccggagcgacgggggtcacggcggcggtcagagggtaaaggtcttgctcccagcagcctccgcggtggatacgtcgccatcttggatccgcgggacaagaaaattcatgcggtgagtttttggtaaattttcggaagtctggcagcggggcgcgcggcgggggcggcagattcggggc

SEQ ID NO: 300 - DNA, 1300 bp, Homo sapiens
ggaaaccaagaagagctgggaggcctggtcttatcagtaacacacatgtgcacatcacagtttggttctgctaatcacagcagtgggaccctccgcacctgtctgggtcaaggaccacagggtgcaccagcccgcagggcagaaaatcatttcaccatgttgagcagcattcttgcagccaagcatgctccattcgaagggagaaaaatgacacttcccctcccattgtcacggggcgagtgtttgggactctaaatcccattgtcctcagcttaattctgggtaggtcacgctgagcacggcgccacaggccacagagctgtgcaccgcccggcctcaggtccaggcgagctcacagcagaagggccaacgggaggcagggaagaccggactgaggtggggccgctgtgtgtggagcagtacacgggctttctactcgcagacgcacgtcgcgggtacacgcgcttagaaggagcggagccgagaccctgccgacagcaggggacaggaaaaggcgcctcggtcgcgccccgcacgagttcccagccccacatccagggaaaccccagccctcaggtaccgtccgcaagaaggctgagcacacaggctcccgcagcatgggccctggcacctgtcagccccggcaggtctcacggcctccggaaccatggaccctgcgagtcgtgggtgtctagggccgactccggcttttcgccacaggaatgaacagtcctctgcttccccgagacccagcgaggccaccggagccaggacgatgggctcccaagcaaggagacgtgggccgctgtgagaagagggagcgcctggctagtgtccaggctgcaaggtcgttgccgctaactccgggaaaccagtggccagtgacaggtgttagcggtctataactcttccgctttcatacagctcccgtcatccctttcacgaagaacgtacgtgggcgcgcaatcacgcatgtatgcacaccacgcacgtacgcgggaggcacgtactcagccatgcatatagacagcaaacattatgaatctcgcattctcgaagacacgcactgacgacatcacgcacgtacgcacgccctggctgctaggagacgctattctctttacctggccctgatgcgcgccagccaaccaggccaaggccaggggacctcgagaccggcagcctcgacgaagaaccggaaggaggaaaaggaacgggagggaggaagagtaagtggaagggtgggacgaggacaccaggcaggagttttgggcccagagctgctataccagcagggagg

SEQ ID NO: 301 - DNA, 1300 bp, Homo sapiens
ccacagagctttctcgtgattccaccctacacctccccaagcccccgctcccctaagctggttctcaggagtccgaggggtcctcccgcagctgctcctcgctcagttctcccattgccccgccctgctcttcgcggggctgcttccaaagccccgacctcagccagcagtttctctcagccccgcccctccctgccccgcccctcccctccctgccccgccccgcttctcccgcggctgctcccaaagccccgccctcggccccctccccaggagtttctctcagccccgccccaccccgagccccgcccgcagccccgacctgcttctcctgtggctgcctccaaagccccgcccccaaaccttccccagcattctcagcccccccagagccccgcctctcccagccccgccctacttctcacgcagctgctttaaaaaccccgcccccagcccctcccagtgatttctttctccccctccctccttctctcagcggacacctgcctccccctgctgattctcaagagtccgcgagctcttcctgcagcttctcctcgctcagctctcccacggccctgcccacaatggtttctctcagccccgcccggccctgccccacaccccgcctcttatctcagccccgccctcaacccagcccccaattgtttctgtcagtcccgctcggcccctcccccagctccgccctcctcctctcagccccgcctccaccccctccccagcggtttctcccagctcctccctgctggtatagcagctctgggcccaaaactcctgcctggtgtcctcgtcccacccttccacttactcttcctccctcccgttccttttcctccttccggttcttcgtcgaggctgccggtctcgaggtcccctggccttggcctggttggctggcgcgcatcagggccaggtaaagagaatagcgtctcctagcagccagggcgtgcgtacgtgcgtgatgtcgtcagtgcgtgtcttcgagaatgcgagattcataatgtttgctgtctatatgcatggctgagtacgtgcctcccgcgtacgtgcgtggtgtgcatacatgcgtgattgcgcgcccacgtacgttcttcgtgaaagggatgacgggagctgtatgaaagcggaagagttatagaccgctaacacctgtcactggccactggtttcccggagttagcggcaacgaccttgcagcctggacactagccaggcgctccctcttctcacagcggcccacgtctccttgcttgggagcccatcgtcctggctccggtgg

SEQ ID NO: 302 - DNA, 1400 bp, Homo sapiens
tctaggtacatggcgttagtgagaagggaaccaatatttattgagctcttaccatgtttcagacactgttccaagtactttcacatacactaccccatttagtgacctgtgtaatccttgagatgggtatacattattctaattttacaggttagaaaatagactggataggccaggcgcagtggctcacgcctgtaatcccagcactttgggaggccaaggcgggcggatcacctgaggtctggagtttgagacctgcctggccaatatggtgaaacttcctctctcctaaaaatacaaaaattagccgggcgtgggggcgggcgcctgtagtcccagctactctggaggctgaggcaggagaatcgcttgaacccgggaggcggaggttgcagtgagctgaggtcgcgccactgcactccagcctgggcgaccgagcgaaactcgtctcaaaaaaaaaaaaataggttggattgtggtcaagtaatttactcggcgtcatgcctagtctagctccaaagctccagccttctccgcttctcacactgcttctatttaagcagtgtcctcttaaaaataatactggtctcatttattgggcacttgatatgacaaaactactaagtgctttatgtacgtattctcatataattctcaagacaactctggaaggtaggaactactctcccccttttacagaaaagataaaggagggtccgagacatcgcgcgtaacaagcccaaggtcacgggtacacaatcgtttggaagctaggtttgattccaaagctccagctccgaaatccaaaccacacccggttcaaaggacaaaagcacaaacgctcgctcgctgggctctaggaggtgcggacacttccgggggaggggcgaagccagctggctgcggaaggcggtgcaggaacccctttggcgagctcgcgcgaggacgtgccgcagcgccgcctgtcgatcaccttgccccgccgcacgtcggcgcgcccccgggcaagctcctcccccagtcctggccgagcgggaagcgaacgcgcgctctctccggttaccttccgcctcggggaagggcgggggaagtggaagcgcgcgctcgcgagctgcgtgctcgcgtacgtcgccggggttcggctgcgtccgtcccgccgcccgcccgttgccgccgccgccgctgccgccgtgctctcgctttgcccgccgccgcctaaggggggctggggccggggccagccatcactgccgttgccgggatgccgcgggtgtacatcggccgcctgagctaccaggcccgggagcgcgatgtggagcgcttctttaagggctacgggaagatcctggaggtggatctgaagaacgggtgaggagggcgaaagagggtccggccgggcg

SEQ ID NO: 303 - DNA, 1400 bp, Homo sapiens
acaaaacaaaacaaaacaaaagctgtaatcccagcactttgggaggcaggccgaggtgggcagatcacaaggtcaggagttcaagacaagcctagccaacaaggtgaaactgtctctactgaagattagctgggtgtggtggtggacgcctgtagtctcagctactcgggaggctgaggcaggagaatcgcttgaacccgggaggcggaagttgcagtgagccgagatcgcgccattgcactccagcctgggcgacagggcgagactccgtctcaaataaaaaaataaaaaaaataaataaaaaggccgggcgcgttggcccgcgcctgcagcccctgctacttgggaggctgaggctggagcatcgcttgatcctgggaggtcgaggctgcaaagagtcgagatcgcaacactgctctccagcctgggcgacagagcgaggtcccatctcttaaaaaaaagaactgtgctcaaggacatctgccgtgtctggggcgcaaaacccctcctggtcccctctctcagggcagtccgcgagcccagcggatcccactcgtctttgcagcgcggacagggaatcggctgagttgatcccatgccaacaagcccgagtagtccgggcaaggcgctcggcggggcagtcaacgctccctccgccatgggctcccctcttgggaaaagcttttccaaaccgccgggcccagggcccagagctcccgccgcgccctcgacgtggcgtcgagtctggccccttcccccgcggcgcacgggcttcacccaggagggacgcgcctggatccacgccttcctcactgactccccgggctccagggcagggtgcaggtccacagccagggcttcgctgcggcccctgagaccccagtgcctttcctgcgctctcgcggcactcgcaaagttgagtcagccacgacgcccacagacaaccccgaggcgccgcgcccagggcgcagctctccgggtgacgagcgcctcaaggggcgcgggttcggggcccgcgacggggcggggcgcgtctccagggctccagtgctcggcctcaggcggggctagaagggccgcgggacggggtgggagtggaggggcggggaagggcggggacaggggcggggccgcacgtcctctcgggccagcctcagccgccgcgcctcagtccgccgtccgccctccgcgcccgcgccgctagcatgaccgacgcgctgttgcccgcggccccccagccgctggagaaggagaacgacggctactttcggaaggtgggcggcttcgggcgggcgggcggggacctgcgggctccagacctcctttcccccgggccctgcaggggccgtgggagcgcgcagtcggggtccactaggccgggagggggagggggcgcactg

SEQ ID NO: 304 - DNA, 1300 bp, Homo sapiens
cgtgtacaccccttcccgggggtcctccccattcccagtgtctctccgggactctactttctgagatcccccgttgcgtgctctcaagacagaccgcacagtcttggctgggtgggttcgggggtgattagtaaggcagcctagccccccaaatctggacataaggctggtctgtgacctcctggctctttagttcaagccgaaagcacccttaaaaatcatctagcggccgggcgcggtggctcacgcctgtagccccagcactttgggaggcagaggtgggaggatggcttgagatcaggagttcgagaccagcctgggcaacatagcgagactgtctctatttaaaaaaaaaaaagaagaagaagaagaaaaatcatctagtggccaatgtcttcattacagatgagaaaaccgaggcccatttaaataccaagtgacttgcccatatgcagttaggatcccacaccagggccaggagtatttcacgttttctgaagcgacacgacaaactctcatagaaagcagagcttgcagagcttaatatgttgcacaagggcctcaccattccagagataccgatggcaactgaaactcgggatttggaatcttggtacagctatgaagtgaaacaaaaccagctcttcagtccttgaaatgaagaaaataacgagtggggtaggggtctggtgccctctgacaatttagtgcacccgaaatctctggggaagaacccacccttcacggcggggcttcacggacacgaaggccatcggtgtttttcacctactggggagaagggatatgtgctctctgactccttcaaatgttttctacagcagagatggcagtcgagattaatacacacgcctcgtctcactccagaacacaatgactcaaaaccgcacgacgtgtacttttggaaacagctccgcgggagagcacccgggacaatccccaaaccccgttgcccgcggggtggggccgcggacgtgcgccacgtcgtgtgcgtcccgggcgtgcgtgcggcctccagtgcgcgtgcgcgtaccctcctggggcgtgctcgcggctataaggggcggaggctgggcggcgttgctctgcgctctgcggctgacggcgcttttgtctccggtgagttttgtggcgggaagcttctgcgctggtgcttagtaaccgactttcctccggactcctgcacgacctgctcctacagccggcgatccactcccggctgttcccccggaggtgagcggccctgtgggcttccccggctccccacccccatcgctagagt

SEQ ID NO: 305 - DNA, 1300 bp, Homo sapiens
accgtgctcggccgcaggacgactgtagatgatatcgtattgtgtgttgaaattttgctaagagagtagattttatgtactcttaccacacacacacaaagagggtagtcatttcacaatgtctctatgaaatcatcatgttgcacaccttgtatacaaccaaaaatcaatttttagaaattggtttcaatcgtgtatgatatatatgtatatgcacatgtatatgagatattatgtatacgtatgtgtggatataagacacatgtttatgtataggtggtccccaacttaaaatggctcaacttacaattttttgactttgtgatgggtttattgtagcattaaatacattttcaacttacaatattttcatcttacgatgggtttatcaggacaaagccccatggtaagtccaggagcaaatatttttgcatacacaggtatgtgtacatgatacatatttatatgtattgatgctgtatctatagatgcatatgtgtgctatgtatgaggcaaatctgcgcatgtctgtgtacatggtaaatatttacgtccgtctgtgcgtgtcatagacatagaacaggtgggatgtaaacagacgggctgggcctagctgctcctttcccgcctcactcgagtctggcaccagattggccgctcccagcccgctccgggtgccggcccctgcaccccaccctgcaccccgcaccctgccctgcaccccatcccggcccgtgcctcgcactccacctttcccgcaccctgccccgcacccaacacctcccgcgcccctcgccgcgctcccccagcacgcaccaggccccgcccactccgccgcgtgcccagcccgcgtcaccgccgtcctccccaggctccagcgcgccttgcggggccgcgcacgctagcggaaccgccgggaagagcgccgtgccgtcaatggcggaggcgcgcacgtctgcagggccgcgcacgtctgcagggccgcgcacgtctgcagggccgcgcacgtctgcagggccgcgcacgtctgcagggccgcgcacgtctgcagggccgcgcacgtctgcagggccgcgcacgcactgacggctgaccgccatcttccctcccgaggcggcagttccaggtgcaagcgccgggtttgctgcccgctgggcgcccctgcagcggcccgagctgtggccggcgtggatgaggggcaggcgaggcagggccgcccctccagtattgccgcccctcccgccccagggcagggctgggagggtacagcccgggggcgggctcgggtcgcctcccggcc

SEQ ID NO: 306 - DNA, 1300 bp, Homo sapiens
taaaactaccccttgggtaactaagtataacaacataaacttgcgattgcaaattttatggctcttactacaaaacaaaaagtagaatgaaaagaccacttatctttagaggacaagcatgaacttgttttctaacagcataacaataaacgtatttatttctccgagctttcaaaggcatcaacagaagggaatcactaaaaatgtaggggaaaagaaacactcggctggagctttggtttctaagcagatccttctggaaagacgcttagggagagtctagggagcagctctgacgtcagtagctgccatcggaagtcaggtcatgttctacaaaaagcagtgacgcacgcccgacagcacccgcggggccggacagcggcttcaccagccccgcgggtccgaatcgcacgcggccgggtccgctctcccgggaggagagcccggcgtggaccagcgtgacgaccccagcgtgctgcggcctctccccgagggcccctccacaagggtccctgcgcgggccgggctcggccgttgccactcgggacagccatcccctcgagttcgcgctcgccgtccccgccttcacctcccgggttgggaggcgggcgactgcgcgcgaggtaaaggaacttgcgttccccggcgccgaggcggcagcagcgcagtgcacagcggcttctgaaggcggcgtcgacggggagctgcgcgtggctcccagtttcctggttacgtgcgcgccggcagagccaaaacctgcagccgaaactcccgcttctccgtaaggattaaagggcgggcgcactaccgggagacgtgtcaaactcagcgcgcctcatggcggccgcggagccccacccgctcctactccagtcctctcacgcccactgacttaccctgcgcacgcgcgctgaggctccgtggggccgccgcgggccccgccccgaggtgggagggcctgacgcatccacagctggccaatcggcggatggcctcgcgcgcccgccccctccccctgcccccggcgccgggctccacgtgccagtgtttgtgtacgtgcggccgtggcggggctggacagggtccgggtcgttgaggattaggctgctcgggcgtaaccggagctggggcgcggctgccaagggccggcccggaagtcccagcggtctttaaattctcccgtgctagggccagcctgcgcattcttacctgtcggggtgcggcgagtgtctcacctctctgcacttccaaggactcttgtcatctgccttaggcgggaaatgctgttgctggattgcaa

SEQ ID NO: 307 - DNA, 1300 bp, Homo sapiens
ctccccaatggcttcgctcagacccgccctgccccgaacccccccctgcttctcccgcggctgcctccgaagccccgccccgcgccgagccccgcctctccccatctcctccctgtttctcccgcgggtgcttccaaagccccgcccccagcacccccctcagcggtctctctcagcccgatccaacccttttctgagccccgccctgtttctcctgtggctgcgtgcaaaccccaccccccagccccaccccagaggttcccctcggccctgccccgcccccccagccccgcttctccaaaggctgttttcaaagccccgcccccgagcccctccccggcggttccctcagccccgccccacccctccccgagccccagccccccccgaaccccgccccgccccactcctcccccagccctgccctgcttctccagcaccagcttccaaagccccgcccccaacccctccccactggtttctttcagccccaccttcctcctctcaccagccccctccctccccgcgctggttctcaggagtccgcgagctcctcctgcagcctctcctcgcccagatcgcccatagccccgcccccaatggtttctctcagccccgccccaccccctcgagtccccgccccatcccaagtccccgccccatcccctcaagtccccgccccactctcaaccccgccccagcggtttcctcactcccgcccttcccctcccccagctccgccctcctcctctcagccccgcccccatcccctccccattggtttctcccagttccttcctgctggtctcgcagctctgggcttaaaaatcctgcctggtggtctcgtcccgcccctcctcttcctccctccggttccttttcctccttccggttcttggtctaggctgcctgtctcgagctccccggccttgtcctggttggctggcgcgggacaggatccggtaaactgaacagcgtctccttgtggcaagtgcgtgcgtacgtgcgtggcgacgtcactgcgtggcttcgtgaatacgtggcttcctagcgatttggcggtgtataggcgtggctgaatacgggcctcctgcgtacgtgcgtggtgtacgtacgtgcgtgattacgcgcacacgtacgttcctcatgaaagggacgacgggagctgcatgaaagccgaagttatggaccgctagcatctgtcactggccaccggtttccgggagtaagcggcagctaccttacagccctgacacgagccgggtgctctctcttctcaccgcggcccacgtctcctcgc

SEQ ID NO: 308 - DNA, 1300 bp, Homo sapiens
tggcgccactgcccgcggcggccgccctccccccggccgcctcgctgcccgcctcggccgccggttacgaggctctgctggccccgccgctccgccccccgcgcgcctacctcagcctgcacgaggccgccccgcacctccacctgcccagggacccgctggccctcgagcgcttctcggccaccgcggccgcggccccggatttccagccgctgctggacaacggcgagccgtgcatcgaggtggagtgcggcgccaaccgcgcgctgctctacgtgcgcaaactctgccagggcagcaagggcccgtccatccgccaccgcggcgagtggctcacgcccaacgagttccagttcgtcagcggccgcgagacggccaaggactggaagcgcagcatccgccacaaaggtgccgccgcccctcccttcgctgccgggacccgcgggccccgaccccaccccctacccgactcggacacccgggagcctccggctcggccgagggggcgctgcagctccagggctgcgcggggacacccccgccgcgcgcggaggcctcggtgaacacggacagatcgccccccgctgcacctccccccagcttgggccacagcgcttggggctcgcgggccgctccctccgctcggaaggtctctgcgaggctcctgggccttaaggcccgaaggaagtttacggggactcgagagagcgggcaggaggcgggttgggagggcgcggagccccgggttcgggggagactggaggggcgcacgtgcggccgggtgcgagcgcgcggcgggggaggctgcggggcggcgcgggggcgcgcgcggagcccgagcggcggcgccaggtcacacaacctgttttggcgcctgcgggcgcctgggcccaagggtgcgacgcgggggcgcctgagccgggacacagggggtgcggtgagcgccaggcgccgcggggagttaaaaagttcgggacctgagcggtgcgtggttccgcggtggccgcctcttcctgccgcgcaggccgagggtcccgacggcgccgctcaccgctccgggactcagcctttctgggcccggcctgcggttccctcggggccggggagagggtggagcgcgggaggaggggcgccgggtggggacgcccaggcccttcgtcgggggagggcgctccacccgggctggagttgcagagcccagcagatccctgcggcgttcgcgagggtgggacgggaagcgggctgggaagtcgggccgaggtgggtgtggggttcggggtgtatttcgtccacgagccgg

SEQ ID NO: 309 - DNA, 1300 bp, Homo sapiens
tatcctttcttctcccatggtgtatcctcactgtccaggactctcttctcagaagcccactccttcccctgtgctgtttatatgcttaatgaaaccaagtacccaaagtgaccgttcaactgttactaggcagctaagtagactccattaaaccttttccttccttcctccccttctttctttctctcccattcttctttcattcttctcgtccttccttctatcctttcttccttcctgcctccttttcttcctctcctctgccctttctttcaggtcttttttgtggtaggaactggtaagaaaaggaaaggaattccctaagattttaaggaaacaacaacaaaaaccaggttatgtttggtgagagagttggggcaagaaactgcatcttctaatatggaatccaggtaatttatcagttttttttcatagcatgactacggtgagatttcttgtaagaaaaaaaaaaaaataccagcatcgctggcctcatatattggattatacttaaggggatcaagggataagatgtttgaatttggagatgtcttgaaaaatcctgtggtgagcacaaatgtttgcagtgtctctgctggactcctcaaattgggaaaaaagagactctggttctcatcatagactcaaaacctgaggaaaagcgagatgcgattattagataaactggcaatgacacgcacaaaaatgtgtctattccagccagggcttttcttttcagttgtttgttttggttagagatgactttggggaactgcatgtcccactggacattccaagctgcgttgtcggagtcgcgggtcgcggcctccagtcagcggagccgccgcccccagggtccgccacccagaagtcggcggaggggggcccgccggcgggagcgcgcgccccggtcgccgtctgcgggtagaagcagaggaaagacggtggcctgggagcgcgcgaggccgcacgtgcgcgcgcccgcccgcccgccagccagtccgctcgcccacgcgcccacgcacgcgcccgcccgcccgttggcccgggaagtctcgcgatgccgtagccggctgctcccgctgcgggtggctcgggctgttgctgtggtttcctgagttgctgctgctgcggcggcggcagcggcgtctgtgcttgtggaggtgtcggcctctgggcggatgttgacattgtgttgttgttattgctgatggtaatggcggcggcggtggcggcgacggtccagaccccatcccctctgtagccggagccgagacagccgacagcgaactccgcggcc

SEQ ID NO: 310 - DNA, 1300 bp, Homo sapiens
ggagggactgagcccggggcagcccacaggggcaggaccgcgtcgcttacccagatgccgccgcggcggcaggccgactcctccgtgcaggaggggcgggctcccaagccgcgcactgcaagcagtggcgccggctcacgcacccctcggccgcctctcgcgcggcttcccgcgccggcagcccgcgatggccccacgtgaccgcgtgtctggtagcaggggaaagaggggcgccagggccggggtgtgcgtgcgtgcgtgcgtgcgtacgtgcgcgccctcccgcccgcccgcctcagtggccgggcgggggtcggcccgcgctctgagtgccgccgccacagttcgcagttgtgactctgtaggcggaagcatagggacaagcctgagcgtcacaggctccccacaaacaaccgcgtgacccggggactttccccagggtgtgcaaaagcacaggcaccccctcagttctggggtgaaggtgggggtggggaaggatgcgcccgcgtgttcgctggggaagggatgagggcgcggggccagggaggccgagccgcgggagcctgggtggagaggcggactgggcgaggtggggcatggcgggggaagtgactcagggccagaggcagcaggcccacggaaggtggggtcgggggggcgcggggactgggcgaccctgaaccgacggggcagggcgaggttgccggagcactcgaggcggaccgcgagtgacggcccagctgctgggcccaacgggcaggggtctgacatctggacggagtgggaaagcagcctcgcatcctgccctggggagtcgggaggagcccagttccatccagctgtgcaaacaggaggaggaggaggtcccaagcctacccttgagaggggcaagaggggtggtcaagccgccgccgccgcgacggcccccgcggtgcgggttgcgccagcctcctcggagctcgacgcagaaacttgttgcaacaaacaggcgaccgcgggtgcccctagcagccagcggcagagtgggtgggcgggcgagagggaggggaaggctggcggacgccgcagcgaactggtgggcagacccggagtcgccgcgtaagcggggccggctcagtgcggtgcggcaggcgcggctgtgcggcagcggaagtcctttgttgcagcacagtccctggcagagccagagcctctccgcgcagcccagcccgagcgccgagcgccgcgcgccgccgccactgcagctcgcggccccttcgccttcgcccgcctttcccgcggctgatttgccttaaactcc

SEQ ID NO: 311 - DNA, 1300 bp, Homo sapiens
gggctgcgcggagaggctctggctctgccagggactgtgctgcaacaaaggacttccgctgccgcacagccgcgcctgccgcaccgcactgagccggccccgcttacgcggcgactccgggtctgcccaccagttcgctgcggcgtccgccagccttcccctccctctcgcccgcccacccactctgccgctggctgctaggggcacccgcggtcgcctgtttgttgcaacaagtttctgcgtcgagctccgaggaggctggcgcaacccgcaccgcgggggccgtcgcggcggcggcggcttgaccacccctcttgcccctctcaagggtaggcttgggacctcctcctcctcctgtttgcacagctggatggaactgggctcctcccgactccccagggcaggatgcgaggctgctttcccactccgtccagatgtcagacccctgcccgttgggcccagcagctgggccgtcactcgcggtccgcctcgagtgctccggcaacctcgccctgccccgtcggttcagggtcgcccagtccccgcgcccccccgaccccaccttccgtgggcctgctgcctctggccctgagtcacttcccccgccatgccccacctcgcccagtccgcctctccacccaggctcccgcggctcggcctccctggccccgcgccctcatcccttccccagcgaacacgcgggcgcatccttccccacccccaccttcaccccagaactgagggggtgcctgtgcttttgcacaccctggggaaagtccccgggtcacgcggttgtttgtggggagcctgtgacgctcaggcttgtccctatgcttccgcctacagagtcacaactgcgaactgtggcggcggcactcagagcgcgggccgacccccgcccggccactgaggcgggcgggcgggagggcgcgcacgtacgcacgcacgcacgcacgcacaccccggccctggcgcccctctttcccctgctaccagacacgcggtcacgtggggccatcgcgggctgccggcgcgggaagccgcgcgagaggcggccgaggggtgcgtgagccggcgccactgcttgcagtgcgcggcttgggagcccgcccctcctgcacggaggagtcggcctgccgccgcggcggcatctgggtaagcgacgcggtcctgcccctgtgggctgccccgggctcagtccctcctgccgcgagccacccagggcggcggcctgcagctgcaccagtcgcgggacagatgcaagtagctggggagaggggtgtttttggtccgattgaga

SEQ ID NO: 312 - DNA, 1300 bp, Homo sapiens
tgaggtagagagaggggcgtgggggaacaggaatgggccagtctaggaccaggggacacagagaagctgactgtcaatgcaagggggtcctcaggacaacagtgtgagatgggctgacggaggccaccttccttccctggaacaagcgcaagcagctgtgggttctctgcgctagaggggaagtgacccacaccgcttccccaagccctgcagccttccagctgagactcccaccctgcaggccggggctggggaggaggggtgctgcgaagaccgactcgggagactctactcagtttctgccaaactttcctaggccactcagccccggaaagagagcgccccatcttggaatctcagacggtcgaaaacttcggggcacccctcagcatccccgcacctcgcgcgccaggattaccccgagacgaatgcccctgtccttacccctcccccgcgccgccctgcccgctcagcgttcagcccctcaccccgcaggcggtcttgcgcccttcctccccttccccacgctcgcttcactctgatctcttcagttttcccggcccccaggttcccagacaggaggggacgcgggccacgggcctgggagggtgggggaaaaggggagaggggagacgggaaagggctgcgcggggagagaaggggtctgagaggcacgtgggaaagtgcaggctctcgaggggagagggggtagtgcggggacttggggcgcgcgtggctgcggtctggggcggcgtaaacttacctcctggtaactctcgtcgccggggctgaaggtgctgttcacgggctgcaggcgcaggccgacgtgcgggacgctgtgcagccacacgacccaccagggagcgatgtagtccacgcgcgccgcctgcatggctcggcccgagtgctacccacaagctgaacgacagctgcgctcacctcccggccggggccccgtgcccgccccgcccccggccccgcctctccctgggcccgcgcccgccccgccccgccgcgatcccagtcccagttctgggcgcgcagcccgctgcagtcaacagcccctttctgggcggggatctgtcctggccggatgggaggagggaagtgaaaaaagctcccagaagtctctaaatcagtttcagtctcgaggtccccgggctgcttcttatttatgatcagatcaagggtataaggtgtcagtgggggcagccagcagtcataggccagagaggggcgactgcccgtcccaagggcttgtcacagggtaagtaaccgacagactgggaaaggaaggagg

SEQ ID NO: 313 - DNA, 1400 bp, Homo sapiens
atatctttgtcaaaaactaattaacaacatacgtatgggtctatttctggagtctattctgttctattgatctacaggtctatgtttactactacactaactttattattacaccttaagtcttgaaataatataatgtaactctcaagatttgtaggatattttaaaaaaattatttgtctattctaggtcctttgcattttcaaataaatttatgagtacgtttgtaatatttatcttgtagctgcaaccttcttaaaatcaattcttactcctatagtaggtttaccgtagatgtctctggatttcctaaatacatgattacttgatctttaaataaagacatacttatcgtttgaaccagaaatttgtgaaaaaggccttttttttccttttagttatgaaaacccaacaaggttctgtagcactacaactcactagctcatttcatagaagggcctcatgtgtccaggggcccctcaaaaggggagccatcagctgccctgtccttttccaagttctaaaaaagcagctgcgtgtagagtctatatttatataatgacttaacaggacaggtggttgggacattttgcccaactttaatcccgtctttcaagtaaaaataactttttttcctttttaaagaagtatattaattttttgtgttttacaaaagaaataatacagaaaaggtattaagaatgagaaaagcctactctcttgtgctcctttcctgatacacctcttccactcattttagtggagagaaaacggagaatattggtaggaggacagaaggaggtagacaggcagaaggaggtgaatcctgggagccaagggcagagagaggcaagtccccagagaagtgggaatggccaacagctccctgagaagataccttccgtccttcctgggcaagcaggggaagtctcaagaatatacagagaaggaagagtggcagagcccaggctggggatgttaaaagggactcccggtgaggatgggggcgggcccgaaagcaccacctgactccgggctgcaggagggggcgtgggacgggggcggagcctctggcgatgacaacagccacacgtgatcggccaacactgagtcttacctcgttgtggcgtcagaaccgccgtcgctcgctcccttctcggcagtggtacctgttcccggtgtccctgaggacgtgcgggccaggtacggccccgaaagtaggaagcggagggggagcaggtaagggacccggagggggtccctggggttggtgtgggggagcagccccggcctgcggatgccccatccccgggcagcagcgcggagacgcagccggtccacgatgcagccccggggccccgccgcgggaccgcgagccttgtgtgagcggaggggtgccc

SEQ ID NO: 314 - DNA, 1400 bp, Homo sapiens
gttttaccatgttggtcaggctggtctcgaactcctgacctcaggtgatccgcccgcctcggcctttcaaagtgctgggattacaggcgtgaaccatcgcgcccggccccttttcttcgtttccatgtaatagcttgattgagaaataattcacatatcaaatccacccttttaaaaagcgagcaacgcggatcgcggaggccacgcctgtgatcgcagcgctttgggagggggcagttccaagagagcggatcactgaaccggggagttcgagaccacccggcaacgtaatctccgcctcgatagaaatagttttttttttttttttgagacggagtctcgctgtcgcccaggctggagtgcagtggcgcgatctcggctcactgcaggctccgccccacggggttcacgccattctcaggcctcagccttttgagtagctgggaccacaggtgcccaccaccacgcccggctaattttttgtatttttagtagagacggggtttcaccgtgttagccaggatggtctcgatctcctgacctcatgatccgcccgcctcggcctcccaaagtactgggattacaggcgtgagccaccgcgcccagccagaaatagttttaaaaaaagaaataaggagcgtgcggcccgcgggggaagcgcctttaccagctcgagcctgcagccccccaggccgcgccgtcctcggctcccccgggcagcgccggggttttgtcaggcgcgcgctgctgtttgcctggattgcgctcattctgaccctgaagccagcggccccactgacacgccctgaaaagtgggagccacacgcgggatccggagaccgcgctaaagtcccacgcacgacggcgcccgccggcgagtccacgcccgcacgtcggcgcatgcgcgcggccaagccggtgcccgcgcccaccagcgcgcatgcgcgccccgtcccttccctccccccgtgctctgccccgatggttcggtccgcgccgggggcggggccagggcgcccgcgggaaatttggcgggaaccgcgcccgcctcttcctcccttccttctttccttgctttcgccgcgcactccgccgccatggagcagcgccgcgtcaccgacttcttcgcgcgccgccgccccgggcccccccgcatcgcgccgcccaagctggcctgccgcacccccagccccgccaggcccgcactccgcgccccggcctccgctaccagtggcagccgcaagcgcgcccgcccgcccgccgcccccggacgcgaccaggccaggccaccggcccgcaggagactgcggctgtcggtggacgaggtgaggggcgtggggagactgaggccggggagttgggggcggggagactgaggcccggggggcagggctcgggga

SEQ ID NO: 315 - DNA, 1300 bp, Homo sapiens
tcaggttatgtctccataatgccttatccacgcccttagtcaacattcttcttcctcttctgtggtgcataaagacttttatatctcaatcacaccacctttggcgttctgcctggttttacagatagttatgtcttggtgtcccctacttccttaccctgtgatttaagcatagtatgggttagaacatttgccatgaattggcctgtggcagggagctgatgatccttgttatcaaccattcaaagtttagcagatagtttggaaaatcaggcgattctgctaattcatgaaattactcatgaaaaaaagtcgaaaggagtcacccgtctctaaggcggctttttgctgtctagaataaccgtgacaaaaggtgggagcaaaataattagctttcaggggagtatggcttctctaaatagttgcaagatgcctacattgtttatgtaaaataaaatatcttatgtactgcactttcgaaaagactgaagatatctaagatatctccaggtggaaattcccggtgacgggtgtccttctgaggtcaacggcactgaccattgcacactgtattctggaatacgttcaacacagcaaaaccggctcgtggcgcgtccccggcgtccgactgctgcgtggccccgagcgacctgcaccccactcgcccccgcccccacctccgccccagtccgcagcggctacagcccgggaggctccaagggaactcccgcacgtctgcgcgcgcaatcacgggacggcgggtcggcgtggcgcgcgcaattgccctggaaaccacggcgcgcgcacgcgcaaacgcgggtgatggggggaagaaagactgagctgagagctttgccgcggggggagggctctacctcgctcccccgcggtgggcgcgcgcgctggcccgctcccttgctgcacgctcccggctcgcgcgttccccccggtgccctcccccgcctcacaagcacccttgccctcccgcatttgtgcgccggtgcagcaggcagtgggaacatccgggcatttccgcagctgagcggcgacccgggcggcggcggcggtcgaggagctcccatggcagggacgaggcggagggaaggcgaaaggggggcgaggagttaagccagagcctccgcggggcgggtttccgagggaggcacagagggaaacggctctcgcagcccgaggagggtcaggcgcggagcttgtcgcacctcccgcgcattctgtccagcccgggctccggagatgcatctgcatcaggtcctcaccggagctgtcaaccctggagaca

SEQ ID NO: 316 - DNA, 1300 bp, Homo sapiens
accctaggagccccgccccgtcctcccggggctcctttctcacccgcgtccctgccgcggtggatacgcacccctcaggctggctgcccagcgcggtttccacgcccaatctgccgcgaccccatcactccaccgcacctacccctgactcctgcttgtcctgcagcctgggctcctccctccgctggccaagtcacgccaagcagtttgcggttacaggacgggtgggggcctctgcatatgtgcagagtacggagggcccagggacgcgaggctccccgatgggcaacctcccctgcctttgcttttccccagagccccctcctggcctgcgttcggcatcttctcgggtcgtcatcgccctctgcggtgcctgcgctcggggtgagggtttttgtcggcttttgttacatcaccgatgtaacagtgcctggacgtagtaggtgctcaataaatatgttgttgaatgcgcttcagtctccccgaatgcttgtcccttccgggcgctctcatcgctctcctaccttccccgctacacagctcgaaggtcccctcctccgggaagctcaccctgtcccacttgccaggaagaatcaagcaaattttctgagtgagacaccttgtcctcactcaggcgtcctgcaggcggcttcagcgagttgttggggcagatgcgccgggagctcccgagggcagggacggcgtcttatttctctttttaagtccacagggcttgcacaatagatgcccaaaaaatgagagtgaatttagaatgagtgaccgagtggctgaagattgcctccttcctttcccagtctgtcggttacttaccctgtgacaagcccttgggacgggcagtcgcccctctctggcctatgactgctggctgcccccactgacaccttatacccttgatctgatcataaataagaagcagcccggggacctcgagactgaaactgatttagagacttctgggagcttttttcacttccctcctcccatccggccaggacagatccccgcccagaaaggggctgttgactgcagcgggctgcgcgcccagaactgggactgggatcgcggcggggcggggcgggcgcgggcccagggagaggcggggccgggggcggggcgggcacggggccccggccgggaggtgagcgcagctgtcgttcagcttgtgggtagcactcgggccgagccatgcaggcggcgcgcgtggactacatcgctccctggtgggtcgtgtggctgcacagcgtcccgcacgtcggcctgcgcctgcagcccgtgaaca

SEQ ID NO: 317 - DNA, 1300 bp, Homo sapiens
aatgcactgtttcttgcacacacctctctccactatctgggcagagtctaggtctcatccatcaccaaggttctagcactcagctgagaggctgcagcaggaggggcagatggaggagggtgcggtgcataccatctccccatcaaaccaatgggcaccacgtgaccattcttgtgtctctggggactgtcaatctgcatgctaggaaaggggtggcattccaatctttcatttttttgtgtgtgagacggagtcttgctctgtcacccaggctggagtgcaatggtgcgatcttggctcactgcaacctccgctccccgggttcaagagattttcctgccttagcctcccgagtagctgggattacaggcatgagccaccacacccagctaattttgtatttttagtagagacagagtttctctatgttggtcaggctggtctggaactcctgacctcaggtgatccacccgccttggcctcccaaagtgttgggattacaggcgtgagccactgcgcccggccccatgctttcacttttaaaaatgcttgtagggcacgcaaaaatactaaacggtcgatggagaaggtctgtctggagtagttgttttttttttttttttttgagacagagtctcgctctgtcgcccaggctggtgtgcagtggcacgatctcggctcactgcaagctccgcctcccaggttcaggcgattctcctgcctcagcctcccaagtagctgggactacaggcgcccgccaccacacccggctaatttaattttttgtatttttagtagagacggggtttcatcgcgttagccaagatggtctcgatctcctgacctcgtgatctgcccgcctcagcctcccaaagtgctgggattacaggcgtgagccacctcgcccggcctgtctggcgtagttctaaccaggaacagagccagcggccagggccgcaccaggcctggccagggagcgccgcgcctgcgcactgcagactctgaagccgccgagccctccgccgaggtgggtggggaaactgcccgggcatccgggtccctcaccccgcccccgctgcatgaatgagaggcgcggcgcccgcccctcccccggcgggcccgcccctcgcgaggggccgccgggcgcagtcagccgccgccacctccgccgcgctctgtccggacggacgctcgccgcccgcagcctgccgcccgccgcagggcgctgacggtcccgcacgtctgccgctgccaccggcgcgcccgagtaagtgagcgagcgagggcgggagcgccgcgg

SEQ ID NO: 318 - DNA, 1300 bp, Homo sapiens
cctttcaagtaagtggagtagttactctccccacaaagtatcagaaactgttctatgagccacttactcctttatgtcttgcacagtccctatcaaaagtcaaatactcctgggagacgtgacctctttagtcttcaagagtcaacactttgggaaaggcagaattatttcaaacagctgagcacaagaaaggcaactagcttgtgtaattgttcattttctgttttttcctactgaattgtaagctacaaggggtctaggaccatgtctatcttattcatccctctatttccaggtttcaggacacataggagaccctccacaacgcccttgggaaaaaagcagaagaggacaaacatgggaaaagaagggagggaagggggagataaaaagcctaattaaattctcacagagcgtttatcctaatattaactagttaatgacctcaagatatgtattgagcttttactatgcacgcatggcaggaggggcgtgccccttccttgccttaacctggtgtggttctttgactttttactcctgtatactcgaagaaaacaatacaaaaatcaaagctgggaaaaaagttcctgtatggggtatttcaccgttttaatgcattaaacatgatgtgctcaaatgccccagcctttgggattgaaacattcataatgagaactccgaagcgaccaagatgaaatacaaacttcaaagaaggcgcccagttttgtcttgctactctagcctagttcagtggcgcctcaaactttaatgtgcatgcgaatcacctggcaatcttgctgaatattcagatttggagtcaataggtctggagtgaagcctgagatgctgcgtttttaacatgcccccgggtgatgctgatgcttctaacccaaggaccacactttgagtatacaagggactggagaccatcacctctaccgccaggtgtgtgtatgctgagtcccagcgttccagatcagtgtcccgcacgtcctcggccttctgccagtaggggaggagtcgggggcggagcgggaggagtggcgcgggccccgcgtgggtcctgccagagatcacctcggccccttgaagaggcagccaagctgcggcggcgcaggagggggcgggttcagcgagggcgcggcctctgagggggggcgcaggacacgcatcccccgcgatcgcccgggccactcgggagcctcgcggcagcccggcgccccacttggccatccgctccttgcccgcctcctcttgtcacctcccgtctcatccttctcgctccttccccgccgca

SEQ ID NO: 319 - DNA, 1400 bp, Homo sapiens
tggccccggctccagcggctgcagcgtcgccatcgccgggcagaccccggccgacctcaaagcgaccgcgcggtggggccggcggggactggggctgcgcagcgcggcctggggtgggggcggcggggcccccaggagctcctgggaaccgagggtcctggggcggtcccgccccgcacagctccgggtgagcttggggagggagacacactctcagcccacctcgccccgcccgacagcgctccgagtcctgagtcccctcacccccattctacagacacgaaggtgaagccaaagacgggacgctcacttcctgagaatttgctgcctgctgcgtggacaccaccgacctattgtttacagcggtcagggacccgccccccagacccccaggaccgcgcttccgggggaggagggtgtcctcagcaacggtgacccgcaccaaagccctcctcaccggggtcaccgccacagccggtgcgaggcccgcagggcgctggggatgcgcgaccgactcccgtgaacctgctcctcgcgcgtcagggagagctgtgcacccaactaggctctgtgaggacggactgaggtcggcctgcaggctgcggccccgaaggcaggatttgtggagagatgattcgcgagccttggaggaaggatgggctgtgcgtgcgtgggtgcgtgcgtgtgtgtgtgtgtgtgtctgtgacttttgtatgtttatgtgagactgcgtacgtgcgcgcgtctgtgtgtgcgcgcgcgcgtatatgtctgtgtgtgtgcgtgcgtgtataatttctaaatggacgtcaccttacacatcacaaggttaaaaaatgacccctgggctgtgccaggccaagcacgaagagaaagccccgcctgaaactgcctggaggccccccggctgtcactctcgccacattccgtggagtatgtggttgcaacttctgtcactcaaggtctgatggcggggagattggagccgtatccaatcagcgcactggagtgaaaactgcccaatcaggcacgcagccagagaggaggcggtggcttccgggatgtggcgcgggtctttgcgtctggctactaccagaccgcgggttaggggcttcatctctctgcgttctcagttgtgggaggccttggtgattcggccacagctcagcctccgtcgctctgtgacctgcgggtattggatgattggtagctaagactcccgaatacttcagaagtggggaaatggtgagtgtgcggggcagggcgtcccaaggctgaggaggtctcatcggagctggcgggaaatggcggcgggaccgagtctgcgaacggagtccccgctgccgccgctcagccctggggcctcagtaccctccggtgagggacctgggctcctgtcg

SEQ ID NO: 320 - DNA, 1400 bp, Homo sapiens
tttttttttttttttgagacggagtctggctctgtcgcccaggctggagtgcagtggcgtgatctcaactcactgcaaactccgcctcccgggttcaagtgatccacctgcctaagcctcctgagtagctgggactacaggtgcacgccaccacgcccggctaatttttgtatttttaatagaggcggggtttcaccatgttaggctggtctcgaactcctaacctcgtgattcgcccacctcggcctcccaaagtgctgggattacaggcgtgagccaccgagcctggcagattatttttcactttaaacattttaggaaagacccaaagaatcctcagggtttacactcacagtacctcgattcctgtatattccaagatttgtgggaagaaaaagtactaagcttggagtcaggaggcctgatgtttcttcctttcaccaagcttctctagttctgtttcattatccccatggcaacaactagcaacagtgactggcatttagtaggcccttcataaatatatgttgaataaactctaaaagaggtagcttttcattccaagttgagttctctcttggtcctgttgcaggcaagggcaatggtaccctgccctaggtgcacaagtgtgcaggagggatcaatcgcagagcctttccgagagaaggggcccaaagcgagtcaacttctctactgagcttcccatgaggatgctggatccccaatcctaaccatgcagacgtctgagggtcgccgccattaacgggaatgatatggcccttcctcccccactccctcctctcttctcccctttcaacacttgaattgggctctccgctacttccgcacagcgcaggacccacacgagcccagaaccatcacggcctgctagttcccacccctcccgtcctggaggaccgtaggtggacgctcttgcagagcgcctctcgctggttggggcgggggtgggcggagccagcaccgtctgggctgtggaagcggagggggtggggacactctggcccggttctcggtggtgcgggagcgggcgggagcagcggccgctctggtcggcggacgtgctgccgagtagtcccggaagcgaagcagcgatggcggagagtccgactgaggaggcggcaacggcgggcgccggggcggcgggccccggggcgagcagcgttgctggtgttgttggcgttagcggcagcggcggcgggttcgggccgcctttcctgccggatgtgtgggcggcggcggcggcagcgggcggggccgggggcccggggagcggcctggctccgctgcccgggctcccgccctcagccgctgcccacggggccgcgctgcttagccactgggaccccacgctcagctccgactgggacggcgagcgcacc

SEQ ID NO: 321 - DNA, 1300 bp, Homo sapiens
gaggaggtgggggagtcggcaggaggaggggaggagcgccgggttcgccatccccaggcgccggctctgcggctgctgaatcggaagccgcagggaggatccggggaaataaagacgccggagaatgacctccagcgaggccgcctgagccggggcccgcgcacagccccgccagcccccggcatgggcgaccgcagcgggcagcaggagcgctcggtcccgcactctccaggggcccccgtgggcaccagcgccgccgctgtgaacgggctgctgcacaacggcttccatccgccgccagtccagccgccgcacgtctgcagccggggtccagtgggcggcagcgacgcggcgccccagcgcctcccgctcctgccggagctgcagccgcagccactgctccctcagcatgactccccggccaagaaatgccggctgcggaggaggatggactcggggagaaagaacaggccgcgtaagtcccgctgggaggggagcgcgggcgcaaggcagacgcagcgtgcggggcccgggactgggagcggctgaggcaggcgccgcagcacgccccgtgcgcccccgcgtctgcggtcgagggactgcacagagtaggttcccgggactgattcttttcctaggggacatcaagcactacaggtctttgcctgagcctgccctttgctcgcttctatcagtagaacgaggattggacacgaagcttgagcgggtccctaggtcaaggatatataataagcgaacgctctgtccgcccttctaattggtggctgggaaaacgcaggtgtgtgaacatttgctggggtccaggagtgaggataaagtgggcggcacaccgagggtgctctctcctttctcacccctctcgcttctctgagcgcgtcctactggggttgcctgccctttgaatcacagagtagccagcagcgtctcgggtctattggagagcgcaagtctggaggcgtggagtttaactaccccccaaaatcacagcctattagaagctgtttcttcacggccaatgagagggttttttgggagggacacacccactgataccatgtgggccggaactatgtggaccaatgaggattggaggtggattttttttttcaacgaagggggaggttgagttgagggtttgtaattgtaatgtacaccggagaaagccgaagtgcattatttcacaatctaaagcttgtatatataatggtagtttgtaaagtgtaccttccccacaggacgctgtgggatgtaaatttgtaggtcgagtttacagctggtt

SEQ ID NO: 322 - DNA, 1300 bp, Homo sapiens
attagaaaccattgatttttgttgctgatggtccttagaaagtaatgcaaaaagttgcttagagttaaaaaagtatgcctgataatctgctttcatttcctcctttctcaaggtgatacaattacaatcagaacctgcaaaaaatccacagtaaattcttctctaatgccttttgcacttaaaatctttagtagataccttagcatcttattcagtaataacatgccaacttagtctgtaactaaatatttggtcttcaattgtgactacataaaatgctgaaatatctataacttgggaagcagcagttataaatgcaggtctggtattagacaacctgtgttcaaatcgcacctctatcgtttattaactgtgtgacattaagttccttaacgtctctgatagcctcattttcctcatcttaaaatgggatcctatcatttcataaagttgtattctatatgagtaattaataatgataatagttctttgaaggcctactacactaggaattatgttgagcacttcacactcattttatctaattgtgagaacagggcttcgtacactgtagacaaccaaaacatactgaatgattgaggcggggctaatgaggtccgcagctggcacgccattagaggagtcgcgagtggagctcagtcatgtctgcccacaaagcgcctgcgcttgacctctacgttatatttactttggcaatgtacaaagtggtgaggacagtcctagcccggagggcccctaacacattgtcgtcttcttatcctcggccctctgcgttagagagggctgccccgaatcggctttgaacgctgactcgcccttttccagtcggcccttgagcccactagtcagggctacagcgttttcctaaccgaggttcagaggtgagatggaaaatgtacccgtctttattctgttctctcccctgcaatgacagggtgaatggcggtggggttgggggcacgtctccagagtcccagtccgctcgggacccgcggaccgcccggaggcgacaacggccctgaaattggggggagcttgtttccagccggactgtgtccctgggcgcgccagagcgccgcgcctgcgcgctcagcccgttgccgcgccggccctgcggacgtgcgcgcgctgccttcgcggcacctgggcctgaggtgcgtgcctcccgggccctcgccagctccagatgcgtgaggaggacttcagaaacccgactgagaagtggagcgacccccagggagggtcggacctgcctcaataccgccaaggtgcctgggga

SEQ ID NO: 323 - DNA, 1300 bp, Homo sapiens
agatgcagtggccagagacagcctcaggccttcttccccatgctgggggtgctgctgcttgccttcaccccgacccggtatccccacttcccgctgccccagatctcccaggctgaatgtcccctcttcgcctccactcttctgagcttctaagagctaactccaagtgaggaactgaaccccttccacccctacctccccaggcaatctgtagagctcttgagccctaataccagtgtctgggaggcgcgtaaacgcttccatttttatccttccactgcagaaaatgcccagtttagtctgggagacactcagacccctcgggacaagggtggctagagagaggtccaagctgccctgggtgggtggggagtcaaggcaggccaaagcttcagatttagacagtaaccaccaaatccgacctgggctgcaggtccaaggcctcttcctctttcctgcatgctccgctctgccgctggcccatcttccaatgcaacccctacaactaccaaagcaaaaaggcctgtcccaactccatcctcacggcccgatccccaaccctcaggggatgccgcttcgtgtctcctctttattttacaacgcggccctccttgcagccctcacgaaaagttctgcagtggggtcccccagcgtggggcccttctcgagacccttaaagagaaggctcgtttggtggaccatacccgggcagcgcgggcccgggcctggactggttctacttgtgttctgaggtccctgaccaccgccttgggtccagccctcgtccagggggcggcggtgcaggggagaccgcgcggcccggcctgaagcgcggccgccctcatcccttccccggggctggggtgggtcaccggccgacaaacacaggaggggccgcgtccccgtccccgacgcgctcacaaacgccgtggtcgcccgaaccttcggccccgcagcattcggctacaggaccgcgacactgcagggccccggctctgcgcgctgcgctccggccgctcggcgcgggaggacgtgcggtcgcgcctgcctcggtggccgcgcggggtaggtggctgcggggaccggaaggatggcgaggaagtcggaaagggtttcctgagatgagagattacttccgtccgggctgcggcctctctctggagtcggctagccggggctcggggagcggggtgcgcagggctcggggccacgccttgccacctgcagcgcccgggtgggccgcgggggcctcggcgggacgcgctcggccctgtcgcaggagctaacgcagggggaatcc

SEQ ID NO: 324 - DNA, 1300 bp, Homo sapiens
gaacctatcagtggttaccaaaagttagggttggcgggggcgctgttataaaagggcagaactagggagctctttattgcgctagtggttacatgaatccaaacaagggttcaagatcacaggattatatatcaaataaccaattttactgaatatcaattttaaaagtcaaataaattattaaacactattaaacatatacaatgtttaaagtcaagcaaaaagtcctaaactaaaagtaaaataatgattgtttagaagtacaccaggatggtatgggtcatctgcaatataacgtcctgtttgggataaggaagcgtgactacatctacagggtgacgtgagaagggcccagagcagcgagcaggtcttgccatcagggaggggaaccatctgaaggggtggcgtgaaaaagtctttagaggaaggcaaaaaatgggaaaaggtcagagaacctttttgggaggtaaaaggaccagctttggattaggcgtgatgcacaggccccagcgcagggcgtagaaactgcagcctggacagcctgggtgggagaaagtttgggatgtttaggaaggaagggtgcgccagccagggggaagaaacgagacaggtggccgcagatggcgcgagtcaggcagcaggaaaaggcaggctgtttaagcagccttttcctgcagtccaggcggagagcgcagaaggagcaccccgaggggcaagcatgggagagccggagcgggctcgcgggcgcgcgggcgctgtacgtcccctcctcggctcgcggccgcgagcacgcgctctccgtgcccggccccggaggggcgggggcggggcacaggcgcggcgcgcgcacgtccgcgcggggcgggggcggggcgcgaacgcgaccggtgacgtcagaggagggcgcgcgcccggaggcagcaggcggagccgggaggcgggcgttgtgcgcggccgcgggcggagcggaggggcgcgaggggcggagcggagcgcgggaggaggcgggggaggagaggccaccgggaccgcgagcggcagctggggagggggccgcggagcccgagcgggagcaaaacagctgatctggttttcctttaaagcgagagaaaatggaagtcgggtagcggcgactgcggcgctgcgggctggcggagcggagcggcgcggcgcggcaggtaagacggcgctggccgcggtgctgccggcgggcggcggggccgggcccgcggaccaggcaggtgcgctctccgggcgcggggccggcgccgtctccttcccgagctccgtggcgaggcag

SEQ ID NO: 325 - DNA, 1300 bp, Homo sapiens
accaacacccacaaatgcctcatatagtcacagtcacacacccactcaggggacacacgccatcactggtactttacggcacccagtcacaactgaactttcactgtggacatacacacagtcacactcacacaagcaacccacacaagcagtggcaccccactcccgcatacacagcaccacacacatacacacaaacacacacaccaagggatacaggaatacacaagcggcgtcaccacacagtcacaggcacaggcaattgcacacggccacagtgtcacacaaccaaaaccacgcacacaccttggagacatgaatcacaaccgcacacccgcagtggtcacacagtcacaactgtactcacaccccaggaacagggcgaacaggccacatatacaacggggacacacgcagtatcacccccggtcacaaggaccctgcaccccgatactctctatcacacatggttacacaaaaaccaccagacaccctggagacaggcggttacacgtgcacagttgcagacacccacacccagccacacagccacaaagacacattcagaacggcgcatccgcagccagctcccgcctgcgcgcacagattcgaggctccggacacgccccggccccgcccaggactcccagacccctcaccttctgcctcccctggtcgcgtccgggtccttgcggagctaactagctcgccacgacgtcaagaacgacgtaacgtcaggccgctgtgggctctgggaattgtagtccagagctagatcggccacggacagaatggcgttctcttatctctgagtcggggcctggctcgttttgacatttttgcgcccacgagtcttcggagagggcgtcgccactccagaccttccagcaagcttgaagtcatctgacgctaaaggactacttacctcaagagctccatcgtcacagaaggaggcggccaagttcgcggggggaggggaggagacagagagtcgaccagtaaagcctcaagggaaatgtagtccaaggcctgagaagcgacgttgctggtaatagaaggtaattcagtaccagcctgggcctggccgcggtgaccgaggcgggccgcgtcgcggagacttctgggagtgcttcctcgctctccgagtgcgcaagcgcagcgcaccgagtggacattttggtctttgtccgcgggtcagtacggcccctgggtccacgtggcgcgaaagtaggaggtgggatctgggcgtctcgggtcggtcggaccggggaggttaaaggggaggattcctgatctttag

SEQ ID NO: 326 - DNA, 1300 bp, Homo sapiens
cgttgactccctcatcctgggcgccgttatatgggattgcttctcaaagcgtacaatgctgtttagtctagggctttgcttaacagccctatttaagtaccccaaagatggggatttgaatagtctgaagtaggcaccccgaaactaaagttccttcgaaacactctcgtttaattaaaaaaaaaagtcacggtgatttgcatgccactccaattaaaaagaaatgcttttatataaaaactcgttttaaaattattcaccacttagcttttccaccccttcaattttcaagtaaaaaagacgctccaggaagatggcaccgttataattatcagcactttcgacaagggaagtgcagctcaaacgttatacctcaatgctggtctcctacatctccctcttaggcacaatcacacacaatcccgcacccagtttcacattcactcaacaatcccaaacatcaggtcaaactttgaggacaaactcggtcacactcgctcaaacccgcctcagaggcccccatctccgccccgcacgtaggccagaagctcttacacccactccctgccctcgcgccgcgcccctaaagatcaggaatcctcccctttaacctccccggtccgaccgacccgagacgcccagatcccacctcctactttcgcgccacgtggacccaggggccgtactgacccgcggacaaagaccaaaatgtccactcggtgcgctgcgcttgcgcactcggagagcgaggaagcactcccagaagtctccgcgacgcggcccgcctcggtcaccgcggccaggcccaggctggtactgaattaccttctattaccagcaacgtcgcttctcaggccttggactacatttcccttgaggctttactggtcgactctctgtctcctcccctccccccgcgaacttggccgcctccttctgtgacgatggagctcttgaggtaagtagtcctttagcgtcagatgacttcaagcttgctggaaggtctggagtggcgacgccctctccgaagactcgtgggcgcaaaaatgtcaaaacgagccaggccccgactcagagataagagaacgccattctgtccgtggccgatctagctctggactacaattcccagagcccacagcggcctgacgttacgtcgttcttgacgtcgtggcgagctagttagctccgcaaggacccggacgcgaccaggggaggcagaaggtgaggggtctgggagtcctgggcggggccggggcgtgtccggagcctcgaatctgtgcgcgcaggcgggagctgg

SEQ ID NO: 327 - DNA, 1300 bp, Homo sapiens
taaataagatactatgtaagagtattttcagcatttcagaaggaatttgctagagaaaaaaacaccaccaacaaaaacctaacaatgcaactgaatttttttaacacctaaatcagggatcaagacaaagccggtgttgaaaatcaaattcattaaagccagatgtttctatgtttgagtttccggactgggaaacgtgtctgtgtccatacaaacccatcttctaatgagccgtaatactgaaattcttcggtaacgtccctccttcccactccctatctttttcagaacttccaggcattaaagacaacgtctgccaatcctacaagttctccccgcctgctaggattcagatggattccacaacttttcagccttccgtgacttttaacactactctagagctaatcacttttaatgaccccactctggaatagacactcctcggctttacactttgtcccggcagcaatcgactgaactgtcccccgacgccgaccacctcggacgacctcagacattcggggtagtttgcccgcgggcagggccccgccaactccgattcctgccccagagccgtccgccccccaagccctcctcaacctcaacccccaaatcccaagcgcagaaccgctgggcttccggttctcctgtgcgcgccccggatccgccacacacctcgccccttctccctgggctcgctctccggaccctaaccccttcccgagcgaggccgagcaacgctctcagcagctgaactaagactccggaggccgcacgtccccctcagcaggccccgcctgggcctctcggctcggctgccctccattgcacccctggcccaaccgtgctgacgcggaagggtggggcagcacgagctcaaggcccggcacttactcgggaaggtaggtggaggaaaaggagctccacttgtgtagcgcgtaggggagaagccggcactcgggcgccgcagcgacagctccgccagccgccatcttgtcagcaccgtagcggccgccaccgaccgctggcagcgaacgggaggaggggagggggcgtggcctgctcttaaaggggccgccgccctccccggccgcccgcgctccccgccccgcatcgttacccgagcccagcgccgggccaatgtcctatctcagggtttcccacgtcgctcgctccttgacggctgaccgacactgggtctgaggtgtaagcgctttccaggcccttccctggggcttggaggggaatggcgcaaaggacttttcttacaagcagaggtaaggaaaagccgagatga

SEQ ID NO: 328 - DNA, 1300 bp, Homo sapiens
caatctcagttcttgtgatagtgagcaaagaactacaaactaacaccaaaatgcaagcttaaagcaaagtttattgaagcacaataatacactctgagggacagcgggcttatttctgcgaagtgaactcagcacttctttacagagctcaaggtgcttttatggggtttgtggggaggagttgaggtttgggctgtatctgagtgacaggatgatgttatttgattgaagtgtatagctatacaatctaaaattaaactgtgcatggtcttacctataatttgttaagaaaagcctcccagggatgggggggcaaaactgtatgtaaattctattataatgatggcatgatgaacttggggtgaacttgaagacaggcttttgtgttgttgggcatgtgccaccttagggaatttccacctgtaccctcctttctctttctccaggatattttggccacagactttatcataaactccatcccttagggtggcattagggtagtcttgggcctgaatttaggtgggccagtggctgtcttagtgacagcctttccgctctcttctgtcatcccctcccaactgctaatgtctaactacctaacaattacccattaaatcagtgtgtctggggttaggagcaggcctcaatatgtttaatcattctccagataatcccaatactgtaaagtttgtgaaacacttgtcagataattcaattatgaaggctgtggaaggtgtttcagtaggatctaattggttaatgttatgacttaattaatttgaatcaaaaaacaaaatgaaaaagctttatatttctaagtcaaataagacataagttggtctaaggttgagataaaatttttaaatgtatgattgaattttgaaaatcataaatatttaaatatctaaagttcagatcagaacattgcgaagctactttccccaatcaacaacaccccttcaggatttaaaaaccaagggggacactggatcacctagtgtttcacaagcaggtaccttctgctgtaggagagagagaactaaagttctgaaagacctgttgcttttcaccaggaagttttactgggcatctcctgagcctaggcaatagctgtagggtgacttctggagccatccccgtttccccgccccccaaaagaagcggagatttaacggggacgtgcggccagagctggggaaatgggcccgcgagccaggccggcgcttctcctcctgatgcttttgcagaccgcggtcctgcaggggcgcttgctgcgtgagtccgagggctgcgggcg

SEQ ID NO: 329 - DNA, 1400 bp, Homo sapiens
ggtgagggcagcgcgcagaggaagtaaacggggactacaggggaccagagacgtgagatagtccttaaaatacatatctaatctgtcctcgtcattttccactgccaccaccctattcaactactcggtgataaccctgtaattctccagtctccaatctgtcctccccaaacccttctccgcaactcctcaagaggatcatcgggtggagtccttcccccttctgaaccttccgtggctgctcactactccgaggaccaagttaaacatcctttaggttatttagctgcacgtcctggcccctactctgtacactagcttctacatctggccgtgtacccacctgttcactgtgctccagctacctggccctttcctccttcagcttctttgcacaacttgtctgttttggctcctgctttaatctcagctttgatgccacttaggcctttcctagctgattcccgccctcacccctgttacccgccatctaattacagctctctaaatgtgcttcaacagcacctttcatgtcactgattgcaatttgcattgaatacttgcctgattatttttgtctgcaagtgccacatgggtttagccctgctcctgacaagcacactgctgaactgagtaacttttgaatgaatgaatgaatgagtgaataaatcagtgaaggtcctacttggcactgtcatcatcctatcatcaaaatatttcgagtccctcggtgttgctatccctggcatgcccatccccgcgggctggcaaaaccctggagggggcagcctcccaaggcaccgccgcgggctcagcccatctaggaatgactcccgcaccacgcggcgaggggcgggtccggcggcgaggtgtcctgctgcctagcaggttcacgtgtactggtgcaggtggggaggaaggcaaggaaggagcgcagcagggcgcgccagatacgtggaggggagcgcgggcggcgcctcgctcgcctccggcttcgccgtcggtcactgcctgggaacgcgacttcctcctctaggggccgacgtgcggggcggggcggggccgggcgggagacgcccccgcagggctgggctgaaagccgccccaatgggattcggtgcggggcagcgactgcgccccgtcccggcgccgcgctcgtccgcagaggaggcggcccggcccgggcagctgcggctcgggatccgtcgaggggaggccgagcttgccaagctggcgcccagcggggtcatggtgcccggcgcccgcggcggcggcgcactggcgcgggctgccgggcggggcctcctggctttgctgctcgcggtctccgccccgctccggctgcaggcggaggagctgggtgagtggagcgcgtccggctggcggcgggacccgaggcg

SEQ ID NO: 330 - DNA, 1300 bp, Homo sapiens
gctcaagcaatcctcctgcctctggctcgcaaagctctgggattactggcatgaaccatctcacctggctaacatttattttccctctattgtcttcagaaaacccccaacttttcatctggaataattttagactacaaaaaagttataaagctagtatacccttcacacaatttctcctaatgttaacatcttacataaccattatacatttcttataactaaaaactactattacctaaacttaaattttattttaagtttatagcctagctacatcaccatgttgcatatgacagtgtctcagtttttttcttgcttttgattaccttgatagtttgaggagtactggtgaggtgttttgaggaatatcccacaaacgagatttgtctgatgtttatctttcagttagactgaggtcacggttttttttttaatcacatgtcaagggcaagtgcagtgactaatcactttgattttcacgtggagtggctctacagccctctttccacactgtactcttggaaaggtcgtccccaggcataggccacactcagggtgggtgtggacggattaccacacccctctggatgaggtattattagaattcctctgcaaggaagattatcccttctccctcatttatttaatcacgtatttatagcagcacgggctctgggctgttttatactttaggttataacttaatgcaatgtactttatattgctgctcaaattgtcccaggcgcggcccccggaagctctctgggtagatccctgcgcccttggacgcccggtccttcagttttttgagcacctcaagcttctggcctacaaaacgctcccggctcagctggagctttctgcgcccgggtcctagagtcgcccatttctctaaggcgccttggccctatttttagagagcggtatttagaaaccaagattagggtgctaacaatttttttttaaatttttatatttttaagacaggatctcactttgtaacacttccttttagtggaagcgccgacctcctgggagacccacgccccctgccgccttccgtcccgtttctcagaaaaccacccagacaccccgccccaccggccggggcccgccgcgcatgcgcgccgaggcgtgacgtcagaacggcggccaggacgccggacgtgcggcagttgcaggcgagcaggcgaggaatcgccgtggcgtcttggtgttctccacgctggttcgcaggtgagtgtccctgtttagtccggacgaccctagctcctttcccctctggcccgcgcctctc

SEQ ID NO: 331 - DNA, 1400 bp, Homo sapiens
atcttggcttaccgcaacctccgcctcctgggttcaaatgattctcttgcctcagcctccggagtagctgggattacaggcctgcgccaccatacctggctcatttttgtatttttagtagagacagggtttcaccatgttggccaggctggtctcaaactcctgacctcaggtgatacgcccgcctcagcctcccaaagtgctgggattacaggcgtgagctaccgcgcccggctgtttacttttaaacgaaacaacaaaaaactttaaagcattttaacttagaatgtggtaacatcgatagctgtaacccacattagcaaaagcttggggccctcatttttatgagtataaagtggtcctgagactacgagtttgggaaatgcggtagctctacgaggcggtgccattcttgccgccgcatcagtgaatttaggagaaggaaggtcgttagccctctgcctcaccgccaagcaggagccttgcgctccaactgcgtccctcgaagtcttcaggcaaaagcgggactggggagtccagtcctgtggcccagccacatttcctcgcgtagaacgttggacaatgttttctacctcacaggaccatccaaatgactgcgttaggtattcccatgaaatgtacgatgagtacaccctattctacagaagcaaaagctgaggctcagagacgccaagaggtttgctggggtctcgcgactaagcggtcccaacacccagacaccctggctacccggggactgccggtcactaccgggcgccgaaaagccgccggctccttccgccagctacacatccggcgccgaggccggaagcttctcttccggctcccaagaccgcgttccggaaatgagtcgctctaccagtacctaagatggccgccggcccatccaccgtcgcgatcggtgtgaggaaagtgtcacgaacccggaattgcccgactccgtcatggcaggcgccgggggcgtggcttccggcggccacagcttgctagtcgccgcggcggggtcgagcgggggcggcagctgacaggcgctcctcccccgaccgcagcggctggttcccagcgaggcgggcggcccccagctcgcgtccccgagtcctagcccgcgaggcgccagggctgcgcctgggcatggaagaggggaagatggacgagaatgaatgggggtaccacggagagggcaataagagcctggtggtggcccacgcgcaggtgagcggtggacgtgcggcgcaggtccggtacctcactccgacggccggtatcaccccgcccccattatccgtttcctcaacagggtcggttccacgtccccccagtaccttcctcctccccggccggtctccggaattcccccaccctccagcatccccccctac

SEQ ID NO: 332 - DNA, 1300 bp, Homo sapiens
tccagccggccacattcctgcgtggttgtaccagacagcaaaaggtcagagagatctgggccctcacagaaacccacacgcttcactcttgggattcacctttgcgagatcttactgcagtttctaaaactttcaccctcgttgaattcaggtgaaagccttcaaattctaaaaggttgagaagaggacctgtggacaacatccccttactattaacagcacagcaattccgtagtctcacgaggctgaactcttttggtgctgagagtaacagcactgtgggcactctgcttcttcctccagtgctggccgggccctccgtcccaaccaagcctccaccccactgcggcctggcagtccggcgggcatccaggcgggaggcggcaccgcgtgaggctgagcgcggcaccgacggggcggggagggggatgtggaactgactctgacggggaacgggaatactgaggggacgacagaccggccaggagaaggatctggggcaatgggagactgacccagtagagaggggatactggggtgatgaggaacccaagcggtagggggggatgctggagggtgggggaattccggagaccggccggggaggaggaaggtactggggggacgtggaaccgaccctgttgaggaaacggataatgggggcggggtgataccggccgtcggagtgaggtaccggacctgcgccgcacgtccaccgctcacctgcgcgtgggccaccaccaggctcttattgccctctccgtggtacccccattcattctcgtccatcttcccctcttccatgcccaggcgcagccctggcgcctcgcgggctaggactcggggacgcgagctgggggccgcccgcctcgctgggaaccagccgctgcggtcgggggaggagcgcctgtcagctgccgcccccgctcgaccccgccgcggcgactagcaagctgtggccgccggaagccacgcccccggcgcctgccatgacggagtcgggcaattccgggttcgtgacactttcctcacaccgatcgcgacggtggatgggccggcggccatcttaggtactggtagagcgactcatttccggaacgcggtcttgggagccggaagagaagcttccggcctcggcgccggatgtgtagctggcggaaggagccggcggcttttcggcgcccggtagtgaccggcagtccccgggtagccagggtgtctgggtgttgggaccgcttagtcgcgagaccccagcaaacctcttggcgtctctgagcctcagcttttgcttctgtagaat

SEQ ID NO: 333 - DNA, 1300 bp, Homo sapiens
ccgggctgggtctccccgcgggcgcggagatgccgttacaccccacgtgatccctgcgcccggccagtccttccagaggcgtctcgcggggtgttaattaaaggtcacaacaaaacagacctgctggctcaccagaagaaatgtcctcccgtgaaatgaaaaatgacaccccagagcagccacgtgtggagcctggcatacgccggcttcctgcgctcctgggcgctgcgccgggggactggggcggggggcgatcggagagggagcgatgacggggtgctccggagaccccgcggggcccaggcgcaggaagaaacgggcggcggggggcgaggggcccgatcccacgcaaggagaggccaaggccagctcgcgccacaccccctctccaggccagagtcgtccgcgtgcagcgcggcgaagccctcagtttcccctgcccggcagcggcccgctgggtcaccaggctcacctgtcccagccccgggcggcttagtccatcacagaccggggctcgggcgggcgggggaccaagggccctagtcctgcggctgcggtcggggagggtggccccccggccggcccggggtcggtagggcaattccagaaaaggtttgcccggcagctctccgagaacaaagggcggggggaggacccggcatgtttgtggacttgtttgtgactcaatcccttttgcacggcgtttcacagacagacctgcaagccttgtcaggaagagaaagaacttgggggcgggggaggctggggcaccgcatttccgtccagccacgctcgctcgcgcggcccccgggctccaggctcgcgcagcggcgtttcattagagccccgggcccgggccgcgcgccaggaacttccccgcacgcggcgagatcgacgatcccccgcccccagccccagcccggctccaggcctcgcaatgtcaggcacgagcgccgccacataaaatggatcccggccggcgcggcgagggcggcaggttcccgaggctcctccgcgctgcgcccgggcgcacacgcgcgctgtgaccgccgaccgctcccgggccacgcggagccgcccctctcccggccctcgcgcaactgtcaggcgaaacgggccggcggatattggctcggcgacacgccgaggctcctccccgagtctggatctttatattttgggagaatttctttgaactcagttaccaagctcggtgaaggagacaagttcccacagctgactcggctcggctctcccaccttcccggcagcggccgcgagccctgattgtatccctcgct

SEQ ID NO: 334 - DNA, 1300 bp, Homo sapiens
gcaggagtgggtttctggctttccagggcgagtggaagaagcgcctctctctcttgtaggtgacagacctggggggcccttcttgaggatgagagcctgttgcttctcaagttctgtgtctaacccaggtccccaggtctaccccagcccctcggccctgcctgccttgtggatgatatagtttaagggtagagaccgctggcctggagggaaggctaggcctcaggttagggcccagaagggagggagaagcccttggggcagctccctttctgctcactcactgcctagctccttccttcacaccttccttcggaaacgtctgctcctgacaaggtctacttcctgctctcaggaggcccttattgtggaggaagggaggcgtcgcccgtccctggcttctctgacagccgtgttccatccccgccctgtgccccttctcccggacagtgccttctccagggctcacccaggagggtgcagcggtggcccccggggcggtggtcgtggtgggggtgttagctgcaggggtgccctcggtgggtgggagttggtggcctctcgctggtgccatgggactcgcatgttcgccctgcgcccctcggctcttgagcccacaggccgggatcctgcctgccagccgcgtgcgctgccgtttaacccttgcaggcgcagagcgcgcggcggcggtgacagagaactttgtttggctgcccaaatacagcctcctgcagaaggaccctgcgcccggggaaggggaggaatctcttcccctctgggcgcccgccctcctcgccatggcccggcctccacatccgcccacatctggccgcagcggggcgcccggggggaggggctgaggccgcgtctctcgccgtcccctgggcgcgggccaggcggggaggaggggggcgctccggtcgtgtgcccaggactgtcccccagcggccactcgggccccagccccccaggcctggccttgacaggcgggcggagcagccagtgcgagacagggaggccggtgcgggtgcgggaacctgatccgcccgggaggcgggggcggggcgggggcgcagcgcgcggggaggggccggcgcccgccttcctcccccattcattcagctgagccagggggcctaggggctcctccggcggctagctctgcactgcaggagcgcgggcgcggcgccccagccagcgcgcagggcccgggccccgccgggggcgcttcctcgccgctgccctccgcgcgacccgctgcccaccagccatcatgtcggaccccgcggtcaacgcgcag

SEQ ID NO: 335 - DNA, 1400 bp, Homo sapiens
atacaggcatggaggaatttccaaatttcctctattgtaaaacatacacatacacacaccaacacacacatgcacacatggtatcctaatagaaggcaaggagaatagacatttactgagcacttcctatgtgccacatgttttatatacattaggatattacagtatatggtagcttttatccattcattcaatctcaatacttttttttttttttaagagtagagcaactgaggctcacagcagttatgtaacctgcccaaagtcacacagcatgatggagggtctggattggagattttgtctgactacaacactcatgtatcaaatcctattcagttttgatgttaaaaattctgtggttgaattcgtcacagtgtctttaaataaaacaacaacaaacaaaacacagcaaaccttaacatagttgctaatcatatgagtttacaaggccacctgtgtctttactatcagttacactccttcccaccccatcacattaatcactcaggtctagggatttgcaagtttgctaacagccgaatggaacaaagacaaaacgctaaaatttgtgatgtgggcctaactccaaagccttcaagaaaaaaaaaaaaaggccaggcgcagtggctcatgcctgtgatctcaacactttgggaggcctaggagggtggatcacctgaggacaggagttcgaaaccagcctgaccaacatggtgaaacctcgtctctactaaatacaaaaaaattagctgggcgtgatggcgcatgcctgttaatcccagctacttgggaggctgaggcaggagaatcgcttgaatccgggaggcagaggttgcagtgagccggtattgcgtcactgttgcccactccagcctgagcaacaagaacgaaactccgtctcaaaaaaaaaaaaaatagccatttgtgctttcaatctctccgcttccggcctccacccggcgggaaaaaactcccgcacgtgggcctccacgattccttggcatgcgtgtcactctgggcaacaggctggtcggccacgactgcgcaggcgagaggcacagagcgactggagactgtagtcccccggtttccctggagaccaggcggaagcggccggaagtagcgctgcggttggcagcggcgggatggagaagctgggggtggagccggaggaggaaggcggcggcgacgacgacgaggaagacgccgaggcctgggccatggaactggcggacgtgggggcggcagccagctcgcagggtgcgccgcagccagaggagccagcggcctccttgggtgtaaatgagaagggtggggcaggcggacgctcggggcggcggccactggggcgcgaccgtccccgccccactcggctcctctaagagagggctgcctcc

SEQ ID NO: 336 - DNA, 1300 bp, Homo sapiens
tcatagaatgccaacttcccaggtgttaaagtgaggctacggttataaggcgaaaaggtgtcacaattagagaaacaactttgaacacggtaatactgatttttaaaaatctcgaatgggctctgtggttctgatactctggctgttgaaataattcacctactgcagatttagtagaaagaaaaataattagcatgattatacctagtagccatttctaccctcttgagagtctgggcttggctccccgcacgtctgctttcctcagccgcagggctcccgcgttctcatgcctgacacagtccgcgttcgcatgccacggtggagcatcccctcagcgtgccctaccgctccggcgccggctcggcagatgttccgcctgcgcagagctgagcataggcgccgtgtgagcgccgattcacccaggcccgagcgcgaggcccaagcggggtacccggcgaagggcgtgcgccgcagcgtcttccgcagcttgaagctcggaggagctgcggcgcagcttcgggagcttagagctggggaagacgctgcggcgcgcgccactcgagcctgcgcggccgcttcccggcgcagcacccccctctcgccctctgcgcagccccaccagcccggactccgaggcagccccggacggggggaggtgcgggaggaggggctcctcagggagcggcggggaattcccccttccaccgaacgttcccgattgttcaccgtcctcacgtcagcagcagggggtaatccccgactccagctgctcctgacgtcaccgcgtggagccaccgccccccgcgcgcccctgctccggggcctcctcgaagccccgcccccagccttagccacgccttctccccctccccccaggcgcccgacgtagagggcggagcttctttgaccgcggcgtgagcggttgcttgggccagaaggttctctggtggaggcgctcttcctggtgtcccgcccagtaggttcgttcgcaccgcttcttccacactctttctccctccttctcctcgccccgccttccctccctcctcaatccctctagttccttccccgcctcgccactgtgcacgatctcgcgagacttggcccagaacattgcggatcgggtcggcgccattttgggactgagactggttgtgggggagggaaaagcggcaaaaggggattattcaaagtaccgaaaaccttctcccgggatcaggcgcggcggcacccccaggccaggggcacctctggtggggcagaaggtaacaccgtcctctaggctccacgcccgagc

SEQ ID NO: 337 - DNA, 1300 bp, Homo sapiens
ggcaggaacaatggctcacccatgttttatgtgtatttccgtgtgcgtgctcctgctttccccaggtctgggccgcctgcctggcccgtgtgccgtagggaatatccacactgggcctgggcggaggctgggcatctcccgctctgggcttgctccctgatgagattctcagaccgtgcttcccctcattcatgagaggaaggttcacagagcaggcgtgggaacctgcctggccgccagggcctcctcccgctcaggctgaggtttgctgcatctctgtccttattcccttccagactggattggctgaaccaggtgtccactctttttggcccatggcataaagaagggtttgggcaacccagtgtgccccaggttgttaccgcccccccgcctccgcccccacccagcctttgatgggcccccttctcatcaatccatcacccctgcacatgccaccaggactgcctggaccagagcccgggactctctgaaacccactgagagctcggccctgggaatgggcctcccaatctcggtctccagggggtgggccccaggtccctagtcttcctcagggtcttctccactgttctgcctcctctcctgatacccagttcctagccggggtgaccccagcctcccgtaacagcctccttgtggtggtgctgggaagaaggggcccgtgtacccggcagggccccccaggcaatgggcatgagcgcaggcagggaaatccgtcagcctccagggacgctctccctacagccccggcgaggggatcgggtcgtggcgacctctccagacgcccaggggctgggcaggagggcgggccaaggcccgcaggtgggggcgccaaagccaggcgggcgcggagtacgtgcggtgggctgcgggcggcatgaagggcgcgggcggccagctccggctccggctccggctccggctcccgcgaggccgggtagcctgggcgttcccaggggtcgcagaggacggcgaaccccggcggagccaccggagctggggaccaggacgcaggcaggcgtgtggagcgtgaggtggggacgtggcggcggctcaagtgggcggagccccggcagcggcccgaggcggagtcgccaagggaggaggcgccgagctgaccgggcgacgccgcgggaggttctggaaacgccgggagctgcgagtgtccaggtgagcgccccgcccgctcagccgccagatcaaccttagcgctggggcgcgggctggggtcgccaggcggtgcgttctgcccgcgcggggctgagagttaggggcc

SEQ ID NO: 338 - DNA, 1300 bp, Homo sapiens
gtcttgctctgtggcccaggctggagtgcagtggcgccatctcggctcactgcaacctcagcctcctgggttcaagcgattctcctgcctcagccacccaagtagctgggattacaggtgcacgccaccacacccggttaattttttttgtattcttagtagagaagaggtttcaccatgttggccaggctggtctcgaactcctggcctcaagtgcccgtctcagcctcccaaagtgttgggattacaggcgtgagccaccgcgcccggcaggagaggggagattctgaggttaggacatgcctggggagattctgaggttaggacatgcctgctcctgaaggtttggagagaaaaggctgggggtaggactgggttcagcaacatcactcccagctccatgcctcacctgagtgataagtgggggactcactccagcaccctccttagcgtggagctggcgctgggccaagggcacaccctcaggagcagcgctgagaagctgggcgcttggtccatgaaccacgccaaaatacgtgaggttgcgagccggcagctgcagcacactgaggttgttgcacagggcggcggccgagcctcgcaggggaatggagcgctcccagcggaacatcctgtgtgggggtgcagccgaatcaccaggcgcgctacaaacagacgcagcggagatgcccgagggcggctatcatcgagcatttcggaagatgcctgagactgggtcataggatggggtgcccagaggacggtgatgggggagggtctcgaggagcaagacaggggagtcccagggctgttttggggcgacgggggaatcgcagaggaggaatggggatgacacaggaccacccgatggccccaagcccgcgagccaaataagtgtgatgaagcccccaaggctttctccctcggctcggatccctgaagcccccggcctagatcagaggtaacacctgcagccccagatcggctcgcctgactcctggttcgtagggtccctccaaatccgccgccaccatagagacgacgcacgtacgcacggcccttgggcggggtgagcggccggaacgtgccgcgggcggcgcggttgccggggcaactgtgggcggggcgagcgaccccgagcccgtggttgcccaggcgactgttaggtggcttacgcggcccggatgcagcagaaacaccagcgttgctgcgaccgcgttggcgatggcgcacgaaggctcggtgagcttcagttcagctggggatgcgccagagccagggtcggccgttaaggtcggtg

SEQ ID NO: 339 - DNA, 1300 bp, Homo sapiens
gaacagccctgtagcaagcaccaggagtggcccatagcccaggccaagcttgactagagcagggctgactggactgagtaaagagagttgtttccttagacctcccctcccagcctcgcatctgacacccgtgatggtgaccagaagggacagagatatttttgcacaaaggctcttcaaatccgttttctttcttcttcttcttttttttttttttttttttttttttttgagacagtctctctctgtcacccaggctagagcgcagtggcgcgatctcggctcactgcaacctccgcctcccgagttcaagcaattctcctgcctctgcctcccgagtagctgggattacaggcaccgcgccaccacatccagctaattttttgtattttagtcgagacggggtctcgccatgttggcctggctggtcttgaactcctgagctcaggcaatcctcccgcctcagcctctcaaagtgctgggattacaggcatgagccattgagaccggccccgttttctttattttaaaattgattggctcttaaacaatttgactttcaagtgcagtctctgaattatttaatatatttcttcctcttgaaattctcgaaatagattttttctgttatcttccctctctaaatgctcatccatttaaatacgcaccaccatgtaagagacttactacattcattagctgtttcaaaatccacttcctgttctcgggctctacaccacccactgaccctttccctcatggcttgagtgtaacaaagcgtttgagtgggcaccgtgcaggtgtaggttttctgcccgagtaccgacgtggcttccttggtcatctaaactcccgcgcggtgggcgggagcaagtaggggcactgggcggcccagagccagcccactgttcccgacaccgaccttaacggccgaccctggctctggcgcatccccagctgaactgaagctcaccgagccttcgtgcgccatcgccaacgcggtcgcagcaacgctggtgtttctgctgcatccgggccgcgtaagccacctaacagtcgcctgggcaaccacgggctcggggtcgctcgccccgcccacagttgccccggcaaccgcgccgcccgcggcacgttccggccgctcaccccgcccaagggccgtgcgtacgtgcgtcgtctctatggtggcggcggatttggagggaccctacgaaccaggagtcaggcgagccgatctggggctgcaggtgttacctctgatctaggccgggggcttcagggatccgagccgagggagaaa

SEQ ID NO: 340 - DNA, 1300 bp, Homo sapiens
gtgctgcgcccaagcaggcagtcagtgtccctggctccagccctcctggggtgcagcacagttttgaatgtggaggggaggcagcaggggtggaaacagcccagccaggagcggccgctctcggtgcggggaggaggtgaagtgagaactgagctgcttgggtctcagggaggctctgacttctagagggggcgttcaacattctttagtggggacttttactacttccagaaacctctgcacattggctcttgctggtcccccgggggccacaggaagtgggagctccagatgaagagtcgctggcactttgagggcagggggcagggccttcccctcatcggaatactcttggagcctacttcagtgcctgcattcagctggtgcacaataagtgcttgttactgtgccaatttcagtatgactagggctgtggtaggagcaatgctaggcgatggggaatccgaagacgcacaggagtccaagggttggctgactgcagaccctcatcataagtctagagccggagaagatggggagacgccggcctgcgccctgtgagtctgggcctcagtcttcccatctctgaaatggggaaggggttcctcggccgagcggatcggccgcagaactcggcggagtcgaggggtccaggcccaggaaggacgccgccggggcgccccccgcccctcaagcttgcgtggcggcagcgcgcacgagcgctgggggcggcgcggccccgcggcggggaggggcgggcgcgcgggcgcgcgggcccgcgcaggcggtggcggcggcggcggaaccgagctgacgggcgtgcggccgctgcgccgcaaactcgtgtgggacgcaccgctccagccgcccgcgggccagcgcaccggtcccccagcggcagccgagcccgcccgcgcgccggtgagtcgcctggggctggggccgggccggtggggccccgcggcccggagaagggcgggggccgggcggcggggccgtcacccccagccgggccgagggcgggcgcgcgcccacggctccgcgggggagagcgggaggcgggcgcgagtgtggccgcgcggggctgagcgtgtcggcggccgggcgggcgggggcggcgtgtccgcgtgtcccggggtgtgcgcgtccccggcgggtgtgcgtgtgcaccccggagcgtctggtggcgttgttggggtgagtgcgtgcggggacgcgggcatggctccccgctacccacttcccgagtggggacgacgggcggaggagtgtgccgggcgccgcagggagtacgtgcggg

SEQ ID NO: 341 - DNA, 1400 bp, Homo sapiens
tgagcagcaggcacgagtgagatcgagaccccggcaaccacctttggctcagcaattctctgaagaggacacgtcaggctgaacaatctaaggtttctagaaggcaagcaggcattgaggaaagatagcccgtgtgtgtgtgatgggatggtggtggtaggattccaagaggtagtgaaaccggacaggctggagctagcgccgccactcccacctgtacgactgaaggccggagctctctgacctgtaactcagggctgccatcctgcagcctcagctgggcgcaatagagtatatagcaccgagtctggtacacagtagttccttaaccaaaacgtcagttccgtgagggtgaagaatttattttgttaatggctgtatcctcagacctaaaaccatgtctgacacatagtagggacccaacgaatatttgttgaaaaaacgaacgaactactggtgtttgtgtattgtggttttgttttgcttttttttttcttcttctttttaagtttgtcttcagggacaagacactgtcgaatcctcatttggaaagattatagcttttctccaagtgttctccacggacaccaccactatcaccaatggcttgttacaaaatgtaggttcctgggcccgttccagaactgctcaatcagaatgggagcaatttgggactctgtaatagcaaaagccccttccccagttcttacgcacgtgaaagctgcagaactacaggattagaattggagggcaggcagacactagctgtttctctgcaatctgaacgttccgaacgaggaaactgaggcccagagaggagaaagggatctgcccgcgtctcccaggtggtccaggctggagacaaaaagttcggatctgggcccaccccggccgaccctcccagacctccagcatctgccgggctagccagccgggaacgggggccttcggggtgggccgccggctcccgggccgctttcaacctgggggacggaggcggtgggagcgtcgccattggccagggcgcggcggacgcctccccattggccgggcggacgcctccccattggccgggcggagccctccgcccccggccggggcggccttgccattggcccctccctcgcctataaggcgggggccggcggggccgtgggagcgcgcgggagcgcacggcggggcgcggccgacgctgggacgcggcgcacggagggacgcggccggcgcccatggcgttcgcgctgctgcggcccgtcggcgcgcacgtgctgtacccggacgtgcggctgctgagcgaggacgaggagaaccgcagcgagagcgacgcgtcggaccagtcgttcggctgctgcgagggcccggaggcggcgcggcgcggcccgggccccgggggcgggcgg

SEQ ID NO: 342 - DNA, 1300 bp, Homo sapiens
ttttcttctgattctgcaaacataaccttgattttttaggcactttaagaactaagtagttaaacagagaaagtttaaagcatgacaatatgttcagagttaggaaaaattagtaattaaaggaggatggggaggattatttagaactatgtttcttctcctgaaaactttctcccttattggattctactctcaagatctatgtgttccccaagggacacacaaaacaatcaatcaaacaaacaaaaaccatcagattttgagcattagagcctggtgtttacctgcacagtgttggtccttttcccattaatatgttggaatagcacaaacagccactgccacttattcagtacctaatattaatcaggcactgcagtatgtagtttacacatgatcctttaatctttaataaacccattatgcagatggggaaaatgagactttgagatactaaagtaacttgcataagacagctcagtcattaagtgcagggatggcatgcaaaccaaatctgacttttaaacgttacttcatcaccacagctggaggtgagctgcatcagtacacaattcccagtgaagacaggaagttacataaggagggagaatttgtgagtgggtgaatagagcagaaggtgactttactaacgtctttcgcgcattcattagccctcagcatgcttaaaggtgaagtttaaggatgattaaaggtgaggttttcttcttaccccacagtagtggctgttgacatttgatatttttgctcttaaaggtgtgagatgctctttgcattacagcctagtgccttacaggaaagaatttcagagaaactaaaattcgttttagtccatatttcaagtagtgtgttttagtccatatttcaagtagtgtgatggtactgcttaacaatgaacagacattgctgttccgggttaacaggactaagaatttgttcccacattcggtcagcaccaaggctaaggaacagcttcactctctaatctttccacgaaatagctgtcaccttgctccggtgctgaagttcgggatgcggaactagctgagcatgcgtacttcctccctgccggccctccctccgtcccgttggctccgccctccgcggacgtgctgcgtcagaatgcgcctcacccctggcgaccccggaagtgggtcgggggcttggcctctgcccggccacagagccggagctggaggtgctgtcccgtctggcggcgatccccgggcagggcccggggccggggtttgaagatgctgaacgtcccttcccagtctttccc

SEQ ID NO: 343 - DNA, 1300 bp, Homo sapiens
aaatgaataagggagtatgcttgttaacaaggattgaatgaaattacacgaatattgagaatattttaaatgcattcattttaatgaaaactgtacttcgaagcatatgttagcagaggttgtagtgacggcaaattatacaaacacttgatagaaattccagaaattctcctgccttttgagaagcagtaggcatatgaactaaagggagtgaaatccaccttaggaagacctgccaaaaagctgattcttcaaaaaagtgttctcgaaatcttagtgtaactggcaccaacacccatccccaatgcctcgttttttttccagcagaactgacaaggtacaaacggaccccgcccagcctggaaggcttctctaatgttggcagagtaggttggacttgtttttgcacaaatcgcctttccctctttccctactccacttgcactgaatattgcactttcttccttactgaagcgggattcctgccttttttttttttttttgagacagattttcgctcttgttgcccaggctgcagtgcagtggtgtgatctcggctcactgcaacctccgcctcccgggttcaagcgattctcctacctcagcctcccgagtagctaggattacaggcgcccgccaccatgcccggctaattcctggcattttaaatacgataaattacttcaacctatgaccacctcaagctgaatataagtagccgcagacaccgtttgcatgacccaggaaccacaaacacggagcgaaggcctgccgggaccacgctgagcttcactactggcagccaactcacttccgggggtgcactcagcacagcagtggcccaacccgccctcaaccggaagtcttttgggctccggcttcgccgtcgccccgccccctggcctttgccccggtcgggcgggacttcctgtgtcgtatttccaaggactccaaagcgaggccggggactgaaggtgtgggtgtcgagccctctggcagagggttaacctgggtcaaatgcacggattctcacctcgtacagttacgctctcccgcggcacgtccgcgaggacttgaagtcctgagcgctcaagtttgtccgtaggtcgagagaaggccatggaggtgccgccaccggcaccgcggagctttctctgtagagcattgtgcctatttccccgagtctttgctgccgaagctgtgactgccgattcggaagtccttgaggagcgtcagaagcggcttccctacgtcccagagccctattacccggaatctggatgggaccgcctccgggagc

SEQ ID NO: 344 - DNA, 1300 bp, Homo sapiens
cctaggtatagtgccttcggtctggactgcagatggagacctgggtcatcccagaagctttgtagtgtgagagatcaaactggctgctctgccaggcctcacctatttccagactggatgattcctgatacttttacttttgagcccaaactaacttctgcatggaggttcagtacaggtcaggtgagtgacgaatctcctgacagggctacagtgaactttcacaaggttaaaccttctaaacttgggaagctgctttgcaaaaataaataaataaaataaaaatcccttactcaattgttgactgggtattattccggaaacaggaaacaggtttttcatttctgccaggttgtgccccagcttccatttgctaagcagcttaggggaacattggattaaaaaccacccgtaaagaaaaggcattaagaaattgatttgaacgatttgaaattattatcttgaaagatcaaagaaacagtgattatgaacaccggctctggtgggaagcggttcttgaaagttaaagcatgggggaactcgagtactctggagcatcatcagcatctgtacaatgcaagtgaactctggaagctagacgcatgctttgcacgtggacacagacacatgcttgcacaggacacatttgcaatacatacatgtttatacatggacacatgttttgcacacgcttgcacaggacacgcttgcacaggacacatgcacaggatgcatgttttgtacaggacacatgttttgcacatggaaacacatatccatgctttgcaaagggacacagggaagcatgcttacaatggatacaagtttacacacggacgcatgttttgcacaggacatatgcacaggatgcatgttttgcacacggacacacacgtttacataggacaagtgcacaggacacgttttgcaccggacgtattctgtgcacgggacgcacggtttgcagatgcaagcacacacactcctcggcgcgacgggcgaagcggggtgggcagcgacagcggagtccggacccagggacagcgcctccgggaacctcgccaaggcggcgggaactacaactcccggctcggtcgcctcgggacgacgcgcggcccagcgcagactggccccgcccagcggccccgcgcggcccggcccaggtcccggcgcccagagtcgccgcgcggccgccggtgagccgcatggagccccgggcggcggacggctgcttcctgggcgacgtgggtacgtgcgggcgccgcggaggtcagagcgaggcagcggcgccggctcctga

SEQ ID NO: 345 - DNA, 1300 bp, Homo sapiens
catcccagaacacaagggtagattcaaacatggctggacacttcggtgctacggaaacatatccccttctggggtcagagcacagctactgagagctgtggagtctgtcacaacgcccacgtcaccctgaagcagcctgcgacaatgcccactgtggtcaaccacggggctactgccttcgctgcaggcctgggttccgcccgttccttagccacgaaacagaactgcaccaggttttacaactgcgtttcacaaagtttacaaaaatttaaagatgtgcacacacccaacagtttatatttcaataacaggtctggagcctgcctgatgactcttgtgctcacagccacccatgagttttcctaagtcacaaaggtggagctaaaggaaggggcggggactatcactgcagaaagaaagaaacaaacatagcttttccaaacagtaacttcgtgtcgctacgcaggaccctttccttttatctcaaaatgctccccgttggtaaaaccacaggtggtgactatccagttttaggggagaagcgcagtgcctgcgtcccgctttatcgctccctcaccaggggcgcccctgcccaccgcggacgcagcagcccgggggtcctccaggatccctccccggagccgcccgccctcggccccgcccggctcagcacactcaccctggggcgaccacctggcccggctgcgcgcacagctcccgcaccacgcccgcgcgctccgacctcagcctgcgttccggccgcgcggggcgcacgcagcccccggaggctacacgggactgagaggccccggaggactgcgcggaggcggcggcctcgaacacggccagcaccgagccgatgcgcacggccgcgcccgccgccaccctccactccagcaggcgcagcggcgcgggccccgggcagcgcacctcggccacagccgccgtcggggcgccctcggcaggaacgcgacccgcggccggcacctccatcgcggacagagggcgggcgggcggtcggtacggggcctgcgctgcgctcagagcgcagcgcctaccgcggcgacacaacccaggcggcgacgctgtagttcctctcggtaccggcttccacccgtcgcctagcccgcgccgacttcctggagggcgcgtgacgtcacgcaagggcgccgcgtacgtgcgtacgtgcgcgtgtaaatacgagcgccgcgcggggccggagccggctccgtcctgggaccaaccctgcgtgccggccgtgaagaactgcgttcctgagccctacctacttttcctcgga

SEQ ID NO: 346 - DNA, 1300 bp, Homo sapiens
aatacaggataatctcaattgtatataaaatttatatacgtaaggacaaagatacatagtaaaaaaaaaattctggcaggtattaaggctgaaaaaattaaaacagtccagagcggtctggctcaggccagcctgggcctgccgagtagctgggacctcagccaccgcgcctggctaagtattaatgaatctgttttagagatagggtcttgctacgttgcgcaggctggtctccaactcccaggctcaggtgatccgcccgccacagcctcccgaagtgctgagcctcccaaagtgctgagactacaggcctggccgcccgcccgccagcttaattcacgtaaattccagacaaacgtagaaagtggctcctttagtaagccacttgcggctgctgctcatcagggttcgcctggggccactgagaccacgcgccggtgcccgccctcccgctgcggtccgattttctgaaccaaccaggcgcttccgggcgccttgccccagacgggcccaccgcctgcgcgggccgagggcggcgcacctgcccctgcgcttccgcatcgaaggtgaggtcggaggaagagaagaccgcaacccccaagctcccgcggcgtggggtccggggggggacacgaggcggggccaccaggacgccgacagcctcacgtctctgggcccgcggcgcgcaaggcatgccgggacccgtagtcccgcgacgttgcgactcacagtgcgcgatgggagtggaggagagcggctcgcggtgcatgccggaactcgtagtctcgggatgctgggtctcagcgcgtgatggggtaatggcacgcaggcctgcgttgaacgctgggactcgtagtcccgccatgctctgtccgcggtgcacgccgggatacgtagttccgagcgcgccaagaccgtcactgggactgggcgacagcggcccgcgttgcatgccgctgctccacggtgccggcgctccgaggaaaagtaggtagggctcaggaacgcagttcttcacggccggcacgcagggttggtcccaggacggagccggctccggccccgcgcggcgctcgtatttacacgcgcacgtacgcacgtacgcggcgcccttgcgtgacgtcacgcgccctccaggaagtcggcgcgggctaggcgacgggtggaagccggtaccgagaggaactacagcgtcgccgcctgggttgtgtcgccgcggtaggcgctgcgctctgagcgcagcgcaggccccgtaccgaccgcccgcccgccctctgtccgcgatggaggtgccggccgc

SEQ ID NO: 347 - DNA, 1300 bp, Homo sapiens
ccccaagctgtcctgcctagcgtccagcgtcttctaggagggtggggtctgcctgtcctggtgtggttggtttggccctgtttgctgtgactacccccccccctccccgaaccgagggacggctgcctttgtctctgcctcagatgccacctgccccgcccatgctccccatcagcagcatccagactttcaggaagggcagggccagccagtccagaaccgcatccctcagcagggactgataagccatctctcggagggccccctaatacccagtggagtctggttcacaccctggggggtgtgtcactgtgatgggacacgtaggagtccacccttaaaaccagcaccctgtccctcgaggctgccgagtgggtgtgtggactggggtgccttcccacaaaactagcctccggctctgggcccgagacagccgcaggccccagccactgaatgatactggcagcggctggggttttatgaactcctttctggtattttttcccctctatgtacaaatgtatatgttacgtctcaatttttgtgcttaagtaaaaataaaaacattttcagacaacacgggtccacatgtctggtggacttgggaggacggggcagcccacaggattaggggctgggcgccgctgctaagattggagagcggggacagttaagatgcaataaataggtcaaggcccttcctcagaaaagtgaaaagcagctgggaggcctgggaagccaacgcggcctcttccaaaggcgccttctcgtgccagtagctctcctttcagagctgcgggtcctggggaggggccctgggagcctcccggacgccgtcgcccccacacacgcccgctccgccgcccgcgccctcacgtgggcgatctctagacgcctctgcgcccgctaggagtccccggagaccacgccggccgtcctccgttgttaacttctaggctcgcggggcctccgtatccccacgtgggccctgcaggaactggcggggcgcgtgacccggcgaggcccagagacaggggaggggcgccgggagccgggcggatccgcgtccccgatgcgcgctgcatttccggcgggcggcgctgggggcagcgtggagccacccagtgctcggcccgccccgcaacccgccggaaccgccgcccgcagcgaggaagcgcccgcgcgggcgcaggcggccggaatggcggggcccggctggggtcccccgcgcctggacggcttcatcctcaccgagcgcctgggcagcggcacgtacgccacggtgtacaaggcctacgcc

SEQ ID NO: 348 - DNA, 1300 bp, Homo sapiens
gtgtgtatatatgtatatatatactatactttttttgagacagagtcccgccctgtagcccaggctggagtgcagtggcgctatgtcggctcagtgcaagctctgcctccctggttcacgccattctcctgcctcagcctcccgagtagctgggactacaggcgcacgccgccacgcctggctaattttttgttttagtagagacggggtttcatcgtattagccaggatggtgtcgatctcgtgaccccttgattcgtccacctcggcctcccaaagtgctgggattacaggcgtgagccaccgtgcccggcaggatttatattttaaggaggcaggggagttattctccatgggaggaaataagccgtgagctgccttgcgctttggcatgtttctctatcatacagataagaagctagttcagtcaagtgtatgcagatttgtggatggaaaaactggtgctcccaggaggaggggagcagattgaggaattactgacaccttctaggggcgaccagccagatgtgcaggtgaagcacaagacaggttctcttcatgcctccactatcctggcctcgaccaaactgcagagggaaaaactcaggtgagagtgagaaagcacagtcactttcagttaggtttgtagcggtgtgatcgtcacttagcactcatttattcgtgtattcatacatttatgcatgtttctttcacagatcaaactgttgagggtccacaaacaggctgaagacctcgtctggagggagactgcagtgaacccaagatcgttcaaataagcgcatcgacataacaagatttagaaaagaataagcacggtgctgtgagagcagctagcgggggctggactgggtccctgcggccaggcttccaagtcgagctgccgtttgggtgggaccagaagacgggctagtctgcgccccaggatccctccctgaggacaaacagaaggccgggtcctcccttctcccgcttgtccttcggcattcgcgggacctgcatgctagaccagctggccggacagctcgctaggacccgcgggtgcggctggcccctaccatttccgcttcctgccgtggggcggggtttccggttgtcggaggcgaggcttgtcggctgtcaaaggggcggcccggcccggcccggaagctacagcagcggcgcggagactgcggggcgggccatggcggcgaacctgagccggaacgggccagcgctgcaagaggcctacgtgcgggtggtcaccgagaagtccccgaccgactggtgggcggcgagacggg

SEQ ID NO: 349 - DNA, 1400 bp, Homo sapiens
tgtgaccacctaggaaatgacaggccttcagagggaggatgttttagccgagtgtaactcaagtctagtaacagattggcatgcttgtcatcactcacagggcattcagcccaatttctttcccagttcccaagccccatcttggctgaactttggggaacaggaatgtgtctgcccccaaggctggatggcaagtgggacagacttgtcctgaatggccaagtgcatggcggagaccaaagtggggctaggacagggatggtgataggacagaggacgatgtgatatgcatgggtagggttgtggtgccttgtctgcccagaggtcctccccagatggagcatcttggggctgtgataggggttggatgatggacaggagtgaggctggactgggtgagctcagttgtcccaagtcaggggcttgggggagctggggattttggcctgtccacatctgggatctgctctgatggaggaaaggggagcgcttgagcagaccttcctcctggggctctgtaattaaccaggaaagtgtctgtgcataggatcttttcatcacttgatacttatcacactccctgcccctaaggctgagtctgaggttcccttttgttaagtgcaggaccagagactttggaaaggccagaaccacacagcagggcaggatgagaggccatctaggaaacttaggcatcctaggcctcccagacttggctaaggattaagtcacgggagagttaaaggccaaaggtgcacagcaaagaccccggtggggagaggctgtgggctctgaagtttgagcaggaggcagaacactgtcccctccctgatcctccaccaggcgggacctttagggatgggggcagtgaagaggatcctgggagggcaccagaggttggactccaagccaaagcccctcccccggcttccaccaggctgtctaacctccctccctcctgctgcaacccgagtcccgggcgccaggccggcgtatcgggtgaccgcggcgacgcagccaccagcctccgccgctcctctgcggggctgcgccggcggggccgcgccgagggagggggccgcgagaggggatgtgcacggcggcgcgcagcgccgcgccaggtggagtcgcggttaccggggcgactggggcccgggccggcacggcggcggccgcggcggctctcgcattgcagcaaagggcaccggcggcggcggccgcggctgcggaggcggccgggggagagaagagcccgggcgggtgggagtaggggccctccctccccagccggacgcaggacctggggctggggaccccgcacgtacacctgtggccgcaggtaagggggagcgactgtgggggccgggatcgccgcctcgggttgggcggggggcggggac

SEQ ID NO: 350 - DNA, 1400 bp, Homo sapiens
gttggaacaccatgggcactcaataatagctatcatttacataatgagtccctactaaatatggatgctgggttaggcgctgccgagatacaaggtgaaagttctagctgcaaatggcaaaagtcctgaatgttcttggatttcaaaatgctttttgtatatcgcctcttttctgcccgtgaggaggacaagggcaaacaattaaaataggaaaaatgtggggagcacttcatggtttataaaacgtttttctgcgtgccaacttattttaatgtcttaactttccagatttgaaaacaagtcctacaccaaataaatggtagagggacacaaactggaacccaggcttcctaaccgccagagcgaccttcccgccgcccaatgcctccctgaggtgctggtcggctgcttctgcccggggtacccagcagtcatcctactctccactcagcaccaccgcacgtcggccgcgcgccacgctacccgccgggttactgggcgctggtttggccttcggaggtcgaggctctctgagtgacctcctgaactgggctcactcttacttagcctcctctctcgaggcagcaccctcctctctacacgacaactccatcattcgcagccccacggtgttcccggggagcgcctcccgcccccaccggcttcgcctcagcttgtcctcgcctttcccgccctcagcatccgcggatacccgcgctcgccgggcccacgcggaagcatccgcagactgtcgcaaggtcccaccgtcttgctctcattgggcaaccttaccctttccccgcctcaatgtttttgcttcctcagtgattggacctgggcattgtccattccagctcccaggcaccgccctctctccacccactagaaagccacccgggttctccttcatccccaacgctcctcacctagcccctgtcctgagggtgcccctaaccctggagccagctttaaaggggcaggccccttctcctgccccagccccagccccacccaccgggcccacattctccgtcttccaggtccagcgctccctcacagaactcccccgcaccttgtctcgctcgctccgcccctccttcccagccacagctagaggtcccgggcgcacctgcagagccggaggcttgctggggcatgcgctccatgaaggctctgcagaaggccctgagccgggctggcagtcactgcgggcgaggaggctggggtcacccgagccggagccccctccttggcgggggcgtccggcaccacctcagtgaggccgcggcgcagggcagagagacgccacacagccaccagccgcagcaccaggatcagtaaggctcctgggacagggcaggggacgggcttgcccccactcccactgtggttctcgctag

SEQ ID NO: 351 - DNA, 1300 bp, Homo sapiens
tataccaggaacctggtgaaggaagcgtgcagaggggaagcaaatgcaactttctggaggctagaacagagaaggggaagttcaccaggtccgcagagattagcctggaagctggtctccagcccggtcctaatccagtaattacactgcccaacggctttccaaaactcaaaagaaaaagcccagcactgtccttcctgtccctggaagtttgtccttcaagtctcccatcacttgtcattcgctcatcaagtatttacttaacatccactctgtgcaggtaccatattgatagcggcctcaagggtgcttctatttagggaatttttagtctattggagcagatagaccgtggggggcattccggggatgctgggggctgtcaggccacgctagaagctgacactgaagacgtcagctactctttaaggacccatctgcctcgctgcccactgctcaacccgtcactgggggctccaggcctgccaccggcttgtcctctgaagggataagcaagtgttctattcacagcccggagtgcccttctgccctcgcccgaggccactgcccgcctggggccagctccagcgctgcgttctccaagcgtggccacactcatcggcgcgctgctctgccaagggggctgacgcggcgcgcacggccagggagctcttgggggcagacgccgtccagcctcccggccgccgggtgcctactccagaccggctctctctctccctaggcgcctcccacgcccgggccggagagcgggcgctcggggcgacggacgaccctgcgcgcacgtgggcgcagcctggaggccgcggggaccctctcccatgggggcgacgggagacgtcctgccggtagaccttggccagggggtcgcgctccccgcccgcacccctcccggagccccggcggggacgtgcggggacgcgcccgggcgggagcgcgcgcgccaggcgcctccgaggtcccggcagcggctcggggcgggcggaggaggggccgagggcggggcggccgcagcctccgccattcccggccccccccggccacggcgcaccgcctccccgcccccgcccgccctcccccaccgcgcgcgctccgcccgccccggagcctcgccctccgccacgatgagcaaatgagcgcgagcgagggcatgaaatttaaattccactcaggggagaaagtgctgtgcttcgagcctgaccccaccaaggcgcgagtgctgtacgatgccaaggtgccgccgcggagggacagggaggaggcgcgggctgggggacccggg

SEQ ID NO: 352 - DNA, 1300 bp, Homo sapiens
gtggcccaatacatgattttttttgcgaatatttcatggacttaaatagataagtcctctctctacacataattaaatggagtgtgtgctttgcattattcagttcctttattcccatccttgcttttgtctgcagatttgtcctattccagaatgggtatactgaaacttgggtaagggtgaggccagcgttctgggtggcccaggctactatcccacccgtgccacagaatccacacagaggcccagcggcggcactgggtggtggggaagggggaggcggacccaggttgggggggcaggcagtcagtgcggttgccaggaagcgggaaagggccacaatggggtctgggaggtgggcggggcggagcggggatgtccagccacgtcgctttgttttcccacgctaggagctaccacaacaggtcagtgcacctcggggcaccgggtcccccacgcaggcccttcccggggcaccctttcccaacagcacgaaaatctcctgcccccaccccacccccaggtgattcccttcaccaagtctgggtctagacttggcccccgcgagttcacgtccctgcctaatgcgcctggagtccgggtgatggccctggatccgctcccggccccaagctccacacagccgggaaggaagctcgcgtttgttttgctggcgccagggatacggtccaggccccgccccgccccgcgctgatcccagggtagtgggaaagtgcgctccccaagaatttgcggtgcaggggccgcggccaccgccttctgtccgcaggtgctgcgagccgtaagcgccccccacccgcgctatgggctcggacgcctgggtgggcctttggcggccacaccggccccgcggccccatcgcggcgcactacggaggccccgggcccaaatacaagctgccgcccaacaccggtagaaggggcaggccccgggattgaggggtgggacggcgcctgggggagggaaggggaagagaccagggaggcctgcgctcggggctgaaccgtgcctgctagaggggagagggggtctgtgccgggggagggtccgtgttgcagatggggcttggggctgggcccggccagacgctaactcggatgctcccaggctacgccctgcatgacccgtcgcggccgcgcgcccccgccttcaccttcggcgcgcgcttccccacgcagcagacgacgtgcggccccgggccaggccacctggtgcccgctcgcatgaccgtgcgcggcaccgacggcgcccccgcctactccatctacggccgcccacg

SEQ ID NO: 353 - DNA, 1300 bp, Homo sapiens
cagaaccttctggaagctctggcggaagttgtcagagaggaagccgtagaggacggggttggcacagctgttggcgtaggagaggatgaccacgaagaagtagaggccggcggaggcgggctcctggggcagcgccacggccaggttgacgatgttgacggtgaagaagggcagccaacatcccgcaaacaccagcaccaccaccaacaccatgcgcgtcaccttccgctccgagcgccgccgcacgcagcccacgcgcacgcccgccgccctcaccttcaccacgatgagcaggtagcacaggcagatgaccagcagcggcgcgaagaagcccagcacggccgtgtagatgatgaagacggcgccccacagccccacgggctccggccagctggcgttgcaggtaccgccctcctgcacgtccgcgaacaccaggagcggcagcgacatgcacagagacaggacccaggccgcggcgctcgccagcttggccacacgcgggcggcgccagcgggccgagctcagcgggtgcaccactgccaggtagcggtccacgctcatgactgtcaggcagaagacactggtgaactggttgacgccgtccagcgtcatgaccaggcggcacaggacggggccgaagggccagaaggacgcggcgttctgcgtggccaggaaaggcagccccagcatgtacaggacgtcggccactgccaggttgagaatgtagatgttggtgacggtcttcatcttggcgaagcgcagcaccacgtagatgaccagcgtgttcccgcccagcccggccgcacacaccagcaggtacagcacgggcaccagcaccgcccgggcccctgccgagggcgccggccccaccagcgtcctgttgtcaccgcctccagaggcagcccccggggaggaggcgttccagctgggcgtggaggctgggaacaggggctccatggcggcagccctggggtgcgtcaggctctgcaagagaagaagggaggacgccagggtggtgagtccctgaaccagcacatgcaggcattccttcctcctgggccccagccccgcctgccaggaggcgcgggatcaccgggtaaacacgattagtcatgtttagcttggccgggaatcacgttaagcaaattgtttggaaaataagccaggagaggaaggagcggcgggcaggtggccccgggagcccagacggacggctgctgtcgatatggcgacagctgccctgtggccgcccctgcacccagatggcgcctggcctggccgcagcatcctggagtctgag

SEQ ID NO: 354 - DNA, 1300 bp, Homo sapiens
aggaggtgttccgattaggtgtgatcgacctaaaagattaatgaaacaacaaacccatcaaaaacgactacaattgacagaaagctagaaacattaacggcgttggaaagctcaaatgacagaagttcacaaattcttaatcatctaatccaggcctctcctcattaccattcagaccactcacaaagatcccattaaatcagctcataatcaggtttacaaaaataagactccttaagagatgtggcaatgtgagaagtggagcacgtacacaggcacagcaaatgactacgttagtgaaaactgtagggtttatcataagcaaaatgacagtgctctcctccgtgaaaaagagaaagaaatcggacgggtctcctttaagtgaaaatagagactgtgagaacataaagacattgctgacatctgtgttttaacattccatttatttaaggaaagaggagaaagaaatgtttggaatataaataaacccttccctataggaaggtcagaaatgtagaaatacgcagaagctggtgggagcaaaagccgatcctgagacaaggatatctagagaggtagccctggtcgggatgtgggaagaggcctgcgaagaaacagcagaaccaagggaaagaaagggaagaacgtcaggtccactgctcatcccgagcgcctagaactgcgccagactcctggcatgcgcacaggacactgaaggaagggatgagcttttcggctagcgtattgtctttgagcgacagagcgggattcccaaacgtccccgccggtcactcagctcctgcagttcatgcctagcaagaaccttgcgggcggtccgaggctgccatcctttcacagctgtatttgggggcaaaaatagggtaacgaagccgggggcccagacttacttttgcagccgggtgccatagcgccctcacccctcgatcccgaaaacaatgcagccggtgcctccacctcccgactgcaccgcgcgcgactgaattccgcccgctcaagatggccgcaaatttgaatttggcgcttggatcggacgttgacgcccgcatggaggccgccatgttgcccggcctacgcatcgggggcgtggcccagtgacgtcacagctaagcgcctctgtatcgtcgcgaatccgtcgcggaacctgtcttctgtctttacccagagctaccatgagcaagcggaaccaggtatcgtacgtgcggccagccgagccggcgtttctggcccgcttcaaggaacgggtcggctacagggagggacccaccgtagagactaaggt

SEQ ID NO: 355 - DNA, 1300 bp, Homo sapiens
aggtcaagagataaaagcaaacaagtatggatttcagagcccacactgctttattatttttctgctcacttaaattatcttttctctttctataggcaagtatttagaaaacttagcaatgaggagaataagatgatctctgaagtctctccatgttagtattagatgaagcacagggagcaatccgagtaccctagcaagagaggaatctggtgggcagaccacttaaaacttgtgtgaatgacaggagtggggaccatggttagggcagtgacacttgtctttctttccaggtgtttgcacttgtgacagcagtatgctgtcttgccgacggggcccttatttaccggaagcttctgttcaatcccagcggtccttaccagaaaaagcctgtgcatgaaaaaaaagaagttttgtaattttatattactttttagtttgatactaagtattaaacatatttctgtattcttccacatattttctgcagttattttaactcagtataggagctagaggaagagatttccgaagtctgcaccccgcgcagagcactactgtaacttccaagggagcgctgggagcagcgggatcgggttttccggcacccgggcctgggtggcagggaagaatgtgccgggatccgcctcagggatctttgaatctctttactgcctggctggccggcagctccgaggtgtggggttgcagagattttgagttctcgggctaggcggtggcattgcaccccctgtggcaatgagggtggctgaagggctcggcttgtcggtggggcagcgagagccgggtgcacgcgccggggaggtagccaacagccgttgggacgcgacgctggttcccaggggagagccagccgctgccgcggcactggttcagacggccaggccctagggacccaccatggatcctgaacacgccaaacctgagtcatccgaggcaccttcagggaacttgaaacaaccggagactgccgcagccctggcaagtagcggcagcgtagtgagttctgtacccaaggcacagcgcaacatctcagcgaagaccgcaccccggaagcaccccgcagtctcaattcgcagtgcgcagtccgcagccgccgcacgtccccaaggcagtgagggcaccgcaccctcaaggaaagccaccacacgcccacccccaaagcccacactcccaccccccacgccctctgcacacactgaatccaaactcttaaatgagatggcgatcaaagagcgcgtggagggccgagccaaagtcccgtacaaattcagggaca

SEQ ID NO: 356 - DNA, 1300 bp, Homo sapiens
cacagggaggaacagcatccaggaggagggtgcagcgggtgtgaggccctgtggagcagactctggagctagaataaggtggcatttttgctgcacgctgtgggggtggacggggcccgaggtcacaccagggagcccatattgggtcaggaatgctgctttggcaatccctggactcagcccccagctgtctggccatctgggcacttctgagccagccatgacctctgccttcccttagcactttgcagtgagcccagcacctggcagcccctgcccagctggtgcacggtccctctgcggcactgtgagcctggaagtagggagctgggtgtccatgtgctctgagcagggctgggggcccaggcgatggaccctggagctgtgaaggctgaggcaggggtgggtcagggatgaggggagactgctctggggggctcggggccatttccaccagaagttccccctgggagtttgtaggacaaaggacatggttgatgtggatcatagggctgaccagtggcaggcggtgggagggacgcggggtgcttgtgccccaggttgatcagggtgaagcagtcacatgatctctcctgtcctctttcctcattctggtttcctaaagtggtcagaggtctctgcaaaataagctaaagggagggttctgctgggtgggtggcttcggcttctgtgcagcgctcaccctgctctcccctggaacgcctggaactagggtggtcaggctggggtggaggagctcccctggaatgttccagagcttcccccactcctgccgttctgagtcaccctgcctccccggaggaggaggaggatcagctgagccgccgcgctcacgtagtgtctggctgtctgcctgtctgcctcgctgtgagcagagtgggatgctgccgataaggcgcgcacgtgggccctgggaggagcccgaggcagccactcccgcacgtgggcaggaggagggctgctcacaccaccggccgagggaggaggactgcgggctgcgcctgggcaggggatgagcttgtgtcgcgggcggcagggggaagggagtcggagagctcctgcggtccagccggatgactgatgaggttgaaagcacttccgctgcggcccccgcaggaagttcccaggaggaagttgcgaccctttctaagccatcccactggcctggactctgctgggattattttgaccccccagggcagagtgtagccatctgactggctttctctctcggcaggagacggggcgcacgcctgcaggtgggggagccccaatacgt

SEQ ID NO: 357 - DNA, 1400 bp, Homo sapiens
cattctcctgcctcagcctcctgagtagctcggattacaggcgcacgccattacacccggctaatttttatatttttagtagagacggggtttcaccatattggccaggctgcccacgaactcctgacctgacctcaagtgatctgcccgcctcggcctcccaaagtgctgggattacaggcgtgagccactgcgcttggcctgaaagcttctactaccattgttgtaagggcatttgtcacccagctcaacccaggacacttaaagtgggacctcagaaggacgcagtattggttatatccgtggctctccaaactgacatacataagaatcagctgaagggacttttccccctccgtcggctctctccctcacttcctgattcaggtctggggactggccctggcatctctgctttgaaaaactcctccgttgattctgatacgtagcaactcctgagaatcaccttaagatgccaaaaatagctgttaaagagtttcttcctcactcggtcttttcagcctatttctgatagatcctcagttcaaaaacaaaaagcaaaaaaaaaacaaaaaaaaaaaccaaaaccaaacaaacaataagccccgctttagtgctccacggccacccaaaggaacgcggctggtctacgcacagcagagacccaggaggtcccggcgatcgagcggcgcggcaggtgaaacttccgcggagacgcccgggacacgctcgcagggaccggaaccgtcccggctaccacccttccgtatgcaccaccgctgtgtcggagttcataaccaaccccagccaaaggctacccagcgtcaacggcctctggctttaaaaaaaaaatctcccttcgggttaaagagccgcggcactgacgcaaggaactggcttcgagggtccgggaccgctccgcgcccgcgaaccgagttcccgcctccctcgggaggacgtccgtgcgtacgtgcgcgtgccgcaaccgccctccttcaaacgcgcgacgcgagggcgggggcgccgcgtgcgcgcgcgctctcgttggttcgctctctcgctagctctcggctgccgctcttgctgcggctgcggctggggctgggggcggcggcggcggcgacgcgggcggcgggcggcgcggggcggtccggcgggttcaaagaggaaaacatggcggaaaacaaaggcggcggcgaggctgagagcggcggcgggggcagcggcagcgcgccggtaactgccggggccgccgggcccgccgcgcaggaggcggagccgcctctcaccgcggtgctggtggaggaggaggaggaggaaggcggcagggccggcgctgagggcggcgcggccgggcccgacgacgggggggtggccgcggcctcctcgggctcggccca

SEQ ID NO: 358 - DNA, 1300 bp, Homo sapiens
ggggaataacctatcttatgtggttatgataataaaatgagttgatatgtaaaccacttagaacaggtcctgatataaagtcagtgccagccacagtttagtccaggctgggtagatgctttgaagcttgatattgtttcaatgtactttgcatttctaaaaacgtgaacatttcaaagcattcatttgatctcctaaggactacctataccggagcctcattccagcacatttgtaagcgaggcacgcctcctagaggccacgagtgaagttaatttccagttctcgaaaatcttacagacagcggagaactggtgtggtggctctgacgccccgcttgtgagtctgcagtcggacatctggaaagtaagcggcacgtccgcgtgatttccagtgcttcatcttcttccaccctaccttccctccgaggctgggttcttctaattcctgtagattgcagagcgattcctgcgaatgtgccttctttcattcattctagttcattccacagataattcagctgcgcgcttcctctgtgcgaggcattgccggagagcggggagcgaattgaacgtggaacctgccagtaggggcttgccgcccaatacgaaattcaaaatatgtattgtatgtagacgggcaaactaacgaggatcttgtaacttgttttctcatctgccaaatgggggtaatacgatcttataggaccttataggtcgctgaaagattaaacgagcggaaaaaaaagagcccctaatagtgagctaggtgcaaaaaagatcctaatgccttttttcctcattcctccccagattgaaagtgatgagtgccagccctgagggttaaagcgccatattttcctcaatatagggaatatttgttagtgtccccagacgaagttacattggttcaattttcggcgtgtgggagttttcgccactagcattcagcaccccagtttcaaccgttaaagctaccgactccacatacaggaaatgcatcttaaaatttggaaaaaaaatccccaaaacactgacatccaaacactttaaagctgccaaggtggacggaacaccttgaattcccagacgcgctccactgagcatgcccagagcctcaggccaaaccccctcctacccgccaaggggaggtggggcagggctggccttctgtgctagtcacttcctcttccggtttcatatgaactctcccgccacccgggaacagtggctgccaccgtttgtgttttcccgagtttgaattcttgcaggtaggggaaacttccgcgaatttaggacag

SEQ ID NO: 359 - DNA, 1300 bp, Homo sapiens
cgcaccgcacacatcaattattcatcgcccgtctccagcttcccgggcgaagccaatcataggcggaggctccgctaatggggccgccgccgccgccgccgaggaggcagccagccgcgcgcccgggcgcaagcgacagctctccagggacggggatgggccgggggcgcgcggggggcgggggcgcacggggcgcgccggagaaacttcccacggcccgcgctctgcgccgcgctcgcggaccctgcgggcgtgaccacccaccctgcgtgtgcccgcgtggggctgggggctccgggggaggccaggccagccgcggcggggggaggggagggaggaggaggaggagcgcgggaggaagatgaaaggcgagcagacctgccttggcgtctccagggagccccggctcgcgcgcgccctccccgccccgcgagcctcgccgtccgcaccccgccccccagcccgccgcccgcactcactcgcgcgcgcagaccgtcagcccagccacttcgctgcgagggagcgcgagcgagtatgaatcggaggcagctcacatttcaaacttgcacgcaggggtggtgctggtgcacgccgctgccgagcgaacgcacgacccgacgagcagcactccagcctccgggcgggggcggcgacgaggcccctttccttcccccgcccaggcaattaattggaagcaacacttgtgcgagtggggctcccggagcgctgtcgcccgaggaggccgccgggaaggcgctggcggtggatgacttcgggtgtctcccgccccccagcgaatcctcccaagtgggcatgctaatgagggtccacggcggggagggggtggaggagggagctgaactggagggggcctcggccggggggaggggaggggaggggaggggagggcggggctaggcatccagattaaatctcggtttaaaggattttcggaacgggctacggggtggagaaggtaggcggcccggcatcttacttccctgaccctgggtgccctggcacccccgggattccccgagcgaggggcccaggacagggtgaacacgcgcacgtacgctcccgctccccgacttcggggagttcctgtgaccaggagctggcggcaggagggaagccgggggcggctgcgcgcggccctgccccgccccgggagctgctgccttcctgacattgcatcctgtggtggccgaggcctcttccttccagccagtctgtcgcaagggctccgggctttcagcgcttgctcaccccccacctctctgccccttagacacccctg

SEQ ID NO: 360 - DNA, 1300 bp, Homo sapiens
cagcagagcaagactgctctctctgtctttctttaaccctcaccttcccttcaaaacctaacaaagaccatgtttaaatcaatagaagaacattttatgacgtgaaaattatatgaaattcaaatttcagtgtccatacataaatctttataggaacacagcccatattttctatgactgcttttgagctccaatggcagagttgagtagctgagaaagagatcttatggtccacaaagcctaaatatttactgtacggcccaaagaaaaactttgctgagcctgctatacaataagggcttcatgattaaataactgggtcgtacaccaagattctgaacatataggcaggccctcttaagtttagtgtctttgtgtaatggaagtaataactattttgcctttaagttgccataaacatcaaatgagataatgcacttagaaaataaaaacaaaaaaaacttataaacaagacagctttatcatgtattgaaggtggtagaataagaaaacattaaacgtttttattctcatttccccttctttcctttacagctttcacttaaacttgaaatttcaagagaaaattcacttttgaagtttttacttttcaagtgataatagggtcacaggttctttccttccagtctttttgtgttgctcccactcccttttctttctcacatgtaatttttttccattttctttaaatagtatctcaactgggctcacaatagctcagggaaggagaaactgggacatgcctgattaatccattttacaggccaggaaactgaggcagatcccagttgcctccgaagctctgactcagcagcatgcagagagccctgccgctctctgcgccttttctaaacaaatagaacaaaactaaccttgccaggtttccaagcttggatctctaacactccttcaacgttcaccccggcgttcctccccgctgcgccccctccctctccttgccgccccctcctcgggagcaggtggtaggctccgcgcccaacgcgcaagcgcgcggcatcgtggggcgggggtggggcgggactgagggcggagtgtgagcgggctcggttttgggccgcggcgggagcgggagtcgccgccactcgagtgcgcaggcgcctggcgattaccggtctcaccatggagcggaaaggtgagcggtggagcggcctccgccacgaggggcaatggtcgccggggcgaggcccgggtcagcgccgggagcttcgcttaactgccgcggttcggttcccggacgtgcggcgcccctccactgagg

SEQ ID NO: 361 - DNA, 1300 bp, Homo sapiens
ctggacacacagggctagtcgacttcgaatcatatttgtcagaaggcccctgagcacatttcatttgccctgcattcccatcaacctcctgcagagatgggcactgcagccagcaggcagcaatggcatctgccatccaggacccctgtctccaacagcaaagcgtctgagccggggttctgaagtgcgccgcccaacaagactgcctgggagccctccacgtcctggtgctcggacccatgggcgagaggctcaggcagaatctccgggcggaagtgggcagtgatgacttcatggtccctgccccggccctgtgaccccagtgcactgcccggacccccggtgaccccgaggtactgcccaggctgagcatcccccacctggaccctgccttactccctcccaccagcactgttagaaatgcagtctggggcccccacaggactcgctgggctgaatctgcattcaacagatgctcagggctcctgtgcacttcattttgaggaccactagatttaggggtttgtgtttatgaattcctccatggacacaaaaaaatcctaaagggccctcggtgccactgccctctggggatctaagaggctattgctgctctgggtgaatctgggaggcagaggagtccccggggacccctgtgttccctgccaacccagctccagctgccaggctcacccttccactgggtgacccagaatcggggcggccgcagcggggggcccagggagccggtcgcccctcactcgcctgcctcacgccctcccaggccagggatgcggccccagctggctcagcccaaggtcgtggacacagtgggtccaggccggctctgctctgacctcaatctccctcctgaaggagaggagggaaggggaagggcctgtgagtgctgctcaccccggaacgtgccctcaccgcaatcagagcagacaaagctgcagccaagggcgtcccaagagcagcagggtgaggaaagcgggcctggcccgccccaggggcaacagccgggctgcacccagcccctggtgtttggtgaggcgatggccggcgctgataaacggccctggcctctccctgggatccttcgcctgcgatgcctttgacctctggcagaggaaactataaagcccagaggtgggcatctggcctcagtctgggcgtagagggtgcagggagcagacgggaggatctcaggccagggacgatggcggctctgcaggagaagaagacgtgtggccagcgcatggaggagttccagcgttactgctggaacccggacacg

SEQ ID NO: 362 - DNA, 1300 bp, Homo sapiens
gggacggggcgttcccaggtgggagcctggagggcaaagcgtggtgcgagcaggtgagggagagagctagttggtaagcgtggaagcccacccgagggggcttgacctgtcccgagaggtccccgcacacccgctctggccgcacgccgtactgcgggcgtggaggcgcaagcccggcggcccggcctccacctgtcccccaagtgcaccctggtccgcgcccagagctctctggagggtggggtatgcgggagaggggtggaggccaaacgcaagggccctcctggagtccccagccctacttcggagccaggggagggggcaccaagtgagagaaattgggcacccccgcctccgctcctgctttcgcacccggcacgcccatctcgtccccgcgcgtctgcaccggccaggcgtcccgcttgcccacccgccgccgcgccccgcgccccctaccccagggcctctgcattcggccccacccctgagggccggccgggaacgcccctggaccggaataatttccagggggcaagagctttcgaaccaagtaaaatagaacttgaatgtagcggctgccgttgcctccttgtaccggtagcggggttggggacggaagccttcggtcggtggagaggagaaagggagaggccttcgggcggtggacggggaagagagggagtccttcgggcggtggagggggtggagagcgaggccttcgggcggtggagagcggggaggggggaggccttcgggcggtgggagggggagagagggaggcctttgggcggtgggggccacggggagggtggtcttcggactacgtgcgggacaggaggtcagggctggcaagtccctcaggcctccctcgttgccccagcctcgcgggccgcctaactgccccgttccaagggtgccaccggaccccgctggagaggaacttctccgttggctggatttcatcaccacccattcccgattccacgtttcctttaagcggggctggcggagccgcaaggcggcaaggaactggattgcgattggtcagcacgtgcctcggtcggcggtacaattggctgaggcgctgggccttgggaagcattccccgacgggattggtcgtcgctctcgcagagcccgcctcccgcagtacaagcggcccccgggtcgggtgggaggaggggactccgggaggaggaacatggcggtggcggacctcgctctcattcctgatgtggacatcgactccgacggcgtcttcaagtatgtgctgatccgagtccactcggctccccgctccg

SEQ ID NO: 363 - DNA, 1400 bp, Homo sapiens
acgcctgtaatcccagcacttagcgaggccgaggcaagtggatcacgaggtcaggacttcgagaccagcctggacaacatggtgaaacctcgtctctactaaaaatacaaagagttgccgggcacggtggctcacgcctgtaagtaatcccagcactttggcaggctgaggcgggtgtatcaccagaggtcaggagttcaaagccagcctggctaacatggccaaacactgtctctactaaaaatacaaagattagccaggtgtggtggtgggcgcctgtagtcccaactactcgggaggctgaggcaggagaatctgttgaacccgaaaggcggaggttgcagtgagccgagattgcgccactgcactccagccagggctacaagagcgagactccgcctcaaaaaaaaaatccaaaaaaacaacaaaaaaacacaaagattagctgggcgtggtggcgggcgcccctaatcccagctactcgggaggacgaggcaggagaatcgtttcaactaagcagcgggaggttgcagtgagccgagatcgctccattgcactccaacctgggtgacagagcgagactccgactcaaaaaaaccaaacaaacaaacgaaaactcagtgggagtgtcttcactatgcagtcgtctattcagcaaccttgacaacaagctctggcactcagtttctatttcccgggagttgcccagcgctccgcccacgcccgcttgcagaactcgccccgcctccgccccacccatcgtgtgacgtcaccatatcggtcccgcccctctacttcgcgttgctcccgggactgtcaaccgcgtccggaagccccgccttttcgcccccgcccgcatgcgcgggcgcacacgaatgcgggcgcacacgaatgcgggcgcacacgaatgcgggcgcacccttgagtcccctccacaaccgcggtttgatcccagcggtccagtcggccggtgctgcccatccgtcccgccccctagacgcacgtccgctcgcccggcgcccgagccagtccgcgcgcacgccgtctgcgccccgaaagccccgccccaaggcgcgcccgcccaccgctctccacgtgctcgctggagggcggtgcgaggggccgagccgacaagatgttcttgctgcctcttccggctgcggggcgagtagtcgtccgacgtctggccgtgagacgtttcgggagccggagtctctccaccgcagacatgacgaaggtgagaggcggcggctcgctcatggtccgccgctggggccctgcccgtgggctactggggctgcggggctggtcgaagccgcggtgtcctgggcgcccaagccaagttgcaaaaatcagtttaaaagaaaaattctctccttgcggggatcggcctaggccgc

SEQ ID NO: 364 - DNA, 1400 bp, Homo sapiens
actataggcgcgcgccaccacgcccagctaatttttgtatttttagtagagagggggtttcaccatgttaactaggctggtctcgaactcctgacttcgtgatccgctcgcctcggcctcccaaagtgctgggattacaggcctgagccaccgcgcccggccctttcttttttttttttgaaacggtctggctccgtcgcccaggctggagtgcagtggcgcgacctaggttcgctgctacctcagcctcccgcgttcaagcaattctcccacttcggtctccccagtagctgggattactggcgcgcgccaccacgcccgcttaatttttgtatttttagtagtgacggggtttctccatgttcgtcaggctggtctcgaactcctgaccttaagtgatggcccgcctcggcctccctaagtgctgggattacaagcgtgacccactgcgtccggtcgggcctggcttttctaaaggaacgtatgcgtgcggttacgaggaaccgtcgtttccccagcagggtgaggctgagcgtgcacttaacagtcgcgagggccacaggctcctcttgcaagtaacttaaggttaaggagcaacatcgtggacaaatcggcctcgcccagcatttcagtgagggcttggtgcgaattccagccagagccctagaaagtatcttgggcaggtcgaaatgcacccctccagctcccagccacgaggggaccggcttccctgtacgcagctccggccagaggaggccgccgccgccccaccacgccgcggaggggtttgcagggtcccttccacggcctggagtttttccttttcccacgcctgaggaaggcctcgggcgcgcggaacagacgggcaggcggggggcgcacaagcccagggcacgatggcagcagcgctggatccggctgggcgctgctcggccccgtatccgtccgagaggaccgccgctgccaggcctagaggagacatgaagagaccgggcgcagcgcgacccgggaagctccgccgaggtaggagaggcgcccggccagcggagggagttggtctcccaactctccggaaggaggaggagccggcgctggagccgccttagccgcggctccgcgggctggggggagggagaggggttgagtcaagatggcggccaaggtggcgaagcagcagccgcggcggcggcggcggctggagtgagcgtccgactcgccgcgccgaacgaggtcccggtgtagggccgcgcgccgtggccgcgtcccactcctcaggccggggcgcacgtcggctcccacgcttagccagctcccggtgagtaggccctggcgcctgcaaccccggcctccgggctcctgctagtccgggggcttccgagggctcccggggcagcagccgc

SEQ ID NO: 365 - DNA, 1400 bp, Homo sapiens
ctgttttgaattttacataatggaaatatgtagcagtgtaccattttgtgatttggtccctgccaatatagtctgcaattgactaccataattgtgtgagctgtattaaataattttcactggtcttttgtacccgattaaacacgaagatgggccaggcgtggcagctcacacctgtaatcccagatcctcccgaggtgggaggatcacttgggtccagtagttcgagaccagcttgagtaacatagggagaccctgtctctacaaaaacaaaccaaaccatgaatatatcaaagttggtttttacatttgactgtatggacatctgctttttctccccaatttttagtgagtcatactgctgctaaaaacattggtgttgctatgagcattattttgtctacttgtgcataggtgcaactgtttctccagggtaatatattctcaagagaggatgtgtatatctttaagtgtactgcataatgccaaattactttgcaaagtgattgtacaaaattatactttaaaaattttcattttcattttattttatttataaatagagtcagagactccctatgttacccaggctggtctggaactccaggactcaagcgatcctcctgccttggcctcccaaagtgctgagattacaggcctgagccaccgcgcctggtccaaaattacatgtttatcagcagtgattaatatacaagcacatcaacagacacacgcatagcacacacatgagcatgcacacgtgtgcgcactccctacacatctacgcatgcacacacccataccatcacacaccacacacgcgcacacagatgcacatacatgcactcactgcacacaccgttgtacacgatgcacactacaagccacatacacgcactacgcacacacgcacacgcacaacaccagaccggcacacagacccataaacgtccatcacgcactccacgcacgtccgcatgcacgctacccgtcccggaagcgtggtctccgccgcctgcctctgacgaagcttgtcccggccgcgccaccgtcggacgcccggggtcggaggtcacggcggcgttggaggtggcgtggttttttttttttttttcacccggaaaccgcggttgccggagcccgaactgaggcggcggcgggagcccggttggcgtctggtcttcgcgtcggccccgcggagccagacgctgcccccggcgcggggagaagatggtgcctagcggcctcgggcccgccacgcgccgccacgagtgagcccagcgcgaccgcgggcgtccgccgagcagctggcccggctgggcccggggcgcgcagctgcccgccggggcggggtgagccggggctggagggcgggctggggtcgggcccagtcggggctg

SEQ ID NO: 366 - DNA, 1400 bp, Homo sapiens
atacaaagagtgacaaggtctgagtgttctcctgtgaataataattatctcgttgtgatgggcttagccttcccttctatcagaaggatgtttctggctgcaagtaattaaaggccagactcaaagtggcttccgcaatgaaggaaatttattagctcacaaagctaaaaagtgcaagaggcagtcaggtttcaggtataatcagatcagggctccagcttgacttctattttgagtctctcaactctgctcctgtctgtgtctgcttcatttatatcctggcttttttcacagtaaataacagctgaggtaacttgacatacaacgatttccagaggaagagagaacatctgtcctgacaactgtttggcaagagcaagaaaatttcccagaaatcctccccaaattattcttgtatccctctggcgagtattgggtcatttgcccatcctcaaactattcatggtggccaaggtgataagattaagctaaccaaggctcactgtttattagctcatacatacctcaaggctaaaagttgtggagtagggaacactattaccatgaaggaggggtacaaagttggacagagacacctatgttagaacttatgcaatcaggaagaaccttcattaattttgataatcctctcagttgctatttcacgtacagaaacaaatacttttagggttgcccttcccttttcttcacaaggatgattttttttttttgagatggagttttgttcttgctgtgcaggctggagtgcaatggtgcaatcttggttcatcacaacctctgcctcctgggttcaagcgattctcctgcctcaacctcccgagtagctgggattacaggtgtgcaccatcatgcccaactaactttttatttttagtagagatggggtttcaccatgttggtcaggctggtctcgaactcctgacctcaagtgatccacttgcctcagcctcccaaagtgctgggatgacaggtgtgagccaccacgcctggccaaaggtgaaattttaatagtaaaaggagaagataagcagcactggtaacaccagcatccccactttcttgtctttatcagcttgggctgtcattacaaaacaccatagactagttggcttaagcaacatgaatttattttcttccagttctggaggctgggaagttctagatcaaggtgcaggctgtttccacaggaggcctacgtgctgccactgtgctgctgccatgtctctagtgatccctgaaaagttccagcgtattttgagagtattcaaaaccaacattgatgagtggtgtaaaataacctttgccatcactgccattaagggtgtgggtcaaagatatgctcatgtggtgttgaggaaagcagacatcgacctcaccag

SEQ ID NO: 367 - DNA, 1300 bp, Homo sapiens
gcctggcaacagagggagactctatctcaaaaaaaaaaaaaaacacaaaaaacaaaacaccacttatatttattatgcgttgataaaaacattaaatacattaaaaatttggtaacatgtatgtaaagtataaaaaaaaaagtgaacttcctaaacccaccactcagctccagtagtaaatcgttatacagtgagaagggattgaaggggaacagaagttccccaagaccagttgggaggctattcatagtcttgggcagagagattacagggtcttgggtagggtggtagagttacaacgaaagagaatgttggcctcaagtgatatttaggtggaaaactggacttggattgtcactagctagtgtgactgagataagtctcaagccttccctgcctcagtttcttcatctgtaaaatgggctagaaataactactgttattttgtatacccagcacttagcacatgggttggcacaaagatggcacacacaaacatcatagtcactattgtgattaatagggaagctcatacacgccggcagaatgaatattctgtcaaacttggggttgaaattcgccatcttctggggcaggaaagtgatggacgactgtgcctttgcaagaatcgacgcccacactgcccaggaagtgccctcgcgggccggggtcccagcccggaccagccccgccccgccccgccccgccctcatccctgggagctccgccccgaggccgcgcgcgccgccgcgcgcgccccgacgcgcccagctgctgacgtgcggggcggaacgcgccgggcgggctccaccgcgccgtgtgcttccgcaggttgcgggggtcgctggggccttgtggcggggcagctccgcggggcttcgcccgctctctcacctcgccgtgctctctcgcggcggccggcggggcccgcgctgcagccggagacccggagaaagggtgagtgttggcgggcgcaggaagggaccggccgggagcgcgccccgctctccggggcattgtttgggcgggggcggcgcgggcacgtgcgcgcccctcccccatcggcaggcagcgcggcagcgggacccggtgaggccccggggccgaggggagggcagggaggatcccaggtgcgggccggggagccgcagaagcgggagcctggaattggaacgtgagttgggggcttcctcttcagcggggcgctgcgctgaggggatacgggaccccgagccacagcggccggagcttttaggatgttaagctcttggccttggaggcaagatttggccccagcacc

SEQ ID NO: 368 - DNA, 1300 bp, Homo sapiens
ttctccctgtaaaaatacttcactgaagaaagacaatgtgttttattgatgactacatctgttatgctatcgtgtacttttaaaacacctctgtcagtctttttctccaatttggtttagtaaggagacttgtgcacatagtctttccccttcctgttctcacactttatttacctatattatggatcttggcactttatatctgtcatagatggtctaattgttgcctagttcaattactactaaacactttcaaacctcttctagttctcaaaatagtggtgggagcattgcagggtgccagatgaaaatctgttgagtttgctctacagcacaccttttgcaaagtatcacttgtggtgtacggggaagcagctgtaatgctgattccgccggcatttctcactcaatctactccatgctaaacaggccggttaggaattaagtcatactctgggtagtacaagtggaaagtgtgaacagagaaaccactttatgcgaggacagtggaaaatgagatcctcctttcctctccctactcctgctcctatcgagaagcacttaagagcgcagacgcccaggacccagccgcgctcgggcgtcccgactcggaggctggcggcgggcaggcacgctctcccgcgctgagagcccttctgcggagatgaactctcgagtgtcgccgccgcgcgcgggcccgatcgataccggcgggcggacgtgctcccgccgccgacagcagccacagggcggtgcagtcagctgtccggccgctcggtcgcacttctcatcagctcaatacccgcagaggacgtgcaccggttccctcccggacacccaccccgtggtctccgccgcaccttctgcccaccgccccttccgctcggccgtccggcgcagagcgggagcttttcagccagacgccctcgcgttgggggcagccgggtcccggcccgagcggagggcgtcgtgaggtggccttttcgcccggctccccagtgggacgctccgcggaggcagccaaggcggggagtgtcgagctccctcacactctggaccttaccttctggcgtcttcgcccgggaggctgcagggggaggcggacccagccggccacaggggcaggttcgcggcgctgtgaggcggggctgggcgtgcgccgccgccgccgccagattcgtctactccagtgaatcggcacgggagaaagccccgcccccggcgcccgctcccactcctgattggccgggccagcccggggaggcccggcgggaccccggcccgcgtctcagctataaag

SEQ ID NO: 369 - DNA, 1400 bp, Homo sapiens
ctctgccccttgcactgagcgccaacccgcatcacagctcagcaaaggcgcgcgcagtgaacagacggaggaggggtggctcctcgctgagctgaaggctgcggcgacgaaaataaacagcatggttcctgctctccacgaacctggcgctgcagacgtgggcaaaccacaccaagagacgcgagcaaccgaaatatagggagaaaaaaaaaggtgccctggacagcgggctagatgtctcctgcaggctcgaggacttcccggagggggcggcgttttctcggggcctgggaagaatgggcgggtttcagcgggcgccttctgggtgactgcccgtttcggcttcccctgaccccgtaacagagcggaagaggcccagagacgccagaggaggggcgtcagcgggacactcaggccaataagctctgactcccgctgtctgcaaaaatgaccggatgcaggaatgtcacctagaaccggccagctttccgacctctccggtcaaggacgcattcctaagagacgaagggagaatgacagaagttaaaaacaaccaaacaaaagccaggttgaggcctctaggtgggtctccgctaccgatggattcagccggtggggctgcaggaggttcctataagcgtggtcccctctccccgcaccgagtccggccccggccctgggatttccccagccgccgccccgccccctccgccccgccgcccccgccgccccgccgccccctccgcccccgccgccccctccgcccccgccgccccctccgccccgcttgcccctggcgccgctgcgacctttcccttactttccagggcctcaggccccgcccctcgctccgaccaaaacacgtgccgcgtcccgccctgcccgatcacgccgcggccaggctccgatcacgcggccccccgcggcgctcattggccggccgggcacgaattggctggtggtggccggccccgccccggcaggggcgcggtgtattttggttcgcctccgcgccccgccccgccagccgctccctccgcggccgccccgcccctcccgcgccgcgagggccgcgccggggcagagccgcgcgggcgggcgaggcgcgtgccggccgcaggagctccgggttgccgccgccgccgccgcccgcagcccacgtgcggccgctgctgcgcccgagctcacgccccgcggccgctttgttgctcccggccggcctgcacgatgcacacgccggacttcgcaggcccagacgacgcgcgcgcagtgagtggtggggctgccgcggcgggactactcgtctgagcgaggggcgaggcgggggaagtggtgcggcactcgcgcgcctgtaaatgcgggaggtggggcgtgcagggcttcgctgcggccgcgccggt

SEQ ID NO: 370 - DNA, 1300 bp, Homo sapiens
gggccggctgcgaccctgggccggagagcaccttcctgccctcactcatgtcacgcattccgccctggacgccaggaactgcccgctgggcagctgcgagtggccaggactttggccaaaagctggggaatcctggcctttatgcagggtcgggggtcttcctatgggcccccggccagggcggaggacaggaagagggctctgggagtcctgggcccgtgtgccttcagcctcagcctcgggtatcccgccggggcggcttgatgggccaagggggctcagtaagcttcggcccagcccggtgccctctcccgagtctgtcgttaccgaacggccatgcgagggcgcccagcgcgacagggaccacctcctgacctccacggaggaccaaaggcacccggggggacgcccggccatcactccacgggcgaggtcgctcccccagggagaagggctccccaaagtccgagcgcccttggagaaagtcggccggacctgggcctgcgccgcaacccccgcccaccgcaactttcgcgggcggtagcggggcaggaagtgggggggcgggggcggcgcttgggacacggggaggtgccaggcgagtgctccggccccgcccctgccccgcccggccgtggccgcgccccctgcgcccccagcgccccggagccgtggagccgccgagccgccgagtcgtcgagtcgcagcgccgggcgtggggactgcgggtggggcgaacaaagcggcggcgacgcgggcggcccaggcccgggacgcgcggagcgagcgaccccgccgggcctttgtctcgggcggggcaggagccgcggcggccgcggggcgccccgagcgcagaatgcggcgcccggcggcgcggattggggagcgctgcggcgactggctgcgtggagcccggcccggggcccgcaggcacttgcgtgtgtgaagcggggagatccggcgcgctgcccgttgcccgccccgcggccgcacgtgggcgggagcggcggcccgagaggagcccgaggagtaggaggaggaagaggaggggacgcacggcggcgcagcgggggacctggggcagcccgcgcgaagccccgccccggccctgagccccgcgcgcgcgcgggcgggatgccccgcggccgctgcactttggctcgagcactgccctgagccggtcgggcccgcgggcgccatggagcagtggcggcagtgcggccgctggctcatcgattgcaaggtcctgccgcccaaccaccgggtggtgtggccctcggccgtggtcttcgacctggcg

SEQ ID NO: 371 - DNA, 1300 bp, Homo sapiens
tcttcaaaaatgtgacatgatttgaggtcaaacattaatatcaagtaaactcaaaagattgagaagctagcattagttctgggaaaaccagaagtgtgcctttttttggaaataatcattggtagcacaaacttaagaatctccaaaggaaataaaaatgagttattaacttacagttttcaccaattaagatataaatgaagctaatgaaatccggaaatacaatttcactgtttttaatgttcatttaaaaaaaaaaatccttatcaaatagccccagtaagtcaccaattaagtctttactacttaaaagcaaaatccacctatgtcctgaacactatccactttacaagcctcattatatgtactggagacaaaattcagaaataaataaatatatatgtacatatatacaaatatatttcaaattaaaaaatacttttagagagtggtatgtattacatttagaaattaataacgaagtaaattatgggatgtcatccacgcctgtcccaaaggtaccgaatttataaatcatctcaggtgcggagcaggacaggttgaaaataggaatgacatgaacccgcgcggaacagctgccggcgcggtgtccagggcggcaccccgcccggtcccggcccctccagccctgggcccgacccctactacgcctctgcctcgacgcgaacgcggagcccgagcgcgcgtcacgccgtgtggggccgaagaggctgctacccagaggcggagtgcgggctcgcgagggtccccacccgactctcgctcccgccagcacctacggactcgcgtccccgccgcgcgccgactcgggagcagcaccgcccccggcacaggagcctcacgcgcctcttacctaacaggaagttgggtggaagcagcgcggacccacggcgcaccgaacgcactccaacagaacccgacgcagacacgcgctttcaaccggcggagacactggcagggccagaaacgcgcgcagcgggggcgggaggtcggtaagctccccgcccctgcccgagaccccgccccggcccggcccggccccgcctttttctctgcctcccctccctgcacgtacgcgccccgcccctcgcgcgacgttttttgttgacccggaaacggattatccggagccaaggtccgctcgggtgagtgccctccgctttttgtggccaaacccagccacgcagtcccctccctgcggcgtcctccacacccggggtctgctggtctccgcggatgtcacaggctcggcaaccgccctcctgtcggcggggagtcc

SEQ ID NO: 372 - DNA, 1300 bp, Homo sapiens
ctgggctggggaagacaggtcgggagaagccgcgtgagcatgtgggagggagaaagaagctccgagacgtggcaaggggtcttctgcagggcaggagagtgggacgcccccgaagtgaaatatttcgagagacttctccttccacaccccaggaatatattttcttatactgccagtggggatcttcagctcagagcttcagggaacaacccctgcttccaagtgagtaattcttctgggagttgtattttttccatctcttgtaaacgtcttaccccacttccacttcccttcgggaacgccacacagcgcctgcgcagcaataccactaaacgactacgtgcggtcggtttgccggcagagggggtatagctcagtggtagagcatttgactgcagatcaagaggtccccggttcaaatccgggtgccccctctttggccttttcgagatactgtttttgtcctgggtgtcgatttttcctaagctgtttgcttttactcctactggcagacgaggagcagtgagggactgaaaggaactggggattcaacagcagtggctctcaaaatgtggtcctgggaccagcagcattacctgggtacgctcgggcctcatcccagacctaatgaattagaaacttgagggtggagtccagaaatctgtgttttcatatacgctccccatcgcttgagtccaggagttggaagctgcagtgagctatgatcgcagcactgcactccagcctaggcaacgtgcgagaacctgtctcaaaaaacaaacaaaatacacacacacacacacacacacacacacacacacacacacacacaccctgcaggtgattacgatctcaagttctagaggcttacgttaaaatttacacatttgcttctactatttacaagtttatgtttcagcctgagctcttcttgtaagacagaccacgaggtaccccagatggaggaatgtgcaaagacgccggggctggagctggaatccgtcccgagacttctcaccttgacctcgaggaaggcaggaggtcggagacagggggtgggcaggctggggaaagaggaaacccgcaggacaagagggttgtggctcgtcacgtggccacttgagggcagcaagtagctgcagctggaggtagctgcctatctgattctgtttgagagtccgccaagttgggatttaaattagacatcaagaagaatttacagaccggccttgccttgttccacggtaaggggacattgggtttagggctggaggaggtagtctctgggactctgggcccg

SEQ ID NO: 373 - DNA, 1400 bp, Homo sapiens
gaggcggattccctggctgtggaggtactgtctatacggggtgcaggagacatctccatacaagggggccctcacctggggaggtggtgaccgcaagcctgacagccccaaagccttcagagatgccgcctggggacactttgggaaagtccaggcggaggacacctgggaatgtgatagtgacacaaatgaccggagagacttgctctcagtcactgagtctggctgactcactgaagattagggcctgaacttccccctctgtaaatggggtgcaggccctggccctgccttcacagtgcccctcggtcccctacaagccttctccgcagggtgggatcgggtctgcctggagcatccccacagcctatgggtcagcagagaagcaggcgcagagctggggtgagacggtcagggccggtcctgccagacacctcagatcactcctcttcacaaataatcccattttacagcccaggaagagagaggccggaccactgcccaaaagcctgtggcctacagcctgccaggtgcgtctgctcgcagagcaggtctgcgcagcaccgagcggtcagcaggggcaatgctgggcactggccagccgcgccaggaccatccctgctgacctcggcggggtggggcggagcgtgcagggtctggcccggaaagccagggcaggctttagagaagggccaccggacggatggtccgaggaccggcatggacccgggtcccagcgagggcggggggagcgtaaggctgggcctgggctgcggcaccggggaggtggcggggaggaggccggcaggaacagccgtgcagggcgggggcggcgcgggtctggtcgggtgaccccgggcgcggccagggctgtaggaggcgagggcgtcgccccgaggccgtggtctcgggtccatggtgggggacctgggtccccgcccccccgggccgccctgggtcgcgcgtgggcgcggcgggcgccgattggctgccgggcgcgcgggcggagcgggcggcggcggcggcggcgcggaggggccgctcaccccgcagcccggcctcggcctccgccgcttgtcgtcgcgccccgcccgcgagcccgccccgcacgtcccccgccggcggccaccatgagcacaggcctgcggtacaagagcaagctggcgaccccaggtgagcccagcgcctgcccgcgtgcccgcgcgcgcctttgtccccgccgcccgcgcgcctctcaccgtgtctctccgtctctcccccgcccgccggcccggacccgctcggaaccggacccggactcgaccccgaccccgaccccgcagaggacaagcaggtacgtgcgcagcgccgctcccccgccgggagacccggccggctgtcacccattgtgacactagcgc

SEQ ID NO: 374 - DNA, 1400 bp, Homo sapiens
aagaagcaaccaaacagaaaaaggaaatattgacaaggatgtggagaaattggaactcttgtgcactgtgggaatgtaaaatggtgcagccactatgaaaaactatacggaggcttcacaaaaacctaaaaagtagaattaccctattatccagtaatcccatgtctgggtatgtatcccaaagcattgaaaagcagggtctctaagagatatttgtaccaccatgttcattgcagcagcgttcacaatgaccacgaggtggaagcaaccagcacgcctgttgagagatcaatggtaagaaaatgtggtatatacatacaatggcatattattcaggcttaaaaaagaagagaatcctgttatgtgctacaacatgtctaaaccttgagggtattattttaagtgaaattagtaacaaaaaggcaagtactgtatgattccacctacataatgtatctgaagtagtcaagctcatagtaacagaaagtagaacgatggtagctgggcatgatggctcacgcctgtaatcccagcactttgggaggccaaggtgggtggatctcccgaggtcaggaaatcaagatcagcccggccaacatggtgaaaacccgtctctatacaaaaatacaaaaattagccgggcgtggtagtgtgcacctgtaatcttagctacttgggaggctgaggcaccagcctgggcgacagagcaaggctgtttcaaaaagaaagaaacaaagaagaaagtagaatggtggttaccaagggactggagtaggggtaaatgggtataaggtttcagttttgcaagatgaaaatgatctagaggtctgccaccactgaattgtacaactaaaaatggttaagatggtagattttgttacgtgttttttcaccaattaaaaaaaaatttaataaaaaaggataaagaggagggaagcctaatgttatgctctttatgcccgaatttggcgaaatcgagccttgcccgctgttttttcctatgacagtgtctgaacctttctttttcccaggagtaggaatggcccctgctcccgcgcagcctccaggctgcaccacgctcgccccgcctctctctccgctccttactccgcccaccgcagtttcctccaatcgcggccctctccccgcccccttacccgagcctttttcctgcatccgggcctgagagtgcaggcttgagggaagcatggaggtccatggcaagcccaaggctagcccgagttgttcgtcgcccacccgggattcctcaggagtcccagtgtccaaggagctgctgacggcgggaagcgacggccgcggaggtgacggacgggtgacggcggcatgggccgcacacgtgcggcagaggaggcgcggccggtgcagtttgggagccggcc

SEQ ID NO: 375 - DNA, 1300 bp, Homo sapiens
tgcagggatctcttttctccaaaaagagatctgcacagggagtggctctctgaagccagttgagaacctgccctgctggatttacacaaactgaaatctcaaatgcccacagggtcagagaggtaaagtaaatgaattaagaaggggggcgtaattcagtggagaatggcagggactgtagtgaacaggagagcacacttcttatacaaatggcaagggcaactcacctctgccactgtgggcatcccagctcttcccattttcagaagaagccagaaatccaatttctttacaggtgaaatctcctggtttaaaaatgctcctttcgaaatattttaaaatataatgctctaaacacaaaagtctgcagccccctttccagcagcttgtggtcctggcctgtgccatgctttagtgccctaacgatgagccccagcaattcccagcgcctcctgcttctccaagtctggcctcttttcccctctgtaccgccgcttctccccactctccgcagctcggggtcactttctttactgatctcccctctcttctgggagaggcacttgctgaacatctttccgcccggagcctccccaggagctgcagaggggcagctggagagatgctttctgacgtagcatctcccacctttctccttggggaccctgaggaaggggacaagggctcgctctgcaggtcctcactgtaactggaaaaacacgacctcgccctcgggaaggctttctgtgcgcctcacctcaggatgagggtgggtgtaggggacacctcccagaaacccctaacctcccagtcggttaaagaagaggggatagggtcaagggatgcgacagagctgtgtggtttccggatgggaaacctcagtcgtttaggcacccctccgctcgagtcacttccgaagcagtcgattcttggggagaagcgctgcggaaaggggcgactccgatgcagatggccctgtcccggcgccccaggtcgtcgcgcgcgcagctgcggtagtcactgcgcctccccgcccccactcctggatgccccccttccctctcccggccagactctgagcaggagctccgcccccagcgcgccgccccagccccggcgccttaaaagccgggcgcaccgccccgccgcgccctgcctgccgcacctctcctttcttctgtagctcgcgttgaagccgcacgtccggccccgatcccggcaccatgagcttcggctcggagcactacctgtgctcctcctcctcctaccgcaaggtgttcggggatggctctcgcctgtc

SEQ ID NO: 376 - DNA, 1300 bp, Homo sapiens
tgtttcgtggcgctacctagggatttaaattcaaaccgtatcacaaaatacaataaaggtttatttacagcacattggtttcatttgacgttcctgtaccggactaccctggcaatcggctaaagttttgtcagcaagtttgctgctgggatttttcttatttggttcagtttactacagcctatcgtaagtgatgcagatggagttagtttctaacatgtgaacgtgagaactgttttggtttgggtccatcattaaaactgaagaagattatttgggttcgatggtgtagatttttgacttttatttctagtttctgtgtgctttgtcatatttccccttgcttcctagacgaggtgtgtttccttatctgattttgcatcactggagagaactcaggaagcaggagaggctgaattggataccacggggaatgcagccctgccaacagaggactggatagaattagagcaaacggacacatccccccacgcctgttctccacagggcagattttattaatatatttctaacattggggcctcgtttcagtcttcaagttttttcttttttagcgcaaactagacgcgctctgagagccaaaattagcgtccgcgaaccccaccccattgcctccaacagacctagctctcctttccaccctcaaacagccgttactacagttcccagcaagcaccgcgcagggccgcaaagggccaggccctcggcgaaggccccgccccgcagggggcatgccgggagttgtagtgagtgggcgcttccctactactacttgtcccttccactgggcattcccacttggaagagtgtgatgcgctgccagagcagtttctctagttccgtactcggagctcaaggtgacagaggactgcgcttccagccctgcgctgcgcatcgcgtcggtcccgcggacctttgccccgcctccttccacacccgttcccttgacagctgggctgcgctccgggccgcggcaagccgcgagcgcgcaggcgcagcagccccgcgccgcgctaggccggcctggagggcgggacaagcgctagaagctcccggccgggggcgcgcacgtaggcacgcagaggccgtcacgtgggtcgccgaggctcgcaagtgcgcgtggccgtggcggctggtgtggggttgagtcagttgtgggacccggagctgctgacccagcgggtggcccaccgaaccggtgacacagcggcaggcgttagggctcgggagccgcgagcctggcctcgtcctagagctcggccgagccgtcgccgccgtc

SEQ ID NO: 377 - DNA, 1400 bp, Homo sapiens
gatctcctgacctcgtgatctgccgcctcagcctcccagagcgctgggattacaggcgtgagccaccaggcccggctttttttttttttttttgagacggagtctcgctctgttgtccaggctggagtgcagctgcgccatctcaactcactgcaacgtccacctcccgggttcgagcgattctgtctcagcctccggagtagctgggactacaggcatgtgccaccatgcccggctaatttttgtatttttagcagagacggggggtttcaccatattggctattggctctgctggtctcgaactcctgacctcaggtgatccgcccacctaggcctcccaaagtactgggattacaggcgtgagccactgtgcccgaccttctctatattatttttatttatttttaattaacaaagcatagaaacagattcaggacattcctccgaagacgttccagactcgagtcctaggacatggttggggcgggggtcatttgatcgagtggcctgtgtccttatctggaatacgggacgacgctgtaactctaactcaccctgcgaactcacagcttttgaggtaaacaagtgagaaagaagagacaataaagtgatctttctttaccatctaccaaggaccaggtggtttacacgtcagttcattttcaggaacacagcagcgctctgaaaactacagagcttcctgggcgtagggggctgtggtcgcttgaaaagaaccagcctgggggtccgagttccaccggaattgggttcgagcgcgggtgaaaagagggacccgacagcacccaccctccaagtagaggcaaaagttgaaagtggcgggctggctgcgcttccgaagaaacacgactggcgaaggctcaccttagtctctacggtgggtccctccctgtagccgacccgttccttgaagcgggccagaaacgccggctcggctggccgcacgtacgatacctggttccgcttgctcatggtagctctgggtaaagacagaagacaggttccgcgacggattcgcgacgatacagaggcgcttagctgtgacgtcactgggccacgcccccgatgcgtaggccgggcaacatggcggcctccatgcgggcgtcaacgtccgatccaagcgccaaattcaaatttgcggccatcttgagcgggcggaattcagtcgcgcgcggtgcagtcgggaggtggaggcaccggctgcattgttttcgggatcgaggggtgagggcgctatggcacccggctgcaaaagtaagtctgggcccccggcttcgttaccctatttttgcccccaaatacagctgtgaaaggatggcagcctcggaccgcccgcaaggttcttgctaggcatgaactgcaggagctgagtgaccggcg

SEQ ID NO: 378 - DNA, 1400 bp, Homo sapiens
caatacactgggtcaaaaaagacctcttcagcaagattgatggtctgcaagcttgacttaacccttgccttgcacggccttaggtcttgtttataatttggtatcttactaccacaaagtctgttagtcttatgatctctactttaacaaggggtgttcaacctccctttccagaatggctgggaactcagtttttaaggtttctctggggtctccttggctaagaggaggtccgttcagtgcttggggggcttacaattttatttttagtttacaaacacaaacaaacgtaattatttatttttatgttttttgttttgttttttgcgacagagtcttgctctgtcaaccaggctgagtgcagtggcaagatcgctgctcactgcaacctccacctcccggattcaagcgattctcatgcctcagcctccctagtagctgggactacaggtgcgccctaccacgcccggctaatttttttgtatttttagtagagacggggtttcgccatgttggccaagctggtctcgaactcctgaactcaagtgatccgcccaccgaggcctgggattacaggcgtgagccaccgtgcgtagccaagtaattattaactccacagaaaataaaaggctgtgcaggaagtaaaaattaatcaagtccatatatagacctcagatacatttcgtttgggctatcctgcactttactttgtaattaaacaccactatttaaaaatcaggaaaattgcacataaaaatccagctgcaagtgggcgctctggagttccccagtctccactcactcgtcctcccagcccccacaggcctcaacgtcgcctatcccactccaccagcccagtcttccaccgccctaggaactctcctacgcctacgcaagcagggagggatagggtgacagcaccgacaacaaagggtcgtctcccgcactccgtatgaggatggcgtactggtcggggggcaaccgaagcctttcttcctaggttctttatcttttctaagtttcccatgacctatcgctccgcttgagccctcagcaaagatgtcacccgccgaaaggtgtggccggaagctggaggcgtggcttccggacgtgcggggcgaggctcgtctcgtttccgccggcgctccgagtgacgtagggaagcgcgccgcgcacctcatggttccggggacagttagggcggcggatggaggtcagcggtggtgctcgctgcgtaggtcttgtggcacggggagaaggggcggctgatcgtgggtttcgagtgcacaacacaggcgtggctgggaaggtcctgggatgcggtggaactggggagcaggctgggacgcggtgggatgccgtgggcctggccgtctgctcgttccgtgctggcttgccag

SEQ ID NO: 379 - DNA, 1400 bp, Homo sapiens
acagttctttctcacggtcactcaggttgtaagtgttggagcgggttcaagccaagtcctctggcaccagcgtccctaagcccacccagagtcataccattctgccattttgtttctggcttttcttcatagttcaaagtcagccaactacctgcccttagcaagcgtggagagaaccccccgcaccacctcagcaaagggcttgtgtgtggaggagctgccacccacgctccatttcaccaaagtgacaactaatgctagggagggcgaacctctcatcggcgaggtcgccactgtcaccagcgcccactgctgggtccaaggctggcgacgcctcaccgcatctgggcttgacttcctgcgtcactggggcgacccctggtcctgacttccactccacgccttcgtggatcaggacgactgggaccactcaaaagcgtatccaagtcctgaggtctccaaagcggtggagagacccgcccagcccctcactccccggctgggaactgagattgtggagggtgggcgccctgccgcggcccagtggggctgggggcttccagagtcggggtccagggctcggtgtccgagactccaccgccagccgcgccgacctgacccacggccgggtacaacagagaaggcggcgcttcccaaaggcaccgatggagtgcagggtagccgccgccctcaggatttatcaaccgcgaggcgctgtcagcaactcgtgcccggaagccaccccgccccggcacacacatactccagcgccccctccaggcgcactccgcaaacacgcgagcgcggcgaccgccccagccctttgtgactggatgagtggggccgagcagcacgcactgtcttcgacctccaatcaggactcggggtctcggagctgtaccaatcggagatgaccgtggcctcaacagggccaatcgggggactcgagcccgacaacagggcaagccgccaacagcgatcaatcagaggggaggagcggctcccagatacccaatcagcggccttcaggcgcagatcgtgggcggagcggtagccaggccgcgggccggccaatcagcgggcgagcggctgcctcagcgcgcgcggcgggcggggcggggcctgtccgcgcctaggagcagtgggcgctgagagcagcaaggccaggtgaggagtagggacgaccccgagcctggagagggggcaggagtgggggcgcgcgagggtcggggcggggtctcaggatgcagccgggcggcctctcagggctgcggacgcggcggggagaggtgaggggccgggttcagagttcggggagggcgtccttcccggcgccgcggctgcgggcggaggggacactgttgccatggcagcgcacgtgcgctcgctggcgcggcccg

SEQ ID NO: 380 - DNA, 1400 bp, Homo sapiens
gttgcaggtggaagtgctgcaccgcctttgggggctgaacaaaaggaacaggggaagcaccaagggcagtgccatccacaggcagggggttcccagggagctccttcccttgtctccaaaacctcttttcagtctagccacgcaccttcagtttggccactctttcaccctttcttgtcctttctctcccctgccatgccactttcaattttctggtccataactctgaatgaagaagccaactgaaggaacttttaggcccccggattccaaataataaccggggcgcgtccattctagacccaaatgtgcaagggatggagaggcgaggatcttcctgacttgaggcaaagccccctctcctccgcggcgcggtgacagtgttctgggggtcagctgggagtagagaggagccactgccgtagtctcggaggatgcctcttcccggtgctactgctgctgctgcggcggcggccggttttttatttttgcaccgcagcacaatgccggggccgaggcaacagcctacgtcgggacctctcaggcagcgtctctacccacttcgcgttccctgtcccccagtcccctaggggcacccgccgaacgcccctcggcgccccaccgcagcgcacgtgcgctcccgggacaacagcaggcgaggcttcggcgcgcccccgccccctcggccgcgcgcgcgctccgcccgccgcccgccctcctcgcgcgtgctcgtgcccgcggccgcggcggcgcgcctcttctccccgctgcgggcgtcgcgggtgcaggaggaggcggagcggaggaggcggaggctgggcgggcggcgggctccggcgggggcacgcgccggccagctgggcgggggcgctgcgggggcggcccgaaggcgtcagggtgagaggctctggagcccgaggacccgcgtccccgggggccgactccgccgcgggagggcgagcgcggtgcgtgccggaggtggggacttggaggccgcggcccggcgcccccgcccccgagcctgacggggcgcgaggcgggatgaggcgctggcgcgggggacgcccggccgagcccccgcggctgccctcggcggccaggcgctaggctcggcggcgcgggcggcgctcggcggcggcggcggcgggcggagggcgtcgggcccggcccgcggagggcagacacggagcggccagcggggcgcagggacgccgcggcggcgcggcggggccgcggggctcggtaaggcgggcgcgcgggagggccgggggcgccggtgacgtgggcaggccccgcggggaaggctgcggggggcctctctttccttcttaaaatattctttttagagtgagggttccggatcgcatgctcccggaggagcctctcggttgtccccccgc

SEQ ID NO: 381 - DNA, 1300 bp, Homo sapiens
atccgggaggcggaggtttaagtgagccgagatcgcgctacggcactccagcctgggctacaaagcgagactctgtttcaaaaaaaaaaaaaaaaaaaaaaaagagaattcactaccagtacttgttcttatttgtcctagacttgccactgtttcagactcaaagggtgcactttccctctttcattgtaggatttagtgcatgaatctgctcaccccaaacatcctcttcataacttggggttttcgatcctttccaggcagatattgtttataatccctcacctggagggttcctccacgtccccaatttatacattcatttgttcacctgtacaatttttttttttttgagacggactctcgctgtcgcccaggctggagtgcagtggtgcgatctcggctcactgctggctccgctcccccgggttcacgccattctccggcctcagcctccagagtagctgggactacaggcgcccaccacctcgcccggctaatttttcgtatttttagtagagacggggtttcaccatgttaaccaggatggtctcgatctcctgaccttgtgatccgcccaccttggcctcccaaaatgctgggattacaggcgtgagccaccgcgcccggcctgtacaacaattattaagactggcttgtgccaggctctgctgagaatcccaggacacggtggggacacggtggacgcaggctgtccgtcaagggggctagtaagccactaaacaaagggtagccttcagccctgcggcgcgggccagcgagcattcagaggcccaactcgctgtggttgctccccgggtctggtcccgcgcggacgtgggggcggccatcaggactgcccgggggttggcgccctgctgggttccaagccggtgggcgcggacagtgtggcgggaaggccgggcctggcgggtgggggcgcggcctggcggtgggggtggaccttcctggggtggagcccgcggctgtgggagcagggcccgccggggctcgggcagggcggtgggaaggcggggccttctgagtgggggcggggactgctggagttgcggggcctgcctggggtagggcggggcaggacagcttggagatagggcccggaattgcgggcgtcactctgctcctgcgacctagccaggcgtgagggagtgacagcagcgcattcgcgggacgagagcgatgagtgagaacgccgcaccaggtctgacggggaggccttgtgcgagcgtcccactgcccacccacctggttgggacagtagaagagggcgggatggagt

SEQ ID NO: 382 - DNA, 1300 bp, Homo sapiens
taggatgtgtttggttggccatagtatattgaacttatcttaaccgtctcaaaacgcatgtcaaggacaccactgagacttctgagtaccatttaaaaaattgggtagtctggaagtgttctaaattggaccgtttggggtttctgttagggcaactttcccatttacatcttggaacacagccttttgaatatagcccttcgggattggcggggagaagggaccgcgatggaaaaagtcatcatccaaagaatgaagagggaggatccaacatttaggatattttattgacttgctaggcgcgtttaccttatcttcgtattaaccccattttcttcattaaccaattgatgctgtgagaagctatgtaacttgacgagcagtgcccagaactgtttttttttttttctggactcggtcttttccactcaaaaccaacaaaaaaccaaaactcgttcttttccacatcaaaagcaaacaaaaaaccccaaccccaaccccaagagccccactctttcaaaagggcttctccggatcactaagtcctagaggtctttggctaggcctgggtccgatctaaataggaaggtaattctagtgttccgcaaatccttgccgaattccatcccggccaaagcagggacccgggggagcctctggtcgcacccgagacagttcgttaaatactcagtgcacgtgctggggatggaagtgctgacccactgctcaggtacgcgcgcacctgacgccgcttggtgcgcgccgcggggtactgggtacgtgctccgcgcgcgcgcgcccggcaaagttccccgtacgtgcgccgtacgtgggcgcggtgccccagcgctcagcgtttcagcgagtgagtgggctccgtgcccagctgaagtctgggaggggcacttttccaggcggtcgcggctccccctggcggcggatgtgcctcgctggaggggcgcagtcaggcgttctccgcgggcagccggcggcggggccttgccttacagcgcggggtcctcggcggcctgggtggctactgcccctgctgctgtcgtaggcgaggacggctgttagtgctgctgctgttggttcgtcgcggcggcgaaggaggaggaggaagagggcgaggcgacaagagaagaaggaggcaggcgcggcggcagcggcggcgccccgagccggcggaggcgaggggggggaagatggcggacgtgcttagcgtcctgcgacagtacaacatccagaagaaggagattgtggtgaagggagacgaagtgatcttcggggagttctcctg

SEQ ID NO: 383 - DNA, 1300 bp, Homo sapiens
gtagccaagggatcctgtgtgggggaaggcggaagcccaaggggactggcagacggggtggcagggccctcttccctccggaatctgacccaaaacacttcctctccaccctcaaagccaggctgggttagcactggcccgtgctgggtgctctgcccaagacctggctcttcacactgagcagaaataaccacatggctagcgagaaccggataaagaccaggacccaggatgccccaggccccacagacagccccacagtcactcccacagcagcctgggttcctcaatgggcctggccacgctgcccctgcccgaaatgccagcgaggcacagactgcccacagccgggagccccagccggtcctgacgccttgccgtggcaacacccctgccgtgcctatcccctgatgctcggcctggcctcccgagctccaccttgaggtaggcggcctccgtctccgcgatggtccggtcgaactcgttgcgagaggcaatcttgcgtgccaggttctcgttgacgcgggccagcttctctgtcagctgcctcacctcattctgcagccgctgcttctcgtcctcctcctcctggatctgccggcacagctcctcccgcttctggcacagctcctctatgcctgggggccgggaggggcggcgctgtgggcccagggcaggagcgcggcggcggagggcgggcctccttccacccgaggaagccagagtcaggcaccacccccgagcgcccggcgcggggcctgcgagccagcgagggctcgggccacggacacccggcctccggcacggagggctctgctcagccgcgcgatgcccgcagcgaggcgggtccaggggcaccccgctgcgagccgggaacccggccctgcggccctcccgacctccccgtcccggctgcgccgctcacacttgaccagctcgttgttgtagttctgcagcgccgcgccctgctgggtcatggtcaacgccgcccggggccccaccaccccaaccgccgcggaagcagcgctgtccgcgcctgcgcacgactcccccacggcgcgccgaactagcgcgtcatcgctgagcgccttgtgcgcgtcatggctgcgcgtgcagacgtgcgtcatcgccgcgcgccgcgccgagcgaatctcggagtcggtgggtgcagatggcggcggcagttgtggtggcggagggggacagcgactcccggcccggacaggagttgttagtggcctggaacaccgtgagcaccggcctggtgccgccggctgcgctggggctggtgaggcctggg

SEQ ID NO: 384 - DNA, 1300 bp, Homo sapiens
tatgatttgcagatgtttagtttatgtacaccagaaagaaatagttacgtatatttacagttcatggttctctgcagcagcgctgagtgtatgccagatatgctttccgttaactaattgtagggattttctgtgggttgagagtttttttgctgttgtgttggaattttactgacctatctttcctccctctccatgttcttcccagtagttcaaatagcattcatatgtaaaatgactggttaaaatatgggagatcatctctggctgttggagaagtcacccatttaggggatcaacctgtgactgaggaggcaggacactttctgtagtgggaggaacatgggccacatacaaacagatttagttcaaatgccagtgctacctctcccttgcattaagcaagttactgaaaccttcagaatctagttttcatctgtaatataggaataatgatgataatgcttatatcaccagggaatttgtctttctgaaagggctagcacacagtaggtattcaatgcaagttagcttttgcccttgccttcaaatccagggaacacatggcagcaacaagactgtagccctgggagttgctatgtctgcagcctctttaaggtgttaggcagacaggatgtaagcactagaaagattcagtatggtatcaccggctgtagtggttcagcccttggcctctgtagcccaagagccagtgttcgggtctactaactctgtgctcttgaaatgtctcctacttttaagtcagtttccttatctgtaaactgagactaatggcatttacctaattgggtcgttggagatcaagtaccttaattgatataaagtgcttagaacagtccctgggaggtggtattttgctccagtctgttatagggaggatcattttgttgttagagttcagtgaagaccgttttttaaaatcgtgtggaatgactataggcattataaagacaactgaagaagctcttgtttctgaacagtacttggccagtttctttaacaggagatggctttgcttttagaagcctgccccagagtcttccatctcttccactctccctgcacgtccgctctgtatggcttttgttattaatgtggagcagttgaagtcactgacttgggtgcaggccaggccagcattactgaggtcatatattactttcctagactctagtcatgaacaggatgttggaagtcagaggtacagagaagctgcctttttaggccgctcacatgaaaggtgtgtttgctttcctcaatcatttttatactaatagat

SEQ ID NO: 385 - DNA, 1300 bp, Homo sapiens
cagcaaccaccacagagtttataatctaatgaagttccaggataaacaaacatatacaagtcaaagatgaacagaaccacataaagcaaatacagaataaaactagcttcaagggtacagagacgttgacaaatgttattaggctaagggcttcttgaaggcaggaatcatgattcatcgattcctgtatttgcagtgcccaagcacagtgcttggcacatagtatatgctcaaggaatatatatgttacgttcgaggaatcaaatcgccttacctttaaatacaccttttatgagtggcgctactgctgtattgaagacttcttcctgttcagtagagggatcaaatacaaaatcgtaggtgaaggatttatctgtaccaaccaccacctagagaaggcacgggacaaggcgtaaggttaaaaatgaaaggcaagaccacacccctcgttaccatttggccccagctgttcagacacaggctctggactctgctacgcacctgaggctctccgggcacgaaggaaaggcacatctggcagccctcgctaatctctttggggaccagagggcgacaacgcagcgccactcttacgggaattcccttcacctcttccttcatgatcctatctcagcaccgtctctgcgagggggaaaaagaaggctcgctgatgaatgttagtaggtcagcaggggtgggagggcgtcctccccggttccgaccctcctcagcgggaacactgacttgggagattcacgctccatgacttggccagggctggaccgcccgtcagccctgcactctaaagagagtgcacgggcttctgaaaggcaaagaaaaaactccaacggggacggcgacaaagaaccaaagccctagggtactgggtaaaaacaggttctgagctaaggtgtgcccccgtaactcaccaaactaaatgtcccttccccgttctccctgggcctcccgccgccctgtcccagccggagctttaaccgccaagtttcaaatccgtcccggagacgccaaccaattgcagtgcggactgcccgagggcggagcgcgcacgtcggcgcgcgcaggccggcgcggtgggaaggggagggtcagctcgttgcaccctggcccggcctcttttcgaccctgcggagcatccgcttccggttcccagactgaattgtcagtgagcggagtctgaggtcgctgtggactgcccactggtgaggtggtgcggcgtttatgcggctgagagtgcgggtctcaggcagaatgtggggcggggacgtgggaggtggctggt

SEQ ID NO: 386 - DNA, 1400 bp, Homo sapiens
gcgggcccttagggacaggaaagcggttagggtattggggggaaagtccctcacagggtggctgtcgctagcggccgccagctctgcgtcacggtgggctcgcaagccggcgcatcgcagtttccctggtaccccgcctggcggtccggcgcggaggggcggcagaccggctaaatcggccccagtgagggccgccgtgtcacctgagccccttccaggccgttgtcctcaggttacaggcgacataaccgaggctccgaagtattgcccacgtccaaggtgacgcagctggccgtcccggcgggccggagtctgggagtctcccacgcctggcccggcccaaccgtcatcgtcccgccgcgagctccgtgcctccggggactgaacggtggggaggccgaggcgccacacgagcgcgcggcgccccgcgccaggttccgagcagggacgctccgtccaggtccgcctggccggccgcgggttccgatcggtgccacataaataaaggctactttcctgagacctctgtccccgcagaggccccgggcgcagagggggggcgtggtgcaccgagctccgaccctgccggtgacttcggggtcccctcgagcgcagccgggctccctgggcaggaaaccctgctccgaaaccgcgcatcgtccagcctcggctgtgcgccctcttggtggcgtgcgcagtcccctcctccggtcttcggacgtgcggcccggggcggaggcggccccgaccccccaccttccccagtgagggtcccgcgcggcacgccgcccctgccagtccggccgcctagctccagcgccgggccgcgccgacctgcctggcccgccgtcccgccgcggcggcccctcctccgccgtccgggcgccccgccccgcccgcgccgcgccggacaccccgccccgaggaggcggcccggcgagtggtcgccgagggaggctggtggcatgggggagccgccgccgccacacgcacggtcgcccggagcgagcccgggcgctgctgcgatcgcggggggccgcggacgccgaggggggcgccttggggcgtgacacggtgcagagggcgcggcctgggctgcggcggccggactcgcggcgagcagcggggggagcaggcggcggcggcgccgggagcggcgggcggagcgggccgggcgccgagggcgcacctggcggccgcgcggccgggccgggccgcgggagcaggcggaggcggaggcggcgggggcaggaggatgtcgcagccgccgctgctccccgcctcggcggagactcggaagttcacccgggcgctgagtaagccgggcacggcggccgagctgcggcagagcgtgtctgaggtggtgcgcggctccgtgctcctggtgagtgcgggacgac

SEQ ID NO: 387 - DNA, 1400 bp, Homo sapiens
acaatctaagtctagctcctaaaaattccacaataagaatgtcattacaagcttattttcccaggtgcagaacaaagtcaaaactacctactcagagacatctgcataactgactcttcctttactctctttttctcttcagacattcatctcatcttacgtagatttaccgggcattagctaaagtcccataggaatgtaactattgtcctaatcgcctacttgcccttcttcctacatgccttcccctcattccccctttaaggaaatgcataaatactaaacctcccgaaaacctcttcggaaaaacaaccacggatgtgtctgtggttcgtgtttttcccgagcacgccctcaaactggattaataagcctcgatgacagagacttatgcctcagtcacttgttccacttgtcaaagctttcctctttgacaagtgtcttgggtcttgtcaagtgtcttgtgtctcaaacaaggcttccaaaccccctaggtcctgagtagcttcgctctgcagatgacaaaaccgagactcagaggttaagttgcttgcccaaggtcacacagacgtactgtagacccccatcatcatctacgcagctgttaaaggacatagtcatgtaacccgtgtggcacaagcgccttctccttcctcctgcccttcgctaacgttagcttttcctgcgacctcttctccgctagccagcgcgtatctgcgtctagccgggatgcctgagccccagtgcgaactgttgtgcttgcagcttcgggagacacgtgctactcgggtgaatgaatcgaacgtccccacccccgccgacagccaataactgcgagccacagcccggccacttccgcctattgcgggcgtcggctagggtccggcggcccacgtgaggctccggagacaagggagtaggcggtggtgcgccaggggcgggctctcccagcctcgccacttatccaggcgctcgccggggacgggaggggcggggctgacgtggggcgccaaggcttaaacgtgacggacaggcgggcacagggaggagtccagagcctaggggcgaggagtgacggagaacactgcccaataacgggaggggttgggctgtctgggccaataggaagtccgtaaggcggggccgggactgcagcaagttcggttgcacggagaccgcagctgttctctgtcagtggaggcagcagcggtagaggcggcggcgaggactggcgacggcgaggaggtgagtgtccgccgcgctccgcacggtcctcttcccgcggcgggtcggagcgggtggacgtgcgccggcaccgctgcgagggacgcttatgtaagggtcgcgcgcgcaaaggcggcgcgggctccgcgagtgacggctggaggagacagcgacgg

SEQ ID NO: 388 - DNA, 1300 bp, Homo sapiens
ttttccagtacgccccctgctcctaaaccagtatcaccctcccccacggctgtctctctctcttcttaaattcttgcgtttatttttctctcccttcgtaactgtgcaatggagaacgggagcctgagcctcgggaagacagggttgcaaccgcaggctaggtgcgcgctctcccctagctcgcggcgtggagctgggtctccgcggcgggcgccggctactgcaggtgctggcacctgggctcaatcgcagcatcatcgcgacacgctccgtgctcccgattctacagcacgggcgcgtgacacccgggtctccgcgcgaaaggagaacgtgggactaaatccacggctccttaagaaggacgtctttggaaactctcgcccttcctcggcggacccgagctgcccgagagatgccctgcatgtgagtgacctctgcgccgaccccgccactggtcagctcgcggctggggcgtgccctgccggggcctgacgtggcggcggggccgcggggcgggcggcgcgaggggagaggccgccgtgagggcgcggcctgacgtggcggccgcggcggggctgccgggggagcccggaccactgcactgccccgcgctccggccagagggcgcccggccccaagccttccccgccccgaggccgcccagggctccgggagtaaccgcgccagcgattgggtcggcggcgcggcggggccatgttggagcggagcaacgaccccgcctcgcaccgccctccgccctgggtcgggccgcgccaggagggaaggggagcggcgaaggggacgctccctcttaggcagcccgacgcggctggagccgcggcaggagcggcggcggtcacgaccgcccctccgcgcccgggccaatcagcggcgcgggcacaaatatgcaaatagcgcgccggtgctgccggagtgccgctcgcaggggctggtggggtcgcgctgggggagtgaactgggccaatcaggcgggtgcgtggcggcgcgggggaggcggtgccccttcactcctccctccactccctccctgccccgcgctgacaggggggcctggccgcgcagccggtaagtgccgccgccgccgccgctgccacccaccgcctcgggcgtggggaggaagcccgggggcaccgcggggcagcggccgctgctcaactggtggggagatgcgggggcgggtcgtgtcagacgggtggtcgcctgaggccgcccccgcccggccagccgcgagtgtcagtctcagtcgaggcggggggcggcgggggcgcctcagtcatgg

SEQ ID NO: 389 - DNA, 1400 bp, Homo sapiens
gagggcgttcctgaatggaggccggtttccctctgcggggaggaaaccccatttccctcctacccctaggcgcttgctacatctggcccggcatcagacaggaaagaaccctttcttcccagcttgtaggaagtctgagctgggccccttatctacccacagcacttcctggaccgggggcctggaccgggctccgaaggggctggctcccggtcttggtcttggcctcggcgccctcgtttctctgcgctttgggcaggggaagctgcggacggcaagctctcggctttcgtgagagcctggtggaatcggtgttccccgaaggctactctgcgggggcgggggctagtccgggccttcccggcagtatcgtctcccccgtgggggctggggaggtgcccccagggctcccggagcggcggcgtggccaaggcccgaaccgggtctgacatctagtggcctcctgggcccgggcagggcgagggcggggcagggaagaaggtggagggcagaatgggaggcgtggagcgagaaaatcaggaagcgcgggaccaagccggggaagggcggcgggtctcgcccctggcacccgctctcctcggggcccgtcccatcccccaggcctggccgaccccaggtccttccgtgcgcagtcggggctcgcaaggacgaatcccgcggccctcgaggcaggcccgggggagctcccggccctccacccccgcaggccgcagatcccacgcacccccgatcatgggggccccggagggaggtcgcgaggccgggctcacggtggccgcggttcgcccacgtgcgggcccggagctggcagggcccggtcccgagcgtggccgcaaccgcggggacctggcacgtgcggggcagccccgggggccgcgtacgccacttccggtcccggagacaccgcccagcccgccgcccggttgccatggcgacgccgtcgcgccacggcccgcagaaccggccaagcgacccgggcgcggcgcggggaggctgaagggacgctcgggtaggcaaggtaggaggccgggctgggggtgggagcggagcgcgcaggggtgcggggcgggggcggcccaggtgagccctgactgcgcagggagggacagcgcggggctcccgagtagcagccggcctcgcacctgccccttgcggccgcgcactggactgcggcgccgacccgcaccctgggcccgagggctgcagggctcgcccgccctctcggagccgagcctctcccggtccaggcggcccctgccctggcctgcccgggtgccgggtctctgctgaagttagaaccgagacccccgcttgctggtgaccccgagtttggatctttgctcctgcgccgcgttctagagcaaggtagggtgcaaatg

SEQ ID NO: 390 - DNA, 1300 bp, Homo sapiens
agcccttggggaaggggtgtgggtcaggcttcaggaggctgtgcagggaggccaggcctggggaagctggagggagagacgcccacctaccacccagagactggcgggcctcctgctggaggagaccccgaggggcttaaagaagccaggcaggagaatcagggccccagctcttctccgagagcagccgatcaggaatgccttctccctgcgccagctgtcactcccaaggggatgccttctttggtttcctttttattgcagaggggccaccagggagtgggcaggagtgaggggtgagagcctgggggccgcagagccaaacttcgcctgattaataacccagatgttcccgtccaagcacatggaggtcccgggagctcttgggaagtcagaccccagctcggtcccgtgccaatctgcagttaggaggcaggtcctcggtccgggttgacacgtaggccacagtcttgggcgccctgatctggctggatgggaagtttagtctccacccagaagaggagctctgaactcctccacgttaaagaaaaagttaggcggggtaaactgcaactttctttttaacccgaagtgatcaaacctcggggcccctctgcactggttcttggagcatggccaggtgcgggcacctggggtgggaacagtggggggaccagggtgggcccctgggctccgaggccgccccaggcccgcccgcctaccggctctcagagaaagaacagggggccgcgcccgccccacgtccgctccgccccgggccagccccttcctcgctgcgactcgcccgctgtccccaccccctcgcccgcggcgcccagtgggaggcgggggctggcctcgccgagcccagcgccgggctctgatttgctgcgggcgttggggatcgacagcctccgcggctgccttccaggagagagggagggaggaaaagggggaaaaaagtgctccgcgccgaaggcgaggtccgcactctccgtccccgcggctggcgcaggacctcactcgagcggagcgcccacggggagcgggtcgcggggcggcggcggcgaggaggaggcgagaaggagttggaggaggaggaggaggaggcgagggcgagctagcccagcggggtcccggccgccccgcgggccaaagtcgagccctcccgcccgtgggcgagcgcgccagccgccccttccagaacagccgccgccacaaagaagaacggggggtgccgaggtccccatgacctcctaaagtggtgcggtccctgctgagtgcgctgcccgggccgtga

SEQ ID NO: 391 - DNA, 1400 bp, Homo sapiens
cggaaagaatgaaatgtctatcactccctttgaatgtgaataagatcagtgtaacacgaatccaccttgctctatgcaactgtcttctgaaacaatcctctgaccctgaacaccacttatttaaataagcggttcttaaatcaatcaatccgtagtgaatggtccatccccacaaaaccaatccccattgaagaccacaccaagttgtgccccactttgggaaaagggggaaagcgggggtagagaaagaggggaaggattggaaccaacattagattgtgcctggtgttgccacgcggttgtcataaacaacggcgtcgaagcaaactgttttaaaacttagaaaatacggcggcctttaaactctattatgtccctgctcatggcaatagtgggacttctctgaacgtagcccacaacggtacagccgcccgggagggaaagcgagctctggggcggacaggcgagtgaaggcagccagaggaggggagcaggctgacagctcccccagcttccgcggcgcgtgggggaccaggacgggcgaccgccacaatcagagggtgcgagctggacccaccggggccactggtctccagggtgggaggatggctgctgcctgtccgctgccggagcctcctttctcccagcagaggagggagagcgcgcgcacgtacacacactctcatacacacacgcacgcacacacatccttcccttagagttgtgtctcgtctcccttttgtttttctcccttcccggtcatgagacccggaagttttttttttttttttttttaatcccgtctctctcccttttccaacccccccgccatctatcacatggcagagatagaataaaaacagaaaaatggcgacggtcacgttgtggcgagccttgctgcgtcattagataatcctcatgcaaatagcgggaagaacaaaggaaggggagcccgggacccccgggggcgcaggtgggtgtgggggcggcggccgggcgcgggggcggcggggcgcgcggggccgagcgcccgcgggaggcgggctgcgtggggcgtgcggccgcgcgaggctcggggcgcagagtgtggacgtccgagtgcgcgcccgtgcgccgccgtggagcgctggctgctgcgctcccggccccgtctcgcggcgcgtcggagccggcctggggacgcgggaagccgtggggcgcacagagcggctccggcgaggctggccgcggcgcacacgcacacgcagccgtggggctcggcccgctaggcatccgcactggggtctgggggcgggccaggcggcgccgggggccgagggcgcgccactgcccagcgcctagcgcctgccttcagcctcctccggggaccgcacgcagttcgccacctcggggtaggcggc

SEQ ID NO: 392 - DNA, 1300 bp, Homo sapiens
cctccccccacccgcccccaactcacaactcttttgagtccagaatctcagaatcgggcgttgggctttgccgggtgcttcagatcaatggtaattatttaattttttccagttttatttttgtaaacagaaatcaattattatttaaacttcaaacaagcaaacaaccaaaaaaaaaaaaaaaaaccaaacaaaaccgagagagcccatccttctgtcacctgactgagtgggaaaaagggtgaaggggttgtgggaggctggggaaggggtcgcaagaagacccatgtagcttttaaccctaatgtggccgagacaagcaccttatttgtgctaacaagaagtgttttgttcattattactgtgattaacattagtattggtgtcgataacaaagctgaaatcacatatttaggatttaggtctgattaaaaaatgttggggtggatgttccaactggatcaggagaaaagaaaatgaaaacagcctggggagagggaagcctgatctgtttcctcactcgcttgctcgtggatgtcattttctgtcttcttgggggcggccaaaaatcgaccggtgtcggggaccagaggcggccccgcacgcccccgcgtgtgcgtccacgggcgtctgtgcagacggacactgtgccggggcgagctgacaggagttcacggctgcgatagaacatggagatgtcatgggcgcgacagagcctggcggggataccagcagcgtgtgtgtgtggacggcaacgttgtctgtgcgcgtgtgtgtgagtgagtgagggagagagagagagaataggtgtgtgtagaggctcccggtgcctctgtctggctgctgaggctgagatgggagcaagtggctggcgaagctggtggtggcttcaaaccacactttcgtagaacaatcgcaagagaaaattgttggggggagggaggaggaggagaaggcggttttccttgtgcccccccttctaacgctgcttttctccttctctctttccccctcatcccgtcttcccctcctcccgtcctccctcgccccgcatgctcccggcttgccgcctgcaggatgagttccacccgttcatcgaggcactgctgcctcacgtccgcgctttctcctacacctggttcaacctgcaggcgcggaagcgcaagtacttcaagaagcatgaaaagcggatgtcgaaggacgaggagcgggcggtgaaggacgagctgctgggcgagaagcccgagatcaagcagaagtgggcatcccggctgctggccaagctgcgcaaggacatccg

SEQ ID NO: 393 - DNA, 1300 bp, Homo sapiens
cctgctgtggtgccagctccagccccaacaccagagctagaacccagcctgctggtggggccacacagggaggagcctcagaccgcgcagttgcagcccagttgcaaagtgtcctggggtcctgcgctggggcttttcttaggagccctggggtgttttctggctttgcaaaggcaatgaaaatttgagttgaatttatcaccagctcctgctccctctaagccagtacccgagctggagccagctcctatgccagctcccgcaccccggccttcctggcctttgcctgtggctgcagagagcaggctgagccagaagcctcatctcctggtgtcccctccaggcctaaggctagagcggtctgcgctgtgcaatgcggaggctgcccagccccaggacagcagcgcggccttcctcccggcccctgcggctcaggcctgtcatcccctgctctggagctcgcgtcctggtccgagtcccggcggctccaccgttcgcagcccggcgaccgcggcgagtcgcttggccgcgaggcctcggtgtcccgccctgcgcggtgaccgaggtcccaggacacagcgcagacagggcgctagtcaggcctggccgcggtaatcccgcctgccgggaccctcgcccgcctcagcactcattaggcgcctggtgtgtacccgcgcccatggccgacaccggcagagcccctggtggggaagggacggagcgcgtcgcgggagccccatgctgcccggggtgggcgctgctcgacagtcacgggagccgccccaatggctgggaccaccgggacccacgggctcgtggagcgtcctcctgacccggcctgggaatcctccgcgaaaacggggagccgcgcgtgtccgtggcgtgcccggcacccggcgggtcggaaacggcgcggccctggctgctggccccgtggggcggtcgcggtgcaggacacgggtcacggcgctgccgctgctctgcgtggcgaacccacacgcccgcccgccagccactgagcagcgcccacgtgcgggcgcggggagctgaacggccggggaccgctggggggcgctgcttgggcggggcggattgactcttgcgggccgccgtacgcgctataaaaggcgcggcgcttcccttctcgtcctctgcgtgcgccggaggctgccgtggcgggtgggccgcctgacttctcctcccggccagttctcgagcgcctcaccgggcctcgccctgcagcctcgctctcgctggcgctgcgcggcctaggggactgggctgctggcctccgggtgcg

SEQ ID NO: 394 - DNA, 1300 bp, Homo sapiens
gggcacaggtgggttgttaatcttgttcgtccaggtgtctcagagtccagctatgttagacacactcagttaatattagccaacacaacaaatattctgctcccttttctccccagggcacactacaaagagtatcttgtgagcctcatcaatgcccactcgctggacccagccaccttgtatgaggtggaagagctggagacggccactgagcgctacctgcacgtacgcccccagcctttggctggagaggatccccctgcttaccaggcccgcttgttacaggtatagcctccacccagcctcatctcttaacccaccctacagaagtcacctggtgctgactgtgtctgagctccaggcttccaatatcattaccttctctctccttctgcagaagctgacagaagaggtacccttgggacagagtatcccccgcaggcggaagtagctgagggcaagggtcccgatgagggtcccatggcctgctccctcaggaacagctccagcaccaataaagaggcatcttaccacccaggcttcttggtggtccttcttcctggtgccaccatctaggggcaccagggaaagagcggggtgaacagagctttgctgaaaagggccccctgcaacctagtgcctgaccctccctggactcaggaccaggaaggagttgacaccctggatggtcaagggaggccctccccatccagcagcctggcctgggcttcctccctccctgcctccttttttcctttcatagaatttgactggtatttgaagtcacccaatatgtatcaggtgggcactgtgggggaatgcagatgcacaggtgtacacagcagtccagaggtcccaggcctgactccaggaaactggcctccctggggaagccacggtgtcacccagaggtcagatagaagcaagagtatctgagggaggcaggggaatgagccaggctggagctgagccagcagggcagggcccccctgctgcgacagtggcatcctgatagtgagatgctcagatgctgctgccctctagtggccgccagttccctgcaactcagaccacgtgatttctgggaaaaggccctccctggaggagaactgaaacttagggtggggactgtagaaaggggcggagagatcagccgcccagccaggagttaagctgaggtcgtctgagccctgcgacagcctggacagcaactcaggtaagatcagccaaggatgggagtcagcctgggatctagggctagaaagtccagccagattgagggcagggggtcctaggggtc

SEQ ID NO: 395 - DNA, 1300 bp, Homo sapiens
caaagaaatgaggctttatagaggaagggatgacagcctcccagggccataaaagatgagtagaggaggaaaataacattgcaggcagagaaatagcaggcgcaaaggccagaagtgttaaggtgcccggtgcctgggaacttcaagttctggtttactgggtggaggtgtggggaggtgaggggcagagaaagggatagcaggcaatagagttggagacacaggcacagagtaggttagaaaggccttgaatgcaggccgggcgcggtggctcatgcctgtaatcctaacactttgggaggctgaggcagccggatcacctgaggtcaggagttcgagaccagcctggccaacatggcgaaactccatctctactaaaaatacaagaattagccaggcgtggtggcacacacctataattccagctacttgggaggctaaggcacgagaatcgcttgaacccgggaggcagattttgcagtgagccaggatggcgccattgcacattgcactgggcgagcaaaactgtctcaaaaaaaaaaaaaaaaaaaaaaaaaaaaaagccttgaatgctatgctaagcgccatagacttgatcccaaaggcgagtggcagggagtccagaagggcatcagcagaaggtgcagtcagacagacctaagacaaatcccatctctggcttcctcaagacttttgctttagttttatcatctggaaaatggagatgacaataataataacttgttaaagtgttctgagcattaagtgaattcatgtccctaaagagctcagcctagtgcctggcagagagctggcccagcaatggaaatgggtgttgacatccaagagtttttagcaggggaggtcagactgctctaaaaggcacgcccggctgcagagagtgactggctggttttgaggaggctgctgtcctggggaggctgggctctcggagatggtgggggtgatgaacagccacaggcagggtctgaagaagtttaggaggtggcttatgcagacccccgcgactttgaaaattgcttgtgaataatatctaaattcggaattgcttctcagccttttgactgaaatctccagtgtaatctctaaattctgatcttttggtgaccccgggcctagtgccaaaccacccagggctggcttgatgactttctctgttcttctttgcagcacgtccacggacgccatgctggggactctgacacccctgtcttcgctgctgctgctgctactggtgctggtgctggggtgtgggccgcgggcgtcctctggtggcggg

SEQ ID NO: 396 - DNA, 1300 bp, Homo sapiens
ataactgcttttctgtctccacttggcagcctctttctttgtagacaattgtctttttcctcactttcggacccatccgatcataaaaggagaaagtgagctgccattgaattaatccgtagaaatttgtggaaaatttaaataatctgtagaaatttgtgaaaaagccactgagcaacaacaaatcgtggcataattacactgcataaaaacccaccactctcattaattacactgtaaccgaacgttgaagtttgcccactcttagacctctccttgccgctttcaggaagggaaatgtcaaactagaacacctgagcctcgcacagctgccagcgaattccggcggcagttcgcgggtaccttcccagcccatcctatctgctccggaccgcgggtgacattcagatttccaacaccgccccgagcttgctttaccagacaccctcaaacgactcggaacgcggttccgcagatgtgattggctgaaaggggacctgccgcgcggcgctctgtaaaagcgcctgcttcctccaaggaggtggagctgaagctggcagggccagggcagggaggggtaattaaattaaaaaaaaaacttggagggaagatgaatcggatcacattaattcaaggagaggtcaaaggccggtacctttgtaacgccggcgagagtaagacttgcggtcgcccatttctgttgggcgcgaggaaacagtaaatcgcggaagggggtagagggggaaggaaagggagcgcgaggcagcatgcggcgcaggagagaggacttggagtcgatggacagggaactcgaattacactgagcgggcgggggagagggccctctgggtcctgcgattggcaggctgagtcgggctgacgtgcggtcacaaccaatggggaggaagggagggacacggcgggggattatggcgtcgtggattggcgggcacagggcggggcgggacggcagtgcgggactgagattgatcgaccgcgggggctgccgcgcagagatatccgggccgccggtgggtggtcgctagggctgggccagcctcttggaggtccacgcccgccgagcccacgctggctggggccggggtgccggcgcgctcgggactcgtctcagcagtcgctcacggtctttgtgtcttctcttccgcccctttccctgcctgccgcctccggccgccacgatgcccctgcgccccgctgctgccgccgcggactggctgcgccggctgcgcgctgcttgctgcggcggtggtggcgccccatctgctacacgggcctgaag

SEQ ID NO: 397 - DNA, 1300 bp, Homo sapiens
actgtcaatccatcttactgtatctctaatttctgtcccttttctcccttcttgtttctgtccctctcccttcttgtctacctcttgagtctggatatctgcatttcttgtctctgtgaacccattctgcgtttccttctttgtgtctctttcatctgcatccctttctgatctgcctctctcttgctaactgttctgacacctgtttgcccggccctgaccctctgatccactcagccctcttataacttggacccgtgtctctatgtttgttcacttattttcactgtctctcctcgcgtcgagtctccggtcctcccagtctgtgagtctgtctctctgtctctctctctcttcctcccgccggtccttcgtctctctttgcccttgagtctctggtctctctccgtctctcctcgctgtttctatcgatcggcatctctctgccccagtacccttccccacctcttcatcccacatgccccattgcattttcaacgcccgccgcgtctccgggttacccaggcgatgtcgagtcgtgtccccaggttaccatggagacgttcagggcccgcccctcgcccatgatcacagaggaacgtcatcgcgccgcgcgcgcacgtacacacgaagggcctgctgactacatctgccggaaagcatcgggccaagcctttctccattttgcggtctaggaagtagcagaggccccttcctgtagggagttgccatggagacgcggtggggcaccgacggagttctaatgacggccgtgattggtgcaggatcctgctaatctcaggaaggcccgtagagaagtgaggaaaacgtggtggggggcatgcgcgatctggtaggcggtgctgccgtctgttgtacctgagaggcttgcgcatgccgacgcacggattcgaggcggggagcatgggaagaagcggccaggagtatgacctgatcattgcgaccaccgctaggggaagggaggagagggtgtagaaacggggacgagggtgggggaagggcaaggaggcgctcgagctggtgcgcggagcatcctgggagacgtagtccagcgggagggggaagtcgaagactgcgcgtgctcaggagcgcggagcggcccgctgagcgcagaggtgagggcggggtcctcttaaccgggagggctatcgtgtggacgggggcggtggctgcagactcggggattccggctccccagtgagaccggaagcgcggggaacgaatccgggcagtccttgcgggagcgcccagggctagagcgagaggcttgtcaatcact

SEQ ID NO: 398 - DNA, 1400 bp, Homo sapiens
gctggagtcggaggtggggaggctgcagtgaaccgtgatcgctccactgcactccagcctgggcgacagagcgggaccctgtctcaaaaaatagatgaataaataaataaaaacaattataatggaagtttggataggaatttaaaacatgtggcaactaaccctgaccctgcggcttcagtctccccgccgctagctgagggccgtggccgctgcacagaggcttgtgaggattcgggggttcaggcagcgcccgccgcgcatctgccagacgtgcggccacagggtaggagcagtaagaaggatccagggaaaaaagtccacgaatgagaaaggaaacccagcgtttgtagggctaggagaacaaagaaagaaaatgctggcggcggagggcgaggctctgcggtgcgtggcagatgggaatttgctcggtggcggctcctctttctggagagcttcccagcgtcccctcccccgccagcccgcggtgacgcgcccggcacccaccacagccggctctcggcgccgtcgcgccttcgctcgcccgcttaggccgtgctcgcggtggcgtgggagacagagagcccagggaggaccctggaacatgcagtggtatggaagacgcctaagaaagggcttctctttccactcacgaaaatcagtgtgtgagctcgaagccatttcccagcgtgtccgcctcaactccctcattcaacagatgaggaattcctccagggaaatgcagtgatgcgctcacggctgccggcggcccagcgccaaggggcgctccacagccccgcggcccgaagccctcgactcggctgccacgcaggccccgcggccccgctcggactcccaggatcggcttccgagcgggacagcgctgcagtccacgagtccgggcaggggcgcctccaggccggagcggtttcctgcctcgggcactctgctgtctccacaaacggtttttggaggcacacacacggatactttaaacacgtcggtgatgaatcggtacccagctgccagtggcggagcttcctgggcggggccgcgggcgcgcggcggcttcatttcctcgcgcgcgccggaagtggcctctcaggcgcggcggcgcgcccgggggtgggtggctgaggcggcggcgggcccaaggcgtgaggcgccgcccgggtgtccccgcggcgcaggaggcggtggagcgcagagcgggcgagcgcggtgagtacctggcccggcctcgcccgccggtccgcgactcccgccggctccggcccgggcggtgcgggcgccggggctgcgggctcctgtgtggtcgggtggggtcgcctagcggaccggtcctgcggggggccctgtctctcagggatgagcctgccggagtcggcaccggttttagg

SEQ ID NO: 399 - DNA, 1400 bp, Homo sapiens
cagcctggagacacagccagactccatctcaacaatgacatcaaaaaaaggccgggcacggtggctcacgccggtaatctcagcactttgggaggccaaggcgggcggatcacgaggtcaggagtttgagaccagcctggccaagatggtgaaaccccatctctactaaaaatacaaaaattagctgggcgtggtggcgggcgcctgtaatcccagctacttgggaggctgaggcaggaaaattgcttgaacccgggaggcggaaggtgcagtgagctgagatcacaccactgcattccagcccgggcgacagtgcgagactccgtctcaaaaaaaacaaaaaaaatctaaaactcaaacttctgaataacaatttcctcctagcaagaagggactcagtaagataagaagcgctgcttggctactttgcaaatgtctggcttaagatggctggttttttgtatctgcctctgcatttaacctggtccatctcgcgggtcacatagcctctacaaaatgagaaggggttcaataccgttaactccgggcctgggtaaaagactcaagtcctgaccccatcatactccaaccaatacataccccgcctgcgctgtctgcgcctgggtctcttcaaccgcagtgagcggtcgcacggctccacatcagggtcgccctgaggctcagccttccccggccccattccgagtgcgcacaggactgaacgagcacgcccggtccctgctccggagcggaggacacgacgcggacccgcacggtgcaccgcagtgacctgaggaaggagcgacgggcgctcgcgccaaaggcgtccgagtgcctggtaaactgtaaagcgcggtcctgcgtgagttgctatggctacagctgcgccaggcggacggcctgcaggaccgaggtgcagctgggacgagcggaaagctctgcgcgtgggcggggagcccggagcctcgccggggcaatgtcatctaggtgctcggcgctccactgatccggcccccgggggtgggcgggcacgtttgcctcggatggtctaacaggcgtcggggagagccaatggtgtggcttcatggctccacccccttccattcgattggccggcgccgaaaagccgggcgtgagcggccgcagtttctggagggagccgctgcgggtctttccctcactcgtcctccgcgcgtcgccgctcttcggttctgctctgtccgccgccatggcccagtgagtgactcgccaggggcagcccggctcggcctcagcgggcggggaactctttgggggtcgagatctccctcgttctctccgacgcctcccaccctgggggtcgcctgagctcacttggggctctgtgaccctggccctacggcgtctcgggcccagagctc

SEQ ID NO: 400 - DNA, 1300 bp, Homo sapiens
cttctccaaatgtataacgtttattattgcattttttgtatccactaagtggaaaatcatgcattagatattgtagaagtagatacaacaatgaacaagaactggtcctgaccatgagaggaactgatgatccaatgggggagatagacctgcacgtgtttaataaaaggaagtggctattccggtttctttttgatgggcaagcattttgcaaggccttgggctatgtgtgtgcaaggctaagccagttagttaattgggatttttttaaaaaggcacttcactggggggaaaaggaacatagagttggttattgtccccttgcctataataaaaacctattatttttaattttttaactgggtttgcggttaaatctcacagcccaagagatttgccacttcagatggattccatacacttgcatttaagtatgcaaaaaaattccaattatccagcaatttaaccaaattattggtaacttttctaaaacaaaaaaaaattgtttcccttgttttggcagcaatttcagttacagtcctttactttctactcaagaaaatagtttcaaaaagttgatgtttgttgctaaaagaactatttttatgaataaatataaaactaagaagttatggtgtcccttttttaaaaaatgactcatcaaaagaaataactttttcctttctcttgtaagagaaaaaaattaatctcttttagaattgcaaacatatttccttgatggagaaaatcaattcacatggcatagtcgttatttatccagttcaaaaaccagagtagaatttactactctgtctccattttttctctccccacccccttaacccacattggattcagaaagcttcattctgcaatcagcattgtcctttatctttccagtaaagatagccttttggagtcgaagatgaggaaaagcctgtattttatagtcttggaagtgtcttcttttgccaggacagagagaggagcttcagcagtgagagcaactgaaggggttaatagtggaacttggctgggtgtctgttaaacttttttccctggctctgccctgggtttccccttgaagggatttccctccgcctctgcaacaagaccctttataaagcacagactttctatttcactccgcggtatctgcatcgggcctcactggcttcaggagctgaataccctcccaggcacacacaggtgggacacaaataagggttttggaaccactattttctcatcacgacagcaacttaaaatgcctgggaagatggtcgtgatccttggagcc

SEQ ID NO: 401 - DNA, 1300 bp, Homo sapiens
tatggggtttaaatataaaagagttaagagctgagaagtgcctccttggtcaattaaaccacactgacatcccgttttccttttcttctttttcataattagagaggaagtggagggaaaggaaataaataactttaacaaagtatgcctagtttaaatgcaccaggtccccgctcttttataaactcataattctcattgcatcactaatttgaaattaatcacagctccttggtgtctcagaaagcttcctattgcttttcactacgtaactttccaagtctgtgtgtttggtactctaggatgttaggccaccagaggaaagaggatgtatcttttttttttttatactttaagttttagggtacatgtgcacaatgcgcaggttagttacatatgtatacatgtgccatgctggtgtgctgcacccattaactcgtcatttagcattaggtatatctcctaatgctatccctccccccctccccccaccccacaacagtccccagagtgtgatgttccccttcctgtgtccatgtgttctcattgttcaattcccacctatgagtgagaatatgcggtgtttggttttttgttcttgcgatagtttactgagaatgatgatttccaatttcatccatgtccctacaaaggacatgaactcatcattttttatggctgcatagtattccatggtgtatatgtgccatattttcttaatccagtctatcattgttggacattttctttttgatagtcgaattcccttcaacgtctagcacagtgccttgcacatttacccactcaaaaaaaatttcgtaaggaattaataaatgaatccttaggaggaaaagtgaaaatgaagtttttctctcaggatgaggtgtatttctccgttcatttcagatatgcatcagctagtcagcgtaaattgtgctttttatatgctcaccaggtgtaggtaagagctttggctgagatggagaaattcatcgcgggaggataataaagcgggcagggatttggcaacctcagagccgcgaggaggaggcggagtcgcggagagtttgagtatttccgtccaatcaaaaggagactgtaagaggaggaggaggaggagatgactggggagcgggagctggagaatactgcccagttactctagcgcgccaggccgaaccgcagcttcttggcttaggtacttctactcacagcggccgattccgaggccaactccagcaatggcttttgcaaatctgcggaaagtgctcatcagtgacagcctggacccttgctgccg

SEQ ID NO: 402 - DNA, 1400 bp, Homo sapiens
tttcaccatgttggcaaagctggtctcgaactcctgacctcaggtgatccgcccacctcagcctcccaaagtgctgggattacaggcgtgagccactgtgcccggccagtggtagtcttttaatgtggtctccgctctctaacttcctttttagctacagaggagagcataagagaaaacatcatcatcgcttctatttactgagtgcctagtatatactaagtgctggaattattatatttaatctttgcaaaaagcactactgaatacacaaacctcgagagcaggtctgcgtccgtttctctcttactatgcaaactaagtctagtacagtgcctggcacatggcacgccctcaacgccgtggatatgatcatatccattttatacataaggaaaatgaggctggaagagttcacacaggtctcagtgtaagtagcagagtcaggatttgaaccaaactgttccgcaccagggagaattttctggcgtctaaaagcactagtgaggagaggagaaagttttaaaaagtaagattaaagaaaaaagtaactacttgtctgtgtggaagctgaggtggaagaagggcttcatggaaaccctctctgatgaaatcatccctcgtttttgaacagcaattttggcttttccagtttctgtgtgcgctgttggtgcaggtgtgttactcttcttattttgcagatgagcaaactgaggcacataagttacatgagaaagtaggagatagaggactggaacatgatacttcgaataaagaatgtctcagcccctgggcaaccgcagggagtcgctgagaaacaagtttccccgggagtagactcccagctcgctcaaatccttcccattccacatcgtgtctggagggaggaaaaaaaaattcttccctcccagaagcaaagtcccgcaacttcttagtcttccctagagacaggaaaggaaacccagcgggactacaccttccgacgacctttgcgaatcttgcggaacgcaggcgccctgaaacggcgtgtgcactacgattcccggcagccgcgggcgggtgcgggactacatttcccagggggcagaggcaggggcgggagggggcgggccccggcgctgctcccgcccctcccccgtgctcgcggggagaggtaaacaaaccacgcgcgggctgcccgcggcacggcgggcgcggctggcgcggctggggcggcaggggcggcggagagcgcgccgagccgcggccgagctggcccgcccgcccgtcgcacatgttccggaacggcgcccggccgtagccgcctgcggcgcctcctgtcggcccgagaagggagtgcggagaggcgccggtcgccacccgcggtgcccatggagcgggtgaagatgatcaacgtgcag

SEQ ID NO: 403 - DNA, 1300 bp, Homo sapiens
gtaaccatatttagatgggcttgtcatagagatattttccaaggaagtgcagaagagtcttgttcactacatcttgttcctttcttagatacaagttacatcagaataggggactcaggctcttgcctgggtctggattggaagaaaaagagcttaccatgggccagagtgtgctaagtcagatacaatacacaagcatcttatcacacatttcaatgatgtggaaacttaggccaagagaggttaagggacttgtccaagctcacacagtctgtatgcagcagagctgggatttgaaccctttcctatggcaccctagagcagccttcaatcatcccctgacacctccagtacttcccagggctggaaagcatccatgattgcggacagcagtggcagtgaaacaatgtcagctggggtaggggttttcagaggcaaaaggtggaattcagctggggaggggggtggttcctgagctgccacttctgcctctcaaattaaagggagccaggtgtggaggcatcctggtgtgagctttgcacagctgaaccaaggctgggcagaggagtgtggagagggatgctgacatctcctcccacttctggaaaataactttgcatttgaagggagaaaggcatgagtaaatctgtaactcggatttggacggcctgggatttcatttgactgtgtgaaggcacacacaggtgcctcgcaagtgtgtgcgtgattacgtatgtatgtgtgtctgtgagtaggagtgtttgtgttgggggtggggggatcttctggttacacactggttcccttcttcccatttggattggggagcttttatttatttatttttaagtcatagcagccaccatgtatggggacctaactatgtgccaggcattgtgctggacactttctgaggcattatttttctgtgaaaaaagtagtttgtttttatgcaggtgcacccagagacatcaggtatttttttccattccggttaaaagacagtgttctactctgtggtaagccttggggagaggcagggaagcctgcggggacgggcaggggcggtccctgcctcgctcgctagtctccaccttttattttgaccggtccgatggcgacaggctcgcactaggacccaggcgccagagtgcctccgtctgtcctgtaggttcattcaatctcccatacacacagactcacagcgagaccgacacacactcccatacactcacacacacaactgcaggcagcgaggctcgggaagtcaggccggcttttcgccccggcgccttctctg

SEQ ID NO: 404 - DNA, 1300 bp, Homo sapiens
cggcaacccccactccccaccctgcctgctcaaaagaaaggatcctcctgcctccagccccctccaccccctctccaggaccttcctgaccgtgcgctgggcctgtgcaggtgttgagccacacccacaccatcccagggggcggggtctcgaaggggagaacaggtgccacagtcaacaggagggagggcttctggccgaggtggcaaggaggctccaggaggcggcagcgttgaccttgggtgttgagggatgatgagaaggagttctgtaggaaggaaggtgctccaggcagggggcctcggggaacaaggggatgctggaggaggtgcgtggactgggggaattgggggtgtcctacgagccacgctggtatcagaggcgtgtgaaccagagcagttccatactgaataagagctgggcaaaatgaggtcgcgaggaggtgcgtggaaggcgggcctagcgttcagtgggatgcggggaggcgcaggagacgcagccagagaggcgaggggcccaaggaagtgctcaagaggtgtcccccggcagggactacaatgcagattccctggagcaggggcgagccgggcccaaggagcaggaaatgaagaagccaggaatcccagctggtccctgacccggacgcacccaccctgccttccccacagcctggcctctggctctgctcccaacgcagcaagccggggtatctccgacctagccctggccctgcccgccggaaccccgcaaaagctatcactcagccctcggccccgccccggccccaccccggccccaccccgcactctcacaaggtgtcactcagccctcggccccgccccgcccgccccatcctcctctggctccgccccaccagcctcgtgcggtcaccgccccgccggcgcacctgcgctgtcactcagccctcggccccggccccgccccgcctgccccactcgcacacgggctatcactcagcctgcgccccgccctagctcgccagaggctccgccccacccgcctgccaacacgctgtcactcagccttagccctgcccaggccggccctcggcccgtcagaggcctccttcgtgctgtcactcagcccttgccccgccccctccccgcccccctcacacgtgctgtctctgtctctggccctggcccgccccgcgcacttgcgctgtcactcagcctggacgcgcttcttcgggtcgcgggtgcactccggcccggctcccgcctcggccccgatggacgccgcgttcctcctcgtcctcgggctgttggcccaggtaagg

SEQ ID NO: 405 - DNA, 1300 bp, Homo sapiens
caccttgtgatatattgtcaagttgtacactcatgatttgtgcacttttctgtatgttattattgaatttaaaatctcattaaaaacgacaaccagtgtagtaagtcatgatgggataaggtcagatgctgtggaatgagaggcctttaactccttggaacttgggaggggacgggtcagagaaaaggcttctccaaggaagtaatatttgacaagagggcccatggggaaaaggaagaggggttaggattattgggtcagctgtgactacggatcctgtccttatttttaaaaacattttgatcatagactttttgcattacttttgaccttttaaaacgttgcagtattatatttatcttgattactgagtgttttggagcccccttaaattctgaacccgaggggagtacctcaactctggtcccggctcggctggctgcacgggggtcggacgctctgtccttagtaccatacgtaagccactgccccgccccgcttttcttcacctatgtaatgggaaaggaggtgaggtgggacgagctttccagggtttaatattctccctggcccggcaaagacggggatttgaggggttacatcggcacaacacccggggtcgaagaaggaggctgctgggctccgggaaggagctccctcgccccagacttccgcactctggttatttcccaacggcgggaaggctcgcttggagccggactcgtgattggctaggacgaagtcacgtgggaggattcgcaatcaaatggcaagggcgtctgcgtcatcagtgagcgacgagagcctcccgagaggggcgcggctaagtaaaataagctcctttcttagtggctgtttccttggggagggactgaaacagcgatggggattcgctctcttccaaccctaggcttccgggatttggagggaaggtgaggcctggggagaaatgtattaaatcgcgtataccccggatgctccgaggggcggggcttcgacggtggggcgtagttaagggcgggtctctcttttgggggcgggattctctcgggagtcggggtggagccgcaaggctccgctttcccggagcgcagggggcggggtttggggcggggcctcgcttgtgggcgggcccgggcaggagcgggcttgccctgcggagcagtagctaggaacagatccacttgcaggttgctgttcccagccatggcttcgcgctgctggcgctggtggggctggtcggcgtggcctcggacccggctgcctcccgccgggagcaccccgagtaggagcagggcgc

SEQ ID NO: 406 - DNA, 1300 bp, Homo sapiens
atttcataagtgcatctagaatatgcttgtgtaaacctatggttagatgatgaagctaagaaaagcctgagtccatccctggagagtaagaaactagtatactccttttacacagtaccttgcacacagcacaggcttaacagacatatttaaattgaactgaagcgaatactaccagaactgaaagtggtagttccagatctttcaggctcaaggtccagattttacaagtgtttctgatcaccctccccctacctcatttatcgcaaagagcagaggccaggaaaaggatgaataatcaatgaccttaaaactcaggtgagaataaaaaccagttctgagaaaccgtgtgacatttacatcctggtacctgagctttagatcactctgcatgtgtatttcctctgcacaaagcccaggaggctacttttatattattggggcaaatctcccaacagccctgggtactaaacagccttcagcaggtgcttccaaattttcttatttgcttcaactcccaggttgccaggggaagcttggccgacaagtctatactcctgggcagactgagcaacagcaggtggtggcttctggataagaggtgctctaggtcggaaggaaataaatgagactacgatcagttaaagttcggtaaagcaagagacgccttcaacccgacgaccagacggtggctccgcagcacagactctctcggatggtggaattcccaaccggcttcgatgtagccccgcccctacccagaccacgcccaccaatcaccgccctctcccccccaggccccgcctggagcccgcccctcctaaagcatgctccacctgactccgacactgccgggcttagtccgccgggcttagtccgtggagcgcttgcgcatttcttgagttgtcgtggcactgcccaaatctgaatgggggaaagagggaacttcatatttcctacagactccgccacagcgactttgcgtgctctcttagagctggttttgcctttcgtggtcctgagaaccctggcttttggttccccaatgcggcttaagtgtgcaggttttaagttaggcgatcttcgggcagccctagtcccagcaccgggtccttgcgctgagtctcgggaccacagccggggaggcggggtccttctctggggcggtcgcgttggcagcggatgcgggaagccggactctgggcgtcatgtactacaagtttagtggcttcacgcagaagttggcaggagcatgggcttcggaggcctatagcccgcaggtacgagtggcgcctggcca

SEQ ID NO: 407 - DNA, 1300 bp, Homo sapiens
agactttaagactttcactatttcttctaccgctatcttctgagaacttcaaagagggaccaggagtacaggaggaaagtggacaaggagcgtgaccattgaagcacagcatcacagggaggggtttaggcctccggatggctgcaggcaggcctggatactatccagcctcccacaagaagctggtggagctgagcgttccctgactcctccaagaaaagggagactccctttcgtggtccgctaagtaacgatgccttcctaggcactggcgttaccgcctgaccaaggagccctccagtagcccttatgcgggtgtgacagagggctcacctcttgcattctcggtcacttctcacaacagcccttcagcacctgaccctatacccaccggttatttcttggttatattagtaatacaataaagagtaatattaaaagctaatgattaataatatctacactaatgattgataatgtccatgatcatctctgtatctaatttgtattataactattcttattgtaagtatattctttattatactgaaacagtttgtgccttcagtctcttgcctcagcacctaggtaatcctccgcccacatctctgaggggctgaactgccccccaccttctggaagctgggaggttggaagaggggatgcgtgcgatggactcagcacacagctgggaactcgaggcacacctaagccttcgcttgtgctgtgcggagtccacacttccttccccactggggtctcaaaacctcccctcactcaacagggtggtgctgctcaaagctctgggcacacattagggctggggagggggtggtggagagggggctccagcctgcccaaccaccaggcaacggggcacctgcccctctctcagctgggtctggacccgcgtcccaggctcaggctgcaatgcctttctctttctctttctcttctttttgcagttccgttgggtcctgcccaggacagataaagacagagcagcctgtctttatcggaggttcctctgccagtaggaggggcccggagaaaaccagaaagagggccagagccagagaaacatgaagcaccccggggcctcccacaccagtgcctgagcaggaatggggaggggccatgattcacaaggccctgggaggtcactttaaagagggctgctcaactgcaaggacgctgtaagcaggaagagaagccacagcgcttcagaaaagagtgggacagggacaagcatatctaagaggctgaacatgaatccacagatcaggtacctctgcacgct

SEQ ID NO: 408 - DNA, 1300 bp, Homo sapiens
tccagttactcaggagacagagacaggtggatcgttttgagcccaggagttcaagacccgcccgggcaacataaggaaactccatctccacacaaaaaaagtaaaaattagccaggtgtggtggctcatgcctgtagttccagctactcaggaggctgaggagggagatcagttgagacgaggagttcggtgatgcagtgagccgagactgcgccactgcactccagcttgggcaatatagagcgaaactcagcatcaaaaaaaaaagaacatctttctattctgaattttcccaattttctacaattaaaaacgctttaaagatctctataaagtcagtcaagggaatttctatctaagcacttaccagcaatttgagctccttctcttttggtctaggtggctctaaaataacaataaaggctacagtgattgaaattcaccagacttgaaatagactgcagccttcttccttcccaccttcttagaatctttgtcctattcatcttccttacgcttccccgggttctcttacttctggattctaacagtgagttgtgagaagcaacgcggaaaacggaatggagactccagcttgttttaaacgagctgtattaccccgcacagtgcaggagaaaagataattggctcaggtctcggctctgccatctaccacctgtggagccttagataagtcagttcttatctctgtcactcaacggtctcggtcttgtcatcttttacatggaatgtcatgaaatatacagtacattgcaggaactgcctcaggtaaagacttctagggttcagtaggtctcagtcgatccctctgagaaaggccgcaccctaaatgcacagactctgactctaaggggatggggtcggggaatctgcattttagtagcttctcaggtgattcagatgctcagtcaggattgagaaaccaggactcttcccagccctcctgttctctgatccacttctctgcttcctccacgtcctaacgattctccagttcccgcacagcaggagcggagggaagaggggagagaaggcaccgctaaggaccgctggccccgccaggcggccgacctccccattccaggggcgccagccggcggattacataacgggcctcggggcgcgttctcgcgaggtttccaccgccccctcctcgctccacgtcagagggaaccgggcggagcggccaacatggcggaacgcaggagacacaagaagcggatccaggtagcaaagccgagctctgggcagggggcttcggcgcgctggatagtggaag

SEQ ID NO: 409 - DNA, 1300 bp, Homo sapiens
gacatatggcagttgattattctgttcttttcttttatgattgaaaatgtctataataaaaagataacatgttttctaataacaattgttggaaatttttttaaataggatttattttcagtgttttaaaatactaccttttgtttagatagtatgcgtacttggaactaagagcactggctttttttccccaaacaatgtcattataagctgatgtcatttataacaccagagcttataagtaggggttgagtttgcctttctcatcaattaaaagtgaattgcagctgggtgtcgtggctcacacctatagtaccaacactttgggaagccaaggcaggagggttgcttgaggccaggagttcgagaccagcctatgcaacacaatgagaccccatctctacaaaaaaattagatgagtatgatggcatgcgcctctgaagtgagaggatggcttgagcccaggagttagaggctgcagttaactatgatcccaccactgtactccagcctgggtgacagagcaagaacctgtctcttagaagaaaaaaaaaactaaattgccagtgtagaggaaaagtcctttatcgtctctttctttactgtttttaatgatttgacattcattacaagttttaaaaagtagatgtgctaatctcttcagatataatatgtttagctgtttcttgtgacagcagtggattgttgacagagcttcttcctcagtgtattagagtaaaacttgatgagaatttttattacttgcagggagtggtgaacattttggtttatctacatatgcttgtgattaataagagtgatagttacatacagatattttaaatttttgaatatttccccattaatttaacttgctttagttggtctttctgaatgccattatttcccaacattacttttaaaagatacttaatatagttcacaagttgaggttttggggaactactaatcatgatcatgttagatttagttttctgttgagtttggttttcttttttgttgccagagtgttgaaattttactttataaaatattatttagatagacataaatccccatgtatgctaaatttaaaataatgaatttcttctttagcttcaaaagcagtggactgtcttttggattcaaagtgggcaaaggccaagaaaggagaggaagctttatttacaaccagggagtctgtggttgactactgcaacaggtactgtttatttcttagtgaagaataacataataattttaaattttcttcatagtcctgaagctccttacatcatta

SEQ ID NO: 410 - DNA, 1300 bp, Homo sapiens
cctatacagtattttattcgtgtttatacagatgtacagaaaatatagtcataaatgtatagaaaatataatatttaatagtttttgtggagtaagtgccttacaaaggcaaaagggcctagggccttgggaagtatgatgcagccctgcttttccttcttaaaggcttccttcctaaacacctttcatctctttattttattcttttcctacaccatgatcttatgaatacttaaattcccaactgattgctatgtgtattgaagcataatatcacaaagtacataaatcagaagtgtatatccatgtaagtgtacacccagatggaaaaaagaagtaatttttttcagtgacattattgcattgtgacctcaagttcagagcaacattctgtgcccctagaataccgtgatagctgctaaactagtcaggaattttttgttttcaggcatgcagtggtgtaattatagctcactgcagcctcgagctcctgggctcaagtgatcctcccaagtagcttggattagaggtttagccaccacgcccagcactaatcaggatttaaatattaatatttaaggtgtatgaaatgtgcagataataaaactgttttcccagctttttattaacaaatactcccttctgaggcagtgtttgaattactcaattagagaaatttttctccccacagctcgatgcattctatttctcatcatttggctcataactggaggaaggcaccacttttggttcttgccaaatctgactgctgatgtgggcttcattgactccttcaggcctctgtacacacatgaatacaaaggaccaaaagcagacttaaagaaagatgagaagtctgaaaccaaaaagcaacagaagtccgacagtgaggaaaagtcagacagtgagaaaaaggaagatgaggaggggaaagtaggaccaggaaatcatggaacagaaggctcggggggagaacggcattcagacacggacagtgacaggagggaagatgatcgatcccagcacagtagtggaaatggaaatgattttgaaatgataacaaaagaggaactggaacagcaaacagatggggattgtgaagaggatgaggaagaggaaaatgatggagaaacacctaaatcttcacatgaaaaatcataatctgactaattttgggactgaatgaataagtacaagaggttggattttctatgttggctgattaccatattgaacacatggcatttgtagcattctttaaatctatctactgaaatgtatttgacattcaagcagttat

SEQ ID NO: 411 - DNA, 1300 bp, Homo sapiens
gaagaagcttcatattcatataagtatgctagttctaaaacataatgtggaatcatttacaactcagcactacttggtagcaataaacagaaacccacctcaaaagagtgtaagcaaaaaaggaattgaattagattacgtaatttgagaagtccaaaggctggagttggtttaagcgaaatttgtattgaaaatttttcttacataaaaaaggtaaaacaaatttggtaaacctaatttttttttatagtgcaagtagtcaactgttgtcattctaagaaactattatttatggatagtaaaactgtttggagactttaaaaataccctataacagttaaaggcagagcaaattactgaaataaaattgcgatatttgccccaaatagtaacagtacaattttcatcagttctctagaaaattatctgcaattaaaaaaaaaagaattctgatgtgttaactcaaattaatcagtattttctttgtacactcagattgcaacctaagtattagtctgttgaatttggtttagtggatatttattcaggatttttacaaaaacaaggaaacagagaagaggaatagtgctgtgcagatgacctcggggttcaggcgacactcaaatgcctgcttctcctctgaggttattaccatctcttacttgtttgacgtttagagatactacaagagatagttgaaaagcagaggttgcatttccagtggtgttttgctctgctggtatttgctcctccgtgctgctgtgcaaagggccagaactgcatcgaatggatcttttcttcaggttgtgcaggctggctgccttgatgtcgtagttgctgatgttggctgccgacgaaccttattcctttacatttgcctggtcctcatttcaccggaaaacacagtagctgtagctgcacatagacgcttcctctttctgtttccccctcatccccctccctagacctctctgggctttgacgtcatgtgtgctcctttcggttgccatagcaaccccattccccaagccctctgtccgtctcctctggtaggttccacaatggtacaggcagcatcacgctgcacaatggtttccaggcagtgaaagagggtgattcagcaagccactcttcttctattttctttaacctccccttcactttttatttttatgggggtgggtggtgcttgctatatgcttacctttttcttttcttttttcatttttacaaatttccttttttgtcctcacccctcaattcctaggggcttgagtgagtttaagattgggttttcttg

SEQ ID NO: 412 - DNA, 1400 bp, Homo sapiens
actatccttctgaattctttttcaggtagatcagggatttcttcctggtttggatccaatgctggagagctagtgtgattttggggggatgttaaagaaccttgtttcatcatattaccagagttggttttctggtgccttctcatttgggtaggctctgtcagagggaaggtctagagctgaaggctgttgttcagttccttttgttcaaaagggtgtttccttgatgtagtactgtccctcttttcctagggatgtggcttcctgaaagccgagctgtagtgattgttatctctcttctgaatctagccacccagcaagtctaacaggctctgggctggtactgggggttgtctgcacagagtcctgtgatgtgaaccatctgtgggtctcttagctgtggataccagtacttcctccagtggaggtggcagactggtgaaaaggactctgtgagggtccttagctttgattgattaatgcacaatttttgtgctggttggcctcctgccgggaggtggtgctttcaagagagcatcagctgtggtagtatggggaggaacaggcagtgggtagggccttggaactcccaagggtatatgccctttgtcttcagttaccaggatggcttgggaaggaccattaggtgggggcagggctaggcatgtctgagctcagactctacttgggtgggtcttgctgtggctgctgtggtgggggtggggtgggggggtgggggtgaggttcccaggtcaatagagttatgttcctaggaggattatgtctgcctttgctgtgtcatgcagcttgacagggaagtgcgggcaagctggcagtcacaggcctcacccagttcccacacaacgcaaacagctggtctcactcccattgtgcccccagcagcagcaccaaggctgtctccaggcagtgggcaagcaggaccgagtactttccccaggctacccgcctcccagctgtgaaaataaacagggctctccttcttccctgctctgttgagtctgcacactggattcatgccctccccctgagttctggccaagagacttctccatcagttgaaattgttacaaagttcagctggagttttccttctccctgcagctttcccagtgcctccagcagccctcctcaaggacccctgtgaggccaggcagaaatggcgtggcaggggacccagcgagcccagagggattttgccgctgcttcctctacccctgtatttcacgcagctctctaaattgactcagctccaggtaaggtcagaatcttctcggataatctagaccttcaggttccccagtggggctgtgtgtttgggggcagacgacctccctttcccacttccacagtttgggcgctcgtagtatttggggtgtctc

SEQ ID NO: 413 - DNA, 1300 bp, Homo sapiens
tcaacacatatttattaaacaatcacttgggggcacggtacctccttcctctcctttccctccgagataaggccaactctaggtgttcccactatcttcaaccccaccccacggtaggctcacaagaacgtcattttgatcacttaagggatgaattttaggtttagatggaggataaacttttggagatggttcctcatatggtctgtctggagactttttgcaataaatggtgtccgtgccatccagagaacataggtcaccagttaatcaagacagtagggaataatgatttacacatgttgacaaattgattcctcttaataaccaggtcaattttttggccaacactatacacatgtacactatgcacataattacgacatctataaaagatagaattaatctaattttatgcagatatgggaagaactcgtcccaagtctcacagtcagtaagtgatggagcctagagttgaactgtttcacttcactaccatgttaatacttttctcaacacattctgccgctctcactctaagtgtgaggccctgtccaactaaaacataatatggtgagttcgtcattgattcaaataatcaactttcttcccgaatcccaagtttatctcttctgattaggaaaaaaaatgcattttgatatgtcgcgtttgcgtaaagcgaggccgaccgcacgcccccttctcgcgagctgctcccctcaactgcgacccaatcacccttgcacacgcctcctgagcccccgcggttcccaccgggcttcaggccacgcctccgccgctgcaccgcctcctctccccgccttcgcccgtagtctataaaacctggagcgcaggatcgcgcccaggagcggcgagctagcggacgcaaagactgggcatgctccgcggcggcgcaggttttggtcacaagtaggaagaagccagtgcaccagaccggcaaagagaagcgggagccgccgcggcagcgcggccgtggggtccgccgccgccgcatcggagcgggaggaggagcagcggggagggcgaggccgccgggccgagagccgtcccgcctgctctcggtcttctgccttcgcctccgcgcggtgcgtcggacccagggtctgtcacctgggcgccaggggccgccgccggggagccggagcgggcaggaccctccctccgccgactgcggcccgagagcgcccccgcggggtggagcggcagccgccttctgcgggcggctgagtgtccgtctcgcgcccggagcgggcgaccgccgtcagcccggaggaggagg

SEQ ID NO: 414 - DNA, 1300 bp, Homo sapiens
attttacagaggggtaaattgaggcagaaaacccaaagaaggcttagggacgattttcgaggctactcacttcatggtgtttctttcagagattagcagctattactgaactccaggaggcaacaggagggggatgggatggaggtggggacccgctgaagaaggcctaggtgggagacaggtaacgtggtacaggtacccaccccacaactcattaagggccatggagggaggaaggctctcaagtgccacgaaaattcccaaagcagcagagggcttgtatggaaacgccggttattcgtccctacccggcccccgccccccgcccccccgactgcccctgccgtcgcctccccgtgggcaagtggtgggggcctgggcttacaaccacacgttctcctccaactagcatcccttccagggtgcactaggatgcctctcagaggttctcccccgcctcccgaaggaaaggggaaaaccccgtgggcgtccggagagcctttgcgcctcgccaggtggagggaccggcgccacccagacccgcgagccgagaccctccccgcggcgtcgctgcgggaggggcggaagagcgcgggcggtgggcgggagcggtgctgcgaggcgggatctgcggggcgtccaatccccttcttcccccgcccgccccctccccgccccccgaacgctttccaccaactgcgcgcggcagtgggcggggcccgtcacggctgtcgtcttgggtgcgatttttttctcctcctttttttaccctcccgtttttttcttttcttttttttttccctatcctttttttgtgaatgaaaaaaggaggtcgcgagcggtacctgggactgcagcgccaggcgtcttcgcggcagcgccttcgccgcgggcccgggcgcgtagcggcggcggcctcgcccctctcccggcgcccctgcgcgccgcccgctgcctccgcagcccggctccgcgcgccgccgtgacattgggcgcctggcgcgcggggcgatgctgatccggaaggggcagcggctgcagtgcagcgcgcgcgtccgctcctgggcccacgtccggcctgggctgccctgccggagtttctgagtggccgcgagctggccgggaggctggagcccagcagcagcgcggcggcgccggcgtcgtcccaacttgcaggcgcggagggacccctgacatttcactaaaatgagcgtgctcagcaggaagagatgtgttcctcacgctagaagccaccccgtcacatgtagtggtgtaagtagatggctgcttgcggttatgg

SEQ ID NO: 415 - DNA, 1300 bp, Homo sapiens
gtcctgggctcagtggcaaattcaacgctgggcaggtggcctgaggacaatgacggtgccagctgtgagtcagacttcctttattcataaaatcatgttcctccatgcagtgcttctcaacctggctgcacgtcaggagccacctgggtagctttgtaaaaaccccaatgcccagttggtttgcaccccctgagattctgattaaactgttctggagtccatctctctctttttattatctatctatttatttattttttaatttggcggctcctctgggacttctcatatgcagtaggggttgagaattgctggtttctttggccagatgggaacatgcaggccaatagttacgcacaaacagagcagcagagcaggacggtgctaaggttggaaagggtgagtcatgaaagttcaggaaatcagaataggaaggggtgagaatcctctcatctgggcttgtggggcaggagagaagagcccagtgggcaaggtccagtgagtgtgcttagaactgggaagatgaggggaagggtaagcgctgggcggcggtgggcaagatggacgagattaaacgggagcgaggatttcagcgagagctttggcgacacggaaggctgagaatcggagggagcctgtcgggcgaaagcgaaggcggctgctgggcaggcagccgaatccggctggagagccgagctggtgagacctacaggaagtgaagggagtcgctcagggcgtggcgcaacgagactcttagaagaaactctgaggcagagatggggggcctccgcccatacggagacacaaggaagtccacatgcacacgcacgagcgcgcacatgaacacgcacaagcacacaaacgcctcctccgggcagggcacacgcgcccgctgcacaggccgaggccctggactcggaggggactgcagagccgacccacaacccgggccccgatgcccctcccggccgcgcccctacgactgcttgcgcaacaggcggcggctccagtgggcgcccgccgcgcgctgccggagcccagcccagcccggcgcgcccgggaggagggagcagggagcggggaaggggtgtgtcccggctgcgtgctgggactgcgagggtctgggaggggcgaggcgcgggggcggggccgcggcgcctataaagtcgccctccgcccggacgtaaacaaacctcgcctggctcccagctggtgctgaagctcgtcagttcaccatccgccctcggcttccgcggggcgctgggccgccagcctcggcaccgtcctttcctttctccct

SEQ ID NO: 416 - DNA, 1300 bp, Homo sapiens
taggcaaattaatatttttctctcattttcttcttataaaattaaaataatttctaatgaccaacagagtattttaaagagtattcggggaaattcagagacccagttgtactaggactacagcttctgaaaggcagatgtcctggacagtgcctttcttctattttcttctgatgattccataagaactttggaaacatttgggttagctgaagccagccttatctgggggctcagaaaagaggggaatggttcatcatcgtacaactttaaggaaattctgagagggaaaaggacagggaaaagaagagggaaagaggtaaagggagaggaagcgggaagaagagtaagggagagagtgagaaaaagagaaagagagggagagggagggagggagagacagagagagagaattaaaaaaaaaaatctaagaatcaagtttcaagactctttatgtgctacagaaaaggatgaggtttaccagcaaagtgcaaaggggatcctaagagaagagacagatttttctcctgccatcagaaataataataataagtggggggagtgagggagggaaaaaaagcaagcaaaacaaaacaaaaacaggaatgtgtgttttgagcaggaatgagagctgggaggaccgtaagggggtgtgtacagaatttcattaaattgttactttaagattgtctccttaaaaaaaaaaaaaaaaaaagagagagagagagagagagaaaaggagggggtggtggagaagcgggagcgaaggaaaggaggcaaaaggcaaagtgaaggaaagctggatagctcggcctctccaaactgattgattagtcatgatccccgcagttttaacagggactcattcaattgggaaggtggagcgctggggagcagattagcatacgcttgtttactcatcttctgagggattttttccccctctttcctttcattttgagaagaaggagggaggggaggggggacttggggggggagaagggggctgtggcttgtgttataaaggacgcaaaaaataaataaattagagcatcttttggggggagggaattcagcggatcagtcttaagaggagcttttttttggagcgagaaatcatataaaataaaatgaaataaaacaaggaggaaggcaaccagctgttaggggaaaaataaggcagataaaggagcggggagagaaattaattgccaaccaggaggagttgggctgtatttttcaaaggtggggagagtggagcacacaccttgaggaggaaagcgagaaagaaaagaaaaaa

SEQ ID NO: 417 - DNA, 1300 bp, Homo sapiens
ccctcgaggtggtcccagaggcaccattagcaactcctaggatcccacagagcagttggaaagcgatgagtctaggataacctgatacaaattttattagagaaaaataacttaaccccccctccttttccatcctttatttattcatctttctcttttggggccacatagggctgtatgacaaatgttcttatatctcacgtgaccgaggatgggtcgtgggcattcacaccatcagtgaccaagacaacaaagacccacgctactttttctccttgaagacagaccgagcccggcaagtgaccaccatcaatgcccaccgcagctacctcccaggccagtgggtatacctagctgccacctatgatgggcagttcatgaagctctatgtgaatggtgcccaggtggccacctctggggaacaagtgggtggcatattcagcccactgacccagaagtgcaaagtgctcatgttagggggcagtgccctgaatcacaactaccggggctacatcgagcacttcagtctgtggaaggtggccaggactcagcgggagatactgtctgacatggaaacccatggcgcccacactgctctacctcagctcctcctccaggagaactgggacaatgtgaagcatgcctggtcccccatgaaggatggcagcagccccaaagtggaattcagcaatgcccacggctttctgctggacacgagtctggagcctcctctgtgcggacagacattgtgtgacaacacagaggtcattgccagctacaatcagctctcaagtttccgccagcccaaggtggtgcgctaccgcgtggtcaacctctatgaagatgatcataagaacccgacggtgacgcgcgagcaggtggacttccagcaccatcagctggctgaggccttcaagcaatacaacatctcctgggagctggacgtgctggaggtgagcaactcctcccttcgccgccgcctcatcctggccaactgtgacatcagcaagattggggatgagaactgtgaccccgagtgcaaccacacgctgacgggccacgacggcggggattgccgccacctgcgccaccctgccttcgtgaagaagcagcacaacggggtgtgtgacatggactgcaactatgaacggttcaactttgatggtggagagtgctgtgaccctgaaatcaccaatgtcactcagacttgctttgaccccgactctccacacaggtaagaccttactgggctaaagatgcccagttgaaagttgaacttgatgtcctccatattatagat

SEQ ID NO: 418 - DNA, 1300 bp, Homo sapiens
tctgtgacatgggcggccttgacacgctagatctcagacgtatcctattcacagcagggtagaggtgtaggttttccacccatagaaatgatctgtggagcatcaggcagctgttactaatttcaatgtattgataaggaaactgaggccccattagtcaggaattattgaatttgagactgagagttaaatatttttactcttactttccctaatttaattcaattccatcaaaatctactgagggctcaccaggtatcaagctttgtgcggagaactgggtaaacagagattaataaggcacctcgccttcccccaggtggccacaagtgtgtattatgtaatagaaagaggaagcaatttattgaaatggcaaatgagagacagtgctctgctagtaggaggtggacgagtatggagatgttaaaaggggtgcaggtgaggagagcatcagggaagtcttcctggaggagggataccagaacagactttggatttgttcattagagaacaaaatgctgatcagagtcccagcagaggaaacagcatgaataaaattgccaatgggataatgcaccgtacagggtacagagatgttttctgtatgcagtggggtgctcaagaaaggttgtagagatagatgaggctaaggagtaggttgtgtcttggaggctatattgggaacttgaactttgtctttcatacatggggagaccctttattattctaagaggggaagagcaggaaaccatcactaatgtgtgctactggctgggctctgtgagaactccttgggagagacagcattaagaaaaaggaaaacattgctaagtagcaacttgaacttagtaaggtatgaagaaggttctctaagcctctggagataacgatactacctacctctgtgttcataagaagcctaacaactttggcaagtctctaaaactctcgagaacttaattttatgatctgtaaaatggaatcatcttacttataatattattgggggaattcaataaggtagtatttttaaagtgcttagcaaaatgcctggcactcatagtagctctaaattatttggagagggcctgttatctttttgggggcatgataacagccaaggttctttttctgtttcagagcctacttggatgttaatgagctgaagaacattcttaaattggatggatcaacacatctcaatattttctttgcaaaatcctcagaggaggagttggcaggagtagcaacttggccatgggacaaggaggccctgatgcacttaggtgagtcttagaaa

SEQ ID NO: 419 - DNA, 1300 bp, Homo sapiens
ttttgagacagagtctctgtcacccaggctggagtgcagtggcctgatcttgggtcactgcaacctctgcctcccgggttcaagccattctcctgcctcagtctcctgagtagctgggactacaggtgcacaccaccacgccagactaatttttgtatttttagtagagacagggtttcaccatgttggccaggctggtctcgaactcctgatctcaagtgatctgccctcctcggcctcccaaagtgctgggattacaggtgtgagccaccgtgcctggccccatggcatatttattaataagtttaaaattgggcaggggtccctcagggctgaaattcaaccttgagttttttcttttgctaaggtgcgtttttgagagacttccccaagcatctttcaggtgggagaaccactctcactgcactccctgaatcctttttcccccttcatcgtggctttctctactgatttcctccgtgagagaggaagggagcagcatgagacacactgaacttctgccctgtgccagtcctcctacatctcctggaaacctcccagcagggcttgaggaagattattgtcacctccatattacagatattataataagagaaataactaacattgactgcatgtttactatgtgtcaggcactatgctgggtgtttttcaagcatcatcccattcgattcccacagcaatatactctaaagttgaaactattgccctggatgggaaaacccgaggctcagagagaagtgtcacatcctaggacacacagcaagttataagagctggcatttgaacccaggtctttctcagagaggctgagctgcctcatcactcatttctggacgaactaagggcttttctccgtggaaatggggagaaagaagattcgatggagaagcctaacactgattcctgctcaaggcaagtccaggcactggcgcatcttgccagaactcagtctccgacccaggcctttccctgcactggagaagcggcgcgcatgcgcccggcctccctcccggccccgccccgcgggaagctaccgctccttgctttcagctctggggcttgcgcactacgtccccagccagaggctccttcccggtcggggacttccggaacgccggggtgtggttccgggtcgtgtgcggctcggggtaatagggctgctgctcggccggccggcggcggcgagcagcaggggcatgagggctaacccgggaagcggcagctgagcgggccgggaggagcgccggtccccgtggatcccgagagtgcagagctc

SEQ ID NO: 420 - DNA, 1400 bp, Homo sapiens
ctcccaaggggctggaattacaggtgtgagccaccgcgcccggcctggtgatgctttctactgaagagtcagttgataggtctttcggggagatcttgtgatgaagaatcaaagcatttgactggggaaagagttccaggatagtcaagtgatgctcaggaagtcagtggagccacgtgctggttccccatccctgctatagcaaattaccacagacttagtggcttaaaacaacacagcttcattctctgacagttctggtggatgaagcctgaaatgggtctcacagggctaaaatcaaagtgtcgggagggctgcgttctgtctgaacgcagagagtttgtttcgtccccttttccagtttctagaggcccctggtattccttgggccatgatctctccttcatcttcaaggccagcaggttagcgtctctcctgtctgacccctattctgtcctttcatctcctctcttaatgctgcctctgtttttatatcttttctctaattttactgcctccctcttggaagggcccctctgtatactctgggctcacccagataaactaggataatttctcccatctcaaatccttacgaaatcccatgtgaaaagtcccttttgccacatagtcacagtcacgggttctagggattgggacatggatgtctttaggggtggagggcgtccttcagcctgccacagatggcaaagtcatgccattgtggctgcagctccattgtccaggctgagtgtgggggcgcatggcgtggttctcatgcccaccacctaccctgaccctgcggaggtgggcaggaggcagcgataatcaccacgtgcagaggtcctgccaggtgcccagcctcatcattccctagaaggcaggcaccaccacatgctcccacactgtagataaggaaacagctttgaaacagatttgaaagtgtttgaggatttgcctggaaggagggctccagagccagggactgggtccgggacacccggagactctctgcttcttggagctccggcaactgcttgtctttctcttcacaggagaagggggccctgctgccgctgccgtggggcggggcgtgggcggtgctggctgcaggaaggctctcccctcccactttgtgctttccctgcaggctgctcctctgtcgagctgatcacacccacagttgagctgcgctggccagagatgcctgcccacagcctggtgatgagcagcccggccctcccggccttcctgctctgcagcacgctgctggtcatcaagatgtacgtggtggccatcatcacgggccaagtgaggctgcggaagaaggtatgtgcctccctgggggtccccggcctgggtcatacttgcttctctccacgtcctgtcaggaaagcccc

SEQ ID NO: 421 - DNA, 1300 bp, Homo sapiens
aatgagtgcctaggaggaaatcagctcttccttcctcgaagagttttaattcatgggtatgatctatttctttctttctttattttgttttatatattttttagagacagagtctcggttttttgtccaggctggggtgcagtggcatgatctcggctcactgcaacctgtgcctcccgggttcaagcgattcttctgcctcagcctcctgagtagctgggattacagtcatgtgccaccacccccggctaatctttgtatttttagtagagaatgggtttcgccatcttggcctggcgggtctcgaactcctgacctcaggtgatccacccgcctcagcctcccaaagtgctaggattacaggcgtgagccacctcgcccagccggtaggatctatttctgaagacaatgtggaagcagagtgtgggccctccacaggtgtagcgaggcggcgtgctaccgcgaagaaggagggaagacgcctgagcccagccggtgccctgctgcccctctgcctcttcggccactggggctgagcttcagccttaccaatccccgccgcgcacgcgcgctcgcttcccgcgcgcaacctcccacccccgccctcactgcacctgccaggtcataaacctcttcccacccactctcactctctacccaaggctcaggcttgtctcacgttgattggccagagcccacgagggcacgtccaatcagcaatcccccctgcgcaacctatcccggttcttcccgcccccgccccgccccgcccgcccccccgggtacctaccgtctctgtgactggtgcgcggccaggtcactcagggcggcggggcgaggtgtgcgggagtgggcaggacgggtgggaggaggggaggggtgggagaaggcggggctcaggtgcctggcagcgcggccggggcccaggaaggggagggggcgaacgctggagcgaggcgggggcgggtgaggagggggtgacgccggacgcgtcgacagcgcgagggttcgcgcgtgagctgcgcgggtcgggcctggtaccgagctttcctgggggctagcaggtcgtggacgccggctcctggaggagagccggtaggagggagtgtgaaggtgtccgcggcgtcgtcgacggcggcgccggccatggaggagacgcagccgccgccgcagcctaagctgcccctgtgcgacagcctcatgatctgggtgagtgcgaggaggcgagagggcgagggggccagggggccgaggcgaggagcctggggcgcccggttctcccaggtgagctggggctacc

SEQ ID NO: 422 - DNA, 1300 bp, Homo sapiens
tccccaatatctctctgccaagttgcagtaaagtgggataaggttgagagatgagatctacccataatggaataaagacaccatgagctttccatggtatgatgggttgatggtattccatgggttgatatgtcagagctttccagagaaataacttggaatcctgcttcctgttgcactcaagtccaaggacctcagatctcaaaagaatgaacctcaaatatacctgaagtgtacccccttagcctccactaagagctgtaccccctgcctctcaccccatcaccatgagtcttccatgtgcttgtcctctcctcccccatttctccaacttgtttatcctcacataatccctgccccactgggcccatccatagtccctgtcacctgacagggggtgggtaaacagacaggtatatagccccttcctctccagccagggcaggcacagacaccaaggacagagacgctggctaggtaagataaggaggcaagatgtgtgagcagcatccaaagaggcctgggcttcagttgtggagagggagagagccaggttggaatgggcagcaggtagggagatccctggggaggagctgaagcccatttggcttcagtgtcccccaaacccccaccaccctcttcctaggccgccctccccactgttaccaacatgaagctgctcgcagcaactgtgctactcctcaccatctgcagccttgaaggtgggtgtgatatggagagggggccaaaagggagaatgtgctggtggttatagctacctatctgcctgtgctcttatatccaggtctggcaaccaaagggctcaaaaggaagatcattccctctctaaagcccagaaagcccatccaaagatctggctggatacctttttggggagggggcagagagctggggtgggtactggcagaggtatggcaggaggccaggattcactgctgtggacccagctgaaaagagtgtgtgtgtgtgtgtgtgtgtgtgtgtgtgtgtgtgtgggcaggagctttggttcggagacaggcaaaggagccatgtgtggagagcctggtttctcagtacttccagaccgtgactgactatggcaaggacctgatggagaaggtcaagagcccagagcttcaggccgaggccaagtaagtctcagggcaaggggttcaggggctgtggaactgtggagagaaagaagggaagatgagaggtcccacagaagtctgaacccaggggtggggattagggcagattaggcttaaattgcagagaaaaagtatttcatcaccca

SEQ ID NO: 423 - DNA, 1300 bp, Homo sapiens
tataaagtccagcaagactgaggcctcactgagcttcaatttccttacctgtctaaccagaatagcaacaacttgtttgtatatttgagctcattacatgtcattttgtaaggcactaaagctcctggaggcttccggaacacagaaataattaatctaagaatcctaaagtggctgtcctggtagcacctctagggagtcctcccatcctacgtaacttcctctgggaaagtagaaaacacggcacctgggaaggggcgctgaaccgtgccccaagtcccagtgggcctggatgcccaagagcaagaggaggcccagaggatggggacaggccacgacctgtggcccaagtcccgcccagagggagtgcgccctgagggagagccaccggagctggtgactcgggggcgggtgctctggggtgtcgctttgggttcagcaatacaaatctgccagctggagattaggcggggcacgccggggagaggtgatgcactgccgctgaagacccaggtaggccggtgcgttcggcctgggtgaggaaggcgcgggacccgggtgcgaggactgcgtagcgtccccggctcccgcttccgcccgctttccacgcccacttctgcaagtcccctccggcacctcggcgtccaccggactcctaggggcgagccctcatttccgaggaatgggaccgccttcgtgcccccggggctgccagtccctagactagccctaggggcttctcgtcccggcggagccgggcggtgcctcctgcctgcgcctcgcacctccccgcctggcacggcccacccgggcacggcgccgccacgcgtgaaggcccgcatcggctccctacgtgggggacgtgcaggatgatgcggggtcgggggggatttcgctgcgtcgcccgccccctttccggcgcaggagggagcggccgccgcgtccccgctccccggccgggacgccaccgccgggcgttgcagaggcgcgccgcaaccaatgggcgtggaggaggtgggtcggctggcggctgtcaccctccaggggacgggagcgcggagaccgggagcgcgcgagctgtcgccgcgccccgggccgagggggaggagccgggggaggaggaggaggaggagccgccgagcagccgccggaggaccacggctcgccagggctgcggaggaccgaccgtccccacgcctgccgccccgcgaccccgaccgccagcatgatcgccgcgcagctcctggcctattacttcacggagctgaaggatgaccaggtcaaaaaggtgagcccccgc

SEQ ID NO: 424 - DNA, 1300 bp, Homo sapiens
gatgacactatgggggtgatggtgtcatgggacctggccaggagaggggagatgggctcccagaagaggagtgggggctgagagggtgcctggggggccaggacggagctgggccagtgcacagcttcccacacctgcccacccccagagtcctgccgccacccccagatcacacggaagatgaggtccgagtggcctgctgaggacttgctgcttgtccccaggtccccaggtcatgccctccttctgccaccctggggagctgagggcctcagctggggctgctgtcctaaggcagggtgggaactaggcagccagcagggaggggacccctccctcactcccactctcccacccccaccaccttggcccatccatggcggcatcttgggccatccgggactggggacaggggtcctggggacaggggtgtggggacaggggtcctggggacaggggtctggggacaggggtcctggggacaggggtgtggggacaggggtgtggggacaggggtgtggggacaggggtcctggggacaggggtctggggacaggggtctgaggacaggggtgtggggacaggggtgtggggacaggggtgtggggacaggggtgtggggacaggggtctggggacaggggtccgggggacaggggtgtggggacaggggtgtggggacaggggtgtggggacaggggtctggggacaggggtgtggggacaggggtcctggggacaggggtgtggggataggggtgtggggacaggggtgtggggacaggggtgtggggacaggggtctggggacagcagcgcaaagagccccgccctgcagcctccagctctcctggtctaatgtggaaagtggcccaggtgagggctttgctctcctggagacatttgcccccagctgtgagcagggacaggtctggccaccgggcccctggttaagactctaatgacccgctggtcctgaggaagaggtgctgacgaccaaggagatcttcccacagacccagcaccagggaaatggtccggaaattgcagcctcagcccccagccatctgccgacccccccaccccaggccctaatgggccaggcggcaggggttgagaggtaggggagatgggctctgagactataaagccagcgggggcccagcagccctcagccctccaggacaggctgcatcagaagaggccatcaagcaggtctgttccaagggcctttgcgtcaggtgggctcaggattccagggtggctggaccccaggccccagctctgcagcagggaggacgtg

SEQ ID NO: 425 - DNA, 1300 bp, Homo sapiens
gagctaaagtgacagaataggaggggtctggtttctgggcttgggataaaggagtaccccactcttttgttgcagttagatatatcctttgtgagatatgaaccctattggagtcaagagatccaccgggttaataaatgatagaacaatctcagtcgctttgaagaaagagtaatggaaggttataatgacttcaatctcaggggaaaagatggagaattaatgttctaggagtggcagggctcctagacagtacagagaaaaatatgtgaaaacttgctctgtgctgatccattaagtgaaggaacacacacacactttttgtccctctttctcaacctagcctcttgtgtccctgctcctctgattagagtgtctgttgcttcctctacaataaagatatttactaacctgggaatgaggtggtgagaacaaggacctggagagtgtcaaactccccatcttggctgttttacacagtgaaattgaggctcaaattatctttgctgtgaaccctcctttcttttctgagcaagtggaaagtatagtaattaggacttcggagtgaaaaagctctgggcttaacatctaaccagttcaaccatgctgagatctcaatggtccttctctataaaagtgagactaagaagtgctcacattgaatcattgtcagaatgtttcactgcagcttcaaaatgggcatgggagggggcacaacttgtctttaaaaaggaagattctaacagctttcatcactccatgcaagtaatttgctattttattgcattctgcaaatcagatatcattcatatctttcccactgccttgcttctattacagatacttgaatgggaaagaggtgagggtagtgcctacataatctgaccctccttccagtatctggcctgttggtttcacacagctttggttttcatggtatttccatgacctgtgaggacaaaaagcattgtgatgttttaaaaagagaagctcaggggcatacagccagcctctcaaccatgcagagccaattacttcaacatgggcccgtgagaggcagggctgaattccactagaactgacaccagattcttttgccagcctagtacaaggtccacattacaagccaaagctcagaaatttctggaggtggtgtatcaaaatttactctgcgagactctgctgaactggctgcatcagggagaaatttcatctcccagaagggtgttgctcatcgtttcttcccggaaacatctgcagagactagcttttcaggtgaggactcattacaaagtatcag

SEQ ID NO: 426 - DNA, 1400 bp, Homo sapiens
atacctgcttaattgaattcggtatttattgcatttctagatgctataagcttgagactagcagaaagtgatgcagaattcagaatgggtgatatggcaaatgccttattaaatatagggctcggcgcggtggctcacacttgtaatcccagcactttgggaggccaaggcgggcagatcacaaggtcaggagtttgagaccagcctggccaatatggtgaaaccccgtctttactaaaaatacaaaaattagcggggcgtggtggcgggcgcctatagtcccagctactcgggaggctgaggcaggagaattgcttgaacccgggaggcggaggttgcagtgagccgagatcgcaccactgcactccagcctgggcgacagagagagactccatatcaaaaaaaaaaaaaaaaaaaaaaaaaggatatggattgtattccataaacagttgaacctcttattcctactgccctgatagttggtctggctcctagaaattcagattttcttccctccaggtgagattatgcgaagaaaggaacactggcaaaattatttccctgattttcttctctcaggctgtctttccctcccctttaagattgtgtactccgtctcaaaaaaaaaagaaaaaaaaaagattgtagacccagcctataaattcataggatcaagaattcttactaacactctttctaacaaccttaaatctctgatagtagcacccacttgacttcgttttgtatggatagatttattctaatctctctgtagattgttttaatcccaagcagatgcgagagcataaaatagtgtatttgccctccctccaggcttttctggtagtattttgtctgtgaaactaagaggctctagctgctattagaagagggaaggagtaaggatgagcttttgaaaaaaaaaaaaaaaaaaaaacccagggtggagagagtggaaggatgtggttttaagagaggggggagggagggcgttattgtctgtggggcgggggcgggggtagttctgataacacagaattccgagagatcacaagattgcttcaggggggtggggtggggtggggtggggctgggggcttgtcgccctttcaggctccaccctttgcggagattataaatagtcatgatcccagcgagacccagagatgctgtaatggtaagactttggatccttcctgaggacgtggagaaaacttgctgctgagaaggacattttgaaggttttgttggctgaaaaagctgtttctggaatcacccctagatctttcttgaagacttgaattagattacagcgatggggacacagaaggtaagaatgatataattactggttatttttgcttgtttgggatacactcagaaaggcaaatattaatggt

SEQ ID NO: 427 - DNA, 1300 bp, Homo sapiens
tctataagaccaagtatatagaaaataatttaaaacctaataaaaggtgctaaaatagtattatcaagtaacaaattacaattctgattgtaattctaacttaaaggatattttgtatgagcttcagttctgctgctttagagaataataatgtaaaaatattgattttagctacatctgtaaagatggctcaaaattaagcttgcttgtgaatgcaccaactctctgtaggtacaatataggatatatgtgtatgggtgtgtaaataaattggaacatatatatttacaaacatagaaacacaagggaaaagcaaacatatgccatttatctgcagtctgatcctgatgatttttcttcccatgtttgaacatttacattgactgaattattctttatcaatttgataatatttgaaggaaatgtacaaacatgacaaagatttatttttactacctcattaaaattattgactgatgattattgaccagtcaaaattatgttttttttcatgttacacccaaagacatactcaaatttatgcttttttatagggaaagttttaagaaaagtaattgagaaaagggggctcaagatctctggctatcaccaaaattcaatttgtaagtgtagaataaaataactaggaatattttttaaaagctctagaaataggaatcaaaagaaagaagaatatttaggaaatccaaagggatttaaagcataaaaatatgtcccaatcagtctacatgtaatctaaggaggcctgcaaacttaatgaggggagttgccaatattgtatcactttggaaatgatgaaataagcattggtaactgtatgaatctaggagtctggtcaaaaggacaagggctaaaaggctgaacttgggtcatgccctgcctatcccaggaagtgcttacctatgtcctgaatcagagggtttttctgttgacagctctggattgtttgggtagatactgacagggcagataccgtcctcacaatacctgcccagaaagacgagaaagaggaggaagaattcctccttccaccaggaattctgtgggaagcacataagatttcatgctactagtttattcccaagagaagctaccaaagcctggtaactctaccaactctaacttttgtgcctgtaagttctcttctcctgggattacaactaattgaaacaggaattcaaaggagtctcggaggactgtaagaagaatgcttcgaggccgatccctctctgtaacatccctgggtgggcttccccagtgggaagtcgaagaacttcct

SEQ ID NO: 428 - DNA, 1300 bp, Homo sapiens
tacaagggacaagatgactctccttaacaatctttcagaaggtccccacggcggagacagtgacagccgtcctcccgcggatgtttttggaaatagaaatgttaacaccaggagaggctcctaggaagtgtcagtgcggcagcaggtggagtagccctgcgtgccgagcaggttctttctgacctagtctcaatgctccgcttcccggccccggttccgccttacagagatcttgttaagccgtcttgcgtccctgttctctaacccagggcgagacttccaaccctccagggaggcgaggcaatcgaagcagacaagacggccacctcacctcttccggggactcgcaggcccgctccctggccatgtcagagcctgatggaccaggctggaggggacgcagccggctcccccgggagcctcccagccagaacccccgcgccccacggtccctttccactgcccccaccccttcgaaacgccaccgccaccaccctccttactcctgaatcccctctcctcaggagtaccccagtggagttaccggcccactcaaaagtaagagcgacggccacccctctcggtcaccctggccccactgtcaccgccctgctcccggcctctgcctacgccgctggctggctccggtgacgcccgggtcggtaccttgcggacccccttgtagatatagaagtacagctcccggcccacattgaagcagaggcggtcgccgttgccagactggtcgttgaggtttacgaaggagacgcggacagggttggatccctgcgagttgaagggcacccggttgggccggctgtactccgagtgcggcagcagcttgtacagaccttcccgggtggtgaattgggtcttaatctcgttcatctccttccctcctccctccgtcgccatcttggaaagcagcgttcatcctgccctaagtgcccggatcacgcccaccgcgcaggcgctgttcctggtgctccctcttcccccaccccctgcctcttccttctcgcccctcccacccgcgggccagccctgcgagggcgggccaaagggaaggggtgggcttgtttacggcccgactgcgcaggcgtgctcacctggcgtgctccacccgactgggcgtccgcaggctcctcccccgggtgtggcctccgggcggcatggctgcttcccaggtgatgccggcttcagctagtggggtctagttgaccgttccgcagccgccagggccagcggaaagccggtcagggggaaccgcggcggggctggtgtcatgagcctgaggtga

SEQ ID NO: 429 - DNA, 1300 bp, Homo sapiens
ttccagtttctcctcagacccaagcctgcccaatgtgcaggtgaccaggctgacactcctgtcggaacaggctccggggcccgtcgtcatggatctcacaggtaactcgcaggatgctgcaccctgaacacaggtagggccctcccaggcacgcttctgcacccctgagttccgagccctgggccatcacagtcgcacacctcatgggtaccacaccctacgtgggggctcctggagcaggtctcagcctgtaggggagttccgaccctagctgaggtttccccaataggggacctggctgttctgaaggaccaggtgtttgtcctgaaggaaggtgttgattacagagtgaagatctccttcaaggtgagagccggggcaatgggcggaggggatgggggtgggggcaacagccagaggcctggcccccagaggaacccctaatgcctctgttcccaggtccacagggagattgtcagcggcctcaagtgtctgcaccacacctaccgccggggcctgcgcggtgagggcagcggtggggggaacggggcgggggggggaagcgggggcagacagaggacagctctgatgccctcgccctccctagtggacaagaccgtctacatggtgggcagctatggcccgagcgcccaggagtatgagtttgtgactccggtggaggaagcgccgaggggtgcgctggtgcggggcccctatctggtggtgtccctcttcaccgacgatgacaggacgcaccacctgtcctgggagtggggtctctgcatctgccaggactggaaggactgaacccccagtccgtgtctcccctacctccctcagttgttgcacagggacccccaagcatccccagcaccccccgtgagtgaccagaccctcccctgctgcccctgctgcccctgctgcccctgctctgtcccgggaccccctggcctggcgctgtcccctgagctgtcccattaaacatggccctgtctctctcggtgccctgggtgtcgtctctttctgcctcccctcccctgggggccgggggcggccgcatgggccttgtctttgctgggactgggcctgtgtgccacgtggcagctgctgcttggcttctggcccccttatctgcccccgccccacgcgccctggcagcaccatgagccgccagcttctgcctgtactgctgctgctgctgctcagggcttcgtgcccatggggtcaggaacagggagcgaggagcccctcggaggagcctccagaggaggaaatccccaaggaggatgggatcttggtg

SEQ ID NO: 430 - DNA, 1300 bp, Homo sapiens
ggcttaagcaatcctcccgcctcagcctcccaagtagctgggactacaggtgcatgccaccacatccagataatttttttttttttttttttagatggagtttccctcttgttgcacaggctgaagtgcagtggtgcgatctgggctcactgcaacctccgcctcccagggtcaggtgattctcctgcctcagccacctgagttgctgggattacaggcacctgctaccatgccgggctaattttgtatctttagtagagatggggtttctccatgttggtcaggctggtctcgaactcccgacctcaggtgatccgccggcctcggcctcccagagtgttgggattacaggcgtgagccaccacgtccggcctcctttttataaatagaaaaatctcactgacctgccttgagtttaacatgccccccactgacaatccctctagatacctgagttctgagttctaggcctggctcggcctcaggcttattctgggacccaggcacatttctgcttctctggcctcactttttcttatctgtataatggagggttaggagtcaaggatctgaagatgccaggcaggacagcggggaaatggaacacgccccttgccagtgacactcggagggcgcaagagtcagtgtcgggctcatcgtgagcaggttctttctgcccccagttcagcaacccgtctgaacagatctggcgtcctggagaattctagaatgaaggggaagagaggcagggaagagctgggaaatacgcaaagcgcctttttctccactttcggagatggtacgtgcgcgcttccacgcagtggcggctgctgcggcgagcacgtcccctgcgggacccacgcggggagtgggctggcagtgcgcgcacagcggcggcgagtgggtcgtgcacgcggatgcggggtgggagtgggggcgcacgcgcgggcgtgggcgagcgggccccggcagtgcacacacacggcaggggcgggcgacagatgcagtgcgtgcgccggagcccaagcgcacaaacggaaagagcgggcgcggtgcgcaggggcgggcgcccagcgggcttggcatgcgcgcccccgcccgaggctataaaagcatcgccacctgctgccactagccaagccgcgcgtccagttgcttggagaagcccgttcaccgcctccagctgctgctctcctcgacatggaccctgagacctgcccctgcccttctggtgagcccccgcccccgctcgcatcctgcgcactgcgcgcccttgtacctgcaaagaaacccacgccct

SEQ ID NO: 431 - DNA, 1400 bp, Homo sapiens
gcatgtgtaaataagagggctgatttatgagggtacaattgtatctttcagatatatttgtccaagtctacatctttaaaataaatggaagcaattatctgaatatttcaagggagggaaccccaccttcccatcccccacccccgatttgagggaagtctagtatgttaggtgaagagaaaaaaaaagaaaagaggaagctctaaagggagttaggaacaaaacaaaacttccgttaagaaatatccctgcttctcttatcctaagagaagaaaaacagattcccaggtgccaccggggagcaatgttttacttaaaaaaaaaaaaagaaaaaggaaaaagaaaaacctgtaagaagttgtcctgttaaatcaacgacacatggagtctgaaggaaatcagccttttcgttacaaacaggtttaaaaagccctggagaagagagacgtgaacagaagcaatattatccactaacaacctaactcccgcttagacatcagctgagagatcagcagcatcattgaacaggggggtttgtcttaagataatgactcatcttgatttctttcaggatataaaacttgtatttaaatcaattcagagaagcacttgagctttaaacattagagagcagggagagcctatttaataaacagcattatttcattttcaaagaatgatactggcagtagctctaagtttaaattttgtattattttcctcaattataattatagatgggtctgaaaggaagcatgcttattactgtcatatttattcttttgacaggtgttatgggactgtaatttggtgaaatgattcaaaacgcagattcctatccaaacacaattcttgtcatcaacacgagaggttcaggaaaagtcctccagcaagcctttcagagatcttgaacaccccatattcatagcacaatccatattcaggaataaggaggagagagtgcctttagggcttatatccggcgtagcaacagccagaaggcagagtgggtgtttgaggtaacaggtaacgaaggctgttagtggggacagctttcaactgggtggggtcggatctaggaagaggcacccagtaggaccccgagtcccgcgcgcggccggcagagggcgctgggctcaccgtcgccgggcaggggcggtgccgctcagtccccggggcgcaggcgcactcgtcgccgcggcggcgtccggggctggcgttcccctggaggctggtgagccgcgctgcgcaggccgaggccgagggcgggggcgcgggggcagcggcggccggagccactgggtggcgggggcgggctagggatgtggaggcctcgggtgtcctcggatctattgaagacctaggggcgacccgcgccggcaccttttcccttgcggtct

SEQ ID NO: 432 - DNA, 1300 bp, Homo sapiens
aaacagtttccataagaatccatccattgtgaagttatacacaccattaaatcaatacagcttactcaccttgctccccatcctcaaatgtctggacttcagttttctcttctttttaaactggaagacaaatttgaccatctctaagtttctacctagctctaacattgtatttttctaagattttatttaaccagttgagatttgactttcgagagttaccatcctttgttagcaaaaggataaaactagggcccatgggcccttctgacttagccatttgttctgggtatgaattccctaagatttctctaaaggagtttctatacctgcctctttacttgtaagaaaatgaagatctgcataaaccaggcagacagtgttatgaaggttaatgccatgggttttaaagtacattttgaaaagcattcttcctttccaaccaccaacaaagggattccaaattacacctcttcctaaacgatgcaacatgagtgagcacataggcgagaggtcgcaggggatgataagagggttctagccctggagcctggctttccagagaggctgtggccaaggttttacgctcccatttggcctcctgttcatatgaaggaaggcccaggaccatgagttctcagatccgcgggctctgagcaaaccgggtgcaccctgactcggcttcatcctctctaactccacggtggcgacttgcatgggagagaggagcaaccaacaacaccttcgggctggttagggggtttaggagacattggttttgtacagacatgacttgatgctggattcccactttcagaagacaaactattcagttctgcaaactccacaatctagaataaggaattagataaccaaccccctccttcacttaacagttaaaaatcatacaggactctgaaaacaaaacaaaacaaaaacttaacctttcttagatcctaaaagcgttccttggatggaaaaccaactcttccactggctaaagatcaaaagcatctttttctctttaatggggccacagttgggcaaaacgcccatcactttaaaaccacctctcggctggaagtacgtaatttttagcgagtcacagaaaaatagggaaacttatgcggcgtttccttggccacttccccatctgggtgatcatgtactcagacccagcactgcagcctgggggtgctccccgtgaggaggaaaaggtgtgtccgctgccacccagtgtgagcgggtgacaccacccggttaggaaatcccagctcccaagagggtataaatccctgct

SEQ ID NO: 433 - DNA, 1300 bp, Homo sapiens
ctcaattcttgagtttctgaagaggcatatccaggggtgggttacgagaacaagagcctgcccagtctgaaagggatgcaggaaggggcggtgtgtactagaaggaaggaagctatcatcatttattaaaactcttcttggaggatggcccatgaagacctccaaacaagctggaggggccagtcacttgctgaagactagcgaagtggagggggaaagcccgagggagctgcagactcgaccactgcgccctcccctcctctccctgcaaggagcccaaggtgtgatcctgccaggcgttcgttcgctgcatgaccttggccatccttccattcccctgggtgtgaattctcattggcaaagtgagctggtgggcataagtgggttttaagtttaaaaatttaaaaaccctgtctgcccccaagtgtggtatcaagattttatagtatgacacttaaattgcttttttcatccgggcgcgtaacagcaacaatgaaaccagcagataacgcgtgagtagtatcagctctgggcctggcactattttatatgtattagctcattttttttaaaaaactgttttcaaccactccatgagatgagtgctcttatgatccctttttcacagaagaggaaacggaggtacaaagaaattagtgcacaaagccagtcggagagagcccctggccaggcaccaagctccagaggtcgctctggcgagcgtttgcttcgggatctgatgccctggagtcgccaactcaattcgcgggtcgcagccaggctccatgggggtagtagagccaggtcgtagtggctaggtgagttgtctcaactaactctagtggagccgccgcagccctggaggagccgggccgcgactcgagagcgcccggcagctctccaatgctttggaaccggcgggacccctgcgggctacccggggcagggcggtgtccgcaggggtctgtccagccgcgcctgctcctccgggtggagagttgggacacccggccagctcgctcgcagcccgcggactggcccagccgagccgtctccgcccgttccccgcccccgcagcggcggggctagagccagagccgcgcccggcagttcccggccgcgagggcgggcgcagcttgtggccggcggccggagccgactcggagcgcgcggcgccggccgggaggagccggagagcggccgggccgggcggtgggggcgccggcctgccccgcgcgccccagggagcggcaggaatgtgacaatcgcgcgcccgcgcaccgaagcactcctcgctcgg

SEQ ID NO: 434 - DNA, 1300 bp, Homo sapiens
acacctgaggatggggcccctgtctcccagtctctgtgggaggttgggggcctgacttcggtaagccccagtggcaaacccagatcagttggtttcacaggggccaaccctcccttcccagttttggtgattttctgtttccctaactctactgagtccccaccccttcccactccctcactctccctttaaactccaggcacatctagacaaatcagcatggagccagctttttctcatgttgtcagtagttaccaagtaaaatctgttttttctgcattaactagtgtctcactgggctctgcagggcagctcctacggtccctcaggcttggagggtcactttaaacaataaaaagcaacaggacacaaaaatccctggctggaaaaatccaaaaagcaggtctgttagcagggcaggcccggagtgacttcccctttctctaacattcccacgtggtcctgcacaccacacatccccccgaccctggggagtcctgggccccttcctggtggagcagcctctctcttgcagggaaaggccctggggtaccccaaggcctccaacagggagcctgttggagaagtcaccaaggccctctgagtctggggctccacagaccctcccccaggcctcctgcaactctccagctctgagagtctgatcccagcccaaggaccaagtgggaccctcccctgtgactctaccacaccctcaccaggtcaagccctactccagggagaggcttatcctcctggtctggacccccaacccagtcttgaagcgggatctctcaccgctatctggagcccctcatcacagcacagatcttcaacctcagctttccacaaggagtctggggaccccaccccggtccaaagatccccacccaaggtccgaattccccagttcccatccagattccccaccccaagtccggagactcccacccaacgtcagatcacttcacagcggtccgaattccccacaccctatcccagtgttccaccctaggtctgaaggcccccgccccgaatccggccgcattcggccccggtctagccagcgctctcacctctcccgcgacggcccgcccgggactggacccgccccggtccggcgcaggcagcgcggcgggcagccctagctgccccagaagccccacgacgatggcggcaatggcggtggcgctgcggggattaggagggcgcttccggtggcggacgcaggccgtggcgggcggggtgcggggcgcggcgcggggcgcagcaggtaggatggggtcggggcgtccccgcg

SEQ ID NO: 435 - DNA, 1300 bp, Homo sapiens
taccccttttcggccccatgtatctcagtaccccatggagctgggctaagtaaataggaattggtttcacgcctgaggcaattagacactttggaagatggcataacctgtctcacctggacttaagcatctggctctaattcacagtgctcttttctcctcactgtatccaggttccctcccagaggagccaccagttctcatgggtggcactcagtctctcttctctccagctgactaaactttttttctgtaccagttaatttttccaactactaatagaataaaggcagttttctaaacttcctgtatcctgttgtttgtgttgctctctccagggctgggggtaggaggatgcaaggacttcctggcctagctcaccctggagaggtttgttgagtgcaaaggactagcttgtgccccacctcccacccacccagcagctaatctggtccctcccaacaacatggaaatgattaccctgtaccgcattctggttcagatttgggggtagggtgaatgcagcctgaggaggccagggagggaggactccggcagcgtttccttggcctcggcgagctactgggctccacttaaggaggctggggcagagcttccaggactctgcccggttagaaaacccgcacgagggcggtgccgctttggagacagggaggagggagaccggaagcctagatccctctggctgtcccctgcactgccggtaacatggcacaggagaggagggctgtttgtgcacgggcagctcctgcagctgctgccgtcgcccaccagcctcctatgccaaaccccacatcctaactcaggaacctctgagaaaaaacggagccctcgagggccccagcccttggaagggtaacctggaccgctgccgcctggttgcctgggccagaccagacatgcctgctgctccttccggcttaggaggagcacgcgtcccgctcgggcgcactctccagccttttcctggctgaggaggggccgagccctccgggtagggcgggggccggatgaggcgggaccctcaggcccggaaaactgcctgtgccacgtgacccgccgccggccagttaaaaggaggcgcctgctggcctccccttacagtgcttgttcggggcgctccgctggcttcttggacaattgcgccatgtgtgctgctcggctagcggcggcggcggcggcggcccagtcggtgtatgccttctcggcgcgcccgctggccggcggggagcctgtgagcctgggctccctgcggggcaaggtactacttatcgagaat

SEQ ID NO: 436 - DNA, 1300 bp, Homo sapiens
acatttgaagtgaactgttgttttactacaaaagtcacagggctgtgtaaattgccttgtgtgttgttttcgtaggtggagtatcacttcctctctccctacgtatctccaaaagagtctcctttccgacatgtcttctggggctccggctctcacacgctgccagctttactggagaacttgaaactgcgtaaacaaaataacggtgcttttaatgaaacgctgttcagaaaccagttggctctagctacttggactattcagggagctgcaaatgccctctctggtgacgtttgggacattgacaatgagttttaaatgtgatacccatagcttccatgagaacagcagggtagtctggtttctagacttgtgctgatcgtgctaaattttcagtagggctacaaaacctgatgttaaaattccatcccatcatcttggtactactagatgtctttaggcagcagcttttaatacagggtagataacctgtacttcaagttaaagtgaataaccacttaaaaaatgtccatgatggaatattcccctatctctagaattttaagtgctttgtaatgggaactgcctctttcctgttgttgttaatgaaaatgtcagaaaccagttatgtgaatgatctctctgaatcctaagggctggtctctgctgaaggttgtaagtggtcgcttactttgagtgatcctccaacttcatttgatgctaaataggagataccaggttgaaagaccttctccaaatgagatctaagcctttccataaggaatgtagctggtttcctcattcctgaaagaaacagttaactttcagaagagatgggcttgttttcttgccaatgaggtctgaaatggaggtccttctgctggataaaatgaggttcaactgttgattgcaggaataaggccttaatatgttaacctcagtgtcatttatgaaaagaggggaccagaagccaaagacttagtatattttcttttcctctgtcccttcccccataagcctccatttagttctttgttatttttgtttcttccaaagcacattgaaagagaaccagtttcaggtgtttagttgcagactcagtttgtcagactttaaagaataatatgctgccaaattttggccaaagtgttaatcttaggggagagctttctgtccttttggcactgagatatttattgtttatttatcagtgacagagttcactataaatggtgtttttttaatagaatataattatcggaagcagtgccttccataattatgacagttatactgtcgg

SEQ ID NO: 437 - DNA, 1300 bp, Homo sapiens
ctctgggcagctggcctacagacgttccttagtgctggcgggtaggtttgaatcatcacgcaggccctggcctccacccgcccccaccagccccctggcctcagttccctggcaacatctggggttgggggggcagcaggaacaagggcctctgtctgcccagctgcctccccctttgggttttgccagactccacagtgcatacgtgggctccaacaggtcctcttccctcccagtcactgactaaccccggaaccacacagcttcccgttctcagctccacaaacttggtgccaaattcttctcccctgggaagcatccctggacacttcccaaaggaccccagtcactccagcctgttggctgccgctcactttgatgtctgcaggccagatgagggctccagatggcacattgtcagagggacacactgtggcccctgtgcccagccctgggctctctgtacatgaagcaactccagtcccaaatatgtagctgtttgggaggtcagaaatagggggtccaggagcaaactccccccaccccctttccaaagcccattccctctttagccagagccggggtgtgcagacggcagtcactagggggcgctcggccaccacagggaagctgggtgaatggagcgagcagcgtcttcgagagtgaggacgtgtgtgtctgtgtgggtgagtgagtgtgtgcgtgtggggttgagggcgttggagcggggagaaggccaggggtcactccaggattccaatagatctgtgtgtccctctccccacccgtccctgtccggctctccgccttcccctgcccccttcaatattcctagcaaagagggaacggctctcaggccctgtccgcacgtaacctcactttcctgctccctcctcgccaatgccccgcgggcgcgtgtctctggacagagtttccgggggcggatgggtaattttcaggctgtgaaccttggtgggggtcgagcttccccttcattgcggcgggctgcgggccaggcttcactgagcgtccgcagagcccgggcccgagccgcgtgtggaagggctgaggctcgcctgtccccgccccccggggcgggccgggggcggggtcccggcggggcggagccatgcgccccccccttttttttttaaaagtcggctggtagcggggaggatcgcggaggcttggggcagccgggtagctcggaggtcgtggcgctgggggctagcaccagcgctctgtcgggaggcgcagcggttaggtggaccggtcagcggactcaccggccagggcgctc

SEQ ID NO: 438 - DNA, 1300 bp, Homo sapiens
tttggcaacaccactcctaaaggatctgaagggacaacaggaggcccaggcctggaggtagggtagccctgagcctgtgcctagaatgggaggcaaagatggtggcaggtgggtgggaaaatgtggggtttgggggtcacaggagagaccaaggggcaggcctggagcatggcacgctccctgatcacagctctccactggaaggccatggagggagtgatggggagagcctgcaactcctggagataagcctgattctgactttctttgaaggatttttttctttcgacttctttcctgtgaaagagaatatccgagaaatgagaattttaactaaagagaaaacctttgcatttgctactgataaatatctggcctatgcgggaaagtcatgggtgccctgggattctggctccactgctaacaagaccttgttagaccttcttaactgcccctccagagaggagaaaggctcttggaggtagagtgagattggggagcttggcagagccctaggatgaactgtgtttttgttttgttttgttgcaggttggagcctttttcctgcagaaagagaagcaattccgggcttttccacagataacctgctagggctcgcagagacctggattctaaccccatctcgcctttcctcacctggggcattgttttctgcgtttgagaactgctgggtgggctggtgttacccaggatttttaaatttttgcaggagacgctttgcaggagatctctagggcttttttctgtgtcaattaaagagcctggccagctggacctgggctgtctttttgacaaaaacaaacgtcatccccctcccagctgagcacttgttagaactggactttaactgagggcctgaaccccctaacaacgggacaaacagtatgaaatcaaaaccgtttaccctcctcccaccagcggtttgcgtagggccttgggtgcactagcaaaacaaacttattttgaacactcagctcctagcgtgcggcgctgccaatcattaacctcctggtgcaagtggcgcggcctgtgccctttataaggtgcgcgctgtgtccagcgagcatcggccaccgccatcccatccagcgagcatctgccgccgcgccgccgccaccctcccagagagcactggccaccgctccaccatcacttgcccagagtttgggccaccgcccgccgccaccagcccagagagcatcggcccctgtctgctgctcgcgcctggagatgtcagaggtccccgttgctcgcgtctggctggtactgctcctgctga

SEQ ID NO: 439 - DNA, 1300 bp, Homo sapiens
tctatgcccattttacaggcaaaatgatactcactcgaacgtttttgtcctctgtttccattcttgaaacatgccaaacctccagttttagggccttttcctaaaactggacataggaagggcccatgtctctctcttccatattctaattaagcactcagcacacatgccatctcttcaaagcttttccgaccgcctatctacaacagcctgcctccacagtttcacacactcttttacgttatttataaaagagtctcactcaatggaagctggatttcctctcctgtaaaatgaggtaggccctctcggctcaaggtcactccctgtgattctacacagagagggagtgggaagagagggcgctcggcagcagaggaggaggaggaaggagggaagggcgaaggcgggagtgggtgcagaagcggggggtctggcggtccaggggggtagaagggaggggcggattcgagtgggcgccaggtggaggtggggccagggttgtcaagggagcacgaaaggggtcgcggtgtgtccggcaaggactgggtagggcagcgcctgctatggactaggggcgagggctacgaaagggttgttggaggggtggatgcgggtggatcccgaaaccaagcggctccgaggggcgactagaggtggggagggggcgcgcaggagttgccaaggtcggacagaggggagcgcggtctatccggctgggaatgggccggacagggcgcggggttccggggtcgcggagaggcgcggaggtagatctgagccgagtggagggcgcgtgggggtgggtgcagaggggcgccgaagggatccgggcccagcggccggtggagaggggccgcggagaggcgcaggtgggagctgggcggccgagcgagcgcagagggggcgcggcttgcgcggcttgcgcggctgggcgggaacaggcgctcggtcgggggcggggggtgcgccggggtagccgagaggcggacgcaacagcggggtcccgcgctgtctgggcggccccaggggctgtcggctcacttccgggaacgccggggaaccgcagtagccgcctgctagtggcgctgctagccggccggcgcaggctgccgagcgggtgagcgcgcaggccaggccaaagccctggtacccgcgcggtgcgggcctcagtctgcggccatgggggcgtccgcgcggctgctgcgagcggtgatcatgggggccccgggctcgggcaagggcaccgtgtcgtcgcgcatcactacacacttcgagctgaagcacctctccagcgggg

SEQ ID NO: 440 - DNA, 1300 bp, Homo sapiens
tgaggaaaatcagatgttttagttctcttacagaccagcagtaatgttgaaaaatataaaagtagccgtaacagaaaacgaagtgatcatctcagccctcccttggagtggggggatatattgcggagctgagttttaatggctatcagttcttgatcagaaaagtgaaatcactccaactccttccgtattccacggaatatgacccgtcttgaactttgagaaattccccgggtctgtgtgaaattccagttccaaataattcacatgaatggttcacaagaatccaggtaggtttgatctagttccctagatgggaatgagagggatgtaaaatttgagaggcaacatgacatggactagagagagaatgaattaacactggggaagcacgtgggggcgcgccggacacctagaaggcactcaaaaagtatgaggtagaattaaaggaaagtgaaccttcctttggctgtctcggcctgattctcaccgcagcaaggagaaagggacagggtcaccttggcgggtgccaggcggagcccggccagacgggcgcggctggagggcagcgcgcaggcgcaggcggcgcacgtggccccggacacgcagcgctgcggcggggccagcgccccaaccccggagtggggccgaggcgcgcagcctctcaacgactcgacgccaacggggtctctcggatcgcggcgcgaggcaggaggggcggggcaggagggccgcggcaggcccgggccgccaaagttgtcagcaaggtcgagggccggacgtggggccccagagcgacgctgagtgcgtgcgggactcggagtacgtgacggagccccgagctctcatgcccgccacgccgccccgggccatcccccggagccccggctccgcacaccccagttcggctcaccggtcctatctggggccagagtttcgcccgcaccactacagggccgctggggagtcggggccccccagatctgcccgcctcaagtccgcgggacgtcacccccctttccacgctactgcagccgtcgcagtcccacccctttccgggaggtgagggaatgagtgacggctctcccgacgaatggcgaggcggagctgagggggcgtgccccggaggcgggaagtgggtggggctcgccttagctaggcaggaagtcggcgcgggcggcgcggacagtatctgtgggtacccggagcacggagatctcgccggctttacgttcacctcggtgtctgcagcaccctccgcttcctctcctaggcgacgagacccagtggctaggtaatg

SEQ ID NO: 441 - DNA, 1300 bp, Homo sapiens
gggaggtggaggttgcagtgagccgagatcatgccattacgctccagcctgagcaacaagagcaaaactccgtctcaggaaaacaaacaaaaaaacctgcacatatacttctgaatttaaaacaaaagttaaaaaacaaagatttcttggtctctggtcactacctccctcatcagctttgcgcctccactgtcaccctcaggaatgttccacatactcagcgagtatgcttggggggcaaaagggtgaaagatacaaaagcttctgatatctatttaactgatttcacccaaatgctttgaacctgggaatgtacctctccccctcccccacccccaacaggagtgagacaagggccagggctattgcccctgctgactcaatattggctaatcactgcctagaactgataaggtgatcaaatgaccaggtgccttcaacctttaccctggtagaagcctcttattcacctcttttcctgccagagccctccattgggaggggacgggcggaagctgttttctgaatttgttttactgggggtagggtatgttcagtgatcagcatccaggtcattctgggctctcctgttttctccccgtctcattacacattaactcaaaaacggacaagatcatttacacttgccctcttacccgaccctcattcccctaacccccatagccctcaaccctgtccctgatttcaattcctttctcctttcttctgctccccaatatctctctgccaagttgcagtaaagtgggataaggttgagagatgagatctacccataatggaataaagacaccatgagctttccatggtatgatgggttgatggtattccatgggttgatatgtcagagctttccagagaaataacttggaatcctgcttcctgttgcactcaagtccaaggacctcagatctcaaaagaatgaacctcaaatatacctgaagtgtacccccttagcctccactaagagctgtaccccctgcctctcaccccatcaccatgagtcttccatgtgcttgtcctctcctcccccatttctccaacttgtttatcctcacataatccctgccccactgggcccatccatagtccctgtcacctgacagggggtgggtaaacagacaggtatatagccccttcctctccagccagggcaggcacagacaccaaggacagagacgctggctaggtaagataaggaggcaagatgtgtgagcagcatccaaagaggcctgggcttcagttgtggagagggagagagccaggttggaatgggcagcag

SEQ ID NO: 442 - DNA, 1300 bp, Homo sapiens
acacacacacacacacaaatccaagacaacactactaaggcttctttgggaaggggaagtagggataggtaagaggaaagtaagggacctcctatccagcctccatggaatcctgacttcttttccttgttatttcaacttcttccaccccatcttttaaactttagactccagccacagaagcttacaactaaaagaaactctaaggccaatttaatccaaggtttcattctatgtgctggagatggtgtacagtagggtgaggaaaccaaattctcagttggcactggtgtacccttgtacaggtgatgtaatatctctgtgcctcagtttgctcactataaaatagagacggtaggggtcatggtgagcactacctgactagcatataagaagctttcagcaagtgcagactactcttacccacttcccccaagcacagttggggtgggggacagctgaagaggtggaaacatgtgcctgagaatcctaatgaaatcggggtaaaggagcctggaacacatcctgtgaccccgcctgtactgtaggaagccagtctctggaaagtaaaatggaagggctgcttgggaactttgaggatatttagcccaccccctcatttttacttggggaaactaaggcccagagacctaaggtgactgcctaagttagcaaggagaagtcttgggtattcatcccaggttggggggacccaattatttctcaatcccattgtattctggaatgggcaatttgtccacgtcactgtgacctaggaacacgcgaatgagaacccacagctgagggcctctgcgcacagaacagctgttctccccaggaaatcaactttttttaattgagaagctaaaaaattattctaagagaggtagcccatcctaaaaatagctgtaatgcagaagttcatgttcaaccaatcatttttgcttacgatgcaaaaattgaaaactaagtttattagagaggttagagaaggaggagctctaagcagaaaaaatcctgtgccgggaaaccttgattgtggctttttaatgaatgaagaggcctccctgagcttacaatataaaagggggacagagaggtgaaggtctacacatcaggggcttgctcttgcaaaaccaaaccacaagacagacttgcaaaagaaggcatgcacagctcagcactgctctgttgcctggtcctcctgactggggtgagggccagcccaggccagggcacccagtctgagaacagctgcacccacttcccaggcaacctgcctaacatgcttcgagatctc

SEQ ID NO: 443 - DNA, 1300 bp, Homo sapiens
aatcccagcactttcggaggctgtggcgggtggatcacctgaggtcaggaattcaagaccagcctggtcaacatggtgaaaccccgtctgtactaaaaaaaaaaaaaaaataagacaaggtgggggagaaatcccaaattttgctactcagaagtaactcaaacatttcgatgaataaacttctaaacgtctatatatattcatatgataccaacacttgtttttttttttgagacagagtctcagtctgtcgcccaggctggagtacagtagagtggtctcggctcactgcaacctctgccgccctggttcaagcagttctcttgcttcagcctcccgagcagctgggattacaggcacctgccactgcatctggctaattttgtatttttagtagagacagggtttcaccatcttggccaggctggtcttgaattcctgacctcgtgatccacccgcctcggcctcccaaagtgctgggattacaggcatgagccactgcgcccggcccccacgttatgtgttgtatgtgggatcatgtttctgttttttttttttttttttttcagcaacagtattatgaacatctttccatgtcaatacatggagatatgtgtcataattttgaatggctgcataatattccattttatatacataccctaatttttaaaatctatattcagaatgatggacatttaggttgcgttcatcactgaaacatcctccattaattcttttttctttttattttttactctagcctcccaatgtgctgggattataggcttgagctaccacacctgattggaaactcattaattctccttgtggatatttttacatatgtatttgaatgtctccttgaagtaaatccttagaaatgggatttctgggttagagagaaagcttattttaaacaattccatatcttactgctttccagaaaaattgcattcattttctagtttccccaattagtgcataagaatggccattttctcatacctttccaagcactgggttttgtccatttaaaaatttttgccaaggaaaaaaaatcagttttgttctttttacgtttcttgtttattagtgagattatgtatcttttcatatttttattggcctgacaaatattttggtgttttggctgtagctcatggttgacagctcagagagagaaagatctgagggaagatggatgcaaaagctcgaaattgtttgcttcaacatagagaagctctggaaaaggacatcaagacatcctacatcatggatcacatgattagtgatggat

SEQ ID NO: 444 - DNA, 1300 bp, Homo sapiens
ctatactcctgctaagcgttttttaaacagaatatttcgagtccatctctattatactgtttatcatgctgtagtataaacatctatttatatgtctgactccacagcagtataacatctatttctgaatacttagcacataaaatgcgctcagtaaaaggtaaatgaactcatcagatccacgtccaagtgcctgtaactcttctagtcatcagccttgtgacgttaataatgtcacataatttcaatgagactcggatcgaaagctgcacctcactagtatttaggaagatggaaggctgattctgtgcggggaagtgcgcggaaaactcttaagtcccctactcaccaacctgtgccaggaggcgtgacgtaagtccgccgcgggttcgccagcaccttgccatcccgcaccacgcccacgccaatcttattggcgctgccttcaaaacccagcaccgccggcatggcggaggctgggagaaaacgccgacaggactcctggcaatgtcaggagctgtggaggtcctcactagtccgcgctgggccgcagctttccggagcgcagaggaagctggccagcctgcagatagcactgggaaagacaccgcggaactcccgcgagcggagacccgccaaggcccctccagggacctgtcttcctaactgccagggacgccgagccaactctgtgccttacattcgtatccgttttcctatctctttcccgtggtccagcccagccttctccactgtttttttccctcttgcacatagttagaatcttaagtcagtgtcacacaatgtgctgtgcatctggcacaacgataaacagcccgagggagggttggggacctaagtgtcctagagaattagaggagggaggcgaggctaagcgtctccgtcacgtggtgtcagacagaccaatcacgcgcattcttcggccacgacaagcgcgcctctgatcacgtgaccaggtccgctacccacgtgggggctcagcgtgcacccttctttgtgctcgggttaggaggagctaggctgccatcgggccggtgcagatacggggttgctcttttgctcataagaggggcttcgctggcagtctgaacggcaagcttgagtcaggacccttaattaagatcctcaattggctggagggcagatctcgcgagtagggtacaaggcactatgaaatgatctagtttcgtgggtgaggggctgaagggcctatgatgcacggaggcggggaaaggatttagagataacgtggtttgaaaggcgggacctggtgcgggga

SEQ ID NO: 445 - DNA, 1300 bp, Homo sapiens
ctgggctggcttctgtgtgattgatgacacacactttcttctgatggtctgcggcttctaggtttgactcaagcatgagacaagtcatgggtggatgtctcattgcagttagacctgtggggtcatctcgcacagagtggggcaggttgaatgggtcactcatccttgttgtcttgctccagaatcatatccttgacagcagcctctccacttttcttccattggaattactggttacccatcttcttgctgggtctgttttatttttactccttttacaaatttcagcacagagattacaggacttcagcccacagggtggagaaggaagctggagttagtgggttcggacactagtgggaacatggggagtgacaccatagtgtgctgtagtgcagtgcccctgttccagaggagagccagagctctacctgagccagcactgttagctgaggtgggagggcatctccccgggctgccttgggactggtttcaattccctaatgccaaaacctgcctgcctactagaaggggctcaggcaggcatccagggctcggtatccaggctggaagcaccagccagaggagacaggacctggcctcttcttgctttcccaggtccagtggccatcctcttctctattgcagagaccttggcccagcctgctgatcagaaaagaatgtcttacagaggatctcacggctggttaaagccgagcatggatctgcagtcagagttctctgattctcagtctaatgattttctgtacattgtgctataaaaatgctaccccatggaggccctttgggaatcatgtgccctgtcttcattccagaagtaagagggaccctcccttgcttggacttcaagaaaaatcctttattatctctcactaaaatgtttggataagaatctagatttttcaaatatgcatttgttatggtttcataggaaatccaagtaaccgatttttcagaacctaagcagttaatgctagaaattttgctgcaaataaattgatcagtatgcaagacagttgtcacggctgaatcatggtccacagttaaggtaaacagatctgtgatgacattttctcagcagaatacaaatgcagctacatttcctcccagaggtttctgacatttcttctacacggataacagattctcctaagaaggtgttggtcacaaggaagaaagatctttgtttaatccctctgaaaaggtagggctgtgatatttgatgtgctttctgtgaagagaattgttctaagagagatgaatattgagaagagcgttt

SEQ ID NO: 446 - DNA, 1300 bp, Homo sapiens
aaccacgaaccctttaatgttgggcagtacttaatggacagagcactgaagtgggagtgagggcaactgggttctgatcccaactctgtcattcatttgctgtgtgttcttagcaagtcactcctgctcactgggccttggtttcctcttgtgcaactgaagaacatggaaaaaatgatccctaaagtcctttgaagctttcatattctgtaacttttgtgcccaagaaggccttacagtgagatgggatcccagtatttattgagtttcctcattcataaaatggggataataatagtaaatgagttgacacgcgctaggacagtggaatagtggctggcacagataagccctcggtaaatggtagccaataatgatagagtatgctgtaagatatctttctctccctctgcttctcaacaagtctctaatcaattattccactttataaacaaggaaatagaactcaaagacattaagcacttttcccaaaggtcgcttagcaagtaaatgggagagaccctatgaccaggatgaaagcaagaaattcccacaagaggactcattccaactcatatcttgtgaaaaggttcccaatgcccagctcagatcaactgcctcaatttacagtgtgagtgtgctcacctcctttggggactgtatatccagaggaccctcctcaataaaacactttataaataacatccttccatggatgagggaaaggaggtaagatctgtaatgaataagcaggaactttgaagactcagtgactcagtgagtaataaagactcagtgacttctgatcctgtcctaactgccactccttgttgtccccaagaaagcggcttcctgctctctgaggaggaccccttccctggaaggtaaaactaaggatgtcagcagagaaatttttccaccattggtgcttggtcaaagaggaaactgatgagctcactctagatgagagagcagtgagggagagacagagactcgaatttccggaggctatttcagttttcttttccgttttgtgcaatttcacttatgataccggccaatgcttggttgctattttggaaactccccttaggggatgcccctcaactggccctataaagggccagcctgagctgcagaggattcctgcagaggatcaagacagcacgtggacctcgcacagcctctcccacaggtaccatgaaggtctccgcggcagccctcgctgtcatcctcattgctactgccctctgcgctcctgcatctgcctccccatgtaagtcctggtcttgaccaccac

SEQ ID NO: 447 - DNA, 1300 bp, Homo sapiens
actgcaggggtgggggattccctacgtctctggctgccccgcccctctggccaagagcggcttcggggttcccgatttctcgctacccaaggctcatttaccctcctggttgggggtggaacttgggattcctgataaattaggggtgattgcatttgagcagtccccaggcttctgcgggagatattcgccctccacatattgatccctctggcctctgaaccccccaaaattgagggtattctttgccaccaggtgcctgggatcctaggtgatatgggatacccctaaatggagccttcccacatatagggagtcccttggaatggcattcagctcctgagttcaagagaggagagatctcctctaatagtatgcttcctgacacagtctcctaaacattgggtttccctagaaatgggcagaggggagcccctttcagaagccgtctgggacccttcccaagagactttttgtatcctttcaaaagccagagtcacccccttaaataacagggaaacaagctggacccacttcccaaagtccagcccctcatctcacccctgcacccccatcctgagagacaggggagcctcatccaagctttattttggggagactccatggcagggtgctgtgagcctgcaggctgtgatgggaacgccccctgccgcagtactcagatggggtcatcccgggcagagggtgggtttctgggttcacttgcccagcaggtgcagctctgctggaacacaggggaacctgtgccctggggccgctgccggggggttttatctggccatgttcccatgggaccctggaaaatgttctaggtcctcagctttccctgtccaatgtgaggcacccagtaagcctcacccccttccctcctccctggcttctcaggcctgattggatccatgcacaccccatgtttctaaccgcccccatcctctcccctgtcccctactctattccaggccctggctctgggcctaacaaggaactctatcccaccccttttgggccagctgtcgttccgcccctctcagcgccccctcctggctgggtgggggcccctcttggctgagctcgggtgccccccctccccacccaaggccggccctttcctgtggagtcatctcaccgccgtgcgcacccactcgtaactcgcacccgggtcctggctgcaccgcatcccctcctgcaccccctggatggcccttcagccaacgggggcctgggcgatggtgagtgggcccccaacacctcctttcccccttcccttcctctagctggg

SEQ ID NO: 448 - DNA, 1300 bp, Homo sapiens
tgattccaattgatgggccaacacacctctgataccttgtgttatgctgtgtactgcctcaaagtgaataatagcttgggatttagtttgtgtagtctaaggaaaatactttgtgttgaactagtcaggctgtgttattgatggccattaaaaggccttgtgcttaggtcttacaagcttttcaaaggcccaaagaaatgattcagacaaaaaaaaaaattagactccaaaatactaaaagaaaactgcaaaaacaggtgaattaatggtgaaagatctgtaggacatagcagtaaggctaccacaacccagctttttgaggttgtcttaaattaatgtgatatggggtgtaggtatgttaacatgcttgataatggaagagtgaggatacctgcttcttaaacagggcctgctcatttttttctggcctctagtacatttctttctggcaaaactcaagctctgttttcacggagatgatgcactgagccatggcatccctaggtggtttgattcatttctgcaccccggtgtctagcaaagtgccacgtgcatgtgtttaatcaaaatagcttgtggttgtcaagctctttgtattcttccctccctccctgtgatttgatttcctgaaagtatcctttccccaaggattatggaacatacacttgttaaacactggacccattttcatgatcatttaaatgtcatgacctttctgacaccttgatatggtttggctctgtgtccccacccaaatctcatctaaattataatccccatgtgtccagggagggatctggtgggaggtgattagatcatgggggcagtttttcctatgctgttctcatgatagtgagtgaattctcatgagatctgatggtttaaaagtgtttggcacttccccccttgctctctctcctgctgtcatgtaagacgtgcctacttccacttccaccatgattgtaagtttcctgaggcttccccagccatgcggagctgtaagtcaattaaatcctctttcctttataaattacccagtctcagatatttctttatagcagcgtgaaaatagactaatacatgcctcttgagatcctcacagcaattggtgcctttagacctcttcattcacacttcactcatgtgttcttccttccccaggtagacgcaccctctgaagatggtgactccctcctgagaagctggaccccttggtaaaagacaaggccttctccaaggtaacagggctgagtcaccccagggtcccaaggccggccttttctcacaaatagctgaactc

SEQ ID NO: 449 - DNA, 1300 bp, Homo sapiens
aactctgtttttaggatggaagatgagtagttgttggtgagaggggcattattctgagctgagaagctgccatgcactcaggaagtctccataagccttagatggtttaatcactcaataattccagaaacaggccttcttatcatctccattttggtaatgaccaaataggctctaagacttgctcaagttttgcacagcttgtcaggactcaaactggagtggcagcccaggtttgtgtgtttctgaaaccagactctgccatcaggctgtgctccctgcactcaggatggtaaacaagggatatggtgttgtttatgcagtatttagactctgaatggtctccactgtgggggatccttcctccactgggctcaaagttgtaatcagaactccgaatgctaggttgcagtaggatcaaagttcaatgcagatcttagttccactgggacacagtcaatgtaaaggaggggtctggagtgtaggagactgtcacttcatctctccatttccctaaagtaaactcatatgggcagccacagacacacgcgaacacatgcatacacacctatgcctcagtgacacatgttagtgagtgctggccatgtgctaggcatcgtgctggattttagtgatacagtgaagagcaaaatagacttagtgcctagaattatgaaagaattatgaaacctacgttctgaaggaggaagatggagttttaaaaattcaaccctaaatgaagatctcattacaattcaggaatgttttgatgtgaaaacacacacacacactctgttacatgggcagaactgccatacatagctcagcatgtcacagattgtttattcatagaatggtaatatttgtagcagtactattgttctgaactttggccttggaagcaggatttagtagaccaggcctgaaattcttcagactctgttgtatcagagaaataaattattagggatttcttccagaagaaaaacttcattgccttgaaattttattaattttatatggctgaaagttctgagaattggttactatattaaggattataaaaatcttctaggttgtttttttaaaaatctgtgtgccagaagatttttaaaccttcataagataggcacacttttgtttgaaagctttggctgaatctgttttattctgttttccagagaagccatttgaagcagaatccaaaccatgaattgtagagaattacccttgaccctttgggtgcttatatctgtaagcactgcaggtaagtgattatacatactctcaaacatatttc

SEQ ID NO: 450 - DNA, 1300 bp, Homo sapiens
gggaggcgctggttcggggaggaagtgggtaggggagaaatcttgacatcaacacccaacaggcaaatgccgtggcctctgctgtgggggtttctggaggacttctaggaaaacgagggaagagcaggaaaaggcgacatggctgcaggggccaagcccaggagccgccctccacagcactcattctgcagaagggaaatttgaggcccccagacggcaggggttgatcctgcagagactggtgagcaaaggggatcaccccaagccccagtggcactaggaacacttacaatctctgacctggactaaggctgccagcctggcccagttaagagtttcccagaaggatggcccatacactttaaattaaaggggccagacacgtgcacactacttccagccactctggaagctgaggtggggggatcgcttgagtctgggagttggaggccagcctaggcaggcaacatagtgagaccccatctccaaaaaaacaaaacaaaacaaaacaaaaaaacaccaaaaaagctcccagaaagacctctgaatctttctggatctctcagtggagacctggaaatctgaactttgacaatccctctcacagtggggccaaggaggaattaggcaagccaaaagaagtgaactttactcttctattgcctgtttgaattttgtatccaagcaagtgttacttaagtaatttaagagactggttcatcgaaaaaataaaactccccaaattcccatagctggtagactgtggtcacagccacagtgcactaagactatctgctcagcacttctggtgacccaaaagggtctgaggacaggagctcagagttgggtcagctgtccaggtactcagggttgtcacaggcaaaactgctggaactcagggcagcattgcaaatgccacgccgctctcagggccccttgcctgccgctggaattaaacccacccagatcttggaaactctgccctggacccttctcaataagtccatgagaaatcaaactctttcctttatgcgacactggattttccacaaagtaaaatcaagatgagtaaagatgtggtttctagatagtgcctgaaaaagcagagaccatggtgtcaggcgtcaccacttgggcctataaaagctgccacaagacgccaaggccacaagccacccagcctatgcatccgctcctcaatcctctcctgttggcactgggcctcatggcgcttttgttgaccacggtcattgctctcacttgccttggcggctttgcctccccaggccctgtgcctccc

SEQ ID NO: 451 - DNA, 1300 bp, Homo sapiens
taattgatttttgtgggattaaaaatgacatttttagtttttttctttttttatactcttttcatgaaggtaaattttgtttttttgggccattgacactggcccaatgctatgacattccaaaattgagagaatataaactttttaaaacagaacacttgattttgactactaatcagaggagtggaattgagtaacaaactcaaacattttatgaaaaataaacagactttatgctatggtatggttccatttatgtttatataatagactaagtattactcattacaagtacaataaatatttgttgatccggttgatgtaaccgtaagccttgttctctctcagtccagtgaaagtatacattttactgataatctaaaagtattaattcctatacaccaaaagatctgcgtatcatccccctcttggaatacacattcacttgcacatatccccagcctgctcctcgcaacagagcttgctttggggaggaaatttcaggatcacctccagaagaaaacaccgacagcgctcctagagccatcgtggtgccctctagcaacttacgggctccaagcgaaaaaagagctcgggttggtgcgggggggcggggagcgggaaactccatcacagacgcaagtgaaaactcctgcggcttctagattccatccgagaaggaaagatgaaaatcaaggttagaaagcagtggcagggcggtgtcccctgccttgctttaattcacgcggctctcgtaacaagccacagatgtgcatcactcaagcgggcttcccagtcctcatctcccctctggatggtcttctgcgaccgcagagtggtagttagggaagatcgcagcgggcagaaactccgccaggggagaaaggagcctgggggcgacggtccgcctaatcgttccaggaagcccctccgcgtgccggtgggcgggcgctcaggcccgaggatgcggggcgaggaggcgggtactggtgattctcctggcagcccccgcccgccccgccagggggagcgtctgcgcccgacgtaggctgcggggcctgggctggcggcgcagggcggtgactcggctcggtggctgccctcccgcgtccccaccccctccccgcccgcccccggcgcggccctgcccgccccctccgccccctcccgcagcgccatgcgcagactcagttcctggagaaagatggcgacagccgagaagcagaaacacgacgggcgggtgaagatcggccactacattctgggtgacacgctgggggtcggcaccttcggcaaagtg

SEQ ID NO: 452 - DNA, 1400 bp, Homo sapiens
taaagggtaaaaaatggtgatgacaaattactccccacctcatttggcagccgagtgtattacatggcttaatgcatgtaaagtacttagaaatgttgctagtatggtcaggcccagtggctcatgcctgtaatcccagaactttgggaggccaaggcgggcggatcacgaggtcaggagttcaagaccagcctggccaacatagtgaaacctcgtctctactaaaaatacaaaaaattagccgggcgtggtggagggtgcctgtaattctagctactcgggaggctgaggcaggagaatcgcttgaacccgggaggcagaggttgcagcgaacctggattgtgccaccgcactccagcctggtgacagagggagactctgtctcaaaaaaaaaaaaaaaaaaaaaagaaatgttactagtatgtagtaagttctcagtaaatgttagctactatactctttcaagtgctgggtttttacttgatgtcatacagtgttatataagatctccaaagatactgaggagtcctcaaggccaattttaacaagcatggttgccgcattcttgtgcttatagttgaacatttcttctttcagacacttgcacaaagggatacttctaagatgcatttgcattaggtggcaaacttcatcctgggtatgaaaaacattgagatttgggaataaagcatagtaagactgaggttgcaattactaaaggaaaaccccaacagagataagtgaagttctgcaatatcatgcaccctcccccaacccgctctgtctccccaggccccccttcgttagaacacccatgactggctatattatatcagcatttcccataatgtaaaaagggaaaatacagacctgggcgttcatggaaagtattctaactctcacaaccagaatccctgtctttgaattttttttcttggtttttagatctttaacttttccttcagcatttcagtactcaactttttgaaaatcatcttttctgaggaatgatatttcctggcacagcatcatctctgtcaagtgactcagtttgatttttttgtttgttagtataaagtggccccaacttacagagaaaaagtgggctcttggtatcagtttgatgtcagggtttttccgtgtttgagagggagctttaaataccactcgatttgaaggtgtctgcaagcgagctccagtccgctgtcaagatgcttctggccatggtccttacctctgccctgctcctgtgctccgtggcaggccaggggtgtccaaccttggcggggatcctggacatcaacttcctcatcaacaagatgcaggtaggctgcagggggagcccatgggaaagacagctactgacaaagtgaaatatgtatgaggatgaaaaaactcgg

SEQ ID NO: 453 - DNA, 1300 bp, Homo sapiens
gaataaatagaatattctgaggtgcattcctccttcctatgttaggcaacattccttgaccctcctcggcccccaagccaggttgcgtttttttctgccatttagaagggttttcctttttgtcctagtaaaacatcagcccctgtagctcttcatctccccctggtgttcttctcccgccatgtcttaagattggtggcaccgaccaatcttaagatttaagttctgtgtgaaaaacacctttgcttttcaatcagtttatcagcctcctccgcaggggaagtgtggacacacaaaagaacttatcggggcttctcatcagtgatagggaaaagactgggcatgtgcctaaacgagctctgatgttatttttaagctccctttcttgccaatccctcacggatctttctccgatagatgcaaagaacttcagcaaaaaagacccgcaggaaggggcttgaagagaaaagtacgttgatctgccaaaatagtctgacccccagtagtggggcagtgacgagggagagcattcccttgtttgactgagactagaatcggagagacataaaaggaaaatgaagcgagcaacaattaaaaaaaattccccgcacacaacaatacaatctatttaaactgtggctcatacttttcataccaatggtatgactttttttctggagtcccctcttctgattcttgaactccggggctggcagcttgcaaaggggaagcggactccagcactgcacgggcaggtttagcaaaggtctctaatgggtattttctttttcttagccctgcccccgaattgtcagacggcgggcgtctgcctctgaagttagcagtgatttcctttcgggcctggccttatctccggctgcacgttgcctgttggtgactaataacacaataacattgtctggggctggaataaagtcggagctgtttacccccactctaataggggttcaatataaaaagccggcagagagctgtccaagtcagacgcgcctctgcatctgcgccaggcgaacgggtcctgcgcctcctgcagtcccagctctccaccgccgcgtgcgcctgcagacgctccgctcgctgccttctctcctggcaggcgctgccttttctccccgttaaaagggcacttgggctgaaggatcgctttgagatctgaggaacccgcagcgctttgagggacctgaagctgtttttcttcgttttcctttgggttcagtttgaacgggaggtttttgatccctttttttcagaatggattatttgctcatgattttctctc

SEQ ID NO: 454 - DNA, 1300 bp, Homo sapiens
gctgtcgtgtacaggcagatgaagctggaaaagagaggcatattcagtactcacgaattcaaacagcttgagggatttccggtgaaagtcagtcctaaccagtgtatacgtacatacacaccaacatgtgtgaatgtgttgtgtgcacgtgtgtgcctgtacaagtccacatggcatatttacctgtcagggacaggctatggacaatgactgtttcttggactttctcttaaaaagtcagatcagacaagtttattttgtatactttgggtaaatgtgtggtatttcgtgagtttggcagtttgtgaaaaaaaaaaaaaaaaaaaaaaaaaaaaaaagctgcctgctctgagcccatggggcaggggcaattttttcatctgacaatctgcgtgcttttgttttgcttgcttattttggccccacaataccacacccttttcttaactaacctctttctacctgggctggacgtgcctgggctctcctccctggccccgctcccacctctcccaggtctctaaacccctagagaacctgtgtcagtgttttgaatccctcagttgctctagcaggaaaactagacagattaggagctggggcacatttggctgaaagacagctcttcgctttcttcttatgctgcttccccttcctcttttcccaaatagatatataaacacatgtattttcctgtttaaattgagcgaattggtcccctgcctgtgccttgatttagccattgggctcagccttgctcctcccttccttactcggataggagccactgggatctggagctccagcttccaaattgaagctggcctcaggccaggtgaccttttctttgtaagtttctttcctaagcgtggggttggggggaggcggggaatggggggggttgcagggatctgtttggtgctgttgaagggggggcgagtgaggaaaggagggggctggaagagagtaaagggctgttgttaaacagtttcttaccgtaagagggagttcagacctagatctttccagttaatcacacaacaaacttagctcatcgcaataaaaagcagctcagagccgactggctcttttaggcactgactccgaacaggattctttcacccaggcatctcctccagagggatccgccagcccgtccagcagcaccatgtgggtgaccaaactcctgccagccctgctgctgcagcatgtcctcctgcatctcctcctgctccccatcgccatcccctatgcaggttagttcccttcttcttcttcattattagtattagtatttaac

SEQ ID NO: 455 - DNA, 6000 bp, Homo sapiens
acacaagcacagacatatctatacacacacgtggacacacatacacagacacatgtatgcattcacacaatacacacagacacaaacacatatagactcagataagcacacaggcactcacaccccacaccctgtctgaggctcccctgaccctcctcgctggggcagcctggcctcttcacactccctgcacccttcactcacagagcccttgctccctggggccacagagctgccccactgcacacatcatcagtcccggggccagcctctcccccggggacctggtcagcccgtctcagccattctgcactcctgtggttctctgacagtggcccgtctccagcagcgtcccaccaggagaccccgcctggccagctcactgctgtattcctggctcaactcctggccctccgtccagtaggccctcaaccaacgtccatcaaatgaacccatgcagctgacattgtctcttgagccagtttttccaaatcccatgatccctgacacagaaaggaaacatctggccagtccctcccacggctgctgtgcccagagcctgtgagcaaacgcctggcccttcctgtgacggtggtcctcgcaggaccccacagggcagcctcacatctggcaggaagacccacccgggccccttgggctctgtgagatgcctgctcctgtcgggcacctttctgggcagtcccaagcactaagccagcacaaatgcagtttaagaggctgatgagggaggcctcctcctgggggtgtggtgatggggaccccacgggccacagccaacccctcccagacgtccgatgaatcacactgagtgtaaactgcctctcttctaaaaggtctcaacatcactcgacagtatcatcaaaggactcttcctaaggaaaatcacagggtaggcccggcagccacacagagccaccttggcggggtcaggagctgcggctcccaggtgccccagccctgctgggaggccaccctcagccagaccctgcagccacactgccctctgccggtcagcaccctaccccaagccccagcggtcacctagcacctccacctgcggtcccaggcaccgggagagggaaggctgcctgcactgggagagggaaggctgtccgcttcacggccggggttcttgctgcttagctggggttttgggaaaaggcttcaccttgccctataccgttctgtgttgcttgagttttataaaaagtcagtgtgactttcataacttgtttttttcatttaaaaaataataggtgtttatgattatgaaagtatatgagaactttatgaaaaatttgggagctacagaaactgctgaggtggaaaagcctggcctttagccacccagaggcctctctcggagcctgccctgcccactccaagggtcacctccacaccccacccgccccggaggacccagggtgagtccttggaagcttccagggctgtgccttctcggtgtgctgggctcgatgggacatgactctgtccccacccactaggggtcttaggaggctgcctggctccagcactcttgaggggtccttacccgagtcactcactcattccccgtgtgccaggtgcctggagaagctgtggggacccggcctaacagggcccagccctcagccgggatctggatgggagtcgttggcagattccagagcaaacaccctgtatctgtcgccgggcgacacagtgacaccaccgccagccagtgagcctatccgtgtctcaggaagcgccctctgccctcagggccctctcaggggcacaggctcagggcagaggacctaggaacctccctgtgacctgccctgcctgcccagaggcgggtccagggcctcccaggcctttgttttgcagatctcattagcggagacctctgcctcctggaggggaggccagagcaggtactgggggaggttttggggacgttttgggcagcccctgtgcccgcagtcctctgctagagcctttcggaacctgtgtctgtcccgaccccccctccaccggcggcatcagggctgaacaaagtctgacactggggttgaccatccactgacgttgccctctccctcccaaccccagagagaatagagccccgccccccaccttccctcgctgggactggggcactgccacggccctgggactggcttccaggacggaggctcccgcctggcagcacagatctccccagggaggccagtgccgagggcctgacccagcaggggcgtccttggttagaaagggtcctccggggccttgggtggggcaggcccagggagagatgtccagtgacagggaaggacacaaccgagggtccgtcctgcctgctgtgggcagtggtatcaaggaccgggccttgctgcctccttggatcagaacgccagccaggaagtcctgtgggtgcccagtggccccttccaggcaccgccccactaaggtgaaaccctgctctttcctgcccatcaggaagcgcccaggccatgttgccaggccagactccagacaaggccacagccctggccatggggcctggagtgggggagctgggccgacgggtgcctgaatccagggctgctgcaggtgcaggttcccactcatcactgtaccctgccaggctgccccctcaccctctactctctgccccccttcatgcccagctgatgggcatggggctttgtgcctgtgcgagggatagagggggttgccccatggagatgggggtgaggagtagattgctgaaatgggcattaggtatgctagagacttcaaggaagtgtgggtgccagtccagcagatctctgcaggcaggtgctcctggaagagggagtggctgtgcaaagagggagtggccgtgcaaagacggaggccggggcagcaaagaggcctcgaggccggggcagaggagctggccttccctccaggagtgatgggaaccactggggggacttcgatgacccagaaagatggagtgggggaagacgtcagctgagaggctcattaggaggatgcctggggctgggtgagtgttggttgggagctcagggggcccatctgagctggggatgcaaagcgggccaaaggctgaggctggggctccacagttttaaaagctgcagaccaggagggcgagggatgggagatttagggagctggaacccggggccagggatgtgtgagccttcccaggaggggtctgataccaaaggccaagttaagaaaatgtctgaggccgggcacagtggctcacgcctgtaatcccagcactttgggaagccaaggcaggtggatcacctgaggtcaggagttcgagaccagcctggccaatatggaaaaaccccgtctctactaaaaatacaaaaatcagctgggcatggtggtggacacctgtaatcccagctacttgggagactgaggcaggagaatggtttgaacccaggaggcagaagttgcagtgagccgacatcatgccattgcactcagcctgggcagcaagagcgaaactccatctcaaaaaaaagaaaaagaaagaaaaaaagagaaaacgtctgagaaccgacggcttgtatttaaaacgtgtgagtgggtggtggcaggagaggtagacagggagcagggccggcttggcggaagctttgctgtagagaggggcagagatggctcggtgggtggagggaggggcaaacggtgtttaagaagaaaaaacgacagcttctgcgtaggagaggggcctcctgtccatctccagggagaacatgggttctgtggccacaggtctccccagggcctggcatcaaggaggcgccaggcacgacctgcgggatgaaagcacgtggctgaagtcctggtggctgtgtctgggtgaggggtgtgagggcgtggcctgagcaggtccactctcaggggagaggggccgaggccaggaactgggtctgggtgtccacctggtgcctgggtgaggtcctgcaggcagcaggtctgggcttcagtggatgcagccagtaagggatgggctgatcagggaaaaccgtattttcaggggaggagcccaggaggcagggagctgggcggcggtggaggggcctggagggcgattgtccagatcaagcccctcgagtaaggcccgagaggctgtggcttcagaaatgaaggtcatgggcgactcgggccaatgccgcgtccttgacctgggcgaagtgagcggttgcactcacgagtgtggacggcccttccctacaggggaccttggattcgctgggggcggagtgggggctggggcccagagaacccgagtccggacgctcccgtccgtgaccctggccgggttctccgctcctcgcagcttcagtccgcaagtgtgagatgtcaggggacccctggacggcggggccctcgggctggcagcgcgcgccgcaggagtttcgattcggagggtctgggcgaaggccgagaactcgcgtttccagcgagttcccgggggcgccgctccgtcccagaggccggggcccctccggttgccgggcagagccgcgccgcgcgcggtcccattggcgcaggtgcgccgcgccccgcccaacaggtagccccgcccgacaggtagccccgcccgcgcctcgccattgggccgcggccgggtgtcccccgaggattggcccaggtggcggccccgcctcgccctcattggccgcaggtgccaccgcccgccccgggaccgcccgccccgcggattggccgctggctccacctcggtccgccatgttcggacaccgccccccgcccccgccggacggtcccgccccgcgcgccccccgctcccgccccgcgcgccgccggagttccgcggagttgaccgggtcggcgccgtcggtcctgagcgctgccttccgcgttccgccgcggccccacctggagcccccgccccgcgccatggccggagctcccggggcgcagcgctgacggcggcggggggagcgcgccatgcccagcaggaccggccccaagatggaagggagcggcggccgcgtccgcctcaaggcgcattacggggggtgagcggcggagagggcggggagcggcgcgggtgaggcagggagggcggggagggctcagccgtcggggctcctgcgcgagagggagagagggaaggggcggcgaggtcgctgcgggcccggggctgtcgcgggaggtcctcggtccccgcccgtgagcgtcacccgcggacacgtcgtggacagcgcgggctccttccccgggaccgggtttccctggggtcggccccgcgccgcgagctcctcggcccggtcattgtggtagacgttttcgctggaaagttgggcggggacgttccggccgcaaacctgtaaggactgaaagttttcatcaagttgtgaaaactcctggcgggtttcttaaaatcagcgtttcctaaacgttctccacgtttacccggtcgggggtctcgctttagccaaaatccggagacccggggcgcgggcgctgtggctccaatgcagcccccggcagggctcggggcggtcgggcggggacaggggtttctggaggagacggtggggccgagactgaccctggggtttgcgtcgcacccgccccccggaggcccttgcctggctgtgggagggggcgcggtcaggtgctggagcggaggggtcctggactcttggccgccgcctcggggcagcgctgctgggggtggcgggggctgcaccaggtggccgggctcacaggcacagcggaggggtcgctgccccccgaagtgtgggcggtggggaggggaggacccgtgggtttgttcttccacctgtgcgcgtctccaggagccccgaactgggacctccgctcccgcgagggtggctgctgctgcagagagggaggggagcagaatgcgggctccggacttgcactggctggtccttgggatctcgaaaagctgctcctgccccggtgcgt

SEQ ID NO: 456 - DNA, 6000 bp, Homo sapiens
tgccacggggacacgtggcctggttcctgctggtcaccaccccgccagccacatcttgaacggcgtccgttctgcagtcgcttgtccttagtgttccagcaacaccccaaccaatgcgacccccggcacctccgtcagccccgcccgggagagccctcccctgcatccgtgctgtgcttgttgaaactgagatcctctagcctttggcctctccggacccagccccagctgcaggccccagccatggtggtccctttgggaggcgtggtccaggaggtgatgggcagctggagaacccccgtgagtggaggctgctgtacctggcagggagggtcctgggcaagggggcatggagtggaaagggagtgggtgtccagaaagttcctggggctccaccaaccagaacgttgccattaccttgagcaaacgacctgtttagtggtgccttttctttacctgtaaaacggggtgattgtaaataaaatcgtgtgtaaaagtgcttaggaccagacccccattggagcgagtgttgatacctgtctcaaaggacagtaggtggacgtggcagggagggagatgtcaagacgacagccagggccctttctgccacttcccctggtgggtggtgggcggtcccctgaaccctggcagtaagcgagggacctcccgacaccctggctcctccgtgttggctccaggggcttcctgtttctagatggccgggcccatcatgtggagggaggggtggatgctataggcagcagccccagtcttcctttgggtggggttatttctgctgctgctgcaatccagaggctctggggctcctaagtgggtagcctcaggcctgggcagcgtccatgggacagggtggtccccagtcaggccccattggcctccctgtggtgtgtggtaaagactcagggtgcccgccctgtggaggaggtgccgggggtagcctggctttgcacccagaccctgctgagggcagcgctggatggtcagctggaccaggcctccgaggtccttagagtccatggaggaaatacaaagtccgctgggctgggcagccgcagaccccacttagcagctggtggtgtcctcggggtcatcagagccagtgctggctgccctgtgcatttcatgttgttggttcctgcctgtccacagcacagatggcatacccgggcagcgggaccctgctccagcctgcaccctggggaaaggtgtcctacattccacattctgcccgtagcaggcagccccaccccactgtagcccatcttgtcacttagggtggtcccggtagtggcttctggagcctggaacgcttgggtcaggccccaggcagctgggaccctcccgagcctcaccccttgggtctggtgggacccctggggtttggccgggaggacaccgtgactactgcctttgcctctgggtatattccctgctcagcccctgaacccagctccaaggccatttctacttggcaagcgggaggttttcatggccagggatgttaatagcaggtctctggatgcaagggtggcaaagtcgccttggcctgtgtaggggaagtggaggaacctgggctctcccgggccggtggtcctggggcagatagcaggggaaggggctgcagccatgtgggtggagccatgggggccgtggaggggcccttcctgaccccacagtgggggccagggtggggctggcgggggacagtcctcagctgcaggggctggggtggggctggcgggggacagtcctcggctgcgggggccggggtgggccaggaaggggaaggggctcttgaggctccggggccttctggctgtagtgtctcacttggagcaatggcgggatccccagatccatcccctggcccgtctgcctcccgccctcatagccctgtagcctagggcagagaggggtccttggccgggacaccatccccacagggacgtggagggtgctgggcccggggctaccatggagtcgcctgctgggagcagccagtacacctgggcgtgcgacctgggcaatgcgggggccgattgctcaggggggcgcctgcactgccaggttcaaaccccaccggcagggagcctgcgctgtgacttcaggcatgtgggtggggctccccgtgccccgtgcctcagtttcctcctctgtaaaagggggctttgtgaggctcgacagggtttagaggagctcctggaacatagtaagtgcttagcaaggccgtcttgccgtctctcccacccagggagggtcaagtgggaagagagcggccccaccgagtgtgttccaggccccggcggcgtctgagaggaggcggccaaacctagtggggctgcgcgaccgcctgtggaacagtggggacgctgctggtgtcctccaggcctgggtgggcgggttaccacggaagcctatcaacggatgcctgtgattccctggtatttataggtatgtctattgttttattaaaaaatccagtttcattcagctttgtctcaaattatttgcaacaaactggaaaagctagttttccccctaaaataggcttctaataaaattggcaatttgcctgctgagcctgaatatcctagagttctgcaaagctggatattttgggatggattagaagagaggagttggctgaaggacagtggtcgtgctgctgagccggccgtctgtgtgaagtttacactggaccaggataaatgcgtatttcctgtgggagctcagcgtggccatggtattcggtggtcttatgattttataggcctagccaggggtctgcgagctgcttctgtccagggccaggtagttgaagcctggggttctgagcaggcgtgggcagcacccaaggaggtgcatggccgtgtcctagtgaaactttatgcacgctgaaatctgaattttatagactcttccggtgtttcaaaatattatccttttcattttattcagccaattaaaagcgtagaaatcctagcttgctgatttggagcactaggcagtgtaggttgccagccctcgttccccatagatttgggaagtcgagtgaaacgcatgtgttaggtttatatgtttcacattttacggaatgcccctcatgcagctggtcagccgcctgacgagggaagcttggccctttggagaagtggccgtgcctcgtggtgagctgctgacagagctggaatttgaacccggggctctggcccggagtccactccgtgaatgcagataaacacaggtttatgagcttgatgatttaaatggaggttttattactgttcaggcaggtgtgggaggccagccatcaggagatgatgccgttgagaaggtcgtttattactcagcttctgagaggagacctcctcttgcctcgcggggccatgcgggcaagcgccgggtgggttggaggcagggggatgtgtgggtggggcctttactgtggtttccatgggaaaggtgtggggagcaggcattgggtcggccaggtggagtaacttcagccaggctctggggtgcaggggctgtccctgtgacctggggaggcccctggggcgactgggggcccgtgtaggaggtgggcccaggtgagagttctgggttggtgggtttgcatttgaaaggttcgctgtgggacaagtcctttgctgtctctaggaatcggttggcctctcggggccgtccctccagggtcagcagggccataggtgctggagcatcgagggcacagcacgtatgaatgcagggagcgtgtggtgtgactggtcagagccagaggtctgcaggacactcccctctgtccctctgcacccccagtgcgaagcggcccatgtaggctcagcacgagtgccgagtgcgtttggggaagtgggcagaattcccagctgagcaccccgcgaccccccatgttttttatgattggaggaaaatgccaggtctcacttgccagtgatgaccaggtcccagggtttgtcagggtaccagggtaggggttggagggtcaggccacccagcggcggtggcggctctgggtctccctaggagcccgggctggccacagccaggcacagcacagcccgtgaggtctggtcttgggaatgcgggtgtctcctgccttaggctgagggtgtgcgtttccaggccagccgggacagttttcagcctggggaagcttggcctttcctgttcctgccccccagtgcccaccgtccccacacacactggtggggtttgtggggtggacacaaccacatcgcaaggcccctatgcctcctctcctcccgctccgttcctgggctgcgggacagtgctcggggcccttggccattggtgtcgagcccattcacagcctctggacgcaggtcagaggtcactcgccacggccacagctgcgctgtcccccactcccagcctggcaggccaacctgcaggaccccgggcttagctgggttctgttctgatgtcgcattttcaaggtccgctgagtccgagccctgcctgggtctggctgctgcccgcccgctctctggactgtgctgatgcagagatgcttgttttcctgtgacgtcagcgtcagctcctgcacatccatgccgtgttttagtttgtgcctcagctgctggctacagcttcccgggggagccgggtaccacccgggcctggagacatgaggaggcagggatgtgaggggcgggggacaggacagccggccttccgttaaatatctgctcctcgcgctcgagcctccctgcctattgtcggggccggaggcgagccgacgcagcatcagctcgtcaacgggaaggaagatgcctccctgcacgcccgccgcgcacagagcataaagaatctgcgctgaggaggcaggagaagaaagccggtgagtcgggggcatctcccccgtggattttccgcgcccccggggccgggccagccgtgctgcaggccctgtgcgtgcggaggacggtgcccgagtcagcattttgggtctgagtcccggcgttgccgctgcctgtgcgctgcacagatgctccgggcagcaacacggctggtgccacggcccggggaaggcgtgcggctgcagcagctcccagcaatgtcaggggaaacgcagtgagaggctgttgttttgcgggtgacagatttttagaaaaataaggctgtggagggaccttctgagcgaggcaggggctgctggagggacatgctcaccccgaggacggatggtgtgtggcccaggcctggtggatgtgtggcggtggctgtggagggctgggggccggggggcttggggaaatcgtcttgggctcgtctgcctgcctggccccagggagttgctggctgttgggagtttcactgtggccgatgctttttggttgtgggtctgtgggtctgtcggggccaggacggatggccgcttcgtctccattctgcattgctgcaggtgggcagattgatgagaccacgggtgaagtctggagaccccaggtgccagggctggtagtggtaacagccagcacctgttccaggcctgcggtctttccgtctcgagcctgccctcccgcctgtctgagcccccgttttgcattgacagtgttgggttggagtctgggtggcacagccagggttaatgtgcacggctcactccatcggggtcctcggatggtggcgaggagcggggctgcggcgtcctgttttctattctgaaatggttggaggtagactcggaggggtctgggggctgcatggtgtttggcagggatgtgggaatgtgggtgcttttctgacgaccattttgcaaggtgttttttttaaaaaaaaaaacaacaaaaaaccaaaacaacaaccagcctccccagtcaggcttgtggggagccgtgggcctggggagactgggctgctgaaggtggggactgggctgctgggggaggcggctttccctctcggggggtgctggctgctggggaggctggcagc

SEQ ID NO: 457 - DNA, 6000 bp, Homo sapiens
ctcgggagcccctggccatgttagttgcacatttcatgactctttaaggagttagtgaggcctgggtgtgacctatttcccgttccaattaaacaggtcattagtccgtgtcgtgctaaagcagatcactcgcaaggaatggaaaacccttgaaatacgttttttaaatcggtgaaagtgagaaactgatgcctctgtgggaaaagaccagactccagggtctgcaccctcagagtgatgagctgcgtctgttaggggtgacctgaggtccctgctttgaaccagcttgttgaaaccggaagccatttctcatcttctgtaagagcctgcagcccctgtcagatgccagccattccccaggtcttgctgacactgtcattaggattcctatgagggccagtggggagacagctcagtctcggccctgcttccgaccccaccaccacccccaaatgcatactgctggcctttcctgggtttaattttattttgcagtggtagaggttgttttgctaaaattatttcaaaatctgccttgtggaaaaacgcccacgtcagggtgaccatctgtggtaaccgagaattccttggaggcagcgtcttcaccgcctggctaagcggatggcacaagctgccagccagacctctgtctgtccctgcccagaggccccagctgccccttcctccaggcacctccctgatctctggagtccaggttttgttcccaaggtcctacctttgtatctaaatgctgtgtcctctccccggacgatctcctccaggcactggctctcaggggccagctccccatgggcgatgatgtctctgatacaggaacttatgggtaccttgcaagtttgcacagaaagtggagcccgtctgttccttctggggtgtgcgagcggggcctcggggagcaggtgcaggacagggcacaggaggaacaggcacggctggtggtgtgcagtgaacagcagtggtcacaccaggtggtggctcccgtgggacttttgaggccggcccagccctgagcaggtggggtctgcagaggcctcgtgggttggaggagacttattcagagggagttttggtcttgctagaaattgcatgagatgaaagatgacattttaattctatcattgaggcatagtctttccaacacaccccctgaggtgtgagggaggctgtccctatatgatgtggtccccgctccttcaggctggggctcctggccagttcatctttcgtcctgtgtctgactttctctatcatttctaaaatgactaagacaatttattttgttaaaaaaaaaaaaaaaaaaaggcgttaagatgattctactttgtagagggatcccaagggagcgtctcctctgggactggccctgtcccccatcttgttttccctctaaacgacatgtgagttcccaactcttgattttagttctgacaactggagactttattcccatacctttttaaaactttttaaaaggtttaacttcaaggagataccattccttttgtgtatttggttactaaagctgtcttgcatctcaaatgtgatttaagaaatcaagcaaaatgcactggccacgtcctctcagtagggggaggccagcgggcatctcccctcctcgccccttctctggtggtctcactgatgtcccccggcccccagccctccttcctttctttcccttgactttgtcctcagactccagggacaacccctggtgcgagacatcctgttgctgatttacttgttctctcatttgtttctgtgtttgttccatttctttcgttcattcattcattcattcatactcagctgcggagaccatcagccagtctgcgttcggcctgtgtctgccactggctgcagggcccggggcaaaggtcttcaagtgccctgggcttcagttccccttcctggagaatgagggtgggagagcacctcccctgggggtttgcgaagatgacatgagcccgtgcatcctgggtctggaccgcatctgatacttagcaggtacttagcagcaggtactgagtagacacagtgctccacagcaaagatgtgtggcagaggcgtagtggatgcgtgatcgagacgcacagtagacacgcaaggatacacggcagagatacgtggtgggtatataatggatacagcgggcgtggtggatttataacagatatgtagcagatatgtgataggagccaggcatggtaatgacaagtcaggaatgtcacagaggactgtgtcttctgggggtcctggggccttttcacgaggaaggattgcaggtggggctttggaaaaattgtccaatttccatcccctgtctcctttccccggtcaccgctcctacccagtagcaggtggagaaggtgacttccatactgggggccaggatcaggagcagccacatgccagagcgggtaggcagcccctggtgcctgcctggccctgccccgacctccacaccagttcagccctgtgtcctgcccaggatggatgggtgggtaatttattgattcattcatttccagggtctcgtgtgggctttgtgaagcctagtacacgttttttattgcgtttttttttttgtttgttttgttttgttttgtttttgagatgaagtctcactgtgctgcccaggctggagtgcagtggtgcaatcttggctcactgcaagccccgtctcccaagttcacaccattctcctgcctcagcctcccgagtagctgggagtacaggcgcccaccaccacgtcccgctaattttttgtatttttagtagagatggggtttcactgtgttagccgggatggtctcgatctcctgacctcgtgatccgcccgccttggcctcccaaagtgctaggattacaggtgtgagccaccgtgcccggccctcgtttttgtttgttttactttgttatgagtaatgatagatttctagaaacttcgtgtatttttttctccactttatttcaactttgtagaaagagatctaaaaatgcaagtctcctcccccaacccccaactctcctgcgtcacggattggttcagaaccaggagacacagggcccagaaacctaggggctggaggggccttaccctttggactcttgactgtttttatattctggcccctccccccgtctgtctctctctcaagagacagggtcttgctctgtcgcccaggctggagtacagtggtacaatcacggctcactgcagctgggctcaagcaagcctcccacctcagcctcccaactagctgggacttcaggcgcgcaccaccacgcttggctaattttttatttttagtagagttgggggtcttgatttgttacccaggctggtctggaatgccccaagtgattctcccacttcgcccgcccaaagtactgggagccaccacgccgggctagactgtggggtttttggggggcaagaattgtactcatatctctgtttccacagtgggtcttacactgtggacaaacagcagctgatgttctcacccggccttgttctaagaggactccaaaaagcaagtcgtagccccagtgactgggaaaggcttccccgggagagcggccgacacagctgccgcagtagtaagggtttatttatcaagactgatttatttatcagttcaagacacagttacacagagtgtgggggatggttcatcagcagctggcacgtccagtggcgcgtgtgcctcgggaaggcctgggagggggacacaggtgctccgcagggaaagctgcccccaccccagcccaaagaagccctccaagctccatcagtcatgcagtcatgtacttttcctcatcagcacaaaccccgcttccttgaagagaagcgtgaggctgggcacggtggcgcgtgtctgtaggcctagctacgagggaggatcgcttgagcccaggaggtcgaggctgcagggctatgattgcaacactgcactctggcctgggcaacagagaaagagagagaggactgtctagaagggaaaacagggatagcaaagtagatgggaaggaagggcctctggggcggcgggtgagtgctggccgctcccctctccacaagctgctgtggtctctgggggctgcacctgaggcggcagtgggaggagaggggtgaagggcaacgcgcccccgtttaaacacctcctggcctggacgccagctgttcacttgtaatcactggtcaccctgaagagatgggatggacccctgcccaacatttggctcaggtgtccacacagatgacagcaccgcacgcagacgggagggagcttctcaccacataatgaggttttctggggagagcaggggaggggggtcttccaggatggtccagaaaggtcttgagcgcgcctgtaaggagactgtctcggtttccgtggcggctctggggcaaggcggggtgagcaggggctgaggcttgcagggtttgaactttccccagggccctcatcacctcactgggatgtgggcgggaggggagcgggtcgtctcaaacacctccagcagtcgaacatcaaaaagggggtccaactcttggttgcgatttctttggctgaagcctggactcctagccccacgggctgagggaaggttacggctggtggttggatagacgccagtgcttgccccagagctgcaggggaagaaggtggcctgaacctcagggcctctgtgtccagttcaggggccagtacagcagcatcggtctgcgaggggtatgtgttctagaggagtgaggggacagacaggggagccccagaggcatccagtggcgcgaatggtgggaagggccctaagaggggaggctgggaggggacaatcccaggtggcaggggatggccgcgatgaggccctggggtggagcccaggcagggagcatccaggggaagccagtgtgggtggggactgggaggagagagggaggctgggcctgccctggcgaggggtggtcagaacatcgctcggtgccagacaggcaggacgcagcgggctggcctgcggggctcactgctgccccccggggccgagcacgaaagggagagttggagggcgcttcctcgccgggtgttgcggtgtgagcggggactggtgagtgtgtgctgtcttcagagagagaagagcagttttcagggtgagtagcctttattcttcacacctcattacacagcacccaggccttttattcaggagggcgcggccggcctcaccccgacagccaccctggcttgttgaccttgatctgtgacagctcccctgtgagttcagacttctcaaggacgcttgcatagccaacattgttgagaacgagtaaccccttatcacagcacacgtctgtcgtgccatgaagcaatttcccatccctgtggctttgaaggcataagtcactgcgtcacggccatgctgttccttccaaacctgctcgtcaggagacagctcttgcgctgtgtaccggcactgccgcccagcaggtgaccccagcagctggtttgtccctgcctgggggtgagggcctgcagggtgtttgtagacgcaactcttgaaaggccctgaggttggggcttggtcatgagggtgcccggggcccatccgggagtagaagtaagtgcactaggcatttggccaagggtcacgttaggccttatttatttattttttgagacagtctcactcttttgcccaggctggagtgcagtggcgtgatctcagctcactgcaaccttcgcctcccgggttcaagcgattctcttgcctcggcctcccgagtagctgggattacaggcacctgccaccatgcgcagctaatttttgtatttttagtagagacggggtttcaccatgttggccaggccggtctcaaactcctgacctcaagtggtccacccacctcagcctcccaaagtgctgggattacaggcgtgagctgccactcctggccaggtcttttttcaaata

SEQ ID NO: 458 - DNA, 6000 bp, Homo sapiens
gtggtggtgggttcctctaatcccagctactcgggaggctgaggcagagaattgcttgaacccgggaggcagaggttgtagtgagccgagatggcaccactgcactccagcctgggcgacagagcaggactctgtctcaaaacaacacaaaacaaaaacaaaacaacaaaaaagtaattaaagcccagggttgctgtcatggggtctgccaaccctggggatgtgggacaggcatggaccctactctctggaaatcacgcagaaatgtgcagcgatgttcccatcctgcctctcttcaaaagaaatcacccgtcattcggaggtttgtgtatggggaagatcagctcagcattatttttacaagcaagagtgggaatcgtgtctggagttagctactccctttgctgtgaacaacccactccaccacgtggggtataaaccatggtagggccacgtctctgagctgtggctgctggagagccctctgctggtggcacatagggcacaagtgccgcagggacagctgggtggatggcccaagactttggcctttatcatgagtggacagaggagtgaccacttgggtccctggagaagaggctatagagagtgagggtggggaagggagatcagaagatgccatccatgagcagcagtgcctgtcagatttggtccaagcagtgccctcaggtggctggcagaggccaatgcaattccttttcaagccagcatcaaagaattcctgatgataaataaatcaggcatctgagctcgcaatggaaaaccacaaaacacagtgggaagcaggatatcctgagtccaagctggtaaaagcccagacagaggctccaaccatcagaataggtaagggtgtgacaggtctaaaacatgaaaatgggcgattgaaaatatgagcaggaggccgggcgcggtggctcacgcatgtaatcccagcactttgggaggccgaggcaggcggagtgcctgaggtcaggagttcgagaccagcctggtcaacatagtgaaacactgtctctactaaaaatacaacaaaaatttagccaggcgtggtggtgggtgcctgtaatcccaggtactcggtaggctgaggcaggggaatggcttgaaccagggagctggaggtttcagtgagctgagaacatgccactgtactccagcttgggtgacagagtgagactccgtctcaaaaaaaaagaaagaaaatgtgagcagggaggccaggtgcagtagctcacacctgtaatcccagcactttgggaggctggagcgggcagatcacctgaggtcaggggttcgagacgagcctggccaacatggcgaaactttgtctctactaaaaataaaaaatcagccggacgtggtggcaggtgcctataatcccagctactcaggaggctgagacaggagaatcgcttgaacccaggaggcggaggctgcagtgagccaagatcgtaccactgcactccagcctggggaacagagcgaggcgcgaggctgtcggagggagggaatatgagcaaggaacaagttggcagcatgtaagacgtacttaaaacgtttttacccattaatctatgaattcctctgagtttctgagaatggaaacttggggtttaggttttatttttttaatgtcacatttcctgaaatgttactattcaaatatagatttgaaacaagagcttttgacagagcttgggcagcctcacttacaaagcacacacgtgaggtctctgtggtgggtgccaacccttggcagattcacactgcccttgtcagcagatgtcctggcctgaccccaggtaagggtggctccccacggaaaggaaccttggtcaatttgttttttgtttgtttgtttgtttttctttttcttttttttttttttttttgagacacagtctcactctgttgcccaggctggagtgcagtggcgtgatcttgactcactgcaacctctgcctcctgggttcaagtgattctcctgcttcagcctcccgagtagctgggattacagatgtgcgccaccacgcccagctaatttttgtacttttagtggagatggggtttctccatgttggtcaggctgatctcgaactcctgaccgcaagtgatccgcccgccttggcctcccaaagtgctgggattacaggcatgagccactgcgcctggccaatcttggttaatttgtaaagatacctggtggctgtgaatttggtcttaactaggaccgtagtgttgcagagtaagatgttaaatggtgacctagagaaagccaaacacattaggcacattataccaaaagaacttgacttttaaataatggttttagaaatggaagctggtgttcttctgcgctgtggacgcggaggagaatggagcaggtctgcacagccaaagtgcctcctttcactccagggtccaggcatccagcagccgaagcgcctcctttcactccagggtccacacatccagcagccgaagcgcctcctttcactccagggtccacacatccagcagccgaagcgcctcttttcactccagggtccacacatccagcagccgaagcgcctcctttcaatccagggtccacacatccagcagccgaagcgcctcctttcactccagggtccacacatccaacagccgaagcgcctcctttctctccagggtccacacatccagcagccgaagcgcctcctttcactccagggtccacacatccagcagccgaagcgcctcctttcactccagggtccacacatccagcagccgaagcgcctcctttcaatccagggtccacacatccagcagccgaagcgcctcctttcactctagggtccaggcatccagcagccgaagcgcctcctttcaatccagggtccacacatccagcagccgaagcgccctcctttcaatccagggtccaggcatctagcagccgaagcgcctcctttcaatccagggtccacacatccagcagccgaagcgcctcctttcaatccagggtccacacatccagcaggtgccgactggggcaaaactcccaatgccggcattaagctagattggcccggaatcagaggtcttgggtgggatgccccctctcacccatccctccttcgaatagagcccacggtcctggtgtggctctgtcatggctgggctgatgtaggtagcatgtgcagaggatgtggagtcggctcctttttcctgtgacgaagttgaaagcgatgatgcatgtgtgttttcttacccgatgcccactgtgtgctgggcactgtcctaggtgctggtcatccggccccacccaaacaagtgggctgtgtgggcggggggagggtccccgggccctgacgtcccgagcaggctcttctgatgagcaggagagtcccgtagagggtctggaccccctttgctcagccgcacctgatgcccacatgtgctgagggtcccggttcctcacgtgaactcagtgctgtattttctcttcagtcccgtttcctcacgtgaattcagtgcaggcggttcacagtacactgtatttcctcttctttttttttttttttttttttgagatggagtctcactctgtcgcccaggctggagtgcagtgacgcaatctcggctcactgcaagctccgcctccggggttcacgccattctcctgcctcagcctcccgagtacctgggactacaggtgcccgccaccacacctggctaattttttgtattttgtagtagagacggggtttcaccgtgttagccaggatggtctcaatctcctgacctcctgatccacccgcctcggcctccccaagtgctgggattacaggcgtgagccaccacgcccggcctatatttcctcgtcttaactcaggtgtgaggtgagctctgtaataggaaggaaatttgtgaaaaatggtaaaagagggaaaagcatatgaaagggctgtgtctggaaagaatctgaattggaggctctgggcacatggtgacagtgcagatgcacccctttactcccaggaacactttgggcacttaggcaaggcagaaaatgtccaagcaggtcccgacaacattcattctcatgccttttgtaacatttaaacgttcatgaaaacatcgccaaacaagctgataattaccatcattttggaattgttcagaaccatgaagaataaagaaggatcatttaaaatcttgaaaaatactgaacaaagaatactaagataattgcaggctgccatgtagcagttcaagatgttcatgagtccgagttccccttctctgaggctgtcaggaggaggttctgtttgaatgaaggtcaggcagggggtacccccacacactctgcttagccctagacgggaccccaggctgctctacgcagagcgcagcaggagctgcagccccccagcccctgcaagccacggggccttgcctgaagcagcacctcgtcacccctgcccgatggcacctcccctgtgtcccctcatgcagagcagggttccaggcctctccttggggccactggttcccccaaccttgggatagacccaagaggaggctctcaagcttgggcaagcctggcgcccggaagggacaaggtgccggggccacctgttgcccggctcagtgtcctcttttgagaaggtataggtgtggaaggccctgcctgtcctctccgctggcccctcagtgtggcctgggcctgacgctctgttcccacctgcagagagcgtactgcggtcagtgcagcgagaggatatggggcctcgcgaggcaaggctacaggtgcatcaactgcaaactgctggtccataagcgctgccacggcctcgtcccgctgacctgcaggaagcatatggtgagtggcagggctggggaggcccggggggcacgggcggggtcggggcgtggcagccagcccattgtccaagcagaccttggtgaccctgggttcttcaagaggggccgtggtgccgtcctagctctgggctgcagcgtgagactcaggcggcagtcttggataggacccatcttcctgagcccccacaagcccccggcacactctgctcattggggcatgaggctcaggcagcaggctcaggtaggacgtggtacgctctgctcagtgggtcggaggtaaggttcattcataccccagtcttgaaccagctcttaaggactgtggaggtgaaagccaggtctgacctagtagcattgggcacgctgaggctccgaacatctggagcctctccctggcatcccccctgggaagccatgcccagcctgtgatgagggcggcaccttccctccgccatccccgagtgcttggacttgaagcatccaggcctttgggggccttattgacttttgcttattgaaggctgcctctggcatttccgtgtggccccctgcatcccactgaaccacgggggtgaggcctggactgaacattcaactccctgggccctgctgcagcgtgcagtgggtgtgtctggggagggtggcttgtctgcatcttgctgtggcatgggaggaaaggcgcctgtggcagtgacgtgccctctcctctgttacgggataaagacagagtctggatcagggtgtcaccccaggatcaccagccacagggatgggggaccacgcaggctggtgcatgcgttggcacagtccttccagaggtccttcagctgcatctgccaaaaagcctgtaatgccctttgacctcataggtccactttagcgtaagcaaatgagaccggccccagaaatgtggtcagctagaggcggagggaggccagagcctgccacccagctgaccaccagtactggtggctccattatgacatatctgcaggcggaacccagaggcccttagaatggccccctgatgcttggttactgacaggatgcagctttgggacaggggagatgaccaagcattgtgcaaaatatcccgttgtataaagc

SEQ ID NO: 459 - DNA, 6000 bp, Homo sapiens
gcaggcggagtgcctgaggtcaggagttcgagaccagcctggtcaacatagtgaaacactgtctctactaaaaatacaacaaaaatttagccaggcgtggtggtgggtgcctgtaatcccaggtactcggtaggctgaggcaggggaatggcttgaaccagggagctggaggtttcagtgagctgagaacatgccactgtactccagcttgggtgacagagtgagactccgtctcaaaaaaaaagaaagaaaatgtgagcagggaggccaggtgcagtagctcacacctgtaatcccagcactttgggaggctggagcgggcagatcacctgaggtcaggggttcgagacgagcctggccaacatggcgaaactttgtctctactaaaaataaaaaatcagccggacgtggtggcaggtgcctataatcccagctactcaggaggctgagacaggagaatcgcttgaacccaggaggcggaggctgcagtgagccaagatcgtaccactgcactccagcctggggaacagagcgaggcgcgaggctgtcggagggagggaatatgagcaaggaacaagttggcagcatgtaagacgtacttaaaacgtttttacccattaatctatgaattcctctgagtttctgagaatggaaacttggggtttaggttttatttttttaatgtcacatttcctgaaatgttactattcaaatatagatttgaaacaagagcttttgacagagcttgggcagcctcacttacaaagcacacacgtgaggtctctgtggtgggtgccaacccttggcagattcacactgcccttgtcagcagatgtcctggcctgaccccaggtaagggtggctccccacggaaaggaaccttggtcaatttgttttttgtttgtttgtttgtttttctttttcttttttttttttttttttgagacacagtctcactctgttgcccaggctggagtgcagtggcgtgatcttgactcactgcaacctctgcctcctgggttcaagtgattctcctgcttcagcctcccgagtagctgggattacagatgtgcgccaccacgcccagctaatttttgtacttttagtggagatggggtttctccatgttggtcaggctgatctcgaactcctgaccgcaagtgatccgcccgccttggcctcccaaagtgctgggattacaggcatgagccactgcgcctggccaatcttggttaatttgtaaagatacctggtggctgtgaatttggtcttaactaggaccgtagtgttgcagagtaagatgttaaatggtgacctagagaaagccaaacacattaggcacattataccaaaagaacttgacttttaaataatggttttagaaatggaagctggtgttcttctgcgctgtggacgcggaggagaatggagcaggtctgcacagccaaagtgcctcctttcactccagggtccaggcatccagcagccgaagcgcctcctttcactccagggtccacacatccagcagccgaagcgcctcctttcactccagggtccacacatccagcagccgaagcgcctcttttcactccagggtccacacatccagcagccgaagcgcctcctttcaatccagggtccacacatccagcagccgaagcgcctcctttcactccagggtccacacatccaacagccgaagcgcctcctttctctccagggtccacacatccagcagccgaagcgcctcctttcactccagggtccacacatccagcagccgaagcgcctcctttcactccagggtccacacatccagcagccgaagcgcctcctttcaatccagggtccacacatccagcagccgaagcgcctcctttcactctagggtccaggcatccagcagccgaagcgcctcctttcaatccagggtccacacatccagcagccgaagcgccctcctttcaatccagggtccaggcatctagcagccgaagcgcctcctttcaatccagggtccacacatccagcagccgaagcgcctcctttcaatccagggtccacacatccagcaggtgccgactggggcaaaactcccaatgccggcattaagctagattggcccggaatcagaggtcttgggtgggatgccccctctcacccatccctccttcgaatagagcccacggtcctggtgtggctctgtcatggctgggctgatgtaggtagcatgtgcagaggatgtggagtcggctcctttttcctgtgacgaagttgaaagcgatgatgcatgtgtgttttcttacccgatgcccactgtgtgctgggcactgtcctaggtgctggtcatccggccccacccaaacaagtgggctgtgtgggcggggggagggtccccgggccctgacgtcccgagcaggctcttctgatgagcaggagagtcccgtagagggtctggaccccctttgctcagccgcacctgatgcccacatgtgctgagggtcccggttcctcacgtgaactcagtgctgtattttctcttcagtcccgtttcctcacgtgaattcagtgcaggcggttcacagtacactgtatttcctcttctttttttttttttttttttttgagatggagtctcactctgtcgcccaggctggagtgcagtgacgcaatctcggctcactgcaagctccgcctccggggttcacgccattctcctgcctcagcctcccgagtacctgggactacaggtgcccgccaccacacctggctaattttttgtattttgtagtagagacggggtttcaccgtgttagccaggatggtctcaatctcctgacctcctgatccacccgcctcggcctccccaagtgctgggattacaggcgtgagccaccacgcccggcctatatttcctcgtcttaactcaggtgtgaggtgagctctgtaataggaaggaaatttgtgaaaaatggtaaaagagggaaaagcatatgaaagggctgtgtctggaaagaatctgaattggaggctctgggcacatggtgacagtgcagatgcacccctttactcccaggaacactttgggcacttaggcaaggcagaaaatgtccaagcaggtcccgacaacattcattctcatgccttttgtaacatttaaacgttcatgaaaacatcgccaaacaagctgataattaccatcattttggaattgttcagaaccatgaagaataaagaaggatcatttaaaatcttgaaaaatactgaacaaagaatactaagataattgcaggctgccatgtagcagttcaagatgttcatgagtccgagttccccttctctgaggctgtcaggaggaggttctgtttgaatgaaggtcaggcagggggtacccccacacactctgcttagccctagacgggaccccaggctgctctacgcagagcgcagcaggagctgcagccccccagcccctgcaagccacggggccttgcctgaagcagcacctcgtcacccctgcccgatggcacctcccctgtgtcccctcatgcagagcagggttccaggcctctccttggggccactggttcccccaaccttgggatagacccaagaggaggctctcaagcttgggcaagcctggcgcccggaagggacaaggtgccggggccacctgttgcccggctcagtgtcctcttttgagaaggtataggtgtggaaggccctgcctgtcctctccgctggcccctcagtgtggcctgggcctgacgctctgttcccacctgcagagagcgtactgcggtcagtgcagcgagaggatatggggcctcgcgaggcaaggctacaggtgcatcaactgcaaactgctggtccataagcgctgccacggcctcgtcccgctgacctgcaggaagcatatggtgagtggcagggctggggaggcccggggggcacgggcggggtcggggcgtggcagccagcccattgtccaagcagaccttggtgaccctgggttcttcaagaggggccgtggtgccgtcctagctctgggctgcagcgtgagactcaggcggcagtcttggataggacccatcttcctgagcccccacaagcccccggcacactctgctcattggggcatgaggctcaggcagcaggctcaggtaggacgtggtacgctctgctcagtgggtcggaggtaaggttcattcataccccagtcttgaaccagctcttaaggactgtggaggtgaaagccaggtctgacctagtagcattgggcacgctgaggctccgaacatctggagcctctccctggcatcccccctgggaagccatgcccagcctgtgatgagggcggcaccttccctccgccatccccgagtgcttggacttgaagcatccaggcctttgggggccttattgacttttgcttattgaaggctgcctctggcatttccgtgtggccccctgcatcccactgaaccacgggggtgaggcctggactgaacattcaactccctgggccctgctgcagcgtgcagtgggtgtgtctggggagggtggcttgtctgcatcttgctgtggcatgggaggaaaggcgcctgtggcagtgacgtgccctctcctctgttacgggataaagacagagtctggatcagggtgtcaccccaggatcaccagccacagggatgggggaccacgcaggctggtgcatgcgttggcacagtccttccagaggtccttcagctgcatctgccaaaaagcctgtaatgccctttgacctcataggtccactttagcgtaagcaaatgagaccggccccagaaatgtggtcagctagaggcggagggaggccagagcctgccacccagctgaccaccagtactggtggctccattatgacatatctgcaggcggaacccagaggcccttagaatggccccctgatgcttggttactgacaggatgcagctttgggacaggggagatgaccaagcattgtgcaaaatatcccgttgtataaagcacttggtggaaaggtcatggcctgcagtaccgagtggccacctccgtctgcagaatcataggtaatgtttatgttctttatctaattcagtaaaatagcataacaattagatttttatatactatattacagtatacccattgtaatgtgtaaatatgtaaatcataaatagtcttgaagtggccaggtgcagaggctcacacctgtaatcccaacactttgggaggccaaggtgggaagatcacttgaggccaggagttcaagaccagcctgagcaatatggtgagaccccatctctacaaaaaaaatacaaaaattagccaggcatggtggtgcgcacctgtagtgcccgctgctctggaagctgaggcgggaggattgctcgagctcaggaggttgaagctgcagtgagccgtgatcgcgccactgctctccagcctggatgatgacagactgtgaccctgtctgtaaaaaaaagttcttaattttaaaaagtcacaaagtgtttacagaagctacattgtaacacctgctctagcacttggtcatgctgccatctctgtgtctctccggcaggattctgtcatgccttcccaagagcctccagtagacgacaagaacgaggacgccgaccttccttccgaggagacagatggaagtaggcgctgctttcttccggccgggtagagcctgggcatcacctcaccctgctcacctctgccttctagccacgagtcctttctcagtcccatctgctctgcaggggtcattgtcttcaagcctggccacccttccctggggctggggatgaggctctccagggcctcctctcaatccccggcagagatgagcagggtgagctggccctccctggaggctgctgggcagggatgcctccgtgaagtgctgttgtggttgcccaggggtgcagagcctcttcctctaaccagctccgggagttctcgaaggca

SEQ ID NO: 460 - DNA, 6000 bp, Homo sapiens
ttgttacacttatcctaagtattttattctttttgatgccagtgtaaatgggatgattttctgcttcattttcagattgttcgttggaagtgtatttctatatttgcatatgatcttatatccttcaaccttgctaaacttgatgattagttctaatcactttttagtggattccttagggttttctacatacaagttcatatgatctgcaaatagaaatagcttcacttcttcctttccaatctggatgctttttatttttcttgcctaaatgtcctggctagaccctgcagtaccatgttaaacagaagcagcaagagtggacatccttgtcttcagaaactaaacacacaccacacaacgcagcactgtactcctgggcattctccccagaggcatgaaaacctacatctcgcaaaaacctgtcaagatggccaggtgcggtggctcacgcctgtaatcccaacactttgggaggccaaggcgggtagattgcttgagcctaggagttataggccaccctgggcaacatgatgaagccctgtttctacagaaaatacaaaaattagccaggcatggtggtgcacccctgtagtcccagctactcaggggcggaggtaggaggatcgcttgagcccaggaagtgaaagctagagtgagctatgattgcaccactgcactccagcctgggcgacagggtgagaccctgtctcaaaagaaaacaagaaagaaaaaagaaaaacttgtacataattggccagagcagcttcatttgtaatagtcaaaaactggaaacaaacaaaatatctttccacaggcgaatggttgaacaaactgtggtaaaaccaaaccatggaatgctactcagcaatgaaaaggaacggactatggatacacacaacttacatgcatctcgggagccttatgtggagtgaaaaaggctcatctcaaaaggtcacatactttatgattccacttacctaatattctttttttttttttttttgagatggagtctcagcctgtcacccaggctagagtgcaatggcacaatctcagctcactgcaacctccacctgctgggctcaagcgattctcctgcctcagcctcctgagtagcgagattacaagcgcccgccaccatgcccagctaatttttgtatttttagtagagacggggtttcaccatgttgcccaggctggtcttgaactcctgatctcaggtgatccacccacctcggcctcccaaagtgctgggattacaggtgtaagccaccgcacctggcccctaatattctttaaatgacaaaattatagacatggagaacatatcagcagttgctacgggctagggattgctggtgggcaggggtaggcaggattataaaggggagaaccttgagtgatggatgggagagggctgtaccttgaccctgatgctggtcacaggaatctacatggggagaaatgacagaacaacatgcacattgcactagtgtcggtgttcctgttttatattgtaccacggttgtatctgatgttgcctttgagggaaagggtagaggtacattggaccttcctatctgtgcaacttcctgggaatctgtcattatttctaaataaacggtttaggccaggcacagtggctcatacctgtaatcccagcactttaggagaccaaggcaggaggacagcttgagcccaggagtgtgagactatcctgggaaacatggcgaaaccctatctctacaaaaaatacaaaacaattagccagacgtggtaatgcatgcctgtggtcccagatacttgggaggctgaggcaacgggatcacttgaaacacggaggtcgaggctacagtgagcaaggtttgtgccactgcactccagcctgggcaacaaagtttcaaaatataaataaaacaaaaatattttggccaggcacagtggctcatgcctgtaatcccagcactttgggaagccaaagtaggaggacttcttgagcccaggagtttgaggccagcctgtgcaacagagggagaccccatctcaatgttttcataaaagaaaagaaaaaaaattttttttaagtctaacaaggaggaggactagcggtctcagcgaagagaggaggataaagcgccagagaaaggaaggacagagagagagagagacagagacagacagagagagccagagacagagacagaggagagagacagagactgcgagatgcagggagagacagagagagagcaacgtgctctgctgtctttcaactatgccctgaaatgggaaagaaagataacatccaaaggtgaggcataccctgagcatacccctgcccagcccccacctcctgcaggggccaccccagggggcatcacagtgatacattttccagctgcctcctctaaaagcacaaggcccagtggagaaagggggtttgcaaccttggagcacacaccagaggcgtcacccctcaatgctgacagtggagcccccaacactgtagccggggaggtggccacatggatgttactcttcgacttctctctttttgccccttaggccaaggagccacagctccatccctcagagcacccatgtccttcctgggctgccagaagcatctcctggagcctgaccccatttgcacaacactggccgaccctcccaggtaaaggcacatgatggcatctcctgccccagtggccaaaagctctcttttacgggagtcaaacaagcgcagaccttggcattcggctggttctgaaaggcaggactttgtgtcctgaggcttcaatacagatgccccgaaagaaccacctctcaaagcaattgcccccaaacttgagccctgaggacagcatcttagcaaacaccaaccgagaacaatgtgagagcatcccacgaaccaccacctcgtccttccagaagggtgctcagcccagcagaacagaacagcatctcttcctggctccaccttccccatgaaactgtgcaggccccaaccccaaagccctccctctgctcttgggaattgctaggacacctcaaatgaacgcaaataaaattaaaagattttttgaagaaaaagacgaccaattgaacagctgggttcatgaacgagaggactgaggactctgccacctaagcgacgctgaccagttctgcctccagagggcttcctccttgagacccgagagttcacagtaagggggactcttccccaccctgatgggcacctggagctaagcccccaggacctcggagagtgccagcttcccgcccacctccaaagtccttgccactcacagccctgccaggcctggcccaaggtgagcagcaccagctcggcgttgtcgggaacactggggaagtaatcttccgtcagctccgtgccatcctcgtacaggcacagccgggaaccgcgctcagggagctgcagggacgggagaagcaacaggaggaggaagggtctcaagacgagggctttgcatctgcaggcctcacaaacgaccggaatgagctgtgcttaaagaagcaggctcaggctgccgcctgtatgccacagtcgctccaacgcccaggcaaggatgagggagcgggagcaagggcgcctgactgcgggccgttctaaaatacgaagagtcaggaaaaacatacatcagggggtgactgctggctctgcaggattcaccctttttaaatgagctcctgagggcgcttcaaatagagcctgtctttgacagcgccgcctccctgctgccaggagctgaacaccaccatccccagcacacagccgccagagcggtgctggcacacgaaggagaacggttggttgcctctgtgcacaagtgtgaccggcacgtggcactgttaatttgttggagtccggttccctgttactctgcactggtcagttttaggcattttatggctactcccaccccacccgcaccgaccccggcaatgcacacctggtaaccctagtactggtctaaaaagaaaaccaacctagaataaggtgacgattgcaatccccagctgcgagggctggaaggggcctgcagagcccacctagccaagcctttcatgttactcaaggggaagctgaggccggacaggcagagcagccgtgaccccgcgtgccagtacctggcactctacccgggtctcctagctctgatgcagggctgtcctgcccgagaggtgggaagagggaaggggtgatccaggtcgtcccccaacccccctgcgttctgaagccacgctcaggaaccccaggctgcgggggcccggggtcctagcggctgaggcgaacgaaaactacccgccccgggcgccgcctgcaccctccgttttggaagaggaaaagcggcacctcctattctccccacacgcctccccgacgggccgtccccgcctagcccagcgggcacctggaagcggagacagcccttgcgcagcacctcctggcagctccggccagccacgccgaacttcctcgggctgcgcagggcccgcagcttcacgctcttgggcttctggagcattgcagatgtcctcaagccctctgggtcccacaggcggtggcacctgctgcccagctgctcagatccgtcctcgccctggccgcaggggtctgcacctggtgagctctgcaagctggcacaggccgggtgccgatcccggaaactacattacccagaaggcctgggaaaagtgaggcccgacgcggtcttgtgcgcaggcgtcgccccacggacaccacattaccttactcagaaggctcaggaaagcaaaggcgcgacgccacctggtgtgcccaggtgccgtggccccggaaactacacaaccctgagggccagagtagcggagccctccccttgtgcgcaggcgcggcctggggtggggcggggtcgcgcacgcgcagaggccctggcccagggctgggcttggttgtcatgagagtggaggctgcggccggggctatgggcagaggtggccgggtctgcttcttccctgtcactgccgcagcagcttggggtgcaaggcggcctggggcggcggaaggggcgccccccgagttccgtctgaggaagcggcggctgccgaggaagtccacgagagccgggtcccgcacgcccctggggtccgggtgctgaggcgccgcctggccgcctccccgggccgcggcaccgctccgacccagccgccctctccaccggggccgcggcagcgccagtcggggcccttccctctaagcaggtaccttccgggccgctgcggcgccggcccagggccggagtggggagcggggcgcggggcgcggggcgcgggcgccgcgggggcgcggtccccacctgggagctgggtacgaagcctgggtgcgcggtgcaagcgcggacggtgtggagttagatgccggccttgctgtcgccgaagagccggcgcggccccgtcgtgccgtatgccggggagctcagcacgggtgctgggaccgcctgccccggccgggacggcccatttagcgtggaatattgttttcagatccggcttttcctcttctggatgcgtagcacatagggggccagtttcagatgtgttctgctgagcaaaagtttgaggaaaattgctctgtccctatagagattaaagtctgatggttggttgttttttgttttggagtttgttttgttttgtttgcacttaagttcagatttctctgaagccctttcagtcgctaagatgacttgatcagaaacccataagcctttgagacggtctcgctctgtcgcccaggctggagtgcaatggcacgatctcagctcactgcagcctccgcctcccgggttcaagcgattctcctgcctcagcctcccgagtagcccgactaatttttttatttttagtagagacggggtttcaccatgttggccaggctggtctcgaactcctgacctcaagtaatacgccctcctcggcctcccgaagtgc

SEQ ID NO: 461 - DNA, 6000 bp, Homo sapiens
ttctgcttaagatatcatttaagttatcttgacttttcccaaatatgtgtccaaaaagtttgaccagtgctgtggattgtgctccccaaaaggatacgctgaagttccacgtgtggtacccgtgaaggagacctcatttgaaaatagggtctctgtgggtgtgatctagttaaaatgaggtcctcggggtgggcccaatgcaacgtgacttctaagaagggaagagacacagccacacaaagggagagcgccatgtggtgacagaggcagagaccggagcaacgcatctctaagcgggccggccaaggacggctgaggatggccagcaggcgcccaaggttaggaagaagccaggagggatcctgccctacagcctccagagcgagagtgcagccctgtccatgcagccatctgacttctgcctgcagaatgaatttctggtgttttaagccatctagtttatgatattttgctatgtctagaatataaacacaaacttctttctattagttaggaaactaatacaaccagtatgttaattagttatacaataccaaggggaaaaaggcaacgtaagcgctagcattaacaactgctaaatgaatgtgtatgaccagaaggaagagcaggaatgacaggcaggcatattaagtacaaaaaggttcatgcagagttaggttgagggactgactcacaggacattgagcccaatttgctcagggactctgggttacttttcagttactaagccagtcagattcctcctaagtaagccaatttgggttaggtctaaatcatcgggggaaaaaaaaaaaggctcctcactaaaccaggataaagaagactccatcagaaagttctctgggataagatatactattaattgaaattcccaataggaggtaacatataaacatacccccacataaaactgtacgtattttgacatgcttgatgcatgatctagatctttcttttactttcattgagaattcgaagaggaccacttcaatatattaattattggctggcattattgctaatgtttcttggaatgtatgaacaaaagcactaaaatagaatgataaaccatcgagattctagttattttttgcacaaagttcactgcaagatgttactgtatattaaacaaaaacaaaactaaaccaactcagaaaataatttttaaaaagccccccagaacaggatgaggctgggtgtggtggttcctgcctataatctcagcactttgggagaccgaggtggaaggatcacttgagcccaggagttcgagaccagcctgggtaagagagtgagaccccgtttctaaaaaaccaaacaaaaaaagaattttgaaaggatgagtgtgatttaacccactgttagctgcacggccccacctgcactctgggcaacctatgccagaaacgcacagcccatggctcccactccttcgtgacctggcacttctgggtcgcatgggctctgagcctagaggtacttttcccttggccacagcatctctcttcacccactccccatccaacagtgtgccaggtcttatcaggcctgcccttccttctgatcccactgtcttttctagacagcaaccacctggtgtccccacctgaagcgcctccctcagacaagtcctaagttcctattgtgtgaacgtgcctcaggcccagctccagtcatctccatccatgtcctaactccagagctcttggtgggctccccatctagggatcaatgcgccaactctcccctgaccctcacttcttgtcctgaattctgaagtccagccaaacaatcaaagctcaaagttaatacccttcagctctgaagccctccaatcctttcatcagctttttttccttttttgagacaagagtctcaatctatcacccaggctggagtgcagtggcgtgatctgggctcattgtaacctctgtctccctggttcatgtgattcttgtggttcagcctctcaagtagctgggattacaggcatgcaccaccatgcctggctaatttttttttttttttttttttggtattttagtagagacggggttttgccatgttggccaggctggtctcgaactcctggccaatctgcccgccttggcctcccaaagtgctgggattacaggcataagccaccatgccaggcccctttcatcatctttcagggcagggcttgtcactccctattccaccttgaaaatacctcttgtgcccaggctgttgggttccagtctccaaatttttttttttttttttttgagagagggtctcactctgtcacccaggctggagtgcagtggcgtgatcgcggctcactgcgacctctgcctcctgggttcaagtgattctcccgcctcagcctcccaagtagctagtattacaggtgcgcaccaccacacccagctaatttttgtatttttagtagagatggggtttcaccatgttggccaggctggtctcgaactcctgaccttaggtgatccacccgcctcagcctcccaaagtgttgggattacaggcgtggccaataagcccagccccgattttttttttttttttttttttaatacaggttctcgctctgttgcccaggctgtactgctgcagtggcgtgatcatagctcactgtaaccatgaactctcgggctcaaatgatcctcttgtctcagcctcctgagcagctaggactacaggcacatgccaccatgcacagctactttttttttttttttttgtagggatggggtttcactgtgttgtctaggctggtcttgaactcctcccaccttagtgtcccaaagtgttgggattacaggcgtgagccgccgagcctggctagtctctgaacctaaccaacactctctgttacggctcgaagacataaatataggaccttttcagtcaaacagaagggtgtttccagtatgctatactgcccccaacaaatctaaaacaaagtactggcatttaagaaccagctaagagaaatgcacagggactgtggaggcaatgctattacctcagtctggtatttgaaaaggattccttttttagtctaccccctcccaaagaccttccagttgtaccctagggtcccctctgtgtaaaccttcaagtgttacataagatacttggaatgtcactgaaggatgccacttttaggctctataaaaatcaccattaacaatttgggaagaagcaaagctctgttgaacatccagttattggctggtcttcctcaccagaggcatgagggatccctgttgtcccaggggcagccatcgacatcccgacaaatgccagagtacatctctccccaggcagcgatgactccatggcggtctcatccctcactacacttttcctagtgctggcatggtaaaaggcaattaactataaattaaacggaaactcagtgtagcaacttccattttgttacaagactaggaaacaaaacttgtctctgattttctttttaagaagacttttaagtgtgactgcgcgcggtggctcatgcctgtaatcccagcacttcgggaggccgaggagggcgtattacttgaggtcaggagttcgagaccagcctggccaacatggtgaaaccccgtctctactaaaaataaaaaaattagtcgggctactcgggaggctgaggcaggagaatcgcttgaacccgggaggcggaggctgcagtgagctgagatcgtgccattgcactccagcctgggcgacagagcgagaccgtctcaaaggcttatgggtttctgatcaagtcatcttagcgactgaaagggcttcagagaaatctgaacttaagtgcaaacaaaacaaaacaaactccaaaacaaaaaacaaccaaccatcagactttaatctctatagggacagagcaattttcctcaaacttttgctcagcagaacacatctgaaactggccccctatgtgctacgcatccagaagaggaaaagccggatctgaaaacaatattccacgctaaatgggccgtcccggccggggcaggcggtcccagcacccgtgctgagctccccggcatacggcacgacggggccgcgccggctcttcggcgacagcaaggccggcatctaactccacaccgtccgcgcttgcaccgcgcacccaggcttcgtacccagctcccaggtggggaccgcgcccccgcggcgcccgcgccccgcgccccgcgccccgctccccactccggccctgggccggcgccgcagcggcccggaaggtacctgcttagagggaagggccccgactggcgctgccgcggccccggtggagagggcggctgggtcggagcggtgccgcggcccggggaggcggccaggcggcgcctcagcacccggaccccaggggcgtgcgggacccggctctcgtggacttcctcggcagccgccgcttcctcagacggaactcggggggcgccccttccgccgccccaggccgccttgcaccccaagctgctgcggcagtgacagggaagaagcagacccggccacctctgcccatagccccggccgcagcctccactctcatgacaaccaagcccagccctgggccagggcctctgcgcgtgcgcgaccccgccccaccccaggccgcgcctgcgcacaaggggagggctccgctactctggccctcagggttgtgtagtttccggggccacggcacctgggcacaccaggtggcgtcgcgcctttgctttcctgagccttctgagtaaggtaatgtggtgtccgtggggcgacgcctgcgcacaagaccgcgtcgggcctcacttttcccaggccttctgggtaatgtagtttccgggatcggcacccggcctgtgccagcttgcagagctcaccaggtgcagacccctgcggccagggcgaggacggatctgagcagctgggcagcaggtgccaccgcctgtgggacccagagggcttgaggacatctgcaatgctccagaagcccaagagcgtgaagctgcgggccctgcgcagcccgaggaagttcggcgtggctggccggagctgccaggaggtgctgcgcaagggctgtctccgcttccaggtgcccgctgggctaggcggggacggcccgtcggggaggcgtgtggggagaataggaggtgccgcttttcctcttccaaaacggagggtgcaggcggcgcccggggcgggtagttttcgttcgcctcagccgctaggaccccgggcccccgcagcctggggttcctgagcgtggcttcagaacgcaggggggttgggggacgacctggatcaccccttccctcttcccacctctcgggcaggacagccctgcatcagagctaggagacccgggtagagtgccaggtactggcacgcggggtcacggctgctctgcctgtccggcctcagcttccccttgagtaacatgaaaggcttggctaggtgggctctgcaggccccttccagccctcgcagctggggattgcaatcgtcaccttattctaggttggttttctttttagaccagtactagggttaccaggtgtgcattgccggggtcggtgcgggtggggtgggagtagccataaaatgcctaaaactgaccagtgcagagtaacagggaaccggactccaacaaattaacagtgccacgtgccggtcacacttgtgcacagaggcaaccaaccgttctccttcgtgtgccagcaccgctctggcggctgtgtgctggggatggtggtgttcagctcctggcagcagggaggcggcgctgtcaaagacaggctctatttgaagcgccctcaggagctcatttaaaaagggtgaatcctgcagagccagcagtcaccccctgatgtatgtttttcctgactcttcgtattttagaacggcccgcagtcaggcgcccttgctcccgctccctcatccttgcctgggcgttggagcgactgtggcatacaggcg

SEQ ID NO: 462 - DNA, 6000 bp, Homo sapiens
cggctgggacgcgggtttctcagacatcgcgtcctcagtgcccttgccagtctctgaccgctgctttagccacctgcagcctactctcttgcagcgagccaagcccagtaacttcctgctggacagaaagaaaacggacaagctgaagaagaagaagaagaggaagcgcagggacagtgatgcgcctgggaaagaggggtacagggggggcttgctgaagctggaagccgctgacccctacgtggagacccccacgagtcccaccttgcaggatatcccccaggctcccagcgacccctgctcgggctgggactccgatactccctcgagtggatcttgtgccactgtgtcacctgatcaggtcaaagaaataaaaactgaaggcaaacggactatcgtccggcagggaaagcaggtggtgttccgagatgaggacagcactggcaatgatgaggacatcatggtggactcaggtgagtggtccctgaaggatgatgacccttgttggcttgtggttagaagagaggttattttattaagtggtcatctctctggggcacagggtctggtgccttccgtagagtgtgacagccccactgtccaaggaggagaaaagctgcaggaatgtggatatcgagatgtttaggaaggggttgattgccactagagacagctgagattctaagaccttagaacataaaaagggtatagttctaagtaagcatccaggtaagcatccaggccgggcacggtggctccaccagtaatcccggcactttgggaggccaaggcaggtggattgcttgagctcaggagttggagaccagcctgggcagcatggcaaagccctgtcactgcaaaaatacaaaaaaaggctgggcgcagtggctcatgcctgtaatcccagcactttgggaggccgaggcaggcagatcacgaggtcaggagttcgagaccagcctgaccaacatggtgaaaccccgactctactaaagatacaaaaaaaaaaaagaaaaaattagctgggcgtggtggtgcgcgcctgcaattccagctactcaggaggctgaggtaggagaattacttaaacccaggaggtggaggttgcagtgagccaagatcgcgccattgcactccagcctgggcgacagcaaaactccgtctcaagaaaaaaaaaaaaaacaatagtcgagtgtggtggtgtgtgcctgtagtcccagctatttgggaggctgaggtgggaggatggcttgactgcaggagtttgaggctgcagtgaggtatgattgcaccactgcactccagccagggtgacagagtgagaccctgtcttagggaaaaaaaaaaaaaagtaagcatctcctgggtaatacctggttcccacacattttggagcccctcgtgccttttcagagagaagtgtcagcttcgagtggcagttggaagtgttctcgtcagtagagttaatgggtttcatggaagcccagctgatggcgaggaatgatgggaatttctcttccctccttgagagtatctttccttccagatgacgattcctgggacctcgtgacctgcttctgcatgaagccatttgccggccgccccatgatcgagtgtaatgagtgccacacctggattcacctgtcctgtgcgaaaatccggaaatccaatgttccagaagtgtttgtctgccaaaagtgccgggactccaagtttgacatccgccgttccaaccgctcgcggacgggctcccggaagctgttcctggactgactgctggctggcgaggaggctgcgagcgtggaatcggaagcgaccgcgggcttttttgcccttctcttagttgagcacagaaccctcagctctggtgcgggcagatccctgccatttaggtgcctaagcaaaaggacaggctgtccaaggtagaaactgtacatagccggtgaccgaatgcgacctttgccagccagagctgctgccagagctgcgttccctgcagtggaggtggactggacacccacgtgcagcgggtttggctcatttgaaaatgagggtccgtggtagctgtgcgttttgctatcattgctaagagattcccgctgattgggctcagtgccagctgttattctgcttccactgtgttggggagaggtgttcggtttccccagcctgttaatgaacagccatacgtgtaagctttttcttgagtgttaagtcttttaccaaaagtgtctgtacagcagccatccaagttgcccctacttagtggcttgccctctgcctgcctcagctgctgcctgaccggctgggggaggcactggcgggaggcctcgggctcccctggaagggcgctgggctggcgggtcagctggtggttcttaggtttccttctgtttgttaaaagggacaatgtggccacttctctgtggaaagggagttggttggggggttgagatggcccgtgttcataactcagtttcctgttttgcacgatgtaaaaaccctgtctttttgcacgatacagccaaaagtattggctgatttcttgctgagtgccctcttagttggtgtgtgaggtcttggtgggctcaggccagctgtttgcgagtgtgggaactcataggttctgtctttgtctcttcctttcacctcattctggtagcagcataaaggttaggcaatcactgggacccgcatggtgttcctccaaagaatagggtaaaggagagctgggagggagccctctccgttgggtgactcttgtgtgccctttagacaggctggcctgccggttccacagggtacagttaggacttgagtctttctttttctgttttgagttggtgagtgagtgatagggtaacatgggccttcaggatgaccccttggaactgtgccgagttccttaaatctcagctgggatcctggacctgggaggcccctgtgagggccagctctggaaaaacctgggagttgatgccggaggctgtggaagaactctgctcgagggcagggtgccctggaacactggtagttctggggctgggagggagaggggctccggctttctctgaaatgaacactgctcttcagcagttcaagtacttgttctcaaaacattttctaattgattggtaggttttcataagcattgtttctttaaggcatggaaagggaagaatgctcaagcaagtcatgtttgttttcagtgggatgggcccgcgttctcactgctgggggcttccccttcatgtggcacctttgtgccaggccaccaggcagactcttcccaccttctcccactgaagcaccaaggggcttgaaccgtaatttggctaatcagaggcattttttttgtcctagtatctttcacacttgtccaaccgtcttatttttttaaaagttctgttgcttgtattaacacgaaactagagagaaatagtttctgaagccagtttattgtgaagatccccaagggggaggttcggtagagaaaaatagtaagctggtttagaaactgacgagggcaaacagccaggacgcattggagaggaatttgccaaagatctaccctgagataacgcctgtccagtgtcttcaccacgtgaataaccagcgctccaaagtgtttttctgctttgaaaaaaaaaaattccacaagcttttaaaggtgcatttaagaatccatgtgactttagaatggaactgccggccctggcaactgtcacgtgtgctagaaggttcgatgcctctggaatgcatgtgatactcatctccattttgtttccttgattgcatttttgttcttttagcagatctgtccctgtgggtggtgtctaagaagtcggacaccttggtttttgtgttagattgagctgggcagctgcaatcagcttctttatatgcaaattaggcacgacccatctgtggttcctggttggtggctaatgaagtgaggggagggagggatgtcaccccaaaagtaggccctcccattggctttggccaggccagacacttcacatcgtttacatggttctgtgtaattttaaagtttatgtgtataaagcgaagctgtttctgtgaaactgtatattttgtaaataaatatattgctactttgaggttcatgattcaaggttcaggcgattgcgttctgtgctgaaggacaattgtgtttcttttctccttgctacctccccaaagcatgattacatcaagtctctgggaaggcagcgtctcagtgtgcacttagcaggatggaaaatgcccacggtgttaaggtaccttgctggtgaattccttagaaacaaaccacaggacgagtagatgtgaatggtttttgcagtttcttcatcagattgaggattagctcaagccccagtgagtggttagcctacttttgattttttttttgtttttgagacttgagtttcgttcttgtcacctaggctgtgaagtgctgtgatgagattttggctcattgtaacttccacctcccgggttcaagagattctcctgcttcagccttccgagtagctggaattacaggtgcccgccaccatgtgcggctaatttttgtatttttagtagagatggggtttcaccatgtcggtcaggctggccttgaactcctgatctcaggtgatccgcctgcctcggcctcccaaagtgctgggattacaggcgtgagccactgcgcctggccgatttttttttttttcttcttacaagatgacgccttccctataggctgctttgagaaagctgcagcctcggagtttctgcaaggcctgaactggaatctccctccccttcagttgccctttttgcctcttcacgtttgggggttccctgtgaccaaacttaagggcagtgagctgtctggcctctgaactgacaccaccagtggccaactagtaccacctccagtgacgtcagaggagtccagacctattcacaattcaaagccctaaaaacactgaggggttggccgttggtttccagttgtccaagcctgtgagtggctatgcgtcctggttgggtgctcaaagcaaggaggtgaaaggcgaccagcattggcgaatggggtaagacttgcacaggcccaaggctaggagttggggtttcgggcctgaattggggcccggagcacccctttacgtggcgccccgggtcccgtccgaccctggggagacgcgggtggctgggatggcaggatgagcgcgccctggaggcgagccaggcccgtcaccacctcccagcggccccgcccctccccgcaggtccctcccctctccgcaggccccgccgccgccgccatctttgttgggggcagccaggcctggctcgagatgccgaagtcgtgcgcggcccggcagtgctgcaaccgctacagcagccgcaggaagcagctcaccttccaccggtaagaggcggggacccgggggcgcgggaggcccagacccggggcccgcggaccgactccgaggccttggcgcgccgggcgggaggcccaaaggcgtgcggccgctgggcccggggacaggccgaggtcctgggcccagaggggctggcgccgccgcgcccgccgcggggatgcggggagtggcggacggaggggcagcggcgcacctggcggggccagggccgggacgtgcagggagcggagcaggtgtttgctgaacagactagcgggccgcggccggggtttgctgtgtccctggtcgctgcagcccccgccgcgcgcggtcctgaagggagcccggcacctgggcagtgcagtggaggagtggaacccccaggggcgtcctggcagtgggaagggactctgcagggtcgcgggaggacgctggagactttggagtctgctccagcactcgcccggcccggcccggcccggcccaggagcaatcgtcattagtcacagttgcgctttctccaaggtccagtcacggcaccatttctctacccacttttgggcacattccgaaggggggc

SEQ ID NO: 463 - DNA, 6000 bp, Homo sapiens
tgaggacagcactggcaatgatgaggacatcatggtggactcaggtgagtggtccctgaaggatgatgacccttgttggcttgtggttagaagagaggttattttattaagtggtcatctctctggggcacagggtctggtgccttccgtagagtgtgacagccccactgtccaaggaggagaaaagctgcaggaatgtggatatcgagatgtttaggaaggggttgattgccactagagacagctgagattctaagaccttagaacataaaaagggtatagttctaagtaagcatccaggtaagcatccaggccgggcacggtggctccaccagtaatcccggcactttgggaggccaaggcaggtggattgcttgagctcaggagttggagaccagcctgggcagcatggcaaagccctgtcactgcaaaaatacaaaaaaaggctgggcgcagtggctcatgcctgtaatcccagcactttgggaggccgaggcaggcagatcacgaggtcaggagttcgagaccagcctgaccaacatggtgaaaccccgactctactaaagatacaaaaaaaaaaaagaaaaaattagctgggcgtggtggtgcgcgcctgcaattccagctactcaggaggctgaggtaggagaattacttaaacccaggaggtggaggttgcagtgagccaagatcgcgccattgcactccagcctgggcgacagcaaaactccgtctcaagaaaaaaaaaaaaaacaatagtcgagtgtggtggtgtgtgcctgtagtcccagctatttgggaggctgaggtgggaggatggcttgactgcaggagtttgaggctgcagtgaggtatgattgcaccactgcactccagccagggtgacagagtgagaccctgtcttagggaaaaaaaaaaaaaagtaagcatctcctgggtaatacctggttcccacacattttggagcccctcgtgccttttcagagagaagtgtcagcttcgagtggcagttggaagtgttctcgtcagtagagttaatgggtttcatggaagcccagctgatggcgaggaatgatgggaatttctcttccctccttgagagtatctttccttccagatgacgattcctgggacctcgtgacctgcttctgcatgaagccatttgccggccgccccatgatcgagtgtaatgagtgccacacctggattcacctgtcctgtgcgaaaatccggaaatccaatgttccagaagtgtttgtctgccaaaagtgccgggactccaagtttgacatccgccgttccaaccgctcgcggacgggctcccggaagctgttcctggactgactgctggctggcgaggaggctgcgagcgtggaatcggaagcgaccgcgggcttttttgcccttctcttagttgagcacagaaccctcagctctggtgcgggcagatccctgccatttaggtgcctaagcaaaaggacaggctgtccaaggtagaaactgtacatagccggtgaccgaatgcgacctttgccagccagagctgctgccagagctgcgttccctgcagtggaggtggactggacacccacgtgcagcgggtttggctcatttgaaaatgagggtccgtggtagctgtgcgttttgctatcattgctaagagattcccgctgattgggctcagtgccagctgttattctgcttccactgtgttggggagaggtgttcggtttccccagcctgttaatgaacagccatacgtgtaagctttttcttgagtgttaagtcttttaccaaaagtgtctgtacagcagccatccaagttgcccctacttagtggcttgccctctgcctgcctcagctgctgcctgaccggctgggggaggcactggcgggaggcctcgggctcccctggaagggcgctgggctggcgggtcagctggtggttcttaggtttccttctgtttgttaaaagggacaatgtggccacttctctgtggaaagggagttggttggggggttgagatggcccgtgttcataactcagtttcctgttttgcacgatgtaaaaaccctgtctttttgcacgatacagccaaaagtattggctgatttcttgctgagtgccctcttagttggtgtgtgaggtcttggtgggctcaggccagctgtttgcgagtgtgggaactcataggttctgtctttgtctcttcctttcacctcattctggtagcagcataaaggttaggcaatcactgggacccgcatggtgttcctccaaagaatagggtaaaggagagctgggagggagccctctccgttgggtgactcttgtgtgccctttagacaggctggcctgccggttccacagggtacagttaggacttgagtctttctttttctgttttgagttggtgagtgagtgatagggtaacatgggccttcaggatgaccccttggaactgtgccgagttccttaaatctcagctgggatcctggacctgggaggcccctgtgagggccagctctggaaaaacctgggagttgatgccggaggctgtggaagaactctgctcgagggcagggtgccctggaacactggtagttctggggctgggagggagaggggctccggctttctctgaaatgaacactgctcttcagcagttcaagtacttgttctcaaaacattttctaattgattggtaggttttcataagcattgtttctttaaggcatggaaagggaagaatgctcaagcaagtcatgtttgttttcagtgggatgggcccgcgttctcactgctgggggcttccccttcatgtggcacctttgtgccaggccaccaggcagactcttcccaccttctcccactgaagcaccaaggggcttgaaccgtaatttggctaatcagaggcattttttttgtcctagtatctttcacacttgtccaaccgtcttatttttttaaaagttctgttgcttgtattaacacgaaactagagagaaatagtttctgaagccagtttattgtgaagatccccaagggggaggttcggtagagaaaaatagtaagctggtttagaaactgacgagggcaaacagccaggacgcattggagaggaatttgccaaagatctaccctgagataacgcctgtccagtgtcttcaccacgtgaataaccagcgctccaaagtgtttttctgctttgaaaaaaaaaaattccacaagcttttaaaggtgcatttaagaatccatgtgactttagaatggaactgccggccctggcaactgtcacgtgtgctagaaggttcgatgcctctggaatgcatgtgatactcatctccattttgtttccttgattgcatttttgttcttttagcagatctgtccctgtgggtggtgtctaagaagtcggacaccttggtttttgtgttagattgagctgggcagctgcaatcagcttctttatatgcaaattaggcacgacccatctgtggttcctggttggtggctaatgaagtgaggggagggagggatgtcaccccaaaagtaggccctcccattggctttggccaggccagacacttcacatcgtttacatggttctgtgtaattttaaagtttatgtgtataaagcgaagctgtttctgtgaaactgtatattttgtaaataaatatattgctactttgaggttcatgattcaaggttcaggcgattgcgttctgtgctgaaggacaattgtgtttcttttctccttgctacctccccaaagcatgattacatcaagtctctgggaaggcagcgtctcagtgtgcacttagcaggatggaaaatgcccacggtgttaaggtaccttgctggtgaattccttagaaacaaaccacaggacgagtagatgtgaatggtttttgcagtttcttcatcagattgaggattagctcaagccccagtgagtggttagcctacttttgattttttttttgtttttgagacttgagtttcgttcttgtcacctaggctgtgaagtgctgtgatgagattttggctcattgtaacttccacctcccgggttcaagagattctcctgcttcagccttccgagtagctggaattacaggtgcccgccaccatgtgcggctaatttttgtatttttagtagagatggggtttcaccatgtcggtcaggctggccttgaactcctgatctcaggtgatccgcctgcctcggcctcccaaagtgctgggattacaggcgtgagccactgcgcctggccgatttttttttttttcttcttacaagatgacgccttccctataggctgctttgagaaagctgcagcctcggagtttctgcaaggcctgaactggaatctccctccccttcagttgccctttttgcctcttcacgtttgggggttccctgtgaccaaacttaagggcagtgagctgtctggcctctgaactgacaccaccagtggccaactagtaccacctccagtgacgtcagaggagtccagacctattcacaattcaaagccctaaaaacactgaggggttggccgttggtttccagttgtccaagcctgtgagtggctatgcgtcctggttgggtgctcaaagcaaggaggtgaaaggcgaccagcattggcgaatggggtaagacttgcacaggcccaaggctaggagttggggtttcgggcctgaattggggcccggagcacccctttacgtggcgccccgggtcccgtccgaccctggggagacgcgggtggctgggatggcaggatgagcgcgccctggaggcgagccaggcccgtcaccacctcccagcggccccgcccctccccgcaggtccctcccctctccgcaggccccgccgccgccgccatctttgttgggggcagccaggcctggctcgagatgccgaagtcgtgcgcggcccggcagtgctgcaaccgctacagcagccgcaggaagcagctcaccttccaccggtaagaggcggggacccgggggcgcgggaggcccagacccggggcccgcggaccgactccgaggccttggcgcgccgggcgggaggcccaaaggcgtgcggccgctgggcccggggacaggccgaggtcctgggcccagaggggctggcgccgccgcgcccgccgcggggatgcggggagtggcggacggaggggcagcggcgcacctggcggggccagggccgggacgtgcagggagcggagcaggtgtttgctgaacagactagcgggccgcggccggggtttgctgtgtccctggtcgctgcagcccccgccgcgcgcggtcctgaagggagcccggcacctgggcagtgcagtggaggagtggaacccccaggggcgtcctggcagtgggaagggactctgcagggtcgcgggaggacgctggagactttggagtctgctccagcactcgcccggcccggcccggcccggcccaggagcaatcgtcattagtcacagttgcgctttctccaaggtccagtcacggcaccatttctctacccacttttgggcacattccgaaggggggcttgtgctcatcgttcccattccctctgctcccattgttctgttttgtgataaatgctttgcttgaagtatacgtaatgtacatgcagaaaaatgcacgaatcataagtatacagcccagcgagttttccccaagtgaacgtcactgaactgaaacgttaccagctgggcgcggtggctcaagcctgtcatcccagcactttgggaggccgaggcgggaggatcgcttgagcctgggagttcgagacctgcctgggcaacagaaggagaccctacctctacaaataatttaaaaaaattagccaggcaaggtggtgtgcccctgtagtcccagctgctcgggagactgaagtaggaggatcgcttgaacccagcttcgaggctgcagtgagctataatcttgccactgcactccagcctgggtgacagag

SEQ ID NO: 464 - DNA, 6000 bp, Homo sapiens
ttttgtttttgtgctgcaaattatacaatcaagaaagtgaaaagacatccacagaatgggagaaatatttgcaaatcatatatctgataaaggactagtatccagaatatgtaaataacttttacaactcaaaaaataataataaaagaaaaatagtttgggaatcgtataaatataaacaacataaaaacaaacaaaagaactcttataactcaacaataagacaaataacccctccccctccccctccccctccccctccctctccctctctttccatggtctccctctgatgccaagctgaagctggactgtactgctgccatctcggctcactgcaacctccctgcctgattctcctgcctcagcctgctgagtgctgccacgcctgactggtttttgtatttttttggtggagacggggtttcgctgtgttggccgggctggtctccagctcctaaccgcgagtgatccgccagcctcggcctcctgaggtgccgggattgcagacggagcctcgttcactcagtgctcaatggtgcccaggctggagtgcagtggcgtgatctcggctcgctacaacctccacctcccagccgcctgccttggcctcccaaagtgccgagattgcagcctctgcccggccaccaccccgtctgggaagtgaggagcgtctctgcctggccgaccatcgtctgggatgtgaggagcccctctgcctggctgcccagtctggaaagtgaggagcgtctctgcccggccgccatcccatctaggaagtgaggagcgtctctgcccggccacccatcgtctgagatgtggggagcgcctctgccccgccgccccgtctggaatgtgaggagcgcctctgcccggccgcaaccctgtctgggaggtgaggagcgtctctgcccggccgccccgtctgagaagtgaggagaccctctgcctggcaaccgccccgtctgagaagtgaggaacccctccacccggcagccaccccgtctgggaagtgaggagcgtctccgcccggcagccaccccacccgggagggaggtgaggggtgcctctgcccggccgcccctactgggaagtgaggcgcccctctgcctggccaccaccccgtctgggaggtgaacccagcagctcattgagaacggaccatgatgacactggcggttttgtggaatagaaagtggggaaaggtggggaaaggattgagaaatcggatggttgccgtgcctgtgtagaaggaagtagacatgggagacttttcattttgttctgtactaagaaaaattcttctgccttgggatcctgttgatctgtgaccttgcccccaaccctgtgctctctgaaacatgtgctgtgtccactcagggttaaatggattaagagcggtgcaagatgtgctttgttaaacagatgcttgaaggcagcatgctcattaacagtcatcaccactccctaatctcaagtacccagggacacaaacactgcggagggctgcagggtcctctgcctaggaaaaccagagacctttgttcacttgtttatctgctgaccttccctccactattgtcctatgaccctgccaaatccccctctgcaagaaacacccaagaatgatcaataaaaaaaataaataaaaaaaaagaaaaaaaaaagaagacaacccaattaaaaatgaacagagggaaaaagaaaaacaaaacaaaaaaacaaaaacacacacaaaaaaacagagggccaggtgcagtggctcacgcctgtaattccagcactttgggaggccgatgtgggtggatcacttgaggtcaggagtttgagatcagcctggctaacatggcaaaaccctgtctctactaaaaatacaaaaattagccgggcgtggtggcccatgcttgtaatcccagctactcgggaggctgaggcaggagaagcgcttgaacccaggaggcagaggttgcggtgagccgagattgtgtcagtgcactccagcctgggtgacagagcaagattctgtcttaaaaaaaagaaaaaagaaaagaaagagaaaaagccgggcacagtggctcatgcctgtaaccccagcattttgggaggcggaggtgggcggattacgaggtcaagagatccacgagagcatcctggccaacgtggtgaaatctcatctctactaagaatacaaaaattagccaggcatgctggtgggcgcctgtaggcccagctacttgggaggctgaggcaggagaatcacttgaacctgggaggtggaggttgcagtgagctgagatcgcgccactgcactccagcctggtgacagagcaagactccatctcaaaaaaaaaaaaaaaaaaaaaaaagaacagagaatatgaatgaataggtatttgtccaaagaagataaacctaagcagatgttcaacatcattagctcctaggaaaatgaaaaacaaaaccacaaagagataccatttcacatctactggtgtggctacaataaaaaagacagacaaaaaccattgttggtagagatgtagagaagttagaaccctcacacattgctggtggcagtgcagctgctttggaaaacagtttgacagtttctcaaaaagtcaaacatgtaatcctgcaattcctctcctaggtatatgcctaaaaggaataaaaataaaaacatatgtccaaacaaacacttgtacatgaatgtttatagcagcattactcataattgtcaaaaggtggaaacaacccaaatatcactatgaattgataaacaaaatgcgctacagcaatacagtgatacatttggcattaaagaaatgaagtacagatatatgctacaatatgcgtgaaccttgaaaacatatgctaagtgaaggaagccaaaccccaaaggccacacggtgtattgctccactgatgtgaaatgtccagaataggcaaattcaccaagacagaaggtagttatcctgcaggagtcttttttttttgtgacggagtctcgctctgttgcccaggctggagtgcagtggcacgatctcggctccttgcaacttctgcctcccgggttcaagcaattctttgcctcagactcccaagtagctgggattacaggtgcccgccaccacgcccttctaatttttgtattttgtatttcaccatcttggccaggctggtcttaaactccggacctcttgatccacccgccttggcctcccaaagggctgggattacaggcgtgagccactgcgcccagcccgggagtgactgttaatggctttgagggtttctttttgggatgatgaaaatgttctgaaattggacagtgaggatgactgaactgtgaacataataaaaccactgtacaccttaattgggtgaattgtatggtatgtaaattagatggcaataatgaggttaaaaaaagtaaacttttaacatcaatgtcaccaggggttcaagttctggcttacacagaattcctttcctggagagcagataatatgcaaagccagcagtgatttatttttactcacaaattccttacatatttttactcacaaattccttacatatctagtagtcaggttcctattttaagcatgtagcaaatacattgtaactcttaattctggaatgcagtctttatggcttagtgagccatccaatccacttatagtcttcgtcagcggcaaaatctggaatttcatggtactgttactttgatcgctcaacttagatttatattttataaatatatatatacatacatatatatatattttttgagatggagtcgcgctctgtcgcccaggctggagtgcagtggcgcgatctcggctcactgcaagctccgcctcccgggttcacgccattctcctgcctcagcctcccgagtagccgggactacaggcgcccgccgccacatctggctgattttttgtattttttagtagagacggggtttcaccgtgttagccaggatggtctcgatctcctgacctcgtgatccgcccgcctcggcctcccaaagtgctgggattacaggcgtgagccaccgcgcccggccaaatatttgtattcttgtgcaccggaggatggttttcccccactgactccaaacgtcttccttgcatttgctgtgtacaattcagtgatttgggtctctcatccatttatactttcaaattttaccaatactttttgaacacacttaaaaaaaaaaaaacccaggaagtatctctaaaaggccaaggtaaaataaaatgaatgggagttcttgtgttcgagttttcttccaactgggctttcctggaggaggtggaagagtgtgtggcagatgtttcagaaaatgagcgctcaatacggtagatcacgctcccggggtcaaggagacgttttccgttttcttttccctcgcttaggcggcgggcgcgcacagtccagtgggagcgatgaggtgtttctaggcccccaagtcacagaaaagcaggcgattgggaacaacggaggcgcggcgggcccccgggccgcgggccagcgccaccttctggtggatcttccccgacgcgagtctgggagtcgtccctccccttgccagcctacctggctcaggcccgccgcgcccgcagccccagcgcggtcgccgtggcaacgccccgcccagccgccagcctccctttgcccctccccacgtccggcgcggctgcgcgggacggggtgggacggaggcggggagaggacgcaggcgagaggaactcggcggcgcggcgcccgcggcctattggctgccacgtcccggcgccagaagccccgcctccctgacgggggtcacgtgatccctttcaaagatggccgccctgttgttttgatgaataatacttggtggggcgagggggaaagagtaggggtggaggggtaggaggatttactcttccagcgagagctacgcgcatcccatcctccccctcccccctacccgggctccggcgtggaggcggggcgtggccggcctgctttgggaggggaggggcttcccttacagtgctgggctctgccaggacggctgtggggtcgccttacctcggggtatccactctgcagtcgaccagttcccgccaggagcaaagggtaggaaggagagcaggatctgctgtaggaacgcagctaccgcgccactatcacgaagaaacagcaggctcggggcacgagacgaactggagaccgcgctgcctagctgggtaacctgggaagcagagggtaataagtggcgccttaagacaaccctgtagcagcagcagtggcggccaaaggaggctgctcagggaacaagcggctgtagtagtctgtggggcgactggagtgaccgaagccaaggcagtttagtgcctctcgtgttcttattttttaacctctgactatgcaattctgaaacctcccccattcgggggaccagacagcctgatagacaccttccactctccttcctcccgccgtggtctcgagaacagaaggatctctccttaacgcctttcaccattaagaggaaagcgatggaggagctgagcgctgatgaggtgaggaggttgggggacaccttgagggattagttggcaactcgttagcgctttggacagggatggtattgcgccagtgctgtctggcctttgggcttggagaaggaacggagatgatattttccaagaataacgtgactccccgatagggtctctggttttgttctcctttattctgttgccttctttcttcattctgaactccatttgcttctttccgagtgttcttttagggtatgaacaagaggagagagcatcttgaggtgtttattcttttcttcagggtatgcgaacaagaagggcgagatttacatgaagttaaagtgtgtgtgtgtctgtgtcttcaggaatttaaagaacaattttggatggaatgagaatgtatggtgggtgaatatttttaaagaaagcatttgaa

SEQ ID NO: 465 - DNA, 6000 bp, Homo sapiens
ggagcctcgttcactcagtgctcaatggtgcccaggctggagtgcagtggcgtgatctcggctcgctacaacctccacctcccagccgcctgccttggcctcccaaagtgccgagattgcagcctctgcccggccaccaccccgtctgggaagtgaggagcgtctctgcctggccgaccatcgtctgggatgtgaggagcccctctgcctggctgcccagtctggaaagtgaggagcgtctctgcccggccgccatcccatctaggaagtgaggagcgtctctgcccggccacccatcgtctgagatgtggggagcgcctctgccccgccgccccgtctggaatgtgaggagcgcctctgcccggccgcaaccctgtctgggaggtgaggagcgtctctgcccggccgccccgtctgagaagtgaggagaccctctgcctggcaaccgccccgtctgagaagtgaggaacccctccacccggcagccaccccgtctgggaagtgaggagcgtctccgcccggcagccaccccacccgggagggaggtgaggggtgcctctgcccggccgcccctactgggaagtgaggcgcccctctgcctggccaccaccccgtctgggaggtgaacccagcagctcattgagaacggaccatgatgacactggcggttttgtggaatagaaagtggggaaaggtggggaaaggattgagaaatcggatggttgccgtgcctgtgtagaaggaagtagacatgggagacttttcattttgttctgtactaagaaaaattcttctgccttgggatcctgttgatctgtgaccttgcccccaaccctgtgctctctgaaacatgtgctgtgtccactcagggttaaatggattaagagcggtgcaagatgtgctttgttaaacagatgcttgaaggcagcatgctcattaacagtcatcaccactccctaatctcaagtacccagggacacaaacactgcggagggctgcagggtcctctgcctaggaaaaccagagacctttgttcacttgtttatctgctgaccttccctccactattgtcctatgaccctgccaaatccccctctgcaagaaacacccaagaatgatcaataaaaaaaataaataaaaaaaaagaaaaaaaaaagaagacaacccaattaaaaatgaacagagggaaaaagaaaaacaaaacaaaaaaacaaaaacacacacaaaaaaacagagggccaggtgcagtggctcacgcctgtaattccagcactttgggaggccgatgtgggtggatcacttgaggtcaggagtttgagatcagcctggctaacatggcaaaaccctgtctctactaaaaatacaaaaattagccgggcgtggtggcccatgcttgtaatcccagctactcgggaggctgaggcaggagaagcgcttgaacccaggaggcagaggttgcggtgagccgagattgtgtcagtgcactccagcctgggtgacagagcaagattctgtcttaaaaaaaagaaaaaagaaaagaaagagaaaaagccgggcacagtggctcatgcctgtaaccccagcattttgggaggcggaggtgggcggattacgaggtcaagagatccacgagagcatcctggccaacgtggtgaaatctcatctctactaagaatacaaaaattagccaggcatgctggtgggcgcctgtaggcccagctacttgggaggctgaggcaggagaatcacttgaacctgggaggtggaggttgcagtgagctgagatcgcgccactgcactccagcctggtgacagagcaagactccatctcaaaaaaaaaaaaaaaaaaaaaaaagaacagagaatatgaatgaataggtatttgtccaaagaagataaacctaagcagatgttcaacatcattagctcctaggaaaatgaaaaacaaaaccacaaagagataccatttcacatctactggtgtggctacaataaaaaagacagacaaaaaccattgttggtagagatgtagagaagttagaaccctcacacattgctggtggcagtgcagctgctttggaaaacagtttgacagtttctcaaaaagtcaaacatgtaatcctgcaattcctctcctaggtatatgcctaaaaggaataaaaataaaaacatatgtccaaacaaacacttgtacatgaatgtttatagcagcattactcataattgtcaaaaggtggaaacaacccaaatatcactatgaattgataaacaaaatgcgctacagcaatacagtgatacatttggcattaaagaaatgaagtacagatatatgctacaatatgcgtgaaccttgaaaacatatgctaagtgaaggaagccaaaccccaaaggccacacggtgtattgctccactgatgtgaaatgtccagaataggcaaattcaccaagacagaaggtagttatcctgcaggagtcttttttttttgtgacggagtctcgctctgttgcccaggctggagtgcagtggcacgatctcggctccttgcaacttctgcctcccgggttcaagcaattctttgcctcagactcccaagtagctgggattacaggtgcccgccaccacgcccttctaatttttgtattttgtatttcaccatcttggccaggctggtcttaaactccggacctcttgatccacccgccttggcctcccaaagggctgggattacaggcgtgagccactgcgcccagcccgggagtgactgttaatggctttgagggtttctttttgggatgatgaaaatgttctgaaattggacagtgaggatgactgaactgtgaacataataaaaccactgtacaccttaattgggtgaattgtatggtatgtaaattagatggcaataatgaggttaaaaaaagtaaacttttaacatcaatgtcaccaggggttcaagttctggcttacacagaattcctttcctggagagcagataatatgcaaagccagcagtgatttatttttactcacaaattccttacatatttttactcacaaattccttacatatctagtagtcaggttcctattttaagcatgtagcaaatacattgtaactcttaattctggaatgcagtctttatggcttagtgagccatccaatccacttatagtcttcgtcagcggcaaaatctggaatttcatggtactgttactttgatcgctcaacttagatttatattttataaatatatatatacatacatatatatatattttttgagatggagtcgcgctctgtcgcccaggctggagtgcagtggcgcgatctcggctcactgcaagctccgcctcccgggttcacgccattctcctgcctcagcctcccgagtagccgggactacaggcgcccgccgccacatctggctgattttttgtattttttagtagagacggggtttcaccgtgttagccaggatggtctcgatctcctgacctcgtgatccgcccgcctcggcctcccaaagtgctgggattacaggcgtgagccaccgcgcccggccaaatatttgtattcttgtgcaccggaggatggttttcccccactgactccaaacgtcttccttgcatttgctgtgtacaattcagtgatttgggtctctcatccatttatactttcaaattttaccaatactttttgaacacacttaaaaaaaaaaaaacccaggaagtatctctaaaaggccaaggtaaaataaaatgaatgggagttcttgtgttcgagttttcttccaactgggctttcctggaggaggtggaagagtgtgtggcagatgtttcagaaaatgagcgctcaatacggtagatcacgctcccggggtcaaggagacgttttccgttttcttttccctcgcttaggcggcgggcgcgcacagtccagtgggagcgatgaggtgtttctaggcccccaagtcacagaaaagcaggcgattgggaacaacggaggcgcggcgggcccccgggccgcgggccagcgccaccttctggtggatcttccccgacgcgagtctgggagtcgtccctccccttgccagcctacctggctcaggcccgccgcgcccgcagccccagcgcggtcgccgtggcaacgccccgcccagccgccagcctccctttgcccctccccacgtccggcgcggctgcgcgggacggggtgggacggaggcggggagaggacgcaggcgagaggaactcggcggcgcggcgcccgcggcctattggctgccacgtcccggcgccagaagccccgcctccctgacgggggtcacgtgatccctttcaaagatggccgccctgttgttttgatgaataatacttggtggggcgagggggaaagagtaggggtggaggggtaggaggatttactcttccagcgagagctacgcgcatcccatcctccccctcccccctacccgggctccggcgtggaggcggggcgtggccggcctgctttgggaggggaggggcttcccttacagtgctgggctctgccaggacggctgtggggtcgccttacctcggggtatccactctgcagtcgaccagttcccgccaggagcaaagggtaggaaggagagcaggatctgctgtaggaacgcagctaccgcgccactatcacgaagaaacagcaggctcggggcacgagacgaactggagaccgcgctgcctagctgggtaacctgggaagcagagggtaataagtggcgccttaagacaaccctgtagcagcagcagtggcggccaaaggaggctgctcagggaacaagcggctgtagtagtctgtggggcgactggagtgaccgaagccaaggcagtttagtgcctctcgtgttcttattttttaacctctgactatgcaattctgaaacctcccccattcgggggaccagacagcctgatagacaccttccactctccttcctcccgccgtggtctcgagaacagaaggatctctccttaacgcctttcaccattaagaggaaagcgatggaggagctgagcgctgatgaggtgaggaggttgggggacaccttgagggattagttggcaactcgttagcgctttggacagggatggtattgcgccagtgctgtctggcctttgggcttggagaaggaacggagatgatattttccaagaataacgtgactccccgatagggtctctggttttgttctcctttattctgttgccttctttcttcattctgaactccatttgcttctttccgagtgttcttttagggtatgaacaagaggagagagcatcttgaggtgtttattcttttcttcagggtatgcgaacaagaagggcgagatttacatgaagttaaagtgtgtgtgtgtctgtgtcttcaggaatttaaagaacaattttggatggaatgagaatgtatggtgggtgaatatttttaaagaaagcatttgaaattccagatatgtgtggttattgcactgtataagcttgattaaacatatatttttgcttgaggggtggtttacagacagattctttgatatttaacaaaatatgtatcttctccacagtttagagaattccagttatattctggtacttaatagaccactaatgacttctggcattcttctgttacattctatcttttcctacttcttgaatctttcaaacttgtgttttgctgtagcagagactgaacgggaagcaagtggaagcaaatgactttctaaactctctcctgttctcatttcttaaaggagttatacagatctacttcttgatgttttaaagattgtttaataaattaggttgttgtaaaaaaaaaaacaaccaaaaagcagtggcaattagggtacaaggaatttcctatgattctactgccttttctcttcctttttgcaaattaggagcttccctttcaggacccctactggccataccctctttagcctacctccaca

SEQ ID NO: 466 - DNA, 6000 bp, Homo sapiens
ttggctcactacgacctccgcctcctgggcaagcgattctcctgcctcagcctccttagtagctgagattacaggcgtgcaccaccatgcctggctaatttttgtatttttagtagagatggggtttcaccatgttggccaggctggtcacaaactcctgacctcgggtgatccacccgcctcggcctcccaaagtgctgggattacaggcatgagccaccacgcccagccaagattgatttttgtattgacattttacagtgcagtttttttttttttttgagacggagttttgtggggaaaagaaagatcagattgttactgtgtttgtgtagaaagaagtagacataagagactccattttgttttgtactaagagaaattcttctgccttgagatgctgttaatctgtaaccttacccccaaccctgtgctctccgaaacatgtgctgtgtcaactcagggttaaatggattaagggctgtgcaagatgtgctttgttaaacagacgcttgaaggcagcatgctcgttaagagtcatcaccactccctaatgtgtccggaattggtgggttcttggtctcactagctccaagaatgaagccgcggaccctcgcggtgagtgttacagctcttaaggtggcgcatctggagtttgttccttctgatgttcggatgtgttcggagtttcttccttctcgtgggctcgtggtctcactggctcaggagtgaagctgcagatcttcgcggtgagtgttacagctcataaaagcagcgtggacccaaagagtgagcagtaacaagatttattgcaaagaacaaaactgccacagcgtggaagggaacccaagcgggttgccactgctggcttgggcagcctgcttttattctcttatctggccccacccacgtcctgctgattggtagagcccagtggtctgttttgacagggcgctgactggtgcgtttacaatccctgagctagacacaaaggttctccaaggccccaccagagtagctagatacagagtgtcgattggtgcattcacaaaccctgggctaaacaaagggtgctgattggtgtatttacaaaccttgagctagatacagagtgccgattggtgtatttataatccctgagctagacataaaggttctcctcctccccaccagactcaggagcccagctggcttcacccagtggatcctgcaccaggctgcaggtggagctgcctgccagtcctgcgccatgcgcccacactccccagcccttgggtggtcgatgggactgggcgccgtggagcagggggccacgctcatcggggaggctcgggccacacaggagcccacggagtgggtgggaggctcaggcatggcgggctgcaggtcccgagccctgccccacaggaaggcagctaaggcccagtgagaaatcgagtgcagcgccggtgggctggcactgctgggggacccagtacaccctccgcagccgctggcctgggtgctaagcccctcattgccctgggcgggcagggccagccggctgctccgagtgcggggcccgccaagcccacgcccacccggaactccagctggcccgcaagcgccgcgcgcagccctggttcccgcttgcgcctctccctccacacctccctgcaagctgagggagccggctctggccttggccagcccagaaaggggctcccacagtgcagcggtgggctgaagggctcctcaagtgccaccaaagtaggagcccaggcagaggaggtgccgagagcgagcgagggctttaggactgccagcacgctgtcacctctcactaatctcaagtacccagggacagaaacactgcggaaggccgcagggacctctgcctaggaaagccaggtattgtccaaggtttctccccatgtgatagtctgaaatatggcctcgtgggagggaaagacctgaccgtcccccagcccgacacccgtaaagggtctgtgctgaggaggattagtaaaagaggaaggaacgcctcttgcagttgagacgagaggaaggcatctgtctcctgcccgtccctgggcaatggaatgtctcagtataaaacccgattgtatgttccatctactgagataggggaaaaccgccttagggctggaggtgggacaggcgggcagcaatactgctcttcaaggcattgagatgtttatgtgtacacatatctaaagcacagcacttaattctttaccttatctatggtgcagagacctttgttcaagtgtttatctgctgaccttctctccactattatcctatgatcctgccacatccccctctccgagaaacacccaagaatgatcaataaatactaagggaattcaggccggcgggatcctccatatgctgaacgctggtcccctgggcccccttatttctttctctatactttgtctctgtgtctttttcttttccaagtctctcgttccacctaacgagaaacacccacaggtgtggaggggcaacccaccccttcaagtttcgctcttgtttgcccaggctggagtgcaatgcacgatctcagctcaccgcaaaacctccgcctcccaggttcaagcgattctcctgcctcagcctcccgagtagctgggattacaggcatgcaccactacgcctggctaattttgtatttttagtagagacagggtttctccatgttgaggctggtctcgaactcctgacctcaggtgatccgcctgcctcggcctcccaaagtgctgggattataggcgtgagccaccacgcccggctgaactaaatatttatggaaccctccttaatgcagatgaaaaggattaaagaaacccaccaaggtctttgtcttatttatggtgagggcagtggataaaccggaaactcggaaaccagcctaataatcaaatctggtctctatcacttcccagtagtttagccttgggcagagttctttcacctgtttcctcatgtaaaatggggctaacagcacctacttttgagggcagatgagatattaaatgagtgcctagagcgaggacaagtgcaaagtgctcagtgtcatggcaacattgccagcgggcatccctggccttgcttcacgctgtagtgcaacactgacatctagtggccagattatagggctacttcttcatcaagtaagtttcaaccaaatattaatatatccttttttcattattttttttagagacagtgtctccctctgtcaccctggctggaaaacagtggggcaatcacggctcaccatagccttgaactgggctcaagtgatcctcctgccttggtctccctaagtgttgggattacaggcttgaaccaccacacccagttccattttctgtaatgaatacctcaaccctcgacctatttctcagacctttttttttgagacagagtctcgctctgttgcccaggctggagtgctatggtgcgatctcagctcactgcaaccttcacctcccgggttcaagcaatcctcctgccttagcctcccaagtgctaggattacaagcatgtgccaccatgtctggctaatttttgtattttttggtagagacagggtttcatcatgttggccaggctggtcttgaactcctcacctcaagtgatctacctgcctcggcctcccaaagtgcaggaattacaggtatgagccactgctcctagcctctgaggctcttaagtgcctctgtattgcacacatgtcactggaatactgttctttaatcctgggaagcaactgctttaaaatgagggaacacacaggtacaaagcacaggaacttcctgggacgaattgttacaatttctttagctcttatgtgaggcaattgtttaaaacctgacacctgccctgtgaagttggaactactgtccccagttgataaataagggacatgaagcttggccacgtcctgtgacttgcttggggtcaccaggctcaagggagggagctgggctttgcagccacagtgtgctctaaatggggctgctcaccaaccagcgaccggccttctctcctgctgcaggcttggtctcactctggatggcctgccctgcccagccccatgctgcccattaggggaatccgtcagaggcttgccctgcttgggcaggaggactgtccaggtagactgggatgcccacagagagcagtggacagaggcgagaagtgcctgtcatttccagatgccacccactgagcagatgcagaggaaagtcctcagaaggctgattcctccaaaaagctttgatctgggtttcagcccctggcaagcttagggaacttgagggacgtccctgggaaaggaagacaaggagtggctttatgtgctttccttcgttctgaaagtagcacctgcttgtgacaaatgcagaatacagaaatataggcaataaaaaataataaaacaaaaacctagaaatacaggcagggcatggtggctcacacctgtaattccagcactttgggaggctgaggtgggatgattgtttgaagccaggagtttgataccagcctgggcaacatagtgagacctggtctctacaaaaaataaaaattagccaggtgcgctgatgcaggcttgtggtcccagctacttgggaggctgaagtgggaggatcacctgagcccaggaggtggaggttacagtgagtcttggtggtgccactgcactccagcctgggcggcagagtgagaccctgcctctcaaaaaactacaataaaaacaaaccaaaattgggtttgatggtctcacttcatcgttaacataaaggaaaaacagtaacacttgtgtcagaactatactcctgccaatggcaacaacgcagttcctgttccactcgctgaatgaggtcacgggtcgttcactcattgtagtctttgtgacgctattgttggtgatagaatgataaagttgatggtcgattttgcaagatacacctgaggtacaggtgcatggagctcctgataatgtgtactgcgttacatgatctgtaaatcgtgggctacgcatcctctacacccgactggaacacgctttgcacctatgcgcacacgtgtttcgcggagagtggtgctcagcgttgtgccaggcgctgaatcaggctctggggtgcagcagtgacctcggtggtcatgtccccgcgtcgcccggccacctccgcagagcaagctgagcagggggctggctggaggccgacggcggaatcccctcaacggagcgccgccagggggcgcgcgaggcagggcggagctgcgtactttgtccgcccgcgcggcccgtcgctcgcgccgcggcgggaaaatccgacctggccgcgcaccaccgccccttctcggccctcctgcgtttgcccagggtcggcccgcagtgatggaggaggaggcggagaccgaggagcagcagcgattctcttaccaacaggtacaggaaaacgggggtcgggctgggctggggcaggacggcgtcgagtttctggacagaaaagtacccggcagcccccggcggcttctcatcggcaccccgcccccgggcgccccccgcggctgcgcatgcgttggcttaactgccgcgggtggtgctgggaggcggtttccgcggcaacgcggctggaccctggcctgcgctggctggggaggaagcggttctaggggagcgtgcgggcgccggggtccggcggcgagaggccaccttctggccttgcgatgaatcctcggtttccccttctcagatggggttttcgtgagggtacaacgtcggcattagacattccaggtgacgcccgtacgcggtgggcggttcgggccggagctctggaacgctggccctggaggcgtcgacccctcgttactgatgcagggacgcggtgcggaccagtcaggcccagagctcgtccttagatgtgggttcgaatctctgccccgccaacttgtgatcgtatcgactcggcccagacg

SEQ ID NO: 467 - DNA, 6000 bp, Homo sapiens
ttcggatgtgttcggagtttcttccttctcgtgggctcgtggtctcactggctcaggagtgaagctgcagatcttcgcggtgagtgttacagctcataaaagcagcgtggacccaaagagtgagcagtaacaagatttattgcaaagaacaaaactgccacagcgtggaagggaacccaagcgggttgccactgctggcttgggcagcctgcttttattctcttatctggccccacccacgtcctgctgattggtagagcccagtggtctgttttgacagggcgctgactggtgcgtttacaatccctgagctagacacaaaggttctccaaggccccaccagagtagctagatacagagtgtcgattggtgcattcacaaaccctgggctaaacaaagggtgctgattggtgtatttacaaaccttgagctagatacagagtgccgattggtgtatttataatccctgagctagacataaaggttctcctcctccccaccagactcaggagcccagctggcttcacccagtggatcctgcaccaggctgcaggtggagctgcctgccagtcctgcgccatgcgcccacactccccagcccttgggtggtcgatgggactgggcgccgtggagcagggggccacgctcatcggggaggctcgggccacacaggagcccacggagtgggtgggaggctcaggcatggcgggctgcaggtcccgagccctgccccacaggaaggcagctaaggcccagtgagaaatcgagtgcagcgccggtgggctggcactgctgggggacccagtacaccctccgcagccgctggcctgggtgctaagcccctcattgccctgggcgggcagggccagccggctgctccgagtgcggggcccgccaagcccacgcccacccggaactccagctggcccgcaagcgccgcgcgcagccctggttcccgcttgcgcctctccctccacacctccctgcaagctgagggagccggctctggccttggccagcccagaaaggggctcccacagtgcagcggtgggctgaagggctcctcaagtgccaccaaagtaggagcccaggcagaggaggtgccgagagcgagcgagggctttaggactgccagcacgctgtcacctctcactaatctcaagtacccagggacagaaacactgcggaaggccgcagggacctctgcctaggaaagccaggtattgtccaaggtttctccccatgtgatagtctgaaatatggcctcgtgggagggaaagacctgaccgtcccccagcccgacacccgtaaagggtctgtgctgaggaggattagtaaaagaggaaggaacgcctcttgcagttgagacgagaggaaggcatctgtctcctgcccgtccctgggcaatggaatgtctcagtataaaacccgattgtatgttccatctactgagataggggaaaaccgccttagggctggaggtgggacaggcgggcagcaatactgctcttcaaggcattgagatgtttatgtgtacacatatctaaagcacagcacttaattctttaccttatctatggtgcagagacctttgttcaagtgtttatctgctgaccttctctccactattatcctatgatcctgccacatccccctctccgagaaacacccaagaatgatcaataaatactaagggaattcaggccggcgggatcctccatatgctgaacgctggtcccctgggcccccttatttctttctctatactttgtctctgtgtctttttcttttccaagtctctcgttccacctaacgagaaacacccacaggtgtggaggggcaacccaccccttcaagtttcgctcttgtttgcccaggctggagtgcaatgcacgatctcagctcaccgcaaaacctccgcctcccaggttcaagcgattctcctgcctcagcctcccgagtagctgggattacaggcatgcaccactacgcctggctaattttgtatttttagtagagacagggtttctccatgttgaggctggtctcgaactcctgacctcaggtgatccgcctgcctcggcctcccaaagtgctgggattataggcgtgagccaccacgcccggctgaactaaatatttatggaaccctccttaatgcagatgaaaaggattaaagaaacccaccaaggtctttgtcttatttatggtgagggcagtggataaaccggaaactcggaaaccagcctaataatcaaatctggtctctatcacttcccagtagtttagccttgggcagagttctttcacctgtttcctcatgtaaaatggggctaacagcacctacttttgagggcagatgagatattaaatgagtgcctagagcgaggacaagtgcaaagtgctcagtgtcatggcaacattgccagcgggcatccctggccttgcttcacgctgtagtgcaacactgacatctagtggccagattatagggctacttcttcatcaagtaagtttcaaccaaatattaatatatccttttttcattattttttttagagacagtgtctccctctgtcaccctggctggaaaacagtggggcaatcacggctcaccatagccttgaactgggctcaagtgatcctcctgccttggtctccctaagtgttgggattacaggcttgaaccaccacacccagttccattttctgtaatgaatacctcaaccctcgacctatttctcagacctttttttttgagacagagtctcgctctgttgcccaggctggagtgctatggtgcgatctcagctcactgcaaccttcacctcccgggttcaagcaatcctcctgccttagcctcccaagtgctaggattacaagcatgtgccaccatgtctggctaatttttgtattttttggtagagacagggtttcatcatgttggccaggctggtcttgaactcctcacctcaagtgatctacctgcctcggcctcccaaagtgcaggaattacaggtatgagccactgctcctagcctctgaggctcttaagtgcctctgtattgcacacatgtcactggaatactgttctttaatcctgggaagcaactgctttaaaatgagggaacacacaggtacaaagcacaggaacttcctgggacgaattgttacaatttctttagctcttatgtgaggcaattgtttaaaacctgacacctgccctgtgaagttggaactactgtccccagttgataaataagggacatgaagcttggccacgtcctgtgacttgcttggggtcaccaggctcaagggagggagctgggctttgcagccacagtgtgctctaaatggggctgctcaccaaccagcgaccggccttctctcctgctgcaggcttggtctcactctggatggcctgccctgcccagccccatgctgcccattaggggaatccgtcagaggcttgccctgcttgggcaggaggactgtccaggtagactgggatgcccacagagagcagtggacagaggcgagaagtgcctgtcatttccagatgccacccactgagcagatgcagaggaaagtcctcagaaggctgattcctccaaaaagctttgatctgggtttcagcccctggcaagcttagggaacttgagggacgtccctgggaaaggaagacaaggagtggctttatgtgctttccttcgttctgaaagtagcacctgcttgtgacaaatgcagaatacagaaatataggcaataaaaaataataaaacaaaaacctagaaatacaggcagggcatggtggctcacacctgtaattccagcactttgggaggctgaggtgggatgattgtttgaagccaggagtttgataccagcctgggcaacatagtgagacctggtctctacaaaaaataaaaattagccaggtgcgctgatgcaggcttgtggtcccagctacttgggaggctgaagtgggaggatcacctgagcccaggaggtggaggttacagtgagtcttggtggtgccactgcactccagcctgggcggcagagtgagaccctgcctctcaaaaaactacaataaaaacaaaccaaaattgggtttgatggtctcacttcatcgttaacataaaggaaaaacagtaacacttgtgtcagaactatactcctgccaatggcaacaacgcagttcctgttccactcgctgaatgaggtcacgggtcgttcactcattgtagtctttgtgacgctattgttggtgatagaatgataaagttgatggtcgattttgcaagatacacctgaggtacaggtgcatggagctcctgataatgtgtactgcgttacatgatctgtaaatcgtgggctacgcatcctctacacccgactggaacacgctttgcacctatgcgcacacgtgtttcgcggagagtggtgctcagcgttgtgccaggcgctgaatcaggctctggggtgcagcagtgacctcggtggtcatgtccccgcgtcgcccggccacctccgcagagcaagctgagcagggggctggctggaggccgacggcggaatcccctcaacggagcgccgccagggggcgcgcgaggcagggcggagctgcgtactttgtccgcccgcgcggcccgtcgctcgcgccgcggcgggaaaatccgacctggccgcgcaccaccgccccttctcggccctcctgcgtttgcccagggtcggcccgcagtgatggaggaggaggcggagaccgaggagcagcagcgattctcttaccaacaggtacaggaaaacgggggtcgggctgggctggggcaggacggcgtcgagtttctggacagaaaagtacccggcagcccccggcggcttctcatcggcaccccgcccccgggcgccccccgcggctgcgcatgcgttggcttaactgccgcgggtggtgctgggaggcggtttccgcggcaacgcggctggaccctggcctgcgctggctggggaggaagcggttctaggggagcgtgcgggcgccggggtccggcggcgagaggccaccttctggccttgcgatgaatcctcggtttccccttctcagatggggttttcgtgagggtacaacgtcggcattagacattccaggtgacgcccgtacgcggtgggcggttcgggccggagctctggaacgctggccctggaggcgtcgacccctcgttactgatgcagggacgcggtgcggaccagtcaggcccagagctcgtccttagatgtgggttcgaatctctgccccgccaacttgtgatcgtatcgactcggcccagacgcaattttcttctctgcaaaatcgtcataagaataatcacttgtcagggtagctgcgggcatcccattcgttcctttcatcagcgccgggcatatggggcgtcagaggctgagaacgttgccgtgaagaggcttaaaagcaagacccggagtggcgaccttaaagaggacggactgaagaaacgcgggaatgagctccagacgcgggagtttcctctctacaaagttacactgcagcagctgtctaccctgccccttgtcttttgagaagttcaaaccttcagaaaagttgcaagaacacggtacagaatgcccagatgcccgtcaccttgattcaccactagttagcattttgctctgtttgctcccatgcttccctcccagccccgcgattggagaattaattgcagatattttgacacttcgcctttacattttaattctttagtacacatctcccaaaaacaaggcattggctgggcgcggtggctcacgcctgtaattccagcactttgggaggccgaggtgggcagatcacttgaggtcaggagttcgagaccagactggccaacatggaaaccccctctcaactaaaagtacaaaaattagccgagtgtggtggcaggtgcctgtaatcccagctactcgggacgttgaggcaggggaatcgct

SEQ ID NO: 468 - DNA, 6000 bp, Homo sapiens
tatggccggagtagggcaccgagttcacacttcatggtttcggatctgcaaatggctcagcacttgttcttatgttaattatagtatctgtgtgtcatatcagtgaatgaaaagtgaatcataaagccttccatcctagtacgttcagccaaaggcccgtatgttagcagtttcatttttggataagcactctttaaactccttattggccaggtgcagtggcttgtgtctgtagtcccagcaacttggaaggctgaggcaggagattcacttgagtctgggagtttgagaccagcctgggcagcacagtgagaccccatctctaaaaaaagtaaaaaataagttaggcatggtgatgcatgcctgtagacccagttagctactcaggaggctgaggcagacggttgcttgatcccaggagttcaaggctttagtgaggtgactgtgctactgcactgcagcctgggtgacagaacaagaccccgactctaaaaaataaaataaattcgggaggctgaggcaggagaatcgcttgaacccaggaggcagaggctgcagtgagccgagattgtgccactgcactccagcctgggtgacagagtgagactaagtctcaaaataaaataaaataaagtagaataaaatagataaaataaataaataataaaactcatcaagaagagtttagggaatagatactatagactttccaaaggttgaaagatctgggtttgcttcttgggtttgcaaccctagtagctgtataactttcagagactttgtgctttttttttttcattgagacagcgtctcactctgtcacccagactagagtgcagtggcacaatcatgactcactacagcctccacctcccaggctaaagtgatcctcctgcctcagcctcctgagtagctgggactacaggcatgcgctaccatgcctgcctaattttttagttttttttgtggagatagggtctcagaatgttgcccaggctggtctcaagctcctgagctggactcaagtgatcctcctgcctcaacctcccaaagtgctgagattataggcatgagtcactgcacctggccttttcttttttcttttctttttcgagatgggctcttgctgtgtacagtggtatatcacagctcactgcagccatgaattcctgggctcaagcaatcctcctgcctcagcctcccaagtacccaagactgcaggtgtgtgttaccacacctggctaagttttcttttctttttgagacaaggtctcactttgtcgcccatgctggagtacaggggctcaatcttgactcactgcagcctctacctcccaagctcaggtgatcctcctgcctcagccccccaagtagctggggccacaggtgtgtgccaccatgtccagctagtttttttttttgtttttttttttggtagaggtgaggttttgcatgttgcccaggctagtcttgaactcctgggctcaagtgatcctcctgcctcagcctcccaaagtgctgggattataggcatgagtcactgcacccggcctttttttttttttttttttttttgagatgggctcttgctatgtcagccaggctgcagtacagtggcatgatcacagctcactgcagccacgaattcctgggttcaagcaatcctcctgcctcagcttcccaagtgcccgagactgtaggtgtgtgttgccacacctggctaaattttttcttttttttttttgtcataaagtctcactttgtcacccatgctgtagtgcagtggcacaatcttggctcactgcagccttgacctcccatgctcaggtgatcctcctacctcagccccctaagtagctgagaccacaggtatgtgcctccacgtccagctaatttctgtagagatggagttttgccatgttgcccaggctggtcttgaattcctgggctcaagcgaatctctcgcctcagcctcccaagtagtcaggactgcaggtgtgcattgccatgcctggctaaatttttgtttttttttggtagagatggggtcttgctatgttgcccagtctggtcttgaactcctgggcttaagtgatcctcttgtctccacctcctaaagtttgtcaccttcttgaaacagtcattatcagttctcatgaagccttccccaatttgcagcacattcccctttgcacacttcttctcgcactgaaaaatgtccttgtctttcatttgtgtctatgtatccgatttctttgaggctgcaacacctctgtcagggtgtgggtggtgtgggtcccttgtggtattgcaagttccatactgggtgctcagaatgtttaatgagctcattgaataaaattggcacactagactaacgatataggaagctggtgaggccgggtgtggtggtctcatgcctgtaatcccagcactttgggaggctgagatgggtggatcacttgagttcagaagtttgagaccagcctggccaacatggtgaaatctctactaaaaatacaaaaattagctgggcgtggtggctcctgcctgtaatcccagctacttgggaggctgagacaggagaatcccttgaacctgggaggcagaggttgcagtgagctgaagttgtgccactgcactccagcctgggtgacagagcaagactccgtctcaaaaacaaaaagaagctggctgaactgctgtgaatgtctcatctgcaaatataactcaaaatttttagtgtcatttgtgggaattattttggtacagaaataaaagatgggccaggtgcggtggctcatgcctataatcccagcactttgggaggccgaggcgggcggatcacgaggtcaggagatcgagaccatcctggctaacacagtgaaaccccatctctactaaaaatacaaaaaaatcagccgggcgtggtggtgggcacctgtagtcccagctactcaggaggctgaggcaggagaatggtgtgaacctgggaggcggagtttgcagtgagctgagatcgagccactgcactccagtctgggcaacagagtgactccatctcaaacaaaaaaaaacaaaaaacaaaataaataaaagatgaagcaacatacgatgtataagcctctggccagcaggccatgctgatcttacctaggattttaacataagcaaaaagactgtgacaaattcaagattgagatttccctgctgaaggtgtaaaccaggactttggaaaactgaaaacaaacatgttcacttctagaaagtgccggcagttttgggttgcgttacctcaatttatagccttgccttggatgctggtcatctgtagcaggtttgggtggatgtttcagattttactcggtgtctcgttgggcaaaggggtctgtgcatttgtctgtgtgattcagcaatgagggcctgtgaggaagaaccagcaggtggcacagagagggactccatggtctgcactctcagcagtggtgccagcctcaggaggagagagagccctgggagctggccaagggcagggccgggcactgcttcccaaactgactgtgccctgcagtaacagcacatctcacacctgacacacacaatgcgaatcattatttatccttactacgggtgatgcacactaattttaatttcattcgaaaggaaagtactggcctatgacccacaagtgggtggtcaggagcagtttagaaaacactggaccaggccgggcgcggtggctcacgcttgtaatcccagcactttgggaggccaaggcgggcagatcatgaggtcaggaaattgagaccagcctggctaacatggtgaaactctgtctctactaaaaatacagaaaattagctgggcatggtggccagcgcctgtagtcccaggtacttggaggctgaggcaggagaattgcttgaacccgggagatggagattgcagtgagccaagatcatgccactgtactccagcgtgggtgacagagcgagactccatccaaaaacaaaaagaaaacactggtccaggctgggggcagtggctcacacctgtaattccagcactttgggaggccgaggtgggtggatcacctgaggtcgggagttcgagaccagcatgaccaacatggagaatctccgtctctactaaaaatacaaaattagccaggcgtggtggcacatgcccgtaatcccagctactcgagaggctgaggcaggagaatcacttgaacccgggagccagaggttgcggtgagccgagatcacaccattgcactccagcctgggcaacaagagcgagactccatctcaaaaaaagaaaacactggaccatcaagagttcgagaccagcctggccaacgtggtgaaaccctgtccctacaaaaaatacaaaaattagccaggcatggtggcgggtgcctgtaatcccagctactcgggaggctgaggcaggagaatcacttgaacccaggaggcggaggttgcagtgagttgagcgcgccattgcaccccagcctgggtgggccagagcccggctgccccagggccagcagtgcctgggtgcttgttggaaatgcagctctcaactcctccctgccccagtgcatcaggacctgcctgcaaagtgatccgtctgcacttcagtttgagaaggcctggcctagaggacagtgggtctggcatgctgggctgagaggcagtactgggagcgattcttggggcctccttgccgacaattgggtgaaaccagcggatacgatcgtagcgtctctgagcccccattgcctccttgtttctctgcccatagtagaagaatgtctctgaaattactggatgagtttcagtcatactttcacatgggcacaatttcacattcaagctccttatcctaggctaattttatattatgttaaatcacttgtttttgttctcacggcttcctgcctgctataggcataattacgaggaagcagaacttctccagaagcaagcgcacatgcgttccaaaataagagcaaattcgctctaaacacaggaaaagacctgaagctttaattaaggggttacatccaaccccagagcgcttttgtgggcactgattgctccagcttctgcgtcactgcgcgagggaagagggaagaggatccaggcgttagacatgtatagacacaaaaacagctggagattgggcttaaaatacccaccaagctccaaagaagagacccaagtccccaaaacattgatttcagggctgccaggaaggaagagcagcagcagggtgggagagaagctccagtcagcccacaagatgccattgtcccccggcctcctgctgctgctgctctccggggccacggccaccgctgccctgcccctggagggtggccccaccggccgagacagcgaggtgagtacagtcccgacgtggccacacgctagcccactctctgtctcttgttggctttttggcctgcatggtgtgtgtgtgtgcacgtgtgttgcacttcacagcttggacaggacacacggctcaactttgtagtgttcttggctggcccgaggtactgggatgccgcattcagaccactgatcctcagttacatgtcccaacccatgaagcctgctggaaacctgtgcagctcaaggagggccctccgtcgggtgtctgggaaaggggaagcgagtgtacccgtccactgcagggcaggcatggagctgcgacagcccttccagagccttcagttatacatagcacaggctcccactggctcagagtaattggcatcattacattttccgttgtgagaatttgtaacttcgtgaggtgattgattgttcttttttccattttgagaaagttccaagaaagggtatataaagttgagcattaaaaatggatttttctctaaaattaccagatgagtttcaggcaggccatttatcagcagattactcccagaagctttctaaggaatttgaaaaaccagaatataacgtt

SEQ ID NO: 469 - DNA, 6000 bp, Homo sapiens
aatgaaacaggcaattgctgaagagcattggttcattcaaaaagcgtgcatttgcttcttgttagatagccatagagtctgttatgaaaagttcaagttttggccaggcactgcagctcacgcctgtaatcccagcactttgggaggctgaggtgggcggatcatgaggtcaggagatcaagaccatcctggctaacacggtgaaaccccatctctactaaaaacacaaaaaattagctgggcatggtggcgggcgcctgtagtcccagctactagggaggctgaggcaggagaatggcgtgaacccaggaggcggaggttgcagtgagcagagatcgcgccactgcactccagcctgggtgacacagcgagactctgtctcaaaaaaaaaaaaagaaaagttcaagtttttcccccaggctgccagcatgttctgtggcaatcctacctccaccagctttggaaaggagggcaaaggagaagcagagctgaaaatcaaacaagtgatggccatgcccccttaaaggaccttagatccttttctattaaatacatatacagagagggcaaacttgcaaaaccaaaagaatccttgggcataacagtggctccaagtggcaagatttttagtactgtttacagcactggcaaattaaatgtcctataagaatcaggaacagagccgggcacggtggctcacgcatataatctcagcactttgggaggctgaggcgggcagatcacttgaagtcaggagtttaagaccagcctggccaacatggtgaaacctatcgctactaaaattacaaaaattagtcaggtgtggtggcaggcacccgtagtcccagctacttgggaggctgaggcaggagaattgctcgaacccgggaggcagtgagccgagattgcgccaatgcactccagcatgggcgacagagagagactccgtcttaagaaagaaaaaagaatcaggaactgaggacacccttcaatcccagcctgtgggcattcctaacacaaaacaattcagagaaacccagaccccaagatgccttagtatttcagcaaactaaatgtggtaaggcaagaaaggagaggccctcctctcgagacacttgccaaactccagaacacctgacagtgagaaggccagaatcagtccttgttatctcccatgttttacaatcaagacatcttcttcctgaatcattcacactgctaatagaaactggtatgggggaacacaccaactcctttaagttcaattcttgtaacagacgtgcagaataagacagtaagaaacactaagcggtggtcttctgcctctgaaggaagtgaaatactagtaagttgctgaaaactcttagaggtgcttcaaggagatgggagaggaggaatgaggccccaagttgaaactattttcttcttcctcattctaatcctaactaaactcaaaaatgtatggatgactagtggagtcacacaggttcaatacaggctcaacagagcacacgatttggggcatgtcacaaacccttagtattcatttctgtgaaatggaggttagtagcctgcacttcataaaggttgtagtgaacactaaacgagataatagatgtaatttgtgctcaacatgacaccacacaggcagttaaatgtaagatgtctcttagcccttttctcctcaccccaccctaccccacctttggactataaaccccttcggagaccttatcatccactgcctcccggccgcagaggcacaggcgtcaacgctggtccttatggtccccttattggagtgggatttgtctgaatctgcaggtgaaaagctagagcggagccctcggccaacaaaaccaaacccagggaagcgaggatgggtcctcagccaaaagcttggtggcgtctgttagtcacagtgcgtccctttcctatcaacgcactgagagggctcgactagattatttctgactatccaacttgacgagagaagcgcaaaggtgaccacagatgaagaggctggcagccgctccaggaggctgaggccgtgagggagtgggaaccctaatggaaacaggcccctccccggaggggacagccgggaacgatcgatctatcctctccttctcaagccctcgcagctcaaggctggggacttcccaagggtcccgtcaccctccccaacaagctcaagtgggaccagaggtgctggcaggcgggaagtggggacccgggggcacagccaaacaccagagcccgggctccggaatgtggtcaaagaggggtcaccggggggaggggccgggtggggaggacctggggaggggcggggctcaggagggggcaagaggtcggggtccccagcttcggagactcggggtccctacccggctcccagccgtatgctgagcgccccctccagccggggtctccgccgcacagcggggcagtcccactccccttacctggctcggctgctctgcctgctccgaggacgccatctttctgaggcctgactaatcaaccgccgctgggcgaggtttctcccaggcgccctcgctctcgccctcccgcccagactaaggtagccggaacagagcctgtcgatgtaggggactggggcagaggggtggagcccgggtgtccgggtcaccttgcatagtttccgttaagactctgctttccaggaagatcccaagtctatatcttctttgcgttgttatatgtgtattattctggttttgctttttttttttgagacggagtttcgcacttgttgcctaggctggagtgcaatggcgcgatatcggctcaccgcaacctcagcctcccggtttcaagtgattctcctgcctcagcctcccgagtagctgggattgcaggcatgcgccaccatgcccggctaacattgtatttttagtagagatggagtttctccatgttggtcaggctgctctcgaactcccgacctcaggtgatctgcccgcctcggcctcccaaagtgttgggattacagaagtgagccacagcgcccggcccatattattcttattgagttaatctctgcccatccccacagtgccatgggcacatttagggacttgccaatggatgaatgcgaagaaacttggaaattaatttttagacatcagttcagttccattcattgagtgcctactatatgctagggactttggtaggccttgaaataaaaacattcaagactcaatccctactcccacgcccaggccaaacacacttacaattacagtattatggggataggactcggataagtgtgcaggtctattgggagaacataaaagggggcattttgaagagaagaggcttctacaaaacgtcattattttacactggttgaattgttagatttttttaattgttagattttaaattaaatattggacgggagcagtggctcacacctgtaatcccaacactttaggaggccaaggcaggaggatcccttgagcccaggaggttgaggctgcagtgaactatgattatgccactgcactccagcctgggcgacagagcgagaccttgtctaaaaataagataagaaaataaaaaatgaaattatatgaaaaaggatacatacattagagttaaccgccagctcctattatagttgtgttttgatcaatatagactgcttaaaagggatgacttaatgaataattcctcctactaaacgctgttttaaatgtctaaacttttcttgagataatatccaatttcctctcccacgttttttttgtttgtttttgcttttgtttttgtttttgcttgagacgaagtcttgctcctgacgcccaggctggagtgcaatggtgcgatctgggccgactgcaacctccgcctcccgggttcaagcgattcacctgcctcagcctcccaagagctgggactacaggcgtgcgccatcacgcccggctaatttttgtatttttagtagagatagggtttcaccatgctggccaggctggtctcaaactactgacctcagatcatctgtccgcctcggcctcctaaagtgctgagattacaggggtgagccaccgcccccggggcccttgcccacgtttttataaacaaaatatgaggtgggaggattgcttgagcccaggagatcaaaactgcagtgagccatcatcgcgccactgcactccagcctgggagacagagcgaaacgctgtctcaaaaaaagaaaaaagaaacaaggaaggaaagtgtcccccgaatgaataaatatgagcagataattacttctagtttacataaaatgccctcttttaagagaggaactttttgatcatttttattactattcttttaatcttagatgtttatttttcaggaggaaaaaaacaaacttttccatagtagcagtattaaaacaaagatgaatatgttgtcaagaggcatctgaacaatctccaacagtgccgagtcgcatttcccctttcctctccgatgcatttgagactttaatgcttactatatttatttaagcgttttgttctgagaccccaaactaatttgcacagttgaagcaggaaatagaatgggtggaaacatgcgggtgtctgtattagcattatgcatctcatatgcgaataggaatgctctaaaaattcaatacagtatacatgcgtgtgcatcgtcatgcaaaataagtctctattggccttatatttgaacgcgcgaatgcagctcctaaaagttaaaaacaactcctaggctgaatcgcgcgatagaacgaaagcggctttaaacccagagactacagtttccggcatgcttcgacgccacacgtgattagcggcaactagaactacatttcccggcgtgccctggtctcacgtgtgatttgctgcggaacgaactacatctcccggcaggctgcggaagggggtcgagtagaaggaccgccgctccggcctcccgcgacttctcgaaggtgggcaggtcccaccttgtggaggatggaggtgaccggggacgccggggtaccagaatctggcgagatccggactctaaagccgtgtctgctgcgccgcaactacagccgcgaacagcacggcgtggccgcctcctgcctcgaagacctgaggagcaagggttggctcgggaccccgggcgagggtgtgggggagccagggccgggtgaggacgtccggcgggggcgaggcggggtcaggagaggcgacttggggattcttgtatctcgggtggaggcttgggacagaaacggtccgagtgggcatagcgatttacagatttaaggcgcttgagcgtaattaatctcgtgtgagactccacggtggtgggaagacagccaggaagcaatgtgcaaattaagccagactcggcttaggtctcttgcctgaaatcacttcgatgttggaccaaacggaccccactgggttcctgccactccgccacactcagatggtacaagaacccccagctgagcccacggcggtgtggggaggggtttccaccgtccgctctggcaggaacctatgcaggaaagagggagctgctactgaccatttctggaggtccagacaaggaacgtgagttgtaagtgacggagccgacggaagttccgagcccggccccatacctttaccagctgcttggccttgcacttaaccagctctcaaccctcagttttctcatcagcaaattgggtataatatttatagccctgcttcaaagggttgttggttctctcaaataagatgatatatttaagtgacttacaagtcttattagccagtagcaacaaatcgcttacccaaagaagttttacaggttacatgtgtgagccagccccaggcatgtagtcacagtgtgtgtcagagggcacagttgcttcctctcagtcaccaacagaaatcatatggaaattttcagagacccatgaacagccaaagcattataaatgctttggtaacatggattttg

SEQ ID NO: 470 - DNA, 6000 bp, Homo sapiens
tcaaaatccaacgcagacagaatttgcaggatcagaaccagaactatcaagaactgccaggaaatgctcaactttctcacttccatttctcttcctttccagagctgaaatgattgaagaggcaatgagtttcagtggcagaaacctggacagtcttgctttttaggtaaaggtataagatatatagatgaaaaacaaaaccaacaaaaggtattttgcaggaaaagtgtcaagctgttgaactgtatcttaaaataaaaatctcgctactgcttttgaatatcacaaatgagaactattacagatgaaaagatgagtaataagaatagcaactctccagaacactttgactagaaaagctttagaaatgaatgaaaatgaatgggatgcagaaataatacataaatgagagaaaacctaaataggataatcaggacgactacctctcaaatacatgatttcatttattctgataagaataaataaaataaatggtttaagaatacttcattgagtacatgttaaacaaactcatgaaactgtaagatttaccatgtacaaaactacaaaatgagatagttgtggcattcttgggcattaaataagtacaaacatggacgtgaaacactctcaaaaaactgtgtagttaagacgcagtatgcctcaattctattctttctcaccacaccattcaaacaagaaaatgagaagctgctctttaatcattagtaatatggtgtttttttgttttttttttttgagacggagtttcactcgttgcccaggctggagtgcaatgatgggatctcagctcactgcaacctccccctcccaggttcaagcaagtctcctgtctcagcctccccagtagctgggattacaggcatgcgccaccctgcctagctaattttttgtatttttagtagagacagggtttcaccatgttggccaggctggttttgaactcctgacctcaggtgatccacccgcctcggcctcccaaagtgttgggattacaggcgtgagccatcgcgccggccaatatggtcattattaatggaaacctcagatgagaaaaagcggcaagaaaaaatttagttttacatgtgaagaagaattaacggcaaagaccaaatagcaggcgtggtctttaaaagtttcaagctccatctctggtgagtacagtgacttaattcattgtgaattttggaaataatcctggctggttaatgaacagggtagtgctggaactgcagatatttatactccacaattatgattgctgttataccctacaatgttttttttcaaggaacacatttatcttgatttctcacaagttaatacagttttaaggttcaagtgtcttctgtgacaccttactgaagaagggcaaagctataacagtggtggatttccgtaagtgcaagtttaatgccgcctgggagtcctcacaaaattgactaatctgatgaccaacgtttaaaattgcatacgtgctgaataaaatcctaaaacaaaccagtttcttctttgttaaggcaacctattatatcctagaaaacacgtgaaggcaatgtagctactggttaagcatatgggttgaagactaggatctattctccactactttattaccttgggcaaattatttaaacttactaagcatcagcgtccttattcataaaatgggaatgaatactaccaccttgaaggatcatcatgtggggactaaatgcatgtaaagggtttactgagcccagagtcaacagtcaacaaatggtcgttagtgctattatttctaccatgcagtacgatcgctgccttatttaaccatgtcagttccttccagctagagggccgaagtggcggtggtctgggaagttctttagctgacatgcgagatagacggcgccgacctcggagcagcaaacacctgcccaacaggtaggctgccagctctctgggcagcatatccaggaccaggaagaagctcccagagacaagctccaggtctaagccccgcctcgcgctcctgccggaggtcgcaaccctgcaggagacagccccctcccccgccgccctccgagagcccagggcccggccctgttggctcccggctccccccggggccagcagtgactggaaacgagaaggaactgaggggaaatccctgagtcggcctggccccgccgcgtccgcggttccgcgcgtcacgccgggaaggagttaccgggaaagtacaccggcccaaccggctgcagctccgtgctccagttagttcgccgggccgggagcttcccgtccacaccagcgctcgcctgggcctggggaggggaaagaggaggggacaagcccgaggggagtcacgtgacgcttaaaggtctatcgcactgaaggcgaggaccgaacaggtcgagggcgtctactgggcgaatctattttgacccttgccactcgccgtctaggcgtggacctggggtggttgctatagaaacgaggcgcgctctttggttgcagccaaaaggctgatcgtgaccaaagaggccaaaacgtgcctcctagcgaggcgaagtcgctatgcatgatgggataccagaaggacctcctcgatccaggaaggtgtttccgctcctaccgggagatggccctcgtctagcaacagttgctaggatggggacgcactctctggtccctattctctttaaccctattcgtagaaccttagagcgtcagattggaagtgaccttagggattctttaactctccaactcctgcaatattgatagggagaccgaggtccagagaggggcagagatttgcccaaggcctagaatccagcattccttttatttttgtttacttatcttttttttttttgagagaatccaggacttttaatcccgtttaccgaaaaccgagctccacccaagaatgtaccagtctgtgccttaagcacggggaaagggcggtgggggtggagagagggataaggcacaggtaagtgaaggaaactttctttgagccaatgagatagatcccttgcggatataaagagctttcatatctccctgtcttgtttttatttttttctctttgcatttatcactatctaacatagtatgtcttatttattgatatagtttatcacctgatccttccactggaatgtaaactctaaaagcagggattttgttttgttcaccttcatgttcttagtgtttgactacaggctcaataaatattcgtagaagtgaacgaatggggctgaggttttggtgctcaagagattatattctaaggtggattcttaagagtgtggcttacagagtcaggttcgggtttcaatcctgcctgcctcggccacttagtacccaagtgaccttaaacattcgtttccctgaaccctagggtctacatctgtaaaaccggcggggggtgggaatactttcctggcaggattgtagttaaggataagtgaaataagcatgaaaagtggctagcacgatgcctgggacttagcaaatgctcagtaaacagaaacgattatttttgaaatgtgaaaatgaaccgttcagaacgatgggagtttacaggactagatttctgccgtttttttttttttctgtgtgggaggtgttagggtgggagggagggaagagggaatggaagactgtgtaaggtgggcttggttggatcagacactcgagtttggaacagtcaactgcgatctgggcacaagggcggtgaggggagcttatggttttacttggggtggaggagggggctaaggggaagccatgccccggaggaggttgaatgggcgggacagatcacggctccactcatggtttccctcttgctggaagtgtgacgactccctccggatctctgtaaaagcggggctatagtgaattctggcgaagggcccgcggtggaccaggaactggtgccagaattgcaaaagggcacctgcgcccggagtggggaggtgatgcgggggcggggcggggccctgggggcggggcgagtcgcggaggtgccgccttggggcggggcggtgacagaaggatggatcctgggggtgaggattgactttgggggcggggcgagagtgcgaactggagtctgaggctgagcggtgacgcaaggacgattctgagggtggagcgaggggaggggattggctcttggaggcggggcggtggcacgaggctagcccttgggggcggggcggtggcgcaagattgaccttgggggcggggtgggggcgtgggttgaatcctgggggcggggcggtggcgcggaatggattctggggtcggcgcgaggcgctgaggtgcgtcctgagggcggggcgatgacgcagagcgaatcctgggggcggggcgagaccttctagatgcgtcccggggagtgggcggtgacgcggtggcaggttctggggacaggcggtgaccccagaattgaccctggggacagggcgaggcgcggaggcgtcctgaaggcgaggcggtgacgcaagagcgaatccttggggcggggcgaggcgttggagatgcgtcctgcgggcgggacggtaacgcgggggcggggcggtgacgtgaggtcagtgcggggatacggggcgggttctggggcggggacgcagtggtggattctggagcggggcggtgacgtggggcgggttctggggcggggcggtgacgcggagcgtgttctggggcggcgcggtgatgggaggcttggccctgggggcggggcgaggcgcagaggtgcgtcctgagggcggggcggtgacgcaagagcgactcctgggggcggggcgaggccttggagatgcgtccggaggcggtggggagcgaagactgacccggggccgtgacgcgggggcaggccctggggcgggggcgggtcctggggactggggcgggcggccgaggcccggaagcggactgaggcggcctggagtcttagttggctactcgccatggacgaagcggatcggcggctcctgcggcggtgccggctgcggctggtggaagagctgcaggtggaccagctctgggacgccctgctgagccgcgagctgttcaggccccatatgatcgaggacatccaggtgcgcccccggccccctgtccccgcgctgcacggccgggtccccacgcccctcgaggaggcgttgtgcgggagcctagccttccctgtggcttcaaacccctcagcggagccaaagaatcccaaacacctcttagtcgggtgttcgctaaagcgattccatgccatactcagtcagcgtacactgttagtgcttgtgtttcttgtgtaaaggaaaaatgtgagacacatcttgagaactttgaataagaaacaattcatgaattggagaacatcagactgaaagagctttagtgttgcaatgacaaaacgtcagaggcaagtatttattgggaaaatgtggaagcaaaataaagaaattatttgattggtttgcagttacaaaattgccttttttttttaaggtctgttaattgactgcttttggctggtcttaagttttatttctctctaacataagcatttatcagatatgacccaagttaaattttgcttatgtttgcagtttaagcaagatttaggtcacttaggatacctgattggttttgtctgctcaggaattcttcatggttggtctccattttaatttacgttaatacttgcgaggaaggaggcgtgtgcgtttttacttttctagcatagaggtttcgggaacccactttggcatcaggctgcctggcagcgtgttcttgggccagtcacttaccctctttgagccacagtttctgggctgtgaaatgggaataagaataatactgtcataaggactaaatgaaataacggatgtgaaactgtagtgctaggcacagagcgggggatcagcgtaccctgccctctttggccagccccttctgtgttcagtttatgttttgttaaga

SEQ ID NO: 471 - DNA, 6000 bp, Homo sapiens
agaaggaagagaagtgggagaagcaccttggcccgtcttgggtctctctctaagctttagccttgcttgtctttatttccagaaccttgagaggtaaaaggctcccaggaccagcctgagaaggagatgaagggagaaatggaggaaaagaaagcagagaggaggagaaaaggaggaaggagaagaagagaaggagaaaaagaggagacataagaaacagggaggagaaggaagaatggaggaaggagaaagagggagagggagaagaggaggatgaggaggggaggaaggagaacacaaggaagagaaggaaaagaggtgaagagtgccccatgcctgtaatcccagcaatttgggagtctgaggtggttggatcacctgaggtcaggagttcgagaccagcctggccaacaatggtgaaacaccatctctactaaaaatccaaaaattagccaggtgtggtggggggtccctgtaatcccagctactcgggaggctgaggtgggaaaattgcttgaacctggaaggcagaggctgcgctgagccaagatcacaccactgcacttcaacctgggtgacagagtgagaccctgtctcaaaaaaaaaaaaaaaaaaaaaaaaaaaaagaggtgtagaggaggaggaggcgaaggaagaggaagaaaacagaggagaaagagaaaacagaaaaggaaggggaggaagaggaagaaaacagaggagaaagagaaaacagaaaaggaagggaaggaagaggaagagaaagggtgaaggaagagaggaagaggaggagaaggagaggaaggaagaagaccaggaagaaaaaagggaggaggctcactcgagagcccacttagcagtaggcctgagagaaacctggttattattactgttgttgtatctttagtgatgttgttcttgcccagttcttgagaactggaatccagtgcatactattccatttttctggggaaaatgaaaatgtcaagcaagctatcaactttcctttttgtttctattcaggtttgggcagattatttcaagctcacccctagaagagtgccacttcttaaaagaaaagcataataataaaaggtcggtgcctcttggaaatgtagcgctgaggaattccagcctccgaaacctggaaggagactcctgagagtcctttgttcctggatgttcagtttccctccccacccccacgcccaccccctcctctctcattatcaaacatttgaagactgagtaattccatttgttgatgtctttggcctcctctagcagagcaggccagagcctctgaaaatgcaaaggcccccaatgaaataaaaacccctggttttcaaggtggatttatcaccctttaaaggaatatttattgggtaatcactttccaaaagtgctcatgacacaggggactgaaataaagagcgtcctctccctcgggctgagggaagaggctgttggccacttggatgcagggaggagggagcctctttgtggcctatgtcttgggagggagcagccagagacaggccaagtttccccagctaaactcaagctggggtcttgcttctgtaccttgggcctacttatttctctcccgtttccaaacccaaattgggtttggaagatgccacttggaaacttgggaagaagaattcctattagcattgttgttgcctttaagaaaagggaaaaggaggaatgcagagatttcagaccagacggggtgagctagagataggagacaatcatccaagccagaccacactgagacgggaatgattcctggcggattagtgggctgggctgggccgggccgggagatgcaccccaagaccaagcagagaaggaggatctcttccccaaggtctttagccaacctcatctggaccaaaggatcttcccagggattcaggtctgagttacagcccagagagcaatggaggcccatacatacctcaggaaaccatggagatgggggaggcggtgacaagacagacagtcccagagaaaagccgctggggtgaagccagaaaggcaaggaggaaaagagaaagagagaccaaaagaacaaaacagatggaggagaccataagatagactgagggggaaagagagacaggaaaaatgtttgtgtgtgagagagagacagagagaaagagggtgaaagagggtgaggagagacagggatagaaagagggggtcaagggctaaaggaaaactttctggaacaagtctggcccagcccacacactcagaagccctcacaccctcccagcagcaactggaggtcttaggagttgattaagcctgcatgggggtgactttttctagacaagggggtaagcaaagggaaacaagaggaggggacgcggctctcccccatccccagccacagttcccaggtgaacccccctttcccctgctggatgtgaaatcgccatttcaccccaccacactccttaattgttgcaaaaatcatttgtgaaattggtctccaacaggcaagaacggccacgctcattccaatagacaaccccacctcaacccttccctctgcaagggcccatggaatcccggagctgcagaaaccctgggggcctgtgtcgctactgcacccactactgtgagtcttttgcagggagggtgagggaccacactgtgggcaaggtggccccagtgcaggactcctgaggttctgagggtccctggcagcagaagtgtccagctatgcactcgccccactcagctcaagatgctacatgagcactggccagaagagagggagcctcccacccttggcacaccctggaggtcttttctcacttgagaattgacctaaacacacactcacacattcctgacgcgcgcttagagccataccaaggcaacctggaggtgacctcaaagcagaaatacagacatggaccctcacttagaaacacacatttactcaaactgaccccaaacagacctacacacaaaacccacctgcaccttgacacacagacccgggcacaggcctatattcacacgcaagcacactggcccattccacaaatacagggaagaagtgccttgaaaccttccaggcagaggacagctagtgacgaatgaatggatgaatatgcaatatacctaatatatatgtgtgtgtgttatacgtgtgtatgcataagtgtatatgatacaaatacatgtatatatacacacagagaatatatatccacctatggaggtcaaagcaggccaggtccccagcaaggctggtgatgtaagggggttgctgtcttccctgggcacacatgctatggcttaaagcttgatctcccaatctctcccgggggagggccccataacttgggccaggcaaagtaccccggtgtcccccttccaattcgaaagctacttggcatctgtcttctcagttagagagagtatgagctcaacaagtttttcatcagggcccccattcccagaaggcccccccaaaatctgatgagccccttgtgctaggagagtggggagaggagggagatctgtcacatgctgcaaggggcaaaggtcacaggtgaggcgaaggggagggatggggacaccctggggccagccagcggtgagcgccccaggctaagacaaggctgaccccactgccgagagagggcgggcagggggtgagattgagggctgggttcattttattgtattttgcctccagcgtggggccagagacgctctttcccccgggagacaaaaggcctgcagttgtggcgtcctgccccgctgggagggcgtttcgcccccaggactcggtgtcccgaggttgaggctactggtcaccctggcttcagaaagcgaagaattcaggaacctctgatcaccccaccctgactcctgatcattcagttggggcgtcccctcaaacccaccagcaaggagctcagagttggtgagttcagagctgtatcaagtcttgacgggctccctccctcccatttcccacctctttgggcccccagatcctcacaccagcaccaactccctgtaaacccaactacctgctggaaaggagttataggcccggcctgggggcctgaggaggacggcggcggctggagacgtctgcacggggcggaactggaaggggaggaagaaacctgtgcctagcacttggcagacccactttgccaagcctcggaaccagatacggttactgggggcttctcagagcggcaggaaggtagagtaagaaccggacaccggggctctgacattacacagaaaaggtcagaattcctcccttcaagtcaccctaggccggttcccggggagcctcactggaggaatttcagagggtgtaagacgagggagaagatgagaaatagggcggactctggccctcggaggccagagaaaaggcgagactccagagaggcgccggacccgaggcagacattcccatacagccgggactccgagagcagccgtgggcgacctgggggccggggactcggcggatccggcccattcatcaaaggaaggcactgggacaaagttggccccctccccttctcccccagcccccaactcgccgggatcggctccctctcttttcacggcggttcaaattctcccccaaaacgaggtcgagccggggattagaaaagagggaaaaaaatattcgttggcgatttcttttcgttattggtcctccgctcccttgcgccctggcccccttccctcctcatgaataaaagaaaagtccgaacctatcagatcgcgctcactgcctcctcctcctcctcctcctcctcctcctcgtacttcggtgaacacttttgcacaacttacccagctgatcactcgcgccccctcgcttttccatttctctttccccaaccccgtcaccccctgtctcctccgtccagccctgaaacccgaggaggctccttcttccgtctgtccccgggtctcctaggggacggggctgtgaaagctggtgtggagggagaagcgagtgtggtccggagaaagaaggcgtggagaagagggagggagcgagagcgagagaataaatatataaataaatacgagaacgaaatccactccgcagtctccgggctcggaaactttggccccgagcgccagagcgccagagcgcgagagcgcggcgctcgccactctgaggctggcggcctcgattccggccgcgttcccccggcccccctccgccgcggggcctggtctccgggttctgccaggcgcatcagcccgcacaacttctggccgaggccagccggcagaggcggacttggggttggagtgtttgtttgtttgaacttcctcgtcgtcgccaccttccctccccccaacctccaccccacctcacccccctccccagcttctggacgcgtttgactgcagccaggggtggggggtgggggtagggagtgtgtgtggaggggagggagaagaggttaaaaaaaagaagacgaagaagacggaaagaaagagatcgcagcaggggtgaagggagcggacgggaagcgatttttgccgactttggattcgtccccggcgtgcgcaagaatggcggcccttcccggcacggtaccgagaatgatgcggccggctccggggcagaactacccccgcacgggattccctttggaaggtaagaacgcccaggctggcctcgccgcgactccgccgcccggaactcggggtccttggagaggctgcggtctccaggggacggtggcggcgccggcgatagcagagggatcccgttctcttctgggtcccagtccgggcgcggaacccagggagtttctgggacccatacttgtccgcttctgcgtgggtttcactgcccggcggccttcgtttcgcaggtcgctagctgccggtctttacccgcagggctgaaattctggtagatttggactcctagtaaatatcaggtcctggtgaatttcagctctttccact

SEQ ID NO: 472 - DNA, 6000 bp, Homo sapiens
aaataatgaaattatttatttattttttcttgctctgtcgcccaggctggagtgcagtggcgcgatctcggctcactgcaagctctgcctcccgggttcatgccattctcctgcctcagtctcccgagtagctgggactacaggcgtccaccaccaagcctgggtaatttttttgtatttttagtagagatggggtttcaccgtgttagccaggatggtctggatctcctgaccttgtgatccgcctgcctcggcctcccaaagtgctgggattacaggtgtgagccaccacacccggcctcttttttttatttttaattgagatggggtctcactctgtcacccaggctggagaacaaaggtgaaatctcggctccctgcagcctctgcctcctgggctcaaacaatcctcccacctcagcctcctcagtagctgggaccacaggcatacaccaacactcccggctaattttttgtattttcggtggagacggggtttcaccatgttgcccaggctgatctcaaactcctaagctcaagtgatccatgttcctcagcctcccaaagtgctgggattataggcgtgagccatagcgtccagccctgacttacattttaaaaggatggctcttgctgctgtcttgaaaatagactgagttagtcagtttataaaactggggagattttgcataaaactccagatttctgccttctcttgaaaaataggggctaggtgcgttggctcactcctataatcccagcattttggaaggccaaggtgggcagattgcttgagcccaggagtttaagaccagactggacaacatggcaaaaccctgtctctaccaaaaaaaaaaaaaaattagcagggtgtggtggtgcacacctgcagtcccagctactcaggaggcaagcttgtattcctagctacttaggaggatagtttgagcccaggaagtcaaggctgcagtgagcatgatcctgccattgcactccagccagagcaaaaaagagagcgaaaccccatctcaaaaaaaagggaagatttagctatgttggacttacctgtcctcatggagctgaataatggccacccctccaggtagggcctgaactctacctttgccagagtcccctccactccctgttggtcttagacaatgaaactgagtgttagtagctatttaccaccaagctcatgcttgttgttcttataataaagataaatggtttaataaatggtatgataaagaaaattatattatggtattataccatttaataaatggtataataaagaaaatggttttttgcacccacatttccattaaaaagtgagaaaattaaagatacctgaggatggcagagtgtttgatgaaagatagggaaatgttggccaggcaccgtggctcacacctgtaatcccagcagtttaggaggccggggcaggcggatcacaaggtcaggagttcaagatcagcctggccaacatagtgaaaccccgtctctactaaaaatacaaaaaattagccgggagtggtggcaggtgcctacaatcccagctactcggaaggctgaatggcgcgatctcagctcattgcaacctctgcctcccaggttcaagccattcttctgccttagcctccctagtagctgggattacaggcgcctgccaccatgcctagctaatttttatatttttagtagacgtggggtttcgccatgttggccaggctggtctcaaactcctgaccttgggtgatctgcccgcctcggtctcccaaactgctgggattacaggagtgagccacagtgcccggcctctaatttttatttttaatttttttaatttttatttttttaatttttattttatttattttttgtaatttttaaaatatacaaaaaaagggccgggtgtggtggctcacgcctgtaatcccagcactttttgggaggctgaggtgggtggatcacgaggtcaggagatcgagaccatcctggctaacatggtgaaaccctgtctctactaaaaatataaaaaaattagccgggcctggtggcaggtgcctgtagtcccagctactcgggaggctgagacaggagaatggcgtgaactcgagaggtggagcttgcagtgagccaagatcgcaccactacactccagcctgggcgacagagtgagacttcatctcaaaaaaaaaaaaaattatatatatatatatacatatatatatgcaaacaaagagcatctgagtcataataatgtaaatctatcacctgactgacctgctgccacacctcatgatctcatctgatccccacactccttctctttgggatactgtgtacagccatagcgtgggtgaactttgtattcctatcctccccatttttgttattttattttatttcttatttatttgagacagagtctcactctgtcatccagactgtaatgcagtggcctgatctcggctcactgcaacctccacctcccggtttcaagcgaatctcctgcctcagcctcctaagtagctgggacctacaggcacacaccaccacgcccagctaatttttgcatttttaatagagacggggtttcaccgtgctgggcaggctggtctcgaactcctgacctcaggtgatttgcccacctcagccttccaaattgttaggattacaggcatgagtcactgtgcccggcctcctccccattttataacaagggaaatggaggcccagaatggttaagtaaacccacccagggctagctgagaattagcaacagagaactgggagtagaatttgttccctggccctttgctgtttctattataagccacccagtcttagattttctgttaccttataattaatgactcaaatgcagtttctgagtgagaaacacaagtcccaaacactctttaaagaggcataaagatgtatcttgttgttttcttttgtttgagacaaggcctggctctattgcccaggctggagtgtggtgacatgatcttggctcactgcaacatctgtctcctgggctcaagccatcatcccacctcagcctcctgagtagctggaactacaggagcgcgcccccacacctgggtaatttttctattttttgtagagatggggttttgccatgttgcccaggctggtctcgaactcctgagctcaagtgatccacccatcttggcctcccaaagtgctgggattacaggcgtgagccactgtgcccagcctcttgttgactgtaggaccacaagttggcggctaacttagagcaatgtttggcacacaggaagcactcattaaatattgacattattgtagttattttaatagcccagcattgcacttttaggtctttcagctttcagtgatgatcagttgataattgatgatctggtggagtggttcttaatggtagagttgggggcaattttacactcccttacaccccactaatcttccccccaacccaatggtaaagctattgcacagtacttggcaatgtctagagacaattttggttgtcacagcctggggggaaggtgctactggcatctagtgggtagaggctaaggatgctgcttaattttttttttttttgagacaagagtttcactctagttgcccaggcacagaacagcttcacagaagctgttaatgcacagaatagcttcctacaaaaaagcattacctggcccaaaatgtcattagctaccaggctgagaaacctgccctcctaggccgggcgctgtggctcacgcccgtaatctcagcatattgggaggccgaggtgggcggatcctgaggtcaggagttcgagaccacctggaccaacacggagaaacccagtctctaccaaaaatacaaaattagccgggcatggtggcacatgcttgtaatcccagctactcgggaggctgaggcaggagaaccgcttgaacacagaggcagagattgtggtgagccgagatcacaccattgcactccagcctgggcaactagagcgaaactcttgtctcaaaaaaaaaaaaaaaaaaaaaaacagggaaagaaaagaaaggaaacctgccctcctatcataggataatcccatttcctcctgtctaaagagacgcctacttagtcatcctgggtgactgcatcagggaggtagattttggagtctgaaaggctgggttctgtcactttgttacagtgcctctggtgcaaagaaagcattttaaaaaccctgtacaattaaaaaattgaatttaattactttgtgtaactttgaataattcacagaagtctgaacttctttatcctgtcctgtaaaatggaggtaaaaagcccttggccgagagctgttttgaggaaaaactgaaataacattggtaaagtgtcgcacagtacttggcacacagcagcccctcgacaaacattagctttctttccctttcttgtcggtttcttcctctccaaacccgcgtgttgcttttctttttaattatttttctgtagccctcctttgcggccacaaactcgctttctaacccaggttcagcccttttattggctgagtgaccttgtgcaagtcacttttcccctgtaggcctcggtttattctccgtaaaatcagaaagttggcctccgatctccaagcacgcttttcacgacgaagtgggactgttaagtttacagagctgctttcctcccccgggactgatggtacggtccccgggcggctccccacccatctgtcgcagaccttggtacaggcccagggggccctcggcggcctctccgggctgcccttgccccctgccgagttccgggcccgtgtctgcgcaagctgattggctggagcggtgcccgggctgcgcggctataggtgagcccaggaggggacgggcggggcgggccggaggcccgccccctcccccctgggtcggacgctgagcggagccgcgggcgggagggcggacggaccgactgacggtagggacgggaggcgagcaagatggcgcagacgcagggcacccggaggaaagtctgttactactacgacggtgagcaccgtcctcgcggcgggggcggggccaggccgggccggaccgggaacctggaggctgaggctggagcgccgatgggaggctgcgggaggctgaggcgctggggagaggctcggagaggaggctgcgagggggaagtcgaggctgagggaggaggctgcgaggaagggagatcgaggctgagaccaagaggggatcgcgtgggggaagcgtgaggtaatcttgatgggaagattctgaggaagtctgatgtggagagtttgagtgggactcctagaggggagggtgcgtcggagcggggaggctgaatctgatggagacggctgcaaggatacattttcttgccgagaacccaaagctcttccctgccccgtcccttcctcatcttttctgggggaagagtcctgcacgactggttgcccgcctcccctcccccagcctctgagcggggcctgcggttgctactgcgacgtggggcgccaggggttgcaaggagaaggatgcaacctgttaaaacagacttctcacttaatctctcaagcaggttactgtgttcgaggaagtgttgaggggctggggccgtggggttgatcgggtcacccttcccagtgaccgaagttctctccgtgtcagagctcagagtgttaggggagcacagagaagaggcaccgaactccacctgaggagtcagcgaaggaggggacatcttagttaggacctgaagaacaggagttcttagccaggcacagggaaggcaaagataacagcaagtttcagaggcaagagagaggacaggacctttgaaaaacaggcatttggccgggcgtggtggctcacgcctgtaatcccagcactttgggaggccgaggctggtggatcacctgaggtcaggagttcgagaccagcctggccaacatggtgaaacccc

SEQ ID NO: 473 - DNA, 6000 bp, Homo sapiens
aggtcctcttccgttctatgacttctaggagtccaagattgatctccttgatcggaaggaggatgtgaagaaaaaactgaagaaggccttctgtgagccaggaaatgtggagaacaatggggttctgtccttcatcaagcatgtcctttttccccttaagtccggtaacactctctgttttcttcctagaggccaggctagaatagaaaagttcgtgctgtgatcatacttgtgatttgtcacagactcttccttcagggactggctgccctgattctctgctctgatttcttatatattaaagtatgaatgatgttgggatgtaatttaattgtccatatattcgttaccaggctaggttctgagggaatactggagtgggcagaggtgttagaagtaagggtgggggcagacatgttgaactagaggaatacaacaaaatagatataagccacaagccttcccctgaagcagctgagatgctagctgggtatacaatagtgccactcatccaatttaagaataataccatacaataaagttcagaatatatggcaaaaactacaaatagtcatgcatgtgggctaggaatagtcatgcatgtgagctaggaatgctgtcaatgagtttgttgacatggatccttttccttatagagtttgtgatcctacgagatgagaaatggggtggaaacaaaacctacacagcttacgtggacctggaaaaggactttgctgctgaggtaacatgaaaggaaaaggaatcctttcatgaagatctgtattttgttattttttgctgactgttagaacttgtttagaacaacttgttctgtgtaaaagtgagctgcctgctatttttgctctacttttggtaatctcactagtgtccattttccttcaaaattgcagttttggttaaagtttcttgtcagttagcttttctgacttaggaattttgttaatacagatggatttctatccctcggggccctttccttacctggcagggactctgtctcacctcttctcaggaaacatttcttatcagtaaatgtctgtaatcttatacacacgagtggtccctttaggatgtacaaaagcagtactcattcagtagaaaccatacttcttcaagtacccatacaaccattctgtttttcactttctgtattcaataaattacatgagatactaaaaaaaaaaaaaaaaaagaaaatgggctgggtgcagcagctcacacctgtaatcccagcactttgggaggccgaggtgggtggatcacctgaggtcaggagttcgagaccagcctgaccaacacggagaaaccccatctctattaaaaatacaaaaaagtagccaggcatggtggcacgcacctgtaatcccagctactcgggaggctgaggcaggggattcgcttgaacctgggagtcggaggttgcagtgaaccgagatcgcgccattgtactccagcctgggcaacaagagtgaaactccgtctcaaaaagaaaaaaagaaaggaaaagaaaagaaaaagaaagataatccccactcaactctgccagacctctccatcttggcccgctaggtttgtagttatatgctacagggctctgtgtttttgtggggttttttttttttgagacagagtctcactctgtcgcctaggctggagtgcagtggcacgatctcggctcactgcaacctccgcctcccaggttcaagcgattctcctgcctcagcctcctgagtagccgggattacaggtgcccaccaccacacccggctaattttcatattttttagtagagacggggtttcaccatgttggccaggctggtcttgaactcctgacctcaggtgatccgcctgcctcggcctcccagagtgctgggattacaggcgtgagcccctgtgcccggccagggctctgtttatgctctccagggctgcatattttgttaatggctttgatgaggattcaggtggttcccagattcgataggcaaatggtacaatgctaatatactggtgctttaatcactctccaaatgacttagcaggctggaataaaggacctaactcagcaaaaatgaagtatttcaggaacagatgcaaaatcaggattcaaaaacaagagataattataaaaggacagaatagaggctcctattcatttcaacagacacttgaacaaaagacttactaggtgcccatgtgttaggcactatgctagggactggtattacacagagggttcagtcctcctaatgctcagtccagtaggcgaggcagacttgtaaacatttcattggctgcattttacatatatatctatatgtgttttttaacatatgtgtgtatgtgtgtatatatgtgaatatatgtgtgaaaatatatatgtgaatatatataatgaaaagaatatatatataccagaaataatataggaggaaatgattaactgactctagaaaagcttgtggaggagacactatccaagcactattttgcttgaggaataggagttcacaaggaaatctgtgagggaataagttgtacaaagacatggtaggatgaagcagcatgatgtatgaggaattccaggtggtttggtctgactagagtctaaaaggtgaggagggggattatgggagagataggcagggccaggtcacaaagggaagatgtgataataccatatataggaataaaatggggggttttgtgattgactctgaattcaggtccaaccaatttaatggagctgctagaaatgttaatgtacgccaggtgcggtggctcacacctgtaatcccagcactttgggaggccaaggcaggagaattgcttgagctcaggagttgaagactagcctaggcaacatagtgagactctgtctctacaaaaaaaaaaaaaaaatcaaaatactggccagccatgatggcgcatgcctgtagtcgcagctactgggaaggctgaggtgggaggatcgcttgagcccaggagatcaaagctgcactgagccatgattgcgccactgtactccagctgggtaacagagcgagaccatgtctcaaaaaaaaaaaaaaagtcttttgtgggaattaggaatagatgaaattcctcagaaaaaaggtctgcagccatgttatccaacagtactttctgtggtgatggatatgtcctatctgtactgcctgatacagaagccacatgtggctgttgagcacttgcaatgtggcaggtgcagttgaagaactgaatttcagtttacatttaaatacccacacaaggctagtagccaccatattggacagcagcagccctagagcttttattaaaattaaatattcccaaggaaatgaagaagtagtatcagaaacaaaaatgttcgctttgttgtattaaaagtgttcattcctaagggatgtcccctcagaatatctagaagattctttcagaccagatttgagatataaaaaaggcagtcagctgggcgtggtggctcacacctgtaatcccagcactttgggaggctgaggcaggtggatcacgaggtcaggagttcaagaccagtctgggcaacatggtgaaaccccgtctctactaaaatacaaaaaattagctgggcgtggctgcatgcgcctgtagtcccagctactcaggaggctgaggcaggagaattgcttgagctcaggaggcagaggttgcaatgagctgagattgcgccactgcaccccagcctgggcgacggagcaagactccgtctcaaagaaaaggcagtcacaggacacaaggaataaaatggaattactgaactattaccatgtacgagcagcgttctcatcattttcacacccacattcagtgatttaaccctcatccccatcctgtgagatatagctgttgttagcttcactttataagtaacaaagccaacactggcccggcacgttggcccatgcctgtaatcctagcactttgggaggcagaagcaggcagattgcctgaacccaggagttcaagaccagcctgggtaacatagcaagaccctgtctctacaaaaagaaaagagaaaaagcagcagccaaagcttagaggggttatgtgcctagtttggagtcgcacacagctagctgggaatctaatctgggtctgtcgaactccaaagcccttcctctttcttcttactcagctgtctccctcaggttatctttaggccttgggttacctatgtgaatgtttctctgcttgtaaataccagttggtctgtgaccctactctaagcataaatggagggactagaagaattagactaacaaatacattcagctcctaaacaccctcaagttagtatagatttcagaatcaaaagacttggattttggacacgttagtctttctgaatgtattttcccttctcctacctgcctcacaagattatcacaaggatcaaataagactgttgggaaaaactcccttgatcctacttttttggattcaggtgtcctgtgccctgttctagactttatctcactaggtcttgttcgattctgcaggttgtacatcctggagacctgaagaattctgttgaagtcgcactgaacaagttgctggatccaatccgggaaaagtttaatacccctgccctgaaaaaactggccagcgctgcctacccagatccctcaaagcagagtaaggccagctggagaggggccgacatcatcaggagagagagcttgtcaatgagccttggaaaaatgcctgtcttaaattgagggcacaacaacccagggggtctgaagtgcaggaatgtcatgtcctactggctcctagaatggaacttgagtcattttgatttgggtttggttaacatcaggaagtgatcacatccttttgtaccggcattgctgagagctgctggtgtaagatgtatactttggtccttctagtctgtttgttaaatctgcctcttcattaaagatagtgaccggggccagacacagtggctcacacctgtaatcttaacactttggaaggctgaggcaggcggatcacttgagcccaaaagttagagaccaaaacccagtctctacccaaaaaaaaaaaaaaaaaaaattagccaggcatagtagcacatgcctgtagtcccagctacttgggaggctgaggtgagaggatcacctgagcatggggaagttgagactgcagtgagccatgatcgcaccactgcactccagcctgggcaacagagtgagactctatgtctcaaaaaaagaaaaatgatagaaattagattagacctattatacccaaccggtatatagggtatcgatagtttcttacacagctgttgggcagagcctgcagagcttagagaagcttatctttagattctcccagtttccttctatgtgcatgggcctggctcttagttggccatccacttgtgcgtaatgctaagatattggcattgatagctttgtgcgacccttccagaaaaaaactcagtaactcagtaaaattttttttttttttttctaaaagagacagagtctggctctgttgcccagcctggtcttgaagtcctgggcttaagcaatcctcccgtctcagcctcccaaagtgctagaattacaggtgtgagctaccacacctggccaagactcagtaaattctatgtggaatgcatgaatggaaatacctaaaggaggcaaagctactactgctccctccccgctagtctaataattgagggagagaacagatgaaaatcaggtatgtcatgtctgaaaggttgccaacccagtattaaagaagttacaactcagtgtttagactctggggattctacactaaatcttacctaatctcagtgtcttaacgtggtgggatcagcagctgacctgccacagggaagaattctacctcatggggttcttctcattcccagagccaatggccaaaggccctgccaagaattcagaaccagagg

SEQ ID NO: 474 - DNA, 6000 bp, Homo sapiens
atgtttgttgtgtctgactttttgcacttagcataatgttttcaaagttcatgcatgtatttgcacctagcagaacgtcattcctttttatggttgaatgatactctgttgtatggatatacattttgtttatccgttcatcagttgatggacatttgggttattccatttacaacttagtcttaaccaaaggtttttgcacgcttcccctagctagattctttgtttcctattctctctccataaaatagtgctggttggagactaaaaatacacaaaactattagaattgactcaattgggttttttgttttggggattttttttctggaacggagtttatctcttgtcggccaggctggagtgcaatggcacaatctcagctcactgcaacctctgcctcctgggctcaagtgattctcctgcctcagcctcctgagtagctgggattacagacgtgcaccaccacgccgggctaatttttgtatttttagtagagacggggtttcaccatgctggccaggctggtctcaaattcctgacctcaagttatccgccaaattcggcgtcccaaagtgctgggattacagagtgagccacagtgcccggcctcactcaggttttaaaggctaagtaatgtgacatcttcttggatggtgagaaccctccaagtgtccacgttgtcaggggtgctcttgagcatgcgggatcagctgccaaaagacttggagcacaggagtttaacaagtcctggtaaaacatgattcaaaccagcagtctatcatggtttctgacagcctcccaaaaccgtaacttgaggaaacactacaacctcttatcggggtacactggcctgttagaatttttccaatactgtcataggacaaaaagaaatcattaaaggtttgtaaaaaggaaaatgagttttaaagaagtttttgagttttaaaagactgtctctggctaccttttagaacatggattggaggggccaagcgcagtggctcatgccggtaatcccaacactttgggaggcccacacgggcagatcacttgaggttgggagttcaagaccagcctggccaacatagtgaaaccccatctctactaaaaatacaaaaatttctctggcctggtggcgggcacctgtaattccagctatttgggagactgaagcaggagaatcgtttgaacccgggagcagaggttgcagtgactcaggattgcatcactgcactccagcttgggtgacagagcaagactccgtctcaaaaaaataaaaaagaacttggattggagggagtaagagtagatttgggagacctgttaggagaatgttacggtaatcctggtgtgatctgatagggcctggatttgggtggtgatgtagaggcagagagaaataggagggttgaagagcagttttggagtccttgaacaactctaaatgatggtaccatttactgtagtaggagtgaaactatcagtgaaaaagatggttggggagtgaagtaagaagtcaagagcatgagttttattttgaacacgttgagtttgaatgattgggttgataacaagaacacggttctgtgtatgggcgtaagcaggagatttgggagttactggctcatagtagtaattgaagcaactgaaggggatcagttaaggagactgtagagtaagaagacaaaagaccagagccccaaagattgctaatatttaatgactaggaaaaataagaacagttgcaaagaaagctaagcaggcagagacgaggaaaactaagaataaaataaaggagaccaaaagaggagaatgcttctgggagggagtgaggactaaaaaatactcactgaatttagcaacgtgaaggtcttctgtgatcttagcaagattatgtgtgatgtgatatggaatttagtagtatgatgtagtatggaattaaaattggaatgggagattaggaaatggagcccaaaagaagagacaactgttacaagaaattggctatgaaaggaaggagagtgagttagaggcatgtaaaccaaaaagtatctgaggccaggtgtggtggcccacacctataatcccagccctttgggaggctgaggcaggtggatcatttgaggtcaggagtttgagaccaacctgaccaacatggtgaaaccccatctctactaaaaatacaaacaattagctgagtatggtgttggacgcctgtaatctcagctactctggaagctgaggcaggagaatcacttgaaccctggaggcggaggttgcagtaagcggagatcacagaactgtgctccagcctgggcaacagagtgagactccatcttgaaaaaacaaaaagtatctgagacaagtctcaattaatttagaggtttattttgctaaggttaaagaccatggcacctgacacagcctcaggaagttctgagaacatgcgtccaaggtggttgggttacagcttcgttttatacattttggggagacagaagttacaggcaaaaacataaatcaatacaagtaaggtatacattggtttgcccagaaagggggtgggggttctaggttctaggtggattcaaagatttcctgactggcaattgattgaaagagttaaactctgcctgaagaattgaagtcagcttgagttaagataaggagggttgtggaagccaaggtttttttttttttttttttggagacagagtgtcgttcttgttgcccaggctggagtgcaatggtgcaatattggctcactgcaacctccaccttccaggttcaagcgattctcctgcctcagcctcccgagtagctgggattacaggcgcctgccaccatgccctgctaatttttgtatttttagtagagatggtttcaccatgttggccaggctggtctcgacccctgatctgatgatctgcccgccttggcctcccaaagtgctgggattacaggcgtgaggtgctgcacccagctgaagctaaggttcttgtcatgtagatgaagcctccaggtagctggcttcagagagaattgatggtgaatgtctgttatctgaccttaaaaggtgtcagactttccagaaaagacttagtgtggggaagagatttctctacagaatgcaaatttccccccacaagagagttttgcagggccatttcaaaatatgtcaaagaaatatcttttggggtaaaatactttgatttcctttagggcctgctatctgtcatatggtgctataccagaatcagtttggaatttggtatcttattgctacagagagtttgttttgtcagtcttactatctgtgttttaatgttcatgctggtcagttgtgtctaaactccagaggatcaccaggtggggtggctcacgcctataatcccagcactttgggagactaaggccagaggatcacttgaggccaagagttcgagaccagcctgggcaacatagtgagacttctctactaaactgaaaaaactagccaggcatacatgtgctggtagccccaagctacttggaaggctgaagtgggaggattgttgagcctggaggtcaaggctgcagtgagctgtgtttgcacaaccggactcctgccagggcagcatagcaagaccttgtctcaaaaaaaaaatgaataaatatactccaaagggagaagggtataatgaggcatgtcagacccttccttcctgccttggcctgaactagttttttaagtttctttgggatcctgttggccaaaatgtggggtccattccgacagttggggggcttaaagtttagttttggtttacgggtagctgctgcaggcaaagatgcagttaggggcatgtccccactccccaacatcaagggtgatactagcagcagcaccaactttacattggctctccgcgttgtaaccgagcgagttatagagaaacgccacactctgagatgaattcaggagtcctttattagccagcgaccgagagatggctagtgctcaaaattctctccgccccgaagaaggtgctagattttcttttatactttggtttagaaaggggaggaggagcctagctgaagcaatcttacagaagtaaaacaggcaaaaaagttagaaagacaaatggttacgggaaaacaaacagttccgggcgcaggggctttaaatccatcacaaggtgatagacgcggaggctttgggtaccatcaaccagacacaaatgctggggcttagggtaatatcaactgggcaaattcctgggaactgcggctatagctttccacaatatcttatcagttatttgcgttctttgatgtgctgggagtcagcttgcacaagttaagtccttgaggaaggggggtgggtaagaggctgcaaggggctacaagtgaaggagccaaaatggagtttgtctggctctctcagctaagggagagtcaattcagattaaaacaaggtagggtatcacatctgcactgagaacatggctggacctccttgatggctctgagcctggatctccactgacacatgctgttgttttccttgtcacatggtaaaggatgagcaaggtgaggcactgacattaaactaactcttctgcttccacaataggaggttctgggggaagagaagctgaaggagatactgaaggagcgggaacttaaaatttactggggaacggcaaccacgggcaaaccacatgtggcttactttgtgcccatgtcaaagattgcagacttcttaaaggcagggtgtgaggtaagaactaatgctataagcccttggggaatgacccaagggagacccaagagagacttaacaaggacagggtggggctggaggagacaggttggaggtaattggacaaattcacattttggtggccccttatctcttgtccaggtaacaattctgtttgcggacctccacgcatacctggataacatgaaagccccatgggaacttctagaactccgagtcagttactatgagaatgtgatcaaagcaatgctggagagcattggtgtgcccttggagaagctcaagttcatcaaaggcactgattaccagctcagcaagtaagtgcttgatcatccaccctccttgtggctctggtgcttctagctaattacaggcctgtggagtccaggcattctttacatttagattagaagctgtctggcgtgacctattaagaaccatttaaaactttgtccattaaaacctcattgtccttgtaattcatccatcagaagtgtactgactagtaaatgccttaatactgtcctatttgctggaaatataaacgtaaccaaaacaaagtccttggccttgcagaactcacagcatatgggagagtgatggtgaacaattcagcctccctttctcttccagcctcagcaaataataataaaagaaatgtgaaagaaaaatatttcacttatttctcaccgccccaacaattgttattgctttttatctttgtgagttttgttcatatttggaatgttagcatagatatttcgtgtcctaatgtttaacttactctttttttttttttttgaggtggagttttgctcttgttgcccaggctggagtgcaatggcgcgatcttgactcactgcaccctctgcctcctgggttcaagagattctcctccctcagcctcctgagtacctgggattacaggcatgcgccaccacacccggctaatttttgtatttttagtagagacagagtttcaccatgttacccaggctgacctctaactcctgagctcaggtgatccgcccacctcggtctcccaaagtgctgggattataggcataagccactgcgcccagcctaacttactctttcttaacctcagatatgcatttataagtacatagcgctctattagtcacttttgcatttaaacccttagaacaactttttaaagtaagcattattttgctaaggaaattaattcagatttaactttcctgagt

SEQ ID NO: 475 - DNA, 6000 bp, Homo sapiens
ggctaattttttgtatttttagtagagacggggtttcaccgtgttagccagggtggtctcgatctcctgacctcgtgatccaccctccttggcctcccagagtgctgggattacaggcgtgagccacggctcccggccacaaccatcacactatctaataaaacttgcacccgttagcagacgctacctattacccactactcctagccttagagaaacactaatctactctctgtctccaggtatttgcgtattctgggcatttcctgtaactagaatcatacaatatgtttgttgtgtctgactttttgcacttagcataatgttttcaaagttcatgcatgtatttgcacctagcagaacgtcattcctttttatggttgaatgatactctgttgtatggatatacattttgtttatccgttcatcagttgatggacatttgggttattccatttacaacttagtcttaaccaaaggtttttgcacgcttcccctagctagattctttgtttcctattctctctccataaaatagtgctggttggagactaaaaatacacaaaactattagaattgactcaattgggttttttgttttggggattttttttctggaacggagtttatctcttgtcggccaggctggagtgcaatggcacaatctcagctcactgcaacctctgcctcctgggctcaagtgattctcctgcctcagcctcctgagtagctgggattacagacgtgcaccaccacgccgggctaatttttgtatttttagtagagacggggtttcaccatgctggccaggctggtctcaaattcctgacctcaagttatccgccaaattcggcgtcccaaagtgctgggattacagagtgagccacagtgcccggcctcactcaggttttaaaggctaagtaatgtgacatcttcttggatggtgagaaccctccaagtgtccacgttgtcaggggtgctcttgagcatgcgggatcagctgccaaaagacttggagcacaggagtttaacaagtcctggtaaaacatgattcaaaccagcagtctatcatggtttctgacagcctcccaaaaccgtaacttgaggaaacactacaacctcttatcggggtacactggcctgttagaatttttccaatactgtcataggacaaaaagaaatcattaaaggtttgtaaaaaggaaaatgagttttaaagaagtttttgagttttaaaagactgtctctggctaccttttagaacatggattggaggggccaagcgcagtggctcatgccggtaatcccaacactttgggaggcccacacgggcagatcacttgaggttgggagttcaagaccagcctggccaacatagtgaaaccccatctctactaaaaatacaaaaatttctctggcctggtggcgggcacctgtaattccagctatttgggagactgaagcaggagaatcgtttgaacccgggagcagaggttgcagtgactcaggattgcatcactgcactccagcttgggtgacagagcaagactccgtctcaaaaaaataaaaaagaacttggattggagggagtaagagtagatttgggagacctgttaggagaatgttacggtaatcctggtgtgatctgatagggcctggatttgggtggtgatgtagaggcagagagaaataggagggttgaagagcagttttggagtccttgaacaactctaaatgatggtaccatttactgtagtaggagtgaaactatcagtgaaaaagatggttggggagtgaagtaagaagtcaagagcatgagttttattttgaacacgttgagtttgaatgattgggttgataacaagaacacggttctgtgtatgggcgtaagcaggagatttgggagttactggctcatagtagtaattgaagcaactgaaggggatcagttaaggagactgtagagtaagaagacaaaagaccagagccccaaagattgctaatatttaatgactaggaaaaataagaacagttgcaaagaaagctaagcaggcagagacgaggaaaactaagaataaaataaaggagaccaaaagaggagaatgcttctgggagggagtgaggactaaaaaatactcactgaatttagcaacgtgaaggtcttctgtgatcttagcaagattatgtgtgatgtgatatggaatttagtagtatgatgtagtatggaattaaaattggaatgggagattaggaaatggagcccaaaagaagagacaactgttacaagaaattggctatgaaaggaaggagagtgagttagaggcatgtaaaccaaaaagtatctgaggccaggtgtggtggcccacacctataatcccagccctttgggaggctgaggcaggtggatcatttgaggtcaggagtttgagaccaacctgaccaacatggtgaaaccccatctctactaaaaatacaaacaattagctgagtatggtgttggacgcctgtaatctcagctactctggaagctgaggcaggagaatcacttgaaccctggaggcggaggttgcagtaagcggagatcacagaactgtgctccagcctgggcaacagagtgagactccatcttgaaaaaacaaaaagtatctgagacaagtctcaattaatttagaggtttattttgctaaggttaaagaccatggcacctgacacagcctcaggaagttctgagaacatgcgtccaaggtggttgggttacagcttcgttttatacattttggggagacagaagttacaggcaaaaacataaatcaatacaagtaaggtatacattggtttgcccagaaagggggtgggggttctaggttctaggtggattcaaagatttcctgactggcaattgattgaaagagttaaactctgcctgaagaattgaagtcagcttgagttaagataaggagggttgtggaagccaaggtttttttttttttttttttggagacagagtgtcgttcttgttgcccaggctggagtgcaatggtgcaatattggctcactgcaacctccaccttccaggttcaagcgattctcctgcctcagcctcccgagtagctgggattacaggcgcctgccaccatgccctgctaatttttgtatttttagtagagatggtttcaccatgttggccaggctggtctcgacccctgatctgatgatctgcccgccttggcctcccaaagtgctgggattacaggcgtgaggtgctgcacccagctgaagctaaggttcttgtcatgtagatgaagcctccaggtagctggcttcagagagaattgatggtgaatgtctgttatctgaccttaaaaggtgtcagactttccagaaaagacttagtgtggggaagagatttctctacagaatgcaaatttccccccacaagagagttttgcagggccatttcaaaatatgtcaaagaaatatcttttggggtaaaatactttgatttcctttagggcctgctatctgtcatatggtgctataccagaatcagtttggaatttggtatcttattgctacagagagtttgttttgtcagtcttactatctgtgttttaatgttcatgctggtcagttgtgtctaaactccagaggatcaccaggtggggtggctcacgcctataatcccagcactttgggagactaaggccagaggatcacttgaggccaagagttcgagaccagcctgggcaacatagtgagacttctctactaaactgaaaaaactagccaggcatacatgtgctggtagccccaagctacttggaaggctgaagtgggaggattgttgagcctggaggtcaaggctgcagtgagctgtgtttgcacaaccggactcctgccagggcagcatagcaagaccttgtctcaaaaaaaaaatgaataaatatactccaaagggagaagggtataatgaggcatgtcagacccttccttcctgccttggcctgaactagttttttaagtttctttgggatcctgttggccaaaatgtggggtccattccgacagttggggggcttaaagtttagttttggtttacgggtagctgctgcaggcaaagatgcagttaggggcatgtccccactccccaacatcaagggtgatactagcagcagcaccaactttacattggctctccgcgttgtaaccgagcgagttatagagaaacgccacactctgagatgaattcaggagtcctttattagccagcgaccgagagatggctagtgctcaaaattctctccgccccgaagaaggtgctagattttcttttatactttggtttagaaaggggaggaggagcctagctgaagcaatcttacagaagtaaaacaggcaaaaaagttagaaagacaaatggttacgggaaaacaaacagttccgggcgcaggggctttaaatccatcacaaggtgatagacgcggaggctttgggtaccatcaaccagacacaaatgctggggcttagggtaatatcaactgggcaaattcctgggaactgcggctatagctttccacaatatcttatcagttatttgcgttctttgatgtgctgggagtcagcttgcacaagttaagtccttgaggaaggggggtgggtaagaggctgcaaggggctacaagtgaaggagccaaaatggagtttgtctggctctctcagctaagggagagtcaattcagattaaaacaaggtagggtatcacatctgcactgagaacatggctggacctccttgatggctctgagcctggatctccactgacacatgctgttgttttccttgtcacatggtaaaggatgagcaaggtgaggcactgacattaaactaactcttctgcttccacaataggaggttctgggggaagagaagctgaaggagatactgaaggagcgggaacttaaaatttactggggaacggcaaccacgggcaaaccacatgtggcttactttgtgcccatgtcaaagattgcagacttcttaaaggcagggtgtgaggtaagaactaatgctataagcccttggggaatgacccaagggagacccaagagagacttaacaaggacagggtggggctggaggagacaggttggaggtaattggacaaattcacattttggtggccccttatctcttgtccaggtaacaattctgtttgcggacctccacgcatacctggataacatgaaagccccatgggaacttctagaactccgagtcagttactatgagaatgtgatcaaagcaatgctggagagcattggtgtgcccttggagaagctcaagttcatcaaaggcactgattaccagctcagcaagtaagtgcttgatcatccaccctccttgtggctctggtgcttctagctaattacaggcctgtggagtccaggcattctttacatttagattagaagctgtctggcgtgacctattaagaaccatttaaaactttgtccattaaaacctcattgtccttgtaattcatccatcagaagtgtactgactagtaaatgccttaatactgtcctatttgctggaaatataaacgtaaccaaaacaaagtccttggccttgcagaactcacagcatatgggagagtgatggtgaacaattcagcctccctttctcttccagcctcagcaaataataataaaagaaatgtgaaagaaaaatatttcacttatttctcaccgccccaacaattgttattgctttttatctttgtgagttttgttcatatttggaatgttagcatagatatttcgtgtcctaatgtttaacttactctttttttttttttttgaggtggagttttgctcttgttgcccaggctggagtgcaatggcgcgatcttgactcactgcaccctctgcctcctgggttcaagagattctcctccctcagcctcctgagtacctgggattacaggcatgcgccaccaca

SEQ ID NO: 476 - DNA, 6000 bp, Homo sapiens
tattataaagaaagtaaaacatatacataagtaacataatagtataatgaaccaccacatacccatcactcaaccccaatgactatcaactcatagctaatcttgccccatccacttcccacctttaccagattgttttgaagcaaatcccaggcattgtatcatttcatctgtaaataacaagaattccttatcataaaatatacagttcagatttccaattatcttatgtcatatttttttttaaggctaaaaaataatcagtatccaagtaaggtccatacaatgtgactggctgataatgtcttatgtgtattttaatctaaaaatttcagatcttttccccctgcaattactttattaaaaaaacaatacgcgagatggcttacgcctgtaatcccagcactttcggaggctaagttgggcggatcacttgaggccaggagttcgagaccagcctgaccaacatggcggaaccccatttctactaaaactacaaagaaaatttagctgggcatggtgacgcgggcctgtagccccagctattcagaagtctgaggcaggagactcgctgaaacccaggaggcggaggttgcagtgggcagagatcgcaccactacactccagcctgggtgacagagtaaaactgtatcaaaaaaaaaaaaaagaaagaaagaaaaaagaaacaggccaggcgcagtggctcacgcctgtaatcctagcactttgggaggccgaggagggcggatcacgaggtcaggagttcgagaccatctggaccaacctggtgaaaccccaactctactaaaagtacaaaaattagctgggcttggtggcgcgcacctataaccccagctattcgagaggctgaggcaggggaactgtttgaacccaggaggcagaggttgcagtgagcccagaccgcgccactgcactccagcctgggtgacagagcaagagtcagtctcaaaaaacaacaacaaaaaagccacaataccacgtattatgtatggatacatatatcacaaaattattaaaatatgcatgaaaggccggaattcaggatggtcttgatctcctgacctcgtgatccgtccgcctcagcctcccaaagtgctgggattacaggtgtgaaccaccgcgcccggccaatgttttatttcttaagaaaacaatatctcatcttaggctacatgacaataaataaataaggaaaaaaaaatagcaagaagagacctgaaacaaatatggcaacctaagacaaagcagcatgctaggtataataatgttcattatgttacttttacactgttaaattattgttatttttttgagacagggtctcaggtttgttgcccaggcagaaaacagtggcgtgatcatagctcactgcagccttgaaccccagggctgctgggactacaggtacacaccaccatacacagctaattttttatttttattttttgtagagacatagtctcattatgttgcccaggctggtattgaactcctggagtcaagcgatccttctgcattggttttccaaagtgctgggattacaggcattgagccaccatacccagccactatacttttttatatgcttgaaataataaaaacatcttaaaattatgaagtcaatgggaaagatacaatgattatactctgtgaagtatcaaatgtcctcatatatcacagtacctacctgatagggttgtggcaagaattaaatgagatcgtgaacataaatgtggcacactagaggcatggcataagagacaaataactggtggccatagttattatttcaccccaccaccatcattgccccgatccctggagtcttaagagaagcatagggccaggcgcagaggctgattcctgtaatcccagcactttgggaggctgaggtgggtggatcacctgaggtcaggagttcaagaccagcctggccaacatggtgaaaccctgtctctactaaaaatacaaagattagccgggtgtgtggtgcatgcctgtaatcccagctacttgggaggctgaagcaggagaatcgctggaacccaggaagcggaggttgcagtgaactgagatcgcaccactgcactccagcctgggtgacagagcgagactccatctcaaaaaaaaaaaaaaaaaaaagcataggaacggtaggaaaaaagagtgctaaactggtagggaatttcccctagaccctgcttgaaattatctaatatactctactcttatctagtttaatccagcactcaaccatattgtcactgaagaccagactaggtagacatctgaaatatccggcaaattatgcaaattaatgttcactgaactatcctttatagaggtactggacctcagcaattcacttcaagtctctgaacttcaatacagatgagaacatgcatctaaaaagggggtaaatactgttaacttcaaacacagattatcatgagaaaaaataggatgtttatgaaagtactctaaacctaaaagttctatactaaaaaaacatggtatttaatgaatgtgcaaggggggaaatcctcatataaaactgaagttcttcagtgaaattccaaagacagccttacttattacttctctgtcaaaagaaggcttgcttacttctctgtctaccatctaccacctttcttagcacttgtctggtaacctccacttaaaatatggggacccctttatttttttattttatttttatttttgagacagggtctcactcaatcacccaggctgaaatgcagtggcgtgatctgggctcactgcaacctctgcctcccagtttcaagcgattctcatgccacagcctcccagtagctgggattacaggcgtccaccatgctaggctaatttttgtatttacagtagagatggggttttgctatgttggccagtctagtcttgaactcctggcctcaagcaatcctccggcctcggcctccccaagtgctgggattacaggcgtgagccaccatgtctggccatatcccttcatttttaagggaagaatatttttccgatcttctaattctatttcttagttcctctacaccccatcctttctgtgaccccattctgtccttccacatctctctcacctgtccacccccttcttcacacttcagtttaccaccccctctctgttctcgaacctcctggttgcaacctcagaaactggttccctttctatttttatctcacctcagaaaacctactgccttcgagcacaaagccttactttattgaggccactaaaactgcaacaccagatgcaagcccacatcctctttcaagctctaaagtcaagaccattaccaagcagggtctgacaggtacagccaagagcagagattatttccagtggacaagacttccccctggcctttgatttccaacctttcccaaatgcaatacatgtgaagcacacagcacgaaacgcactcagcaggctttatcactccataaaaaataggcacaacatttacaaaaaatcaaaaagaactgaaattatctgtaacagttttgcaaattccttcgaagtaactaaaaacactgcaggacggaaaaaacaacccagggctgcaaatctttgctttaggtaacatttcactagatgagggtgccaggattctcctcccacatggacacagagaacagatgcgctaagctgcagcaacaggtttcttttcaaaaagaaaatgtgctttaaaacacttcaggcaggtctggtagagcttggagtccctaataaatacacaaaacaccggagatcaggttagggcaggccgtgggcaattcaaccacttctaggacctttccagggcccactgaggtaataactgctttccctcttgccctggaagtaactggtgacgccgcctccagcccttgaggagccggagaaagggtggcccaggcccaacctttggaggatactgccttggctctctctcacaaatgcaacggcccgggacggtgtcgccttccaggaagggcctttgcgtctccctcccccggggacaccgcgaattcccgcctcccggcggaaagcgggagaagcgagagttttctccccgcccctcccccagtaggggcaaacccgcccctcagcaggcctgtgctgtgcgctcctctcccggggaccaccgtcctcagatctccccagggaatgggtcgtcctcttcctgcccccacccgcgagacgcggcagaaaagcccgcggctatcttcccgccagcaacagcctcccgccgagccggccgggacagaggcggcccccacccccactgggcaggggactgcagacggcgctccccgactctcaagacgaccagggagcttcccttttcctcagcggggtgaggggcatctgtcgcccgccgacttggaggtggaggggcagggacattccctcgccatcacctcaggagctagaacgcgcccttctcgcagcagggcgtgggcctcccaatccctccaaggggcggacggcgtgcgcaaccccctggagaagcaacaggcgcccccatccccctccaagccgggtaacgccgaccccctcgtccctcccgctcttcacctccggaagccgggccaaagcctgggcgaacgactgcgcctcactccgccccctgcgccattttatcgccccctccccgacctcccctaccccgagtcagccgggccaacaccagggggagggcaaaccagcagtgattggcaggaaaccgtcccgcctctaggagggttgtgccccgctcaggcgcctcagccccgccctccgcaccgcccaccgtgcccactggctccaccttttcccgtctcatcgacctgctcgactctctgctgctcctcactttttccggccgctgccggaggggtccaggccgagtaagcggagcgccgagcccagctgatgcaacctggctggactcgcgtgacagttcccggcacgcggcggcgacggtgacccaggaaggggctctggtgccgggctgagcgggggaagcaggggtagcggagccatgggggacgctcccagccctgaagagaaactgcaccttatcacccggaacctgcaggtcaggcctgggggttggaaatgcgccgttggggattaggagcccgaggttcagtgattttgagccccattacggggttctaagtatgtggggccggggactcggcgctggcgcagctctgagagagcctgtagatctcactgctggtcggtcagtcaatcaagcagcccttccctgggttccccagaaatcacagtgggctcacctcttgcgtccagttgtcttgtgttggagccaaactttgaatccaggactcccattccacccccctattaagtgccagacgtggtgcttagtcgctggggatacgtcaagggcctgccagagcttgtctgaaggggatcagacgttaaaaatgacccattacggttcaagtaagtactggaagatgctatactgggagctttaaagggaaagagagaagggaaggcttccctgaggaagtgacctccaaactgcgccttgaaggaaatggatccccccccctcactccacaaatgttccgtttgttaccaagaactacaggagtagaagtgaaccagaggaagaatggaagaataaggagggagagcatttcagatggaggaaacagaaattgtggcaaatttagctggagtggagtgagcaaagttatgaggaagcacttaaatatttatattgcttaccccttaactttttcaggcttctgactgttgtcaccttatcagcgacgcatgatttccgaccactttatttaaataacaaaccctctggcaccagaactgccccataccttgctctgccttttttttgttattgtttctacatagtatacattttatttatttgtttaagagaggtaggcagggaccaagtcacgggagccttgcaggccttattc

SEQ ID NO: 477 - DNA, 6000 bp, Homo sapiens
gcttcagctgggtgcagcacctcacgcctgtaatcccagcactttgggaggccaaggcgggcagatcatcagatcaggggtcgagaccagcctggccaacatggtgaaaccatctctactaaaaatacaaaaattagcagggcatggtggcaggcgcctgtaatcccagctactcgggaggctgaggcaggagaatcgcttgaacctggaaggtggaggttgcagtgagccaatattgcaccattgcactccagcctgggcaacaagaacgacactctgtctccaaaaaaaaaaaaaaaaaaaccttggcttccacaaccctccttatcttaactcaagctgacttcaattcttcaggcagagtttaactctttcaatcaattgccagtcaggaaatctttgaatccacctagaacctagaacccccaccccctttctgggcaaaccaatgtataccttacttgtattgatttatgtttttgcctgtaacttctgtctccccaaaatgtataaaacgaagctgtaacccaaccaccttggacgcatgttctcagaacttcctgaggctgtgtcaggtgccatggtctttaaccttagcaaaataaacctctaaattaattgagacttgtctcagatactttttgttttttcaagatggagtctcactctgttgcccaggctggagcacagttctgtgatctccgcttactgcaacctccgcctccagggttcaagtgattctcctgcctcagcttccagagtagctgagattacaggcgtccaacaccatactcagctaattgtttgtatttttagtagagatggggtttcaccatgttggtcaggttggtctcaaactcctgacctcaaatgatccacctgcctcagcctcccaaagggctgggattataggtgtgggccaccacacctggcctcagatactttttggtttacatgcctctaactcactctccttcctttcatagccaatttcttgtaacagttgtctcttcttttgggctccatttcctaatctcccattccaattttaattccatactacatcatactactaaattccatatcacatcacacataatcttgctaagatcacagaagaccttcacgttgctaaattcagtgagtattttttagtcctcactccctcccagaagcattctcctcttttggtctcctttattttattcttagttttcctcgtctctgcctgcttagctttctttgcaactgttcttatttttcctagtcattaaatattagcaatctttggggctctggtcttttgtcttcttactctacagtctccttaactgatccccttcagttgcttcaattactactatgagccagtaactcccaaatctcctgcttacgcccatacacagaaccgtgttcttgttatcaacccaatcattcaaactcaacgtgttcaaaataaaactcatgctcttgacttcttacttcactccccaaccatctttttcactgatagtttcactcctactacagtaaatggtaccatcatttagagttgttcaaggactccaaaactgctcttcaaccctcctatttctctctgcctctacatcaccacccaaatccaggccctatcagatcacaccaggattaccgtaacattctcctaacaggtctcccaaatctactcttactccctccaatccaagttcttttttatttttttgagacggagtcttgctctgtcacccaagctggagtgcagtgatgcaatcctgagtcactgcaacctctgctcccgggttcaaacgattctcctgcttcagtctcccaaatagctggaattacaggtgcccgccaccaggccagagaaatttttgtatttttagtagagatggggtttcactatgttggccaggctggtcttgaactcccaacctcaagtgatctgcccgtgtgggcctcccaaagtgttgggattaccggcatgagccactgcgcttggcccctccaatccatgttctaaaaggtagccagagacagtcttttaaaactcaaaaacttctttaaaactcattttcctttttacaaacctttaatgatttctttttgtcctatgacagtattggaaaaattctaacaggccagtgtaccccgataagaggttgtagtgtttcctcaagttacggttttgggaggctgtcagaaaccatgatagactgctggtttgaatcatgttttaccaggacttgttaaactcctgtgctccaagtcttttggcagctgatcccgcatgctcaagagcacccctgacaacgtggacacttggagggttctcaccatccaagaagatgtcacattacttagcctttaaaacctgagtgaggccgggcactgtggctcactctgtaatcccagcactttgggacgccgaatttggcggataacttgaggtcaggaatttgagaccagcctggccagcatggtgaaaccccgtctctactaaaaatacaaaaattagcccggcgtggtggtgcacgtctgtaatcccagctactcaggaggctgaggcaggagaatcacttgagcccaggaggcagaggttgcagtgagctgagattgtgccattgcactccagcctggccgacaagagataaactccgttccagaaaaaaaatccccaaaacaaaaaacccaattgagtcaattctaatagttttgtgtatttttagtctccaaccagcactattttatggagagagaataggaaacaaagaatctagctaggggaagcgtgcaaaaacctttggttaagactaagttgtaaatggaataacccaaatgtccatcaactgatgaacggataaacaaaatgtatatccatacaacagagtatcattcaaccataaaaaggaatgacgttctgctaggtgcaaatacatgcatgaactttgaaaacattatgctaagtgcaaaaagtcagacacaacaaacatattgtatgattctagttacaggaaatgcccagaatacgcaaatacctggagacagagagtagattagtgtttctctaaggctaggagtagtgggtaataggtagcgtctgctaacgggtgcaagttttattagatagtgtgatggttgtggccgggagccgtggctcacgcctgtaatcccagcactctgggaggccaaggagggtggatcacgaggtcaggagatcgagaccaccctggctaacacggtgaaaccccgtctctactaaaaatacaaaaaattagccgggcgtgggggcggtcacctgtagtcccagctactcgggaggctgaggcaggagaatggcgtgaacctgggaggcggaggttgcaatgagccgagattgggccactgcactccagcctgggcgacagagcgagactccgcctcaaaaaaaaaaaaaaaaaaaaagatagtgtgatggttgcacaaccttgtgaacatactaaaacccactgaattgtgcactttaaaagggtgaattttatagtatgtgaagtacatctctaaaaagaaaaaacagaacaggctgtgtggcccaactgatttatcactactcttagaaggaagcccaatttaaaattgaacagaataaggcctgcaaggctcccgtgacttggtccctgcctacctctcttaaacaaataaataaaatgtatactatgtagaaacaataacaaaaaaaaggcagagcaaggtatggggcagttctggtgccagagggtttgttatttaaataaagtggtcggaaatcatgcgtcgctgataaggtgacaacagtcagaagcctgaaaaagttaaggggtaagcaatataaatatttaagtgcttcctcataactttgctcactccactccagctaaatttgccacaatttctgtttcctccatctgaaatgctctccctccttattcttccattcttcctctggttcacttctactcctgtagttcttggtaacaaacggaacatttgtggagtgagggggggggatccatttccttcaaggcgcagtttggaggtcacttcctcagggaagccttcccttctctctttccctttaaagctcccagtatagcatcttccagtacttacttgaaccgtaatgggtcatttttaacgtctgatccccttcagacaagctctggcaggcccttgacgtatccccagcgactaagcaccacgtctggcacttaataggggggtggaatgggagtcctggattcaaagtttggctccaacacaagacaactggacgcaagaggtgagcccactgtgatttctggggaacccagggaagggctgcttgattgactgaccgaccagcagtgagatctacaggctctctcagagctgcgccagcgccgagtccccggccccacatacttagaaccccgtaatggggctcaaaatcactgaacctcgggctcctaatccccaacggcgcatttccaacccccaggcctgacctgcaggttccgggtgataaggtgcagtttctcttcagggctgggagcgtcccccatggctccgctacccctgcttcccccgctcagcccggcaccagagccccttcctgggtcaccgtcgccgccgcgtgccgggaactgtcacgcgagtccagccaggttgcatcagctgggctcggcgctccgcttactcggcctggacccctccggcagcggccggaaaaagtgaggagcagcagagagtcgagcaggtcgatgagacgggaaaaggtggagccagtgggcacggtgggcggtgcggagggcggggctgaggcgcctgagcggggcacaaccctcctagaggcgggacggtttcctgccaatcactgctggtttgccctccccctggtgttggcccggctgactcggggtaggggaggtcggggagggggcgataaaatggcgcagggggcggagtgaggcgcagtcgttcgcccaggctttggcccggcttccggaggtgaagagcgggagggacgagggggtcggcgttacccggcttggagggggatgggggcgcctgttgcttctccagggggttgcgcacgccgtccgccccttggagggattgggaggcccacgccctgctgcgagaagggcgcgttctagctcctgaggtgatggcgagggaatgtccctgcccctccacctccaagtcggcgggcgacagatgcccctcaccccgctgaggaaaagggaagctccctggtcgtcttgagagtcggggagcgccgtctgcagtcccctgcccagtgggggtgggggccgcctctgtcccggccggctcggcgggaggctgttgctggcgggaagatagccgcgggcttttctgccgcgtctcgcgggtgggggcaggaagaggacgacccattccctggggagatctgaggacggtggtccccgggagaggagcgcacagcacaggcctgctgaggggcgggtttgcccctactgggggaggggcggggagaaaactctcgcttctcccgctttccgccgggaggcgggaattcgcggtgtccccgggggagggagacgcaaaggcccttcctggaaggcgacaccgtcccgggccgttgcatttgtgagagagagccaaggcagtatcctccaaaggttgggcctgggccaccctttctccggctcctcaagggctggaggcggcgtcaccagttacttccagggcaagagggaaagcagttattacctcagtgggccctggaaaggtcctagaagtggttgaattgcccacggcctgccctaacctgatctccggtgttttgtgtatttattagggactccaagctctaccagacctgcctgaagtgttttaaagcacattttctttttgaaaagaaacctgttgctgcagcttagcgcatctgttctctgtgtccatgtgggaggagaatcctggcaccctcatctagtgaaatgttacctaaagcaaagattt

SEQ ID NO: 478 - DNA, 6000 bp, Homo sapiens
aatgtttttcccactacatctgtgacagacttgcacaggattggtcagcaaatggcagagctagaatccaaactcaggccttctaaattcagtacaatctataacaaactgtgcaagagtaaagaccaaagagggcttttggtctcttggaaaaaatattttaagccaccttaataggaccaatatccttcgtaaccattgcaataatcaattcctacacaacatgacattcagatgcaaaaaaatgggcttttctgagcttcttatgttccaatagatctgggaacaaaagtatacaaaacaataccatatatatggtatatatagagaggaggagataattttaatttgtacaaaccattctctttctgatgtctgatgttacttcctctttttttttttttttttttgaaacggagtctagctctgtagcccagactggagtgcagtggcgcgatctcggctcactgcaagctctgtctgcctcccgggttcacaccattctcctgcttcactcagcctcccgagtagctgggactgcaggcgcccgccaccacgcctggctaatttttgtatttttagtagagacggggtttcacagtgttagccaggatggtcttgatctcctgacctcaggtgatccgcccgcctcggcctcccaaagtgctgggattacaggcgtgagccaccgcgcccggccatttcctcattttcaaaagtacttattataaagaaagtaaaacatatacataagtaacataatagtataatgaaccaccacatacccatcactcaaccccaatgactatcaactcatagctaatcttgccccatccacttcccacctttaccagattgttttgaagcaaatcccaggcattgtatcatttcatctgtaaataacaagaattccttatcataaaatatacagttcagatttccaattatcttatgtcatatttttttttaaggctaaaaaataatcagtatccaagtaaggtccatacaatgtgactggctgataatgtcttatgtgtattttaatctaaaaatttcagatcttttccccctgcaattactttattaaaaaaacaatacgcgagatggcttacgcctgtaatcccagcactttcggaggctaagttgggcggatcacttgaggccaggagttcgagaccagcctgaccaacatggcggaaccccatttctactaaaactacaaagaaaatttagctgggcatggtgacgcgggcctgtagccccagctattcagaagtctgaggcaggagactcgctgaaacccaggaggcggaggttgcagtgggcagagatcgcaccactacactccagcctgggtgacagagtaaaactgtatcaaaaaaaaaaaaaagaaagaaagaaaaaagaaacaggccaggcgcagtggctcacgcctgtaatcctagcactttgggaggccgaggagggcggatcacgaggtcaggagttcgagaccatctggaccaacctggtgaaaccccaactctactaaaagtacaaaaattagctgggcttggtggcgcgcacctataaccccagctattcgagaggctgaggcaggggaactgtttgaacccaggaggcagaggttgcagtgagcccagaccgcgccactgcactccagcctgggtgacagagcaagagtcagtctcaaaaaacaacaacaaaaaagccacaataccacgtattatgtatggatacatatatcacaaaattattaaaatatgcatgaaaggccggaattcaggatggtcttgatctcctgacctcgtgatccgtccgcctcagcctcccaaagtgctgggattacaggtgtgaaccaccgcgcccggccaatgttttatttcttaagaaaacaatatctcatcttaggctacatgacaataaataaataaggaaaaaaaaatagcaagaagagacctgaaacaaatatggcaacctaagacaaagcagcatgctaggtataataatgttcattatgttacttttacactgttaaattattgttatttttttgagacagggtctcaggtttgttgcccaggcagaaaacagtggcgtgatcatagctcactgcagccttgaaccccagggctgctgggactacaggtacacaccaccatacacagctaattttttatttttattttttgtagagacatagtctcattatgttgcccaggctggtattgaactcctggagtcaagcgatccttctgcattggttttccaaagtgctgggattacaggcattgagccaccatacccagccactatacttttttatatgcttgaaataataaaaacatcttaaaattatgaagtcaatgggaaagatacaatgattatactctgtgaagtatcaaatgtcctcatatatcacagtacctacctgatagggttgtggcaagaattaaatgagatcgtgaacataaatgtggcacactagaggcatggcataagagacaaataactggtggccatagttattatttcaccccaccaccatcattgccccgatccctggagtcttaagagaagcatagggccaggcgcagaggctgattcctgtaatcccagcactttgggaggctgaggtgggtggatcacctgaggtcaggagttcaagaccagcctggccaacatggtgaaaccctgtctctactaaaaatacaaagattagccgggtgtgtggtgcatgcctgtaatcccagctacttgggaggctgaagcaggagaatcgctggaacccaggaagcggaggttgcagtgaactgagatcgcaccactgcactccagcctgggtgacagagcgagactccatctcaaaaaaaaaaaaaaaaaaaagcataggaacggtaggaaaaaagagtgctaaactggtagggaatttcccctagaccctgcttgaaattatctaatatactctactcttatctagtttaatccagcactcaaccatattgtcactgaagaccagactaggtagacatctgaaatatccggcaaattatgcaaattaatgttcactgaactatcctttatagaggtactggacctcagcaattcacttcaagtctctgaacttcaatacagatgagaacatgcatctaaaaagggggtaaatactgttaacttcaaacacagattatcatgagaaaaaataggatgtttatgaaagtactctaaacctaaaagttctatactaaaaaaacatggtatttaatgaatgtgcaaggggggaaatcctcatataaaactgaagttcttcagtgaaattccaaagacagccttacttattacttctctgtcaaaagaaggcttgcttacttctctgtctaccatctaccacctttcttagcacttgtctggtaacctccacttaaaatatggggacccctttatttttttattttatttttatttttgagacagggtctcactcaatcacccaggctgaaatgcagtggcgtgatctgggctcactgcaacctctgcctcccagtttcaagcgattctcatgccacagcctcccagtagctgggattacaggcgtccaccatgctaggctaatttttgtatttacagtagagatggggttttgctatgttggccagtctagtcttgaactcctggcctcaagcaatcctccggcctcggcctccccaagtgctgggattacaggcgtgagccaccatgtctggccatatcccttcatttttaagggaagaatatttttccgatcttctaattctatttcttagttcctctacaccccatcctttctgtgaccccattctgtccttccacatctctctcacctgtccacccccttcttcacacttcagtttaccaccccctctctgttctcgaacctcctggttgcaacctcagaaactggttccctttctatttttatctcacctcagaaaacctactgccttcgagcacaaagccttactttattgaggccactaaaactgcaacaccagatgcaagcccacatcctctttcaagctctaaagtcaagaccattaccaagcagggtctgacaggtacagccaagagcagagattatttccagtggacaagacttccccctggcctttgatttccaacctttcccaaatgcaatacatgtgaagcacacagcacgaaacgcactcagcaggctttatcactccataaaaaataggcacaacatttacaaaaaatcaaaaagaactgaaattatctgtaacagttttgcaaattccttcgaagtaactaaaaacactgcaggacggaaaaaacaacccagggctgcaaatctttgctttaggtaacatttcactagatgagggtgccaggattctcctcccacatggacacagagaacagatgcgctaagctgcagcaacaggtttcttttcaaaaagaaaatgtgctttaaaacacttcaggcaggtctggtagagcttggagtccctaataaatacacaaaacaccggagatcaggttagggcaggccgtgggcaattcaaccacttctaggacctttccagggcccactgaggtaataactgctttccctcttgccctggaagtaactggtgacgccgcctccagcccttgaggagccggagaaagggtggcccaggcccaacctttggaggatactgccttggctctctctcacaaatgcaacggcccgggacggtgtcgccttccaggaagggcctttgcgtctccctcccccggggacaccgcgaattcccgcctcccggcggaaagcgggagaagcgagagttttctccccgcccctcccccagtaggggcaaacccgcccctcagcaggcctgtgctgtgcgctcctctcccggggaccaccgtcctcagatctccccagggaatgggtcgtcctcttcctgcccccacccgcgagacgcggcagaaaagcccgcggctatcttcccgccagcaacagcctcccgccgagccggccgggacagaggcggcccccacccccactgggcaggggactgcagacggcgctccccgactctcaagacgaccagggagcttcccttttcctcagcggggtgaggggcatctgtcgcccgccgacttggaggtggaggggcagggacattccctcgccatcacctcaggagctagaacgcgcccttctcgcagcagggcgtgggcctcccaatccctccaaggggcggacggcgtgcgcaaccccctggagaagcaacaggcgcccccatccccctccaagccgggtaacgccgaccccctcgtccctcccgctcttcacctccggaagccgggccaaagcctgggcgaacgactgcgcctcactccgccccctgcgccattttatcgccccctccccgacctcccctaccccgagtcagccgggccaacaccagggggagggcaaaccagcagtgattggcaggaaaccgtcccgcctctaggagggttgtgccccgctcaggcgcctcagccccgccctccgcaccgcccaccgtgcccactggctccaccttttcccgtctcatcgacctgctcgactctctgctgctcctcactttttccggccgctgccggaggggtccaggccgagtaagcggagcgccgagcccagctgatgcaacctggctggactcgcgtgacagttcccggcacgcggcggcgacggtgacccaggaaggggctctggtgccgggctgagcgggggaagcaggggtagcggagccatgggggacgctcccagccctgaagagaaactgcaccttatcacccggaacctgcaggtcaggcctgggggttggaaatgcgccgttggggattaggagcccgaggttcagtgattttgagccccattacggggttctaagtatgtggggccggggactcggcgctggcgcagctctgagagagcctgtagatctcactgctggtcggtcagtc

SEQ ID NO: 479 - DNA, 6000 bp, Homo sapiens
tgggccaccacactgagctaatttattttaattttaattttttgtaaaggcaggggtcttattaagttgcccaggctggtcttgaacttctgggctcaagcaatcctcttgcctcagccccacaaagtgctgggattacaggcatgagccactattcctggcctaaatatatattttcatcctcattttaaagatgagaaaatggaggcacagagagattaagtaacctggcaagggcgacacaggtaataatggcaaagctaggatacaaatcccaatggttggccgggcttggtggctcttgcctgtaatcccagcactttgggaggctgaggcaggaggattgcttgagcccaacagtttaagaccagatctgggccaggcgcgatggctcacgcctataatcccaggactttgggaggccaaggcgggcggatcacgaggtcaggagatcaagaccatcctggctaacgcagtgaaaccccgtctctactaaaaatacaaaaaaattagccaggcgtggtagcaggtgcctgtagtcccagctactctggaggctgaggcaggagaatggcgtgaacccggaaggtggagtttgcagtgagccgagattgtaccactgcactccagcctaggtgacagagcgagactccgtctcaaaaaaaaaagaccagatctggcaacataatgagaccccgatctctattaaaaaaaaaaatcaaaccgactgggggcggtggctcacgcctgtaatctcagcactttgggaggctgaggcaggcggatcacgaagtcaagagtttgagaccagcctggccaacatggtgaaactctgcctctactaagaatacaaaaattagctggttgtagtggtgcatgcctgtaatcccagctacttgggaggctgaggcaggagaatcgcttgaacccaggaggaggaggttacagtgagccaagattgcaccactgcactccagcctgggcgacacagcaagattctgtcttggggaaaaaaataaaaataaaaaatcaaatctggacagtcagaagtcatagcaccctatgccaaaaatgagcttcaccattaggctctagtatctgtagtcatttaatctctgtgaacctcagtcttctcactgtgaaaagtgaatgagtctgcctcacagcattgttgtaaggattggatgagagcacacaatagattgtcaatatgtggggacagtccccactttcatgatcaaatgttaaggttcagctacttggacttggagtctgggggccagagaaagttagctctctggcttgggccacctgggctagggagagcggcctaggggcaagccgcccacagtgaagctgtgtctccctgtctcaatttccattccccaggaggctcacatttctctgctcactctattttcgttggcccaggaggacgtgccccagggaagtccagggatcagccacaaggactccctgttcctgttccctatctgtcctcctccctccctgggaaacaggtgtgtctgaactggggctggaagcagagcctgagagctggatgactggccttgggtgagtaggatcctgttgtccctcactcaccctagaggtccccacacactcttctttatctcatgcttagggcacccctgctgttttttcactctgcaagggttttcaaaaggaggccctgggtggctactgacaggcctctcatggtttcctgtgagtgctgaatcactctctgatgcctgtaaccataggccctccttccccctagtgagaacacagcctttttcctctgggtatattgctcactcttacctactggctgcctagagctcttgcaggcctcaaggcttggtagataacctcttccaaattgcccagatgctttcttctatttttttctttttcttttttttaagatggagcctcgctttgtcacccaggctggagtgcagtggagcaatctcggctcactgcaacctccgcctcccaggttcaagctattctcctgcctcagcctcctgagtagttgggactacaggcacacgccactatacccgattaatttttgtatttttagtggcgatggggtttcatcatgttggccaggctggtcttgaactcctgacctcaagtgatctgcccgccttggcctcccaatatgctatgattacaaccatgagccactgcgcctggccgtccagaaactttccttgtgaccccaagctggacactgaatttgtgggtggagagggtgaaataagtaagtgactttcacagagcatgggaggtggggagggcagagcaagaactaatgtagttaaatgttgactgtgtgaagggcaccatgccacgtggtagtcattacctctttctgtcctcacaaaaaccagaagaggcagttattattatcatcatcaccatttgacagagtaagacaagctcagagagtttgacatcatagcctcaaatcacaagccaataggtgatagatataaagccagggctgacaccagggtccccctgtctaatgtacagagctagcttctcttgggtatgctggtcacccagtgccttcttcagggggaagaggcaggagtggctggggctgctacctagtcaccctgcctgacagctggtcttcttaatggaaatgaggctggaaaggtgggcatgaggcaggttataaagggccttgtcttccaatggtaagtgataaatgagatggaattttgttaatgcaggaggccctaaatgggcaaggctcaaactcatactttcagctctttcaggcccactggtcgactggactggcatttctggggactaaggggacgatttccctggagctcctgagctggaggagtgacccctgtcatgagaaatgcgtgcaattatacatcctgtttcatgtggtggaaaagaaaccaaatacctctggaatgctctactgtgcccaatcctctctctaaacttagaagcaggtttagtaataataaaaataacaatagtaactccattttattgtgaacttgctaaggaataaaaacagcattaagcactttaaacatagttcgttttggccgggtgcggtggcttacgcctgtaatcccagcactttgggaggctgaggcaggcggatcacgaggtcaggagattgagaccatcctggctaacacggtgaaaccccatctctactaaaaatacaaaaaattagcctggcgtggtggtgggcacctgtactcccagctagtcagcaggctgaggcaggagaatggtgtgaatccgggaggcggagcttgcagtgagccgagatgatgccactacactccagcctgggcaacagagcgagactctgtctcaaaaaaaaaaacaaaaaacaaaaaaccaacatatttcgtttaatcatcaaaacagtcctgtgggtatagtattattattacctcagttttacagatggggagatggaggctcagtgaatctaactttaccttgactggggtggcatcagaacacacctcatgggtcattaccttgtactgcctctgattcgcatatcgtcaaccagccattcccttagggatgtgagggactcagaactttatagctattgtcattgggtgatttccttctatgctctttacagatatgactcctcagttcaactgtgagctcttgacagcaatatgaggcaagaagtgtatgttattattatcctcattttatgcttgagaaaaatgatgctcattaaagtcaagaaacctgccaaaagtcacacagcctgtaagtgaatggcagagccagttatggttttaaggtctcttgtctctctatagaatattttttcctgtacactgttgtagaggagcaaaaaatggacaggtcagatgaatgaagtttatatagtgtcccaagttacagaaaagaatagtggcatggggcctctgggggctggtggcaacacatattatgggaaggtgagaggaggaaatgtcctgttatggagataaaatctctcaggaagtaatagttgtcagccctcttcttgacacagatacctcactaaaaatgtagatttcctttgtaggtgataaatttatttctacaaaaggaaggacagcttttcagagcaactcctgtatctgcagtttctcagcataaccagctttaagaaacaagccagagaaatatatattttggggtggcatattctggcctcccacagtcatattttggagtggtgagtcctgagccccaacagtgttttttttttttttttttttttttttgagacggagtctcactctattgcccaggctggagtgcaatggcgccatctcgactcactgcaacctctgcctcccaggttcaagtgattctcctgcctcagcctcccgagtagctgggattacaggcgcgcaccaccaagcacagctaatttttgtattttttttaagtagagacggggtttcaccatgttgggcaggctcctgacctcgtgatccgcctgccttggcctcccaaagtgctgggattacaggcgtgagccaccgcgcccagccagccccaaaactgttaaatccgtactgctctagctttaaacataccttctagatacagcaacccgtgccgagctgtaagtgactgcacatgcgcacacgctaagcccagctcagacggaggccagtgccagccacgtgttcccaggtgcccacgcgggccaagcgcgaaggcgagatctgggtagcgtggacaggcgctagcgaataagaactggctcttatagagtcacgagactatatctgggaaactacacttcccagaagcagcctgcggtgactgcctctgttaaatgacgtacttcctgaaagccggctccggataggttgcttagaggaagtaggcggttctaaaccgccggcggctaggcctatttccggtaggaatcagtggacttggcggcagaggcagtgcggatccggcgttctccactgatcttttccaaggctgtacagacatggcggcggcttttcggaaggcggctaagtcccggcagcgggaacacagagagcgaagccaggtaggaccatacaggccccacaagtgctggcctttgtcgccatgtgttacccttgccccaaccctgtcgccaccgtgggatccgggtccaaactgtatagtatataaatgcacgtaaatgtatgttaatgacgctggcgtggctggggcggagcttcgtgggaacgagtggaggggatttgtcgtttccgttctaggaaaagcaggggtgcccccctttccttggggatataaaacctgctctggaagatttcagtgtggtgattgagtaagatgtctgtcaagtgcctggtctcttctgaggagttgaggtcagagctcatgtaggcaacaactgctgggctgaaattggatcccacgtctaatgggcagctccgcctgctgcatatgggggccctgaccgaagagactgtggttactaatgtggtatcatcatcacgctgggcttgtggttcatgaagatctgccatatgtgctttttgtttaagccttaccccttaatgttggccttttccattcccattatacagatgaggaaactgaggtccagagtggtgacttgtccagttacaaacaccagattcaggcagagtaaacagttctaggatttctatggtgggtgtgtctgtgtagggaggttgagtagaaataagcttatatgcagaatcagttgatacactgtcaggaatcccgtgcttaatatctgattcagaaaggcccttagacatacatatgtgctccaacttagttttacagatgaggaagacaggggaaagagttgtgcagctgactgatgggatagaactaaggcctcttaactacagttcagtcttcctgcttaatagcatatatcaaactttttttttttgagatggagtctcactctgttgcccaggttggagtgcagtg

SEQ ID NO: 480 - DNA, 6000 bp, Homo sapiens
agggaaattgtctcacaggtcgggcactggggaccaaagttcagctatcctagatttgacttgggcttttggggtagtatgagtatctgggttgtatcccataaaggcattctttacctgatagagagtcagtgaggtacctttgtatgtttggatgttacagagggaggagagattggcagggcgcggtggctcacgcctataatcccagcactttgggaggccgaggtgggcggatcacctgaggtcaggagttcaagaccagcctggctaacatggtgaaaccccatctctacaaaaattagccgggcatgatggcgggtgcctgtaatcccagctactcgagaggctgaggtgggagaatcacttgaacccaggaggtggaggttgcagtaaactgagatcatgccgttgcactccagcttgggtgacagagtgagactccatctcaaaaaaaaaaaaaaaaaaaaaaaaaaaaagagggaggagaccagagtcctagcctgaggaaggaggacagttctgtgttggaagggcccccttgatacatcattatcttctctgtttctggttctgttcccctttccaggatctccattcatgttgtccaatctaagctgcctctgcccactaccttcaccatgtctgtttcttcatccagctcttaattcagtcttctggacagtaacagtagctgggaacttttatggaagccaggtaaggataaggacaaggattcccgttttgggggaggctaaatctgaatggtgcctgaatgccagctgcctaattatttaacactaggtagaatggagtctctgcctttctgtgaactcactgacctctgttgctgtttatcctgtcagtcctctatgtccctctctattagaaaggcctagggcctagttctatgcatatcacaatgcttgctgatgacttgttttctcttcccttttctttcctcttagatccccagaggagcaccctttctaacctggagcccagcatctttcagctccatgcccagagtcttaagcaagaggacctattcctttggggccccaaaatgctcctgaatgacctgtaaggactcgttaagaatagtaggatgaaggcttctttgcccaccctcccctccaaggccctgtttctgggctgcccgcccctaccttcttgaagtagctattatctgtcttatctactgaggcttttcactgcctgcccatccttgccccccatctcagctcactgcaacctccgcctcccaggttcaagcaattgtcctgcctcagcctcccaagtagctgggattacaggtgtgcgctaatttttgtatttttagtagagatggggtttcaccatgttggccagtctggtcttgaacttctgacctcaagtgatctgcccgcctcgccctcccaaagtgctgggattacagttgtgagccaccatgcccagcctatagctgtaccttctgagtgcaagctcagttgaacttggaaagtaatgggagttcccattctggtgagtagaatgaggtaggacactgctctagggcagtagtgctgggggatgcaaaggaggatgagatattctggtgggacttggatctggacagtaggaggctacctttcctcatctccagcttctgccttttttttttttttttttgaggcaaggtcttactcagttgcccaggctggagtgcagtggcatgatcttggctcactgcagcctccgcttcctgtactaaagcaatcctcccaccttagccccccaagtaataatatatgggactacaggcacacgctatcatgcctggctaatttttaaatattttttgtagagacaggttttcaccatgttgcccaggctggtctcgaactcctgggctcaactgatccaccaactttggcctcccaaagtgttcagattacaggtgtgagctgctaccatgcctagccccagcttctactgcttgaggctctctttggcatctccacacatcatccttagcagcccagactgcatttctgtagcagcctcttccctggtctcttctttcagtctctctgcctctaatccagtggctttaagaattttttggctgtgacttccagtaagaaatacaatttacattgtgacctagtaaatatgtgtgtagatttattaactgaaataaaaatgttatgatttaatttttatccttagtgggagtgatacactgatattttctattatatttcattaaaaaatgccttgtgactaatgatcctgatccttttcactacttggacaacacggaacatgaactgcatgggtccactttgttttttcttttttttgagatggagtttcactctgtaacccaggccagagtgcagtggcgagatcacagctcactgcagcctcaacttcctgggcttaagcgatcctcccacctcagtctaccatgtagctgggaccagaggcatgcgccaccacacccagctaattttttgtactttttgtaaagacagggtttcgccatcttgcctaggctggtcttgaactcctgggctcaagtgatcctcctgcctcagcttccctagtagctagtactacaggcatgtgatgccacacccagctaattataaaaggatttttgtttgtagagatgtgtctcactatgttgcccaggctggtctcaaacccttgggctcaagagatcctcctacctcagtctcccaaagcccttgggattacaggtctgagcccacacacccaacctcaacagaaatattaaatagcaatgtggaaaattgttatttgagctgtcaccaggtggcagcacatgatttgttgccagaagaatggtaccaaaaagcctttggtcagggggactgggctggggtgatctctcttctcccttcagagattctgtgagctaccaattaatcttcctaaaacactgccctgtttagtttatggtcctgctcaagaatagctctcacagcataaaaaacaaaagacaaatttgaatattggcatttaagcccaacccacatgcagcctcttctctctccaatatctcctaccacacttctttctttctttttatatttttttgggacagggtcctgctctgttgtccaggctggagtgcagtggcaccatccacagctcactgtagccttgacctctgggctcaggtgatcttctggctttagcctcccaagtagctaggaccacaggtacatgccaccattttgggctcatttttttttttttttctgtacagacagggtctcgctatgttgcccaggctggtctcaaactcctggcttcaagtgatccaccttggcctcccaaagtgctgagattacagaagtgaatcactgtgtctggccatattttttttttttttttttttttgagacggagacttgctgtgtcgcccaggctggagtgcagtggtgcgatcttggctcactgcaacttctgcttcccgggctcaagcgattctcttgcctcagcctcctgagtagctgggactacaggcacgcgccaatacacccagctaatttttctatttttagtagagacgaggtttcaccatgtttgccaggatggtctcgatcttctgacttcgtgatccccctgcctcggcctcccaaagtggtgggattacaggcgtgatccactgctcccggccctggccatatttcttaaactttatggccaccaggaatgcataccacttatactcttccaggaggatgaaagtcttaagatgtctgaaaaggggtctctaacccctgggagtgctaatacagtaaggcccatactgcttgctcttgccctcctcctgttctagtctcttcagtcatgagattatgagctcctgatgtccaggcacatgcaaaaagtgaagaaatatgtgccttgaacagctgggcagaattcttagctgggagcggtggctcacgcctgtaatcccggcactttcgtaggccaacgtgggccgatcacttgagtccaggagttacagaccagcctgggcaacatggtaaaccccgtctctacaaaatatacaaaaaattagtcaggcatgctggcgtgtgcctgtagtcccagctatccggggaggctgagttgggaggatcatcttaatccaggagtttgaggctgcaagtgagccatgatcgctccattgcactccatcatcctgggcgacagagtgagacccttctaaaaaaaaaacaaccaacaaaaacaacaaaaaatcccaacttattccccaccagctttctttcaaaatctgttttcaagctagctgaagtgttacctcctctaagctttcacttaaccgaatctcatagtcatgattaattgcttccctagcattttgtttagctctactgattgctcttactatttcaagtcggtattattgatatattttttcctcctcactatactgaaatcctgcaggacgcagcattcttaccgcttttccttactcagctataccttgaccaacccgaaagccgcgccagtctagtccattttctattggctttatcaattaccaatcatttctgtgtttaacatttttattggtccatcttgtgtttactgccccgccctctaagaggctcctggacttgggtttcccccaggtgtattccctcctcctcggttccgcctttcccacacactgcttcttctgtttttacctcgacttccttcctattggttcccttcgtcctccggagttggcacctacggctgttgattggcttttctggacgcccattgtgcccaccctcataccacgtggcattcctagcgctaattgggcaattccactacctcgtttatcaggagttgacggttgactggctactctgagggagggcttgagggaggggcgtggccagccgagaccccgcccccaacccccctgctgggccgggtaggcgtttcagtctttcgcggcccgggagctcagcagagctaccagctgccctgttggcttcgctggtcggatcgtcctcctggccccgccaaacaggcggggggagcggccccgactgtggggccatggcagtagtctcctcgttcgccgccgccgctagcctagctgagtcgccggcttctgcgctaggggctcccaccgcctccgcaggctaaggagccgctgccaccaacgagctgtgagggttactatgctccctctttgccgccgtctcctcctcttgcccgcgcaggcacccctctggctgctcagtcctgcctcaggtaacgtgaaaagaggacgggggtcacaaacccgggcatcctgcctggcccgcgcgcgctgccgctccacctcctctgccccggagcagaggcgcctgcgtccctccgcacccgacgggacccctcggcttcccagaggtccccctctcagcggcggcggacgctcccttcctggccgctttcccctttccttctcacttccctcaggctccccgccacgtctgctcccccttagaacctgggaacccattagaagttacctcgctcgcattagggatctttcgttttctcggaaaactcttgtttcagagacttccagctccccactgagcgcctccctgctcgcatacccgctcctgcctcagagatctgggttccttcacttgacttccctccgatacactcttccctcgaaaacgttcacctctacccaggaaaacaattccctcccctcagaccctactgccttccccctcttctttcctcgcttgtcatcgtctcccttcctttcccctctctgctttttactcttcgctgtgaagagtggactaagccagtgttcagatttcgctacaagcgaaatccaggtttgcgtaatttaaaagtctttaaattgtatacctctgagaagaacttgctgaggaatttggacttcatgctgcatgcatggggagccgttgaaggttttgtaagcaggagcttggtatgattgcatta

SEQ ID NO: 481 - DNA, 6000 bp, Homo sapiens
atggaaggtgaaagaataagcaaaatatggtatatacatacaatggaacattatttagcctttaaaagaaataaaatcctgacgcatgctaacatatatgactcttgggcacattatgctaagtgaaataagccagtcacaaaaaagggcaaatactctatgttccacttatatgaggtacctattaatagaagagtcgaattcagagatagaaagtaggatggtggttgccaggggctgaggagagagggatataaggacttattgttaaataagtacggtaacagattttcaagatgaaaagctttctggagatggatggcagtgatagtaacaaagcaaaatgaatgtacttaatgccactgaactggcattaagactttaaaatggctaaaatggtaaattttataaggattgtaccacaatttttttttcattaacagattgggggaggattttcttagaggacaatttggggtaatatttgctttgtaataaattcacccatctataatattccaaatctatcccattaagtctgagctgtaatcttccacccactacttatcaccacttcactgatttcaacagaattcttttctctattgacttgaaatagtcaaaaaaaaatacaaaaatccttctcaaaggtttttccacatttagacacagtatctagcaatgatcaaaatgtgatttattttcaaattctaatcaaatttggaaattatgtctttcctacaaagataatactgagctctcaaactattattgagtctcacaatcatatgatataaacatgtaattttaccatattcacttttggtgaggaaactgatttgcccagttacagaagaaatcagtgtcatccaagtatccgtatgccaagtcttaagctgcaatccttaaattaaatgatttgagccgggtgcggtggctcatgcctgtaatcccagcactttgggaggccaaggcaggtggatcacctgaggtcgggggttcgagaccagcctaaccaacatggagaaaccccatctctactaaaaatacaaaattagctgggcatggtggtacatgcctgtaatcccagctactcagtaggctgaggcaggagaatcacttgaacccgagaggcggaggttgcagtgaggcgagatcatgccattgcactccagcctgggcaacaagagtgaaactccatctcagaaaaaataaataagtaaataaataaattacctggttttcttataactgaataaatgcttacttttaagtcaatcctataaaaattgagataatataaaaaacaggaagaatcatcactttttactaagacgatcatttgtaagagaactccaggttcctaaacacacaaatggctaatgtgtttaaggtgtgtagttttccaaataattttttcttctatcaataacattcttttacctatttgacaatataaaattaacattattaggcaaacaattgttcactgcagatgccattctatttttcccatttttaaacaattgtgtatagcattaccattggtctgaagagaaaaacttattcccatcttattaatgggatcgaaattttcattttcttttttttttttttttttttttgagacagagtctcgctctgtcgcccaggctagagtacagtggcgcaatctcagctcgctgcaagctccgcctcccaggttcacgccattctcctgcctcagcctcccgagtagctgggactacaggcgcccgccacctcgaccggctaattttttgtatttttttagtagagaccgggtttcgccatgttcaccaggatggtcttgatctcctgacctcgtgatccgccccctcagcctcccaaagtactgggattacaggcctgagccaccatgcccggccgaaattttcattttcatttccaaaccaaaatccctggaaaatcttgctttgcctgagtacaagaagcctaaatttcctgtcctttagccaatataaggttaacagttaagcataataattgtcacacacaaaaaatagaaagcagatgcaagttattagagataaaaaggtaaaattaaaacaaagttataattactttataaagtttttaatgagggaaatcagaagacaattttgtaacacggtaaaactacaccttgaaatatagagtcctttttcaaacagtgcattccacattagataaaaaatggaactggagaacaaaaacaaaacaaaaagacgatgatgaaaaacttaggcagggctgggtgttggagcttacacctgtattcccaacactttcggagcctgaggtgggtagatcacttgagcccaggagttcaagaccagcctgggcaacatggcaaggcccatctctaaaaaatttaattaattaattaattgaaaaattttttaaaatgtaggcaggcaaaaagcctcaggccaatcctaaacctacaaaacatcaaaatcttatggtcaacttttattataaggacactcctttattagtttggaggttatggtttaatcaaactgtagatatatgcatattcctaatacctgtatatcagatttcactgggtaaccaaaacagcaaactctgaaaatggttatctgaacgttaatttgtaaaaataagggccgggagcagtgtggctcacgcctgtaatcccagcactttgggaggccgaggagggtggatcacgaggtcaggagatcaagaccatcctgactaacacggcgaaaccctgtctctactaaaaatacaaaaatattagccaggcgtggtggccggcgcctgtagtcccagctactcgggaggctgaggcaggagaatggcgtgaacctgggaggcggagcttgcaatgagccgagatcgcgccactgcactccagcctgggcgacagagcgagactccgtctcaaaaaaaaaaaaaaattaattaattttaaaaaaaataaggaacttaatagaacagagagagagaaaagcccaacaaaatttcagcaaggaaaaatactgcctactaagctagtgttagaacctgtgcaatgtgagtattaaaaaagagggaaaagtctgcctatacttgacagtagcttctaagttgatgccaaaatggccaaaaatatctcactaaaataattccttcaccaaacatcaaaaggcaaaggtagcactcacaggatattagttctagctccaagtctttcacaatgcatacagttctactttcaaagggccttcctaagatacttacatgtcagtggcactacgactgggtttattaagagaacagcctttacttatcctttaaagtattcctggagaaaggacaccaaccaagcaattcaagtctgtaggggaggggaatccgcaaatatgaataggtaatttattaagcttgtgaattcattgcagagatactctggaatatatagtcttatctgtctccttgttatcttcttaccctccaaagattccaattaggcaaagtctcaaatgtttactcctctttgaaaaggacctcagtaccccattgtcattgccctcgccatctcatcattctgcttttttactcttcccttaatacaatataaatacaccacgcccataacaccacacgctccacgctcacactccatacatctctccccacagaaccacccaaaacatcccatacttaatggtccaacaccaattaaaacaaaaactctacacgtccccccatataatacaggaaacactacacattccacacacattgtaacccaagtcattaatacctccaatcccattcaacccgtacttaacacattctacacactcatgatagcatataaattatacgcttctccatagctcgccacacacacacacacacgccacgcaccgtataaaagcctaaatgacacaccactgcagcgttcaaacgctgggaagaagactcccttgtggcaccggaaacccacgaggttggaagtgggaggggaagagggccagatacttcacctgaaaatccgccaggatcatctcccggtccatgttggacgccatggcggccgccgagttccgcggctccgggagcgaagcgcgcacctgggaggcagacggcacctcctgcgaccgtcgccgccaccgccgccgccgccgccgggcgccgaggggctggcgggcgagccggcgggcgggtcggcgggccagcgggcggggcagcgcgggaagcgctaggcgctcatgcactcggtaaccttcaggcgccccggccgcccgcctgcaacctgcggagcccgcgtcgcagcagcccggacaggaagattggtctggatgtgggtccggtcttacagtcgcgggccaggatgagggcaggttgcgacagcgcgcacccggataccttcagcggcgttaagcccggcgggggcggggaaaccgagcgagcgagcgggcgggcgaacgccgcggccgcctccgcctcctccgcttcctccctggccgccgcctccgcccctggttggccagcgccacggctgtcgcacattttgcctgtcatcgaggtcgcaaagcgccgctttgcggctccacgtgaccaccctcctgtcaagcgctgagcgcgcgactacccggccaggatctctgcgctggcggcagagactgcaacctgcagctgcggaagcttcaagtctcgcaacaggttattccagtttggatttaagcaaaggcctcaggatagcgcctccccctagctgaggcggggaccagattgtgcacctcacgtggttagtcacacaaatacacaccaccctcacaaaccaactaaacacactgttacaactcgtctaacaaacagcatttcagaaatatatgtttttctctacaatgtttcagcaaaatacagcttcatatagtctctcacgctcaacctgtcaaaaccgaatccacactgtcacacccagtcccaagctccctgacgtctgcatcctcagactccgtaacacagaagtaaccagactgccatggtagacatgggagagacgaggaagctgagaaaggtaaaaatctcgttccagagaagaggaggagcattttttttaattgataaggtagttatgagaaataacaacctcgagttaatagggttgctccaaagggggaaaaaagggaaaacctttctactgctgcagttatatttgtttttttaagctgagacatcttacaaatgggataaaacttgaatccagctttgaatatagtcagtctatttttatttatttatttatttatttatttatttattattttgagacggagtctcgcactgtggcccgggctggagtgcagtggcgcgatctcggctcgctgcgacctccgctttctgggttcaagcgattctcctgcctcagcctccatagtagctgggattacaggctcccgccaccaagcccggctaagttttttttgtatttttagtagagacggggtttcactatgttgggcaagctgatctcgaactcctgtcctcgtgatccgccctcctcggcctcccaaagtgttgggattacaggcgtgagccactgcacccggcctattcattttcataagaaattattttggaatattcaccaaatattgaaagtttcaacccatggtcagaaattgacaacctctgtaactaaaacagccaaagactatgtacaatgaagtgtgacagtttgtaattgtcgtccaggttagagaaagtgtgacagtggaagttgttcatccttgacttgggaaaatatcagcttctggattgtcatggggcatttacttgctttggaaagtatgtaaaagcttgaaaatgtgaagtaagattgctgattttatcctgtagagctaaaataactagtgaaatcatcatgtagcatgaaggcctaggcttcccttaagaactttttaaacttgtatcatttatttacttttttagagacagggcctcactatgttgcccagg

SEQ ID NO: 482 - DNA, 6000 bp, Homo sapiens
ccaaatttgggctattgtgaatagtgctgcagtaaacatgggagtgcagatatctcttcaatatgctgatttccttttggatatataccaagcagtaggatgctagatcctatggtagctgtatttttagttttttgagaagcctccaaactgttctccacagtggttgtactaatatacattcctaccaacagtgtaagagggttcccttttctccacatccttgccagcatttgaagtccacatgaaagaaaattatatcttctgttcagttttgagaaaaaaggtatgtaactttttctcacaagtggtagcttagcatatgcttgctgctatctttagtaacaaagaaaatattgttttaaaaaatgtactggtaattagacaagaacaactttctcagaataaaattaattatgccaaaacatgtactcagtaagcagatgtccccatagctaagaaattgatacaatctatttcctactaactttaatctctaggtttagaattagctggatctaatgattaagtttgatgatagtaaaaatatcacgtagctgtagatatttaaattttgacaccatgatatggatcttttgccagggtttactttaaagttctgacatgcatctataatcctgtattatttataaattgacaaaaaaggaacttaaagctatagtaatgctaccgctgtctctgaccttaaaatggaaatgcacataagtggcagaaggatatagatgaaaggtgtagcaagaagcagcagctctagttcatgttactcctttttaaaaaatagtttatctaaaatcaattattacaacgttaagagagtattccaccctaaaaccaaaagtgtatataacactgaagagacaaacactgtatagttatcctcccagataatttcataagattgatagcaccttagtaatacatacacattgattcacaaactaaatgccatagtagtggaaggcatgttaaacttttaaacttagcagattccttctcttagtatattttcaaaacagtaacaaaaaaaaactcggattattttagaaataatggcaaattagaagtaattttaatttattggccaggcgtggtggctcacgcctataatgccagcactttgggaggccgaggcaggcagatcacctgaggtcaggagctcgagaccagcctggccaacatggcaaaaccccgtctctactaaaaatacaaaaattagccaggcatggtggcgtgcaactgtaatctcagctacccaggaggctgaggcaggagaatcgctggaacccaggaggcagaggctgcagtgaatcaagatcgcgccactgcactccagcctggaagacagagcaagactccgtctcaaaaaaaaaaaaatttattggatgtctgcctaaacatttaatgtatatgaattaaacacaaatacttaaaattcaaaatagagcattttagtaattttaaaattatgtaaatcaaaattaaacatgactttaaaagtcagtcatgtgcatttgcatttaaactactttacaaataatgtattttatttagacatcaaataaattttaatcttgtcaattcttgtattcctcaaaatacatttcctcaaatagatcttattggatacaaactcaagacactgctgcacaaatatgtcagggttttggtttaagaaaattcattataaaattggcaaaataactcagtttctctacccataaagttattagccttgatgaaactgacatgagtagtcagtgttatctagtactgttgtttactactctctcatgactaaagatgtccaaatcatttgatactcctggaaagaaccaaatttggtggttttggggacctttgtaatgagaggaatttttaaatgtgataaaggacagaagcaataaaagacaaaacaaaaaataaaaataagaaataaaaaaaccccaactcaattctcttttaaaagttcacttatctctcagtacttcactttttcagacattccacccatttttacacatcctttacactttcctcagtatgggtcaaattcaggctagtgacttaagaggccaaaagcgttttaattttattatgataaatcttaaagcaccaaaatgagaattaaaagtatcttaagcaagtagtaattgatagaagctttcaattacccatctagtttgtataaacattgaaagttttattttgtagttcctagaatatgtaactatatgatatgacataatagcttactgtagttccattgctcaagcttcactaagaaactgggatgattcaacaaggtaattctaatttcagtctttcggacctatttattaactttcaacaaaaaggtgaaagatttaaaaattttaaaaatttacctaagtaaagttgatctttagaaataatgttttccaagctgcttttgaagacagttaagtaggcagctctacaattcatataaaatatttcctcttcagttagtggaaatttctttgttcgaggactctctgaaggtgttgatttctgactggagaaagttgcatcgcttcgtggactgatcgccattctattggaaaataatttaaaaatgtgtttgtcaatgtgagtcactaaaacacaaatgtcaccatgtctttcaaatacagggaggagaatcaagattttatacatagaagaaaatttataacatatatgaaaagatcaagatattaaaagttttatatgtggaagtaaaagacgaatactatagttgtatatggacgtattatatattaaacaagaataagcctttggcagttaatttctaattttagatatatacatatgtatatatataattgttcaaatatgtgataatagccaaaagaacaaagatatacacaagagaagaatcactgaacaaaggaagagcacacatctattctctcaaaatacgaaagtcagatgacagtcttcatcaggtttttaagaggagcaaatcagttaatacatgtgaagcatatacaatattgcttgacacgtagtaagtgctaaataaactgcagataatgagaaactccagaataatgagaatcgggatatgagtggtagttgacacccatcttccacagcaggatcaacaagatcatttcattaacatctcaataatgcagccccacatttcaaatagctatattttaaaagtcttatttatagcattatcatagttttactgtgttcctttattaataacaatatttggggtttgtatagcacctctgtacataagagcttaaagaactgtcatacatcttgtcttatccctattacagcggtcaggtatttttttgtccgttttacagatgaggaaattgaggggtagcaatgtcacccagctagcagtaagtggcaaaaagccgtaaatttcacgaacagtttcttctttgttaatgtggatatagtactgaacaatggttactatggggtattagattctactggtggtctaacagcttccaatattactctacccagctttgacttctaaaaatagatctccaacctaataaattgaatatttcaagttcaataataagataacacaggtagggtccccttcaggactcattgcattcctactcaggaggcctaaatcacttgcaccttttcgaattatatagatcatttacacttgggaaagaaagataataattgcttatcatggatgaagtaccctatttataatacgcaggccgcctgcctgacactttcatattacaccagatttagaaggaccccacagggatgtggtgtcacagtctggttactgcaaattggtaatactataattaagcatcagagttctaaacacatatgtgtgcatgcatctcctcacaaatgtgaaagaaaactgtttcaagaagtaagggagaatgaatttcactttgcaataagcaattttaaaatataagtatattttaggatcgtcctcaaatattctttccaaacaaggcaactccctcacatggaaatcccaaggcagaaatgtgccagaattttattcttttcctttctgtgacgagaaaccaaactaaagcttaaataaacatataattgcaccccccgcaggcttggaaacctcccttacttaaaactccggcccgagactgagacaggggcctagagagtacattgcagcaaacggctccataaataaccagccacacaatagcaagaaaaataaactgttaacaagcgcctaaggcttctacagggccaagtgaaaacagaaagccgtccagtcaccgtccctacacagtgaaataccgtcacaggtaatctcgggcaccatctctctatttttgtattcctctggaaataaaaccgcatttacatgtacattttaggtacatacatggaccaaatgtttatgacagagaagtagacaaagcagaggaaggagaagcagctgcacagagagggacagagggagcgaagagacagagacagcgagctgtttgctacctaattctagctcacaaacaaggaagcgcagccaattctcttcggcgattcagcgttcctctcaccgcagctggacagatctcggcctttctctaatcaccatggcaactgcacctcaccgccaccggaaataagatgcagagcccttctccaaacgatccggctagaaatctaggaagcgctgatccggagcgcacagagacagctgtgttgctcctctatcgcgggggtggtatggccagagtagtgagagaaggtgctctgttacaccagcaggaaataggtgctgtcctgggcctagaactccccgctcgctcctttgctcgcgcacacccggatccttcgtcgcggggaggatgtttccgcccggccgcggtgggcttgacgcaacgtccagcgcgcgcttttcatgccttggcgtttcctttggcggattttctgttttcggaagttgctgggttcgttttattcagcggcagtggtgctttcccgaatctcagaatgccgtaggtatctcctccccaggtattgctgttttgggggccctctgcaagaagagaagatattatgtggcccagtagcctttctcgttttcctattttttcggagtatgaacttgtctcctctgtccacaggcaattcccttcgcttggtaccctcaactctacgtctcctccagcggtactcatacgatagtcctccttcgctttctgtttctacgatgcttttgacagatttcgtaaactgtgggctgtatttaggtgatgtctaacttgaaataacataaataaggttgacacacaggatgggacagagtagatgaaaacacgccttcgtagtttgtcagtcccttgccttcattaatgtggcgcgttcgtgtaaacccgtgggagaactcatggactgagtgggtctagatacctggattccagataagactctttcactgttgggcaagtcacttatcgaccctgagcttcgtttttttttacttacacaaataagtttgtactgcatgatctctaaattcccatctatgaccaataatctgattattgagaatgaccatagtgggaataggcattgtgctagataagattcatctgtttttcatatccttcatccatcctatattgagatgcataaaatagttgctaccctatagaaacttaaaaaagccattaaaggttgggggagtggggtggatatcaaacacctgtaatttctccttggccgtccttgtcctcaggttgatttaggtaccccctctagtgtaacctgttccttagtttatttcaggattaagtaaaatgcaaagtaacacagctggggaaatttttgtatcaaataggaattgacatgaaaggggaaagctgtacagaaatgataacctatatttattgaatcttgaattacaatgtgggtgctgtattaatcaatttatctacgttttttcattgaatcctaaaa

SEQ ID NO: 483 - DNA, 6000 bp, Homo sapiens
tttttaactttcaactttgttgcttatagacagtaaagagttaggacttgctttaaaaaaaaatctagccttataatattctctacctttttcactgatgtctttactgcacttaaacttgtaattatctggttggggctaccatttagatagttgttttctatttgtcccatctgtttttgttcctttgttcttttttacctgccttcttttgaattaacattatttttaaatatatcatttcaattcctctatttgttttttaggtatgcctctctgcattttcagaggttactctggggattacagtatgcctttttaacataccacagtctatctagagttataataatacagtactacttcatgtaaaagagaagaatcttgcaacattatagtcaactccctctacactttgtgccactggtatcatatatattatgtctacatataaccccataatagtgtttaatttttgctttaaacattctcacctttttaagaagttgcaagcaaaaaatatatagatgctccttgacttacaacaggattatgttacaacaaacccattgtaaattgaaaatgttagttgaaaatgcatttcacacatttaacctactgaacatcacagcttaaacatgttgagaactcttaaattaacttatagttgggtaaatcatctaacccaaaatctcttttaaaataaagtgttgaacatctcatgtaatttattgaatattgtgctgaaagtaaagaaaagaatggttgtatgggtacttaaagtagtttctactgaatgcatattgctttcacactattatgaagtcaaaaaattctaagttaaatagacaggtgagagccaccacgctcagccaaaaaggctctattataccttcctctattagactttactgacttttacaagcaggaaagaattgcatttaaatttcatatttttcttatatcaagtactaaaaatttcaccaatcttcttttaaaatgcaggacactttatttataaaagaaattatataactttgaatatctactataattcaaaggatgtttatttaatggttaacttttacttggcctgacacatcattccacccacctacttctttataatcaacccacaaaataaaaatcattgtacctggcagtagcatcaaaatgattacagcatataggcacaataaagatccagaatatgtttatattcattttcccttatcttggaaaaaatatagcacattttaaagttctctcagaaaactctcagactataaatacagcagcagaatggcccccactgttactgttacgaatagtttttctacaacactaatgctattccaactttatagctttagttcagtcatagcttggaacagaataaagttaactctggtagagagtatctttggctgaattagcatgatgatgtacactaattagcaagactaaacaaatggtactttttaaaggaagctttataaagaaaaggtagaagaagaaaaaaggtctagaatgggatttgattacttacagcaagagctactaaaaagacatgtatctgtctacatagaatgaaatctttccaaagtagcaactttatcattcaattaataaatacttattgagcaactattttatcaatgaggacactgagtaacaatctaaggagcacacagctggttaacagactcaagattcaaatcctggtttgtcttactccaaagtccatgatttttccacttcaaatctttaaaaagtgaaggtttcaacctagatagagaaatgactgtgccactaatttcagaatgtacacagaaagaggagcaagattggaagggaagatgattagcctaatgaaaccaacagcagcatttatctaattcatctgtttcctccaaaggatcaaagagaaggcagagaaagctacacttagggaggacttaagataggtaatctctaaatccttttaaaaaacattttaagtagtacatactaaatgaataaatgtaatactaatgaataatggatactaatgaaaaaatgtaagctgtgcaagttataaaacattagaaaataagcacgcataaactcaccacataatttaagaactagatcattaccaatatgactgggtatacatgcatctatttgcttcccccaaaaggcatctattaaactgtatttatcatttctctgtatttatcatttctctgccttttaacaataatcttatcatatacatatataaccataagtagcttatttttgcgtgttcttaagttttataaggataacaaatgtagtctcatacaaattggttatttcactcattatgttaagattcatccatccgctctattgtcactgaacatttgctgtttcttatttattttagattcatttggaccatatatattttcacaactactcattgttgtattgaagttttttctgctcaaggttctaagaaattagaaaaaagatagatcacaccctcccgtaagttatattacacatttagtcttccaaatacataccaaatagtcaccatttcaacatcacttaaaaatgaatccacctgcatatgtaacttgccaagataactatttgcaccactcatttatgacctcaccagtaaccacattaaaaaaaaaaaaaacacttaatttactaacaatgatggagattctctactaacatgccattacgttttatgcattacttaactgttgatttagtcttaaatcactttgctaaaacttagaaaattagcaaagtaattgctagtttcacatatatattagctatatatgtgagatgttaacctcaactttaaggttgtgtatttattaccagaatatacttatctaaaagcctaatataacatcttgtgtgcatatgttaggaagacagttgtcaaaaaggtccacttttaggcctgacacagtggctaactcctatagtcccagcacattgggaggctgaggtggaaggatcacttaagcccaggacttcaagaccaggctgggcaacacagggagacactgtctttacaaaataaaaaaattaggcatggtggcatgtgggagcccaggaggtagaggctgcagtgagctgtgatcacagcactgcactccagcctgggcaacagagccagactctgcctcaaaaaaagaaaaaaaaagttccacttttcatagttttttggttccccactcctatacacagatacacacagttcaggaggtattaccacttgtttggcaaatacacctctgttttcactgtattcttagggattttgtgtgtgtgattgtgtgacattatctttgcagctttgtttatttgagaactggatgatttttctaatgcaagagtagggaaacaagtctctttgcttaattctggggaaaggaaaacctcctcaataatccataacttttaagggcatcagtaaaacatgcatttattggcagctgtgttgaacaccctattaggtgatgggtttctttatctgtaaagataatagcagcccccatcccctaaagtattttaggattcaatgaaaaaacgtagataaattgattaatacagcacccacattgtaattcaagattcaataaatataggttatcatttctgtacagctttcccctttcatgtcaattcctatttgatacaaaaatttccccagctgtgttactttgcattttacttaatcctgaaataaactaaggaacaggttacactagagggggtacctaaatcaacctgaggacaaggacggccaaggagaaattacaggtgtttgatatccaccccactcccccaacctttaatggcttttttaagtttctatagggtagcaactattttatgcatctcaatataggatggatgaaggatatgaaaaacagatgaatcttatctagcacaatgcctattcccactatggtcattctcaataatcagattattggtcatagatgggaatttagagatcatgcagtacaaacttatttgtgtaagtaaaaaaaaacgaagctcagggtcgataagtgacttgcccaacagtgaaagagtcttatctggaatccaggtatctagacccactcagtccatgagttctcccacgggtttacacgaacgcgccacattaatgaaggcaagggactgacaaactacgaaggcgtgttttcatctactctgtcccatcctgtgtgtcaaccttatttatgttatttcaagttagacatcacctaaatacagcccacagtttacgaaatctgtcaaaagcatcgtagaaacagaaagcgaaggaggactatcgtatgagtaccgctggaggagacgtagagttgagggtaccaagcgaagggaattgcctgtggacagaggagacaagttcatactccgaaaaaataggaaaacgagaaaggctactgggccacataatatcttctcttcttgcagagggcccccaaaacagcaatacctggggaggagatacctacggcattctgagattcgggaaagcaccactgccgctgaataaaacgaacccagcaacttccgaaaacagaaaatccgccaaaggaaacgccaaggcatgaaaagcgcgcgctggacgttgcgtcaagcccaccgcggccgggcggaaacatcctccccgcgacgaaggatccgggtgtgcgcgagcaaaggagcgagcggggagttctaggcccaggacagcacctatttcctgctggtgtaacagagcaccttctctcactactctggccataccacccccgcgatagaggagcaacacagctgtctctgtgcgctccggatcagcgcttcctagatttctagccggatcgtttggagaagggctctgcatcttatttccggtggcggtgaggtgcagttgccatggtgattagagaaaggccgagatctgtccagctgcggtgagaggaacgctgaatcgccgaagagaattggctgcgcttccttgtttgtgagctagaattaggtagcaaacagctcgctgtctctgtctcttcgctccctctgtccctctctgtgcagctgcttctccttcctctgctttgtctacttctctgtcataaacatttggtccatgtatgtacctaaaatgtacatgtaaatgcggttttatttccagaggaatacaaaaatagagagatggtgcccgagattacctgtgacggtatttcactgtgtagggacggtgactggacggctttctgttttcacttggccctgtagaagccttaggcgcttgttaacagtttatttttcttgctattgtgtggctggttatttatggagccgtttgctgcaatgtactctctaggcccctgtctcagtctcgggccggagttttaagtaagggaggtttccaagcctgcggggggtgcaattatatgtttatttaagctttagtttggtttctcgtcacagaaaggaaaagaataaaattctggcacatttctgccttgggatttccatgtgagggagttgccttgtttggaaagaatatttgaggacgatcctaaaatatacttatattttaaaattgcttattgcaaagtgaaattcattctcccttacttcttgaaacagttttctttcacatttgtgaggagatgcatgcacacatatgtgtttagaactctgatgcttaattatagtattaccaatttgcagtaaccagactgtgacaccacatccctgtggggtccttctaaatctggtgtaatatgaaagtgtcaggcaggcggcctgcgtattataaatagggtacttcatccatgataagcaattattatctttctttcccaagtgtaaatgatctatataattcgaaaaggtgcaagtgatttaggcctcctgagtaggaatgcaatgagtcctgaaggggaccctacctgtgttatcttattattgaacttgaaatattcaatttattag

SEQ ID NO: 484 - DNA, 6000 bp, Homo sapiens
cctaggaggtactcaatttatactggtattagttaacttcaaggtccgcaaacaatgttagaaaatactaataaagatactgttatttaacatgcttattgttgcccttcaaagattaaacttcacatatggatggtaatttgcctggctaaaatgatataaaagatgaaccatgttagatgttgtaagaggggaataagaaacagagttgatgccttagcacatacaaacttattaaagaaagtcagagtaacagaactttagagttccaagagatctaacataacagttcattagaagaaaagtgccacctcatcatttggaattgaaaatgattcacgatttcacagcaagctcttgtggtctaagaagccttatcagctgagatggatttgaagctatatctttaaaaaaagtttattttacttttattttaaaattttttttactctctccattttggagatgaataaagttgtatcttaaggaaaggaaagaataggcagacaggacacttaagaggagtctaaccatatgaacaaaagcctaaaataagtagaagatattttggaaattaaaaaataatttggaatacagtgtttatataagtgagagaaaggaccagattgtaagggagtatttaatgctcaactaagaagtttggactaaaaagatggattctaagaataaatggcatttaaaactctagtaaaataacaattaagcaagggtgaattacctgatacttttgtattttaccatcttgaggtacttaaaaacaagcacccaaatgggctagttaagaataaacattcctactcatttatacattctagtctaacattctttttaaagtaccaaggcttataaacaaattttaaaaggagggaagtggagtggtgatgggacgcatctatgtgctttactagtttgagctgacctttttttaaaacaagaaacatgtttaatttttaacttagaaatttttaagtaaaatggaaaacaatgtatggcgttggccaaccaaagaatggcatattccttacggtacaatttgatttgaatgaaaattattatttataaacgtgaatgtttctctctctactgttcttactgcttataaagagatattggcatagctcttaagctattcttagcatgaaacttggtactttggcattatactgatgtcaatgcaatttaatgtaggaactcagtgatgaaataaatactgagatgagaaagcagtgttttgttgaaaactaccacacagcattccaaatttcacatgttctattttagaagcatcctttttttcttacaaattttatctttaaaaaagtattatggaaaatgtcaaacatacaaaagtataacagtataatgaaacctcatgaacccataaccaaccttccacaactatcaacattccgttgctgttgtttcagcgacttctgtttttttcttttgaaatattcaaacgctaatctcaactggtgtggtggctcacacctgtaatcccagcactttgggaggccgaagcaggtggatcctgaggtcaggagttcaagaccagcctgaccaacatggtgaaaccccatctctactaaaaatgcaaaattagctgggcgtggtggagcctgcctgtaattccagttacttgaaagacggaggcaggagattggcttgaatcggggaggcgaaggttgcaatgagctgagatcgcgccattgcactccagcctgggcaacaagagccaaactccatctcaaaaaaaaaaaaaaaaaaaaataccctgtaaaaaccaaatctcagatatgatataagtttatccataaacatttcagtatgtatctctaacaattacagacacattaaagaagtctgtttctcctaaaatttttcccttaataaacggctcaagccaaaaccttggagtcatccttaactcatctttctctcatacctcacagccaatccaacagccaatactggataatttggaaccttcactgctaccactgtaatctaagttacaatcgccttttacgtgtattatggccacagctccttcattggtctccttaatgcccctgaaacttcagtctttgtacttcttcctgctgcctgaaatacttttattccaaaaaaaactaggtctgtcacttccttgaggtctcttgaatttcatcctattagaaagacttgccctgaccatcctatctatacacgatactaatgttagaaaatactaataaagatattaacaaccaccatctctgcgttattctattcttctggccatgatttttatcaccacctgatgtatttacaagcttatcttccgctacaatgtaagcttcaggagggcagacactttgctgattttattcactgctgtatcaccagtgtccacagtagccacaagcagacatcagacatgcagtagacacttaaatatttaaaactgaaaagaaaattatttgatggctaacagattagcataaaatttaaaactttttcctaaagaatttgaaacaaggaattaaaattctttgggaagtacacattttgagagctttgctagatttaattttttaaattgagtctatccacaatttaaatcagactaaattctagtaaatgtgtcctctttaaggggtgtgagttatacgtctgaaacatatttaactgtatttaaaagagtagcattatacagtgtcaaatcctcataagcatctagaattataggtaatgagcactaggacaaacaaaaataccaagggctctagtcctctattgcagtcaatgttaaaagtgtacaagtgtctcacacatcaaaattcatttcacaccctcaatcactcattcttcttgcaccttgtctttgaactattagaagctagtgaatttaaatcaaaacattattttaactataaaggctcaacgtctacaatatatcatattttagggaaggaagggaagaaaagggttaaggcagctagcttattactcaccatgcagattttagaacttagaaatcaaaagctagaaggaatttaccatctctaaagtgttacttgcttgttgatatggaaatgctcagattgaaccagatgatttttaaggtctctctaggccacagcattctattattctagctatcttaaatctggaatgcttatcccggaagaaaaagcagctgggagtactaggtcagacagcacctggttatttactagttgtgcaagtttcttaacctcagtaaggctgcttcctcacatatataaaaggggttaataacatctatctggcaaagttatggaaaagactggagataatatgtcaaatgcattacaaagtgcttgacaggtttttcataatataggcagctattaccttgctctagctctactactcttttgccagggatagtgcaatgtaggatcaactgtgccaacaaaattggggcaaaggcaaggaaagtagtaaagccacagaacagatttacatttcagcaccaatttggtatgcatattagaaaattatttttgttttctttttacaaaagagaatgttgttgctaccgtgaccgtaaacaccagattgtttataattcatgttgtgaaatttacatctgttcacagatttactgagttggcataacatgggtgatgactgtgggaaacggcccaagttccttagtactgacacttccttgattgtagaatatcgagaggtagtcaacttttccccttaaagtatatttaaaacatactactgtgactacagccataacaatatccccgcatctctccttgatctacagctggtgcttcccattttgaaaaagagtgaaaaccccccaaccctaggtttcttgtggtcttggcaaagtctcaacgccaactggcgatctccatttcccccgcgggctgccaagcccaggacagtcctttcagggagaaagagggccggagggaactgtgttggcagctctctgggttgaaggacaggaaaaggaaactcccttcttggactccgaggggagggtgagagacgaaaggaaagggtggggggtagtgcaagaatggcctgtgtctcggttaccgcaaaggactcgcaagcctccgccagccccggggtggaggccacaggagcactgacgtcgtggtatcagaaaggcggacagtgcagccttagtgttccccaggggtgggaggaagctcccggccccgtccccaccccgcctcgcttcccagggagcggcggttgggcaggagcggggcagaaatccgccgccgggcccggggaggggaccaggccgcgcccatctcccaggcctctggctgcagcaggcccgctgggtggtcggcgaggcccgggggcgccgcgtcgagctgcggtcccctccctcaaccttcccgggcgccgccaccccttttccccccagcaccagggtacctgcacggcgcgactgaggaaggtgcctgcgtcggccgccagcttcttcacgttgaagtccatgatattcatcctaggcggcagccgggcggagccggccgacctagcggcggcgaggcggaggtgccgcggccgggctggggcgcagggctagagcggcgagggcagacgtggtaggtggagggaggcggcgccagccccgcagccgcagctgtcgtttccgtgaacggggaggatgaaggcggggcgagggaggagaacaagcgcgcggcggcagcgccaaggatgggtcagtcggctcggagaacggccgctaacgtcgacgatgggccccgcgggcgagccggagatggacgggcgaccccgccgtgtggacccgggtcccaagggaaaaacaagcgcgggccgcggggcggagcctttctcgaggttatcgcgggaacagcgaccccttgaggattgcggcggcgcagccccggggcgcgccgggagctccgcccggctcctgtggaggaagcggcgagggcgagccgcggggtctcggcgcctctgtatgcttgcacttaacgagaacccagagcgaacacgacccacatttctctttttgttttaagaggaaatataggagttacagcatagaattacaatatctggacattagaaataacaggtcccggtcacggtatggcaccgcgcgacacacttggtccctgaggcctggatgccgctcagcaaacgttcgcggaatagggttgggtttactgtcccccaccgagccggttgctcattcattcagcataattgaatacctcctgtgtgccaggcactgaatcaagtgtcggagacaatgtcctgccctcaagctcctggccggttacttgacaaccttccgggacctcaacgctatgtgcctactgtgtgaaagcaaagtgccaggtggaggacacaaagatggcgagcgacacaggatagtccttaacaattaagcgtgactaattttaataacaaatgagaatatgatgtgacatccgttccaaatcctgtcgttccaagtaacttcttaagcatctttcacgatacagcctctgcttgaaaggaattaaaacaggtacaagcatggaaggagacgttgctatcatatttcaagaataagaaaatgctgttttgtgtggttgtgcagcaggcaatgaaatgagcttacattcaagcttccgtgttttactgaaacaacagtcacagatgcagtagatgttaaaggttgaaagacgagtgcagtaaaagcattatgaggacaagaagaaaacgtaaatatttgtgttgtttcattctttgttgtggtggcagaaacagccccctctttctaaggtaactccaatataatgatctctcccagctttgaaatactccatgtctgtttcattttccagaaatatggaaaaatgaatatataataaaaaaccctatttctcatttattgtctattttagatctttatgtggaaaagcacttactctcttcccagagcactgtttttaa

SEQ ID NO: 485 - DNA, 6000 bp, Homo sapiens
tacaggagccatcttgagacattaggatgaaagctacatgataagaatagaaaaacaaaaacacagaagactgcctacctctgaacttcttagagggtgagaaaataaatcagtatttgggtaagtcactacagctaggtttctgttacttgagctgaacataagcagtccttaatcaatacagactagataacatgaaaactcttctactacaaatacttagaaatgctgggtaaaatgcagcaaaataaattaattaattaataataatgcatacttgagcttacaaaaaaaaagacagggaaatattcaggtggcaaaaataaaaaaagaaactggacaccagggtcttgaatacagaatatgaccctgtctggagaggagaaaggattgaatgaggatggtgcttgaatgtttaaatccatgaggtgataaatggattttaaaaatgtgatatatgtatacaatggaaaactattcagcctctaaaaagaaggaaatcctgtcatttgtgacaacatagatgaaccttaaagacattatgttaagtgaaataagccaggcccagaaagatgaatattgcatgatctcacttaaatatggaatctaaaaaagttgaactcaatagaagcaaagagtggaatggtggttagcaagggctgggagagagtgagggagctggatgacgctggtcaaaggatatacaatttcagttacataggaggaataagttcaagagatctattgtacaacatagtgactatagttaacaacatgttgtattcttcaaaatcactaagaacagactttaagtgttctcaccataaaaataagtatgtgacgtaatacatatgttaagtcactcaatttagccattccaagatgtatacatattacaaatcaggttgtatacaatacagtatatacaattatcatttgtcaattttcattaattttttttttaagatggagtttcgctcttgttgcccaagctggaatgcaatggcgtgatctcagctcactgcaacctcctcggtttaagtgattctcctgcctcagcctcccgagtacctgggattacaagcacccaccaccacacccggctaatttttgtatttttagtagagacagggtttcaccatgttggccaggctggtcttgaactcctgacctcaagttatccacccacctcagcctcccaaagtgctgggattataggcatgagccaccgcgcctggcctttataatttttaaaaatacacggtaacttgtgataagaccttgggcccttggtgcaaacagaaatcagttaactgtgagcacaccctgtcccccaacttcatgacctcacacacacacataagttaaaaacccatgaaattctgtaccctcaatgaaagggtagactagatagaagcttttcttctggcatagtaagaagcttttctgtcaaggcacaagctctgaaagagaaaaaaacaaggaagatctctctcccttgagaatttgaatcatagtttgtactcccacaaatctgggttcaaatttataatatctgaatgatcttagaacttctaagccaagaaagaaattcatgtaaaaattgctcactagccagtgataaccttaggggtctctgacagaagaaacatttttttctgtatcactaaaaatgagccataaaaaaaaaagctaaaaggaatcaatgtacaaagcaaaaggaatcaatccacaaacaaaaaggtcatcaaatacacaaatagaagtattagacccctaaatgcaaaaggatttatctatatgatatcatttatgcagtttaaaaatataacatagtagtaccattcatagatacatataaattcagtgaaagtacaaaaacataacagatattaatcataccaatttaaaaatagtggctaactctggggaaggaatagtgtcaagaaaagcctgaataattgatccagactgaaggagaattgagcaacaagctaactggatgcagcacatgatctttcttggctgggacgtttttgctgtaaagacattggaataattggcaaagtttgagtggggtttctaggcaaagggtacacagaagtttttgtactattcttgcaacagttttcttagtttgtaaattgtttcaagttaaaaaatttgtttttaaaaagaggatgaaaatgaaaaataggaaacagtttcagagaagaaattgccaggatagaccaattggtggtgggaaataagaggaaataatcaaaggggactcagatttctggcttaggtgatttggtgtgtatgattcaatttatcaatgtaggaaacccaagaaaagaagaattttcaggaaaagcaaactataacagacttgccactggaaatattgaatctatggataaatagttggaaatttaggctgggggtgatggtgtcacaaaagagcttagcactgtaaacatcttgatttgattacttttttcacttactaaatcatttgggaattcactatgttgcctgtgtaaaccataaaatatataaaaataaataggaaacggacactgcccttaagggactgatatctggtaagagaagtagaatcagtctgtaggcaaagggtagagactgatggagcaagttctagagggtgacaaattagttctcaaccttggtcacacattaagaacacctagaggaactcctaaaacatcccaatgcccagtccacactctgggactggatccaggcatcagtggttgcttaaactctccaggtgatgctgatgtgcagccaagattaagggagcagtggctctactcagaacacctgagacacctattcctttgaaacatttggcaatgatgcaggaaagagtgtggagagaacaggaggtggaaataaggaaatttggttgaagaggcttctgccaaacagagtgatgatttatattttctctgtaaagaaagcgaatcagctgggtgcggtggctcacacctgtcatcccagcactttgggaggctgtggcaggcggatcacttgaggccaggagttcgagaccagcctggcccacatggtgaaactctgtctctactaaagatataaaaaattagccgggcgtggtgatgcatgcttgtaatcccagctacttggaaggctgaggcaggagaatccttgaacccaggaggcagaggttgcagtgagctgagatcacaccattgcactccagcctgggtgacacagcaaaactctgtctcaaaaaaaaaagtgtcaaaggctaagaataaggatatatgaaaataaggtaagtcttttatggagaatggggaaacaggattacagctacagagggtgcaaaagaaagaagtaacattgttgttttcccaagactgggaagattgaaacacttgaggatgaggattcagggacaccactgtgtccaccattaaagaatttcccctttaatggtggacacggtggtgtgatccttttgtagagacgagcataggttatggcaaatatacctactttaaaaacagtgctctgggaagagagtaagtgcttttccacataaagatctaaaatagacaataaatgagaaatagggttttttattatatattcatttttccatatttctggaaaatgaaacagacatggagtatttcaaagctgggagagatcattatattggagttaccttagaaagagggggctgtttctgccaccacaacaaagaatgaaacaacacaaatatttacgttttcttcttgtcctcataatgcttttactgcactcgtctttcaacctttaacatctactgcatctgtgactgttgtttcagtaaaacacggaagcttgaatgtaagctcatttcattgcctgctgcacaaccacacaaaacagcattttcttattcttgaaatatgatagcaacgtctccttccatgcttgtacctgttttaattcctttcaagcagaggctgtatcgtgaaagatgcttaagaagttacttggaacgacaggatttggaacggatgtcacatcatattctcatttgttattaaaattagtcacgcttaattgttaaggactatcctgtgtcgctcgccatctttgtgtcctccacctggcactttgctttcacacagtaggcacatagcgttgaggtcccggaaggttgtcaagtaaccggccaggagcttgagggcaggacattgtctccgacacttgattcagtgcctggcacacaggaggtattcaattatgctgaatgaatgagcaaccggctcggtgggggacagtaaacccaaccctattccgcgaacgtttgctgagcggcatccaggcctcagggaccaagtgtgtcgcgcggtgccataccgtgaccgggacctgttatttctaatgtccagatattgtaattctatgctgtaactcctatatttcctcttaaaacaaaaagagaaatgtgggtcgtgttcgctctgggttctcgttaagtgcaagcatacagaggcgccgagaccccgcggctcgccctcgccgcttcctccacaggagccgggcggagctcccggcgcgccccggggctgcgccgccgcaatcctcaaggggtcgctgttcccgcgataacctcgagaaaggctccgccccgcggcccgcgcttgtttttcccttgggacccgggtccacacggcggggtcgcccgtccatctccggctcgcccgcggggcccatcgtcgacgttagcggccgttctccgagccgactgacccatccttggcgctgccgccgcgcgcttgttctcctccctcgccccgccttcatcctccccgttcacggaaacgacagctgcggctgcggggctggcgccgcctccctccacctaccacgtctgccctcgccgctctagccctgcgccccagcccggccgcggcacctccgcctcgccgccgctaggtcggccggctccgcccggctgccgcctaggatgaatatcatggacttcaacgtgaagaagctggcggccgacgcaggcaccttcctcagtcgcgccgtgcaggtaccctggtgctggggggaaaaggggtggcggcgcccgggaaggttgagggaggggaccgcagctcgacgcggcgcccccgggcctcgccgaccacccagcgggcctgctgcagccagaggcctgggagatgggcgcggcctggtcccctccccgggcccggcggcggatttctgccccgctcctgcccaaccgccgctccctgggaagcgaggcggggtggggacggggccgggagcttcctcccacccctggggaacactaaggctgcactgtccgcctttctgataccacgacgtcagtgctcctgtggcctccaccccggggctggcggaggcttgcgagtcctttgcggtaaccgagacacaggccattcttgcactaccccccaccctttcctttcgtctctcaccctcccctcggagtccaagaagggagtttccttttcctgtccttcaacccagagagctgccaacacagttccctccggccctctttctccctgaaaggactgtcctgggcttggcagcccgcgggggaaatggagatcgccagttggcgttgagactttgccaagaccacaagaaacctagggttggggggttttcactctttttcaaaatgggaagcaccagctgtagatcaaggagagatgcggggatattgttatggctgtagtcacagtagtatgttttaaatatactttaaggggaaaagttgactacctctcgatattctacaatcaaggaagtgtcagtactaaggaacttgggccgtttcccacagtcatcacccatgttatgccaactcagtaaatctgtgaacagatgtaaatttcacaacatgaattataaacaatctggtgtttacggtcacggtagcaacaacattctcttttgtaaaaagaaaacaaaaataattttctaatatgcata

SEQ ID NO: 486 - DNA, 6000 bp, Homo sapiens
gtgctcgtgaagagaaaagaggacttttctagtttaatgaatttattaaaactttgaatttttgtagatcattttttagcttagaaatggttgaattagaatgatgtcagaccagctattttgtactgttttatatttggtattattggggaaactagccttaaaataaactgaaaattctaattatcttcaaattatttatgagcacattaatcacaaaaatcactaatttctaatagaaaatttttctaaaaaatagcacaaatgaacttgtaaaatttgtcctattctaccattgagtcttcaatttcattgagataattagcagtcatattatttgaatgtctaccttctcactatgtgtatgtccttaagggaatagtatcatttcatcttacgtcttctgcttctcatagtcatgctgaacatgtagatacaagtaaataatacttacatgtaaatgacaataaatattttatttgaataggaaaatgtgattggaccagtttatgaaaaaaaggtttagttattcaaatatttctcaaagaattaaattaagaaagcctcatacttgtagtatctaatatttaagtagtttttcatcaatatttttatttagtaatttataaagaaaagattaagaaaacattctaatggaagttttttggggaaaaaagtatagccattaattttaagttaatattataaggacagttttgaaacagactttcaaggatttatatttgaataccacctgaattgtctctagtataattggcccaagagggaaaaggaagatagatatactttgtcattaacgtattattaatatctataaatcttttccaatgtgaaggttggtagaaagtaaacagcgccaccgagtggtggtattaaggagctttagtcacttggaaataaataattcgctgctttcttttcaacagttttccatccaattatcttagtaacaacaatcagacttctgtgacacctgtaccatcagttttaccaaatgcgattggttcttctgccatggcttcaacaagtggcctagtaatcacctctccttccaacctcagtgaccttaaggagtgtagtggcagcagaaaggccagggttctctatgattatgatgcagcaaacagtactgaattatcacttctggcagatgaggtgagtattgtgggtatgagaaggaaaatatatcacgaattgacataccttctaatattataacaaaatgcaaattcctcattagttatttggaaatggtttcatagattacagatagttatattaacataaaattttaattaatattctttaatagaatatcatagaaatatttaaaacttttaactgccaaataacttgaagatgtataaaactccctccaataagatcctttatctaggccagacatggtggcttacacctgtaatctcagcacttttgggaggccaaggcagtgggatcacttgaggccaggagttcaagaccagcctgggcaacatagcgacacctcatctctacaaaaaatatgaaaaattagctgggcatggtggtgtgcgcctgtagtcccagctactcaggaggctaaggtgggaggatcgtttgaacacgaaaggtcaaggctgcagtgagccgtgatcatgctgctgcactacagcctgggcaacagagtgagaccctgcctcaaaaaactaataataataaataaatcctttgtttttcagcacaattgataataacgtttaaagtccttttggtgaataatttaaacaaattaaatacaaatctgattggttttctacttgtttatttttttaatgtagttaataactggaagtattttattttgcaggtgatcactgtgttcagtgttgttggaatggattcagactggctaatgggggaaaggggaaaccagaagggcaaggtgccaattacctacttagaactgctcaattaagtaggtggactatggaaaggttgcccatcatgactttgtatttatatacaattaactctaaataaagcaggttaagtatcttccatgttaatgtgttaagagactgaaaataccagccatcagaaactggcctttctgccaataaagttgcatggtaaatatttcattacagaatttatgttagagctttcatgccaagaatgttttcttacaaaattctctttttattgaggtttcactaataagcagcttctacttttgagcctcaacttaaagcagaactgttttctactggatttttcattaacagcaagctttttcttttatgtaaaataaatctattgtgaattgatatcagcgactcatttattaggtataaataatagccaaagaataaaattaaaatttattttaaactttcggtcttaaaaagagctgtaggatataaacctcttttgtgaaaagtagaattttctgaatgctttcatagacaaaaacgcatttaaactatgtttacctggttttccaacagaaatcaaatgattttaatattatgttttgatgggttattttcagagttgtttggttttttaaacactactgaatggtttcttttaaatttaagaacaactagttcttgaaaagcaataccgtatttctctgataaatttgtagttaaggttctagaaaatctaggacaaatttacttcattaaacataaagtttttaagattattcagttggcacaatttaatgcataattgggattggatccatttactgtactgtggtacagtaaagagaatgtgttcttattgaacagcagatttgtatacaaatacggaataatgcaactacattataaattgtatacgaacaaaataaattgggtcactctgagcttactattaaaacattgaaaatttattaatgaacacaggctatcttgatgaggatctctgcttatgaaacacatactaatgaaattattagtgacacattggaagctagaaaattgctgttggggccattgctataaatcattgtttccatgttaagacttctgttctaattcattcattcaacaaacatttgttgagggccagatactgtgctggtcaactggggatactgtcctgaacaatatgcacacagttcttgcccctgcagagcttaaagaccattaaaggatacagaaaattaagcaattatcctatagtaggattcgtggtgtgatggggaaaatacaaggtactgtatttgggagtcatgtaactccagttttgggagtgagagagggtctggggaagaactgttccagataaaaagatgtgtaaccaagatagcatagcacattctgacaactaaagcaatttactctaacttaagcatgaagtacaaaagtatagttcatttattgagggaatgttaagctattaaaatgatactttttggtacttttaaaaaaatgaatacttaaacaccgttttaaaattttgtgttaagagctcctaataagaacttggtaaacatgttgacaatttaactcacagtctaaactttaaaagtagtagttacccttttatttctgtgccatgagacaaattcttctgcagttttatagttgtacaagatgttttgactcactctcaattgccatattcttaaagaaaccctgaaaagctgctcaagctggtcagttttctgtaaaaccaagtaaatgaaattttctctcccctcagaaaggaagttctacagcctagagtaccatctattgtgttttataagtccagatttaggctttgaaagatcataccaaaacttcagatcgacttaaacagcaactatgaattaggtttatgggaaatgtagtaatacaggggaaagaatatcggtaatggagtgaaatggtcctgggttcaaatccagtcttcctcacatattgtgctctttaagcttcaaatgagatgtataactgccttttccttaccagtaaaatgaggacaataattatgacaccatagggtggttgtgaggattagcaaatgttatcttgtatttcaggtgcctttcagggaaaggcttggcacatagtaaacacatcctgtaaatatcagtttccccttgttagcccctgtagcatcctgacctaccaagtctataggccttgcatatcactgtgcaccagagatacctcttttacatctgggctctgttttctctctatcaatcctatcctccaccctctttaaatcagaccccaggtttaaccttcccacagtcagtataaatcatttttcagaactttcagctttccatcaagtgaaagttgattttagttacccagtaatgtacagaaaccttcaataatgttaagcttcaaaggcttctggtacgtttgtctaccacagaaccaccacaatatatatgcttgttcttaggtttattgctttttattttaatggggtttggttgtttgggttttattttggttttggcttattttaaagtcaagtttagtttttactcaggtaaaggcctgaagtttcttgggcgtggaagaaaaagcttgggaagcctattaattcatggtgcagttcagaattgtttaaataagctctgtgccactgagcttaatctgaaagtatagtgacatgtgaaggatgcacatatgaatgaaaaactaaaataattgtaggctcttctataaatgaaaaaaaaagtgattggattgtgtctacctttttcctcaaagtaatctaacctaaacggtcatggtgttaaaactttttatggtgctaatcagaaaaattgatgttgcaagaaatgaggtctcaaaaatgggaatgtgcctcctcactctgcgtcacatgggaaataaatcctgaggccaggatcaccagtggggtagagtcatcttcatagtctcctgttatcctccccctgaacaaagaacaaagtgagactgggaagctagtgttggggaaacatttctgggataaactgtggagtggagaagacaatggagggcaaggcaaaaacccacagacttgtttacccatagaggccccactcacctccatgctgacagaattccagaaaaattccttccctatctcccaaacacctgaaattctgaaatattgccctactatttagcactttaagcttcagtgaggtgctgtaatggagagatagcttcatagtttagcctatagccaactttgcctcaagacctccagataagatgaagtggcttttacctcatgtgagtctcaaacgctggagagagagttccacaaccacccctgccctttctcccatattacgctcattagaaagtctactcagggctgggtgccgtggctcatgcctgtaatcccagcactttggaggctgaggcgggtggatcatctgaggtcaggagttcgagaccagcctggccaacatggggaaaccctgtctctactgaaaatataaaaattagccgggcatggtggcgtgcacctgtaattccagctactcgggaggctgaggcaggagaatcacttgaaccccagaggcagaggctacagtgagccaagattgcaccactgcactccaacctgggtgatagaataagactcttgtctcaaggaaagaaaaaatgtctactcagtagagcagtgattggcaaagtgtgagaccccagaccggcaatattggcatctcctggagacttgtttaaaatgctgattactattttcaagaactttctaccttcatttttacttattttttgttttcaagggctcatggaatcagtcttccatgtgacagctttttaaatattttaagacaaaaactgagtcttctaatcttaattgtgttctagcagtagtcattgtaattatagttatttttataatttatttgtttagtgtatatctgtcactctagaatgtaggctccctgagataaaaactataattcttttgatggcagttacattcccaactcttagcacaagatctaggacatagtat

SEQ ID NO: 487 - DNA, 6000 bp, Homo sapiens
aactagtgagaatataaatataaacgaaatctaacatttgcccctccattgctttggcacagagccatgaacaactccagggcactactcacatagactctgaattgcaccaccatatgaggcatccctgattgtacaaagaagtaactaagtatgggtcacttccaaaaatgggaaatttatacttccactctgaagttttctacttaaaggagtgggttttttgagatggagcctcactgcaatgcccaggctggagtgcaatggtgcaatcttggctcactgcaacctctgcttccctggttcaagcgattctcccacctcagcctcctgagtagctgggattacaggtgcctgccaccatgccgggctaatttttgtatttttaatagagacagggtttcaccatgttggccaggctggtcttgaactcctgacctcaagtgatccgcctgccttggcctccaaaagtgctgggattacaggcctaagcctccgtgcacggtcaggagtgggtttacttaactgtcattagaaacattaggcacaatattatgaaacaaaacaaactttccaccttgcttaaaaaaaaattattagaagcaaatcaatgcagtgtacacgtggcagacactgtgagttgcttacccaaaagctaatctcccctccctgtatttactaagagacccctccccgccaagttttgtccctatgttgtgcagccaagaggcagggcccccttcagagtaccagaggtgatactggataagtaataagatatttcattacccttggcaaagattcatttagtaaaggaaatttgggaaactgtggccaagaagctagaggagaagtcttgctggaggcctttcggggaaaggcttccttgatctacaaaaaggaaatgaggaaaggaaatatccttttccctcctttcagtctttagccattattgtgtgtggatgtgatacttggagcctctgcagccatcttgggactgaacttgtaaagtttccatagtgaaacatattgatatgttttggatatttgtcccctccaaatctcatgttgaaatgtgatccccagtgtcagaggtggggcctggtgggaggtgttttgatcatggggacaggacggatccctcatgaatggcttagtgccgtcttcttggcgatgagtgagttcacacctgacctggttgtttaaaagtgtgtggcacctccaccctctcttgttcccactttcaccatgtgatgtgcctgccactgctgcacctttcaccatgactgaatcctacctgaggcctcaccaggaagccaagcagataccagcgccatgcttgtacagcctgcagaactgtgagtcaactaaacctcttttctttataaattacccagcctcaggtatttctttataatgacacaaaaatggcctaacacacatagctatctctagctctatagattagatagattagatagggatagcccaaagaaaccttggagatcaccaaattcaattgcctcatttatttttattatttttgttccatgttgtttggtttattaatattccccaatggaaatcacaactattaaaccaaccattatttttggaaagtcgtgataaacatgaatacaatacgattatttaattaggtgtcattttagagatagaagcttaaaatatgacccctttatgtaataattgccaaaataatatcctaccagaattaattcaatagcatgggtagcttatttctagaatattttaaaaactgaaccaaagcttactaagatgggtgaatttaatacaatgtttttagctttgtcaaagatagtacaatttagcacaaactaaaataaaaatttactgtttgctctatgctgcatcctatgttatcaaatagcttgactcaaattacttgactcaaatagcttcatacagttctcacaacaactcaggtaaacactgtcatcaaacccattttgtggatgaggaaattgaggataggcaaggttaaatagcttgctcaagatcacagagctagcagtagaaaagctgggatttgcagtaagtagaaaagctgggatttgcagtctgatttgctcaagctctgaaccactgcagttttctgcccaagaatgaatacaacttattcatggttgaggcatgtggcaaacactgttggatgcctacttagcaactatttccccttttctgctctcagtcagaacactcattttgtttaggggtgacttgtgatcaatttaatgaactgtggccaatcctatctctttttgccagtgactggtctgatgtggcatatgaccattttctggacaataaggaagattctaaagtctgggaaatatttttctccttcataaaaatgggggacagcacttccttttcttccgttcctgctctgtgcagtgacctctgtggatgtgatgtctggagctatggcagccacattgcaattaagaggtgacaaacctggagacaaaagctcacatgcatgtgatggcagagagcaaacacaaaaaagagcttgggtccttgatgacatgattgtactgctcaactaaccctgaaactatctgcacttgaaatttatattgaagatatagtaaatgacctcatgctttaagctactgccaaatattctgttccttgaggccaaaggcattctaacagatgcaatctagacacagaaagatgttttcccagagttcctgcaaaaacagatgatgtgtaggttatggagattttatccaggaatccattagtataggtagtagtttagaaaaaaaatactccaagctttgtctcagatatggttaaatctgagccatccacatggtgtctgtgctgaatattttcccctcagatgcactgtttccttttctgaaactgactgatatgaactatatcaaaagcctcccttgccctctggcgtctggttggacttggccattgacaagcaccagcaggagactggaggagggtggtgagttagatataaatcccccaggtcctttgctgggtgtttacttaggctgactgcatccgttgactgaaggtcacagactcctgtcaggtggccctgtgtgtctggatttttcggtaactgttctttcccgattggacagatctaggagctgtagcctcagggttccagcttctcttgtggtttcccacaccctgcccacatctttgcaaaatgccatttgtttcctgccaggaccctgactgatacaatggtgtcaacgaaatcactgcagctattgaagcttggtccagtctatctgaggtgtggagttttataagggctttcacctactattaaagggagacaggagactacacaaataaatgtcatgctgcaaaagtgaaacaaagatcatagctcagagaaaacactttccacttgagggcaagaaatcagagaaagctacctggaagagccggcatttgggatgaggacggataggagttttaaaagagatgagatgaagggcattccaaagacagggaagagtgtaagtcaagccggggaagagagaaagctcaagtgaaatttctgaaaaattagagctggaagggatctacgatatcttttatttaatgttcgttctcccttcacctcctttaactgagatttggccaaggtcaaacagcaagtaagtagcatgtcaggactccaaccagatctgctggctaccaggttagttcttaataatccaccttctacctccaccccactccctcacctcaggcagtctgcttacttctcagtctctcccactagactgtaacctcctcaatagcggggcttctgttttcttcacccttgaatcccagtacctagcacaatatctaacacaaaatcgtcatcgtcatcagcagcagcagcagcagctaccaaactttaagaggcaaccacccactgtcaggcactatgcagttattttgtacatcttctgtaatcttcacttttcactgaggacgctgcggctcagagaggttgtctaatttgtcttaggtcatacagcagtgccggactctattttataatatctttcatcaaccggactccgaagccctgcctcaatgggcgttcagtaacatctgttgaatgaacgaatgaacaagcaatatccactcaatgcaaactatcggctgtaacaggccaccctaaaggccccggaacctcggccggctcaggactccgcacgttgtcttccaatctaagcacaccggcccctctctgcgccccgcacaggctcagaggctccgcccgcgtctccgcctaactcgccggccacgcccccacttcggggagctcggtccctctcggattcgagttttcctcggctccagccgccgcgcagagggcctctcccggccctgcgacctacagccccttccactcccctgcccctcctctgcgccctccctcactctccaaacttcttttttccaccctctctaaacttcagtcattctagtgcccgcctcctccactcgcaccgaccaaccagtggtccccattctcgttggcggtccgcctcctgcccgccgggggccaatccctggcgcgagagtccagggccggggctcgttcccaagcgcccagcctgtgacggcagcgcgccgggcgccgcgcggcgggagggggcggggctctggatgagggatgggcgagggccgggggaagggaaaagggaggaggaggaggttgcggctggtttgaaagcggcagtttcctggcagcttgggcaggcgttggtctccgcgctacagctccgcagcggccacgatcgatcccgcgacgggtctacgcgcgcttctgcgcgccccccacggatttttcccgttcccggctcttcccccttcacctccccgcccccccgcctcagcctttcccgccgctcgggcgctgagcccagggaccagccggcggcagtgaccccgcccgaagccccttctggaacctcctggggacaattcccttttcctttcttcagcctaacccgcggtggccctcgcggagtccggtcagccccggggagcgcagccgggaggggcgtccaaggggcgtctcgcgtctgggaacggccgggcccccagcgggctgtggtcgcggggtgggggccggagcggcgaggccccccttaccgggctgcgcgggccgcccagggcccccgggctgagacggggccggagcggcgccccggccgcccgcgcggggtctcccccatggtgcagcggggttcgggatgtcgaagacgctgaagaagaagaagcactggctcagcaaggtgcaggagtgcgccgtgtcctgggccgggcccccgggcgacttcggcgcggagatccgcggtggcgcggagcgtggcgagttcccctacctggggcggctccgcgaggagcccggcgggggcacctgctgcgtcgtctcgggcaaggcgcccagcccaggcgatgtgctgctggaggtaaacgggacgcctgtcagcgggctcaccaaccgggacaccctggctgtcatccgccacttccgcgagcccatccgtctcaagactgtgaaaccaggtacgccggccctgcgtatctgtctcggggtgttggggagaggggcttcagggtgggcgtcctgggagcggcggcacctccccaccgcgtattgtcccgggtaatcttagacctctagggtgtgccagactccttgacgagggggaggggtggcgttggtgagtcccattttgccgaagggaaaactgagctctggcttggcgcggttgctctgctagctgtgctagctgtcacagaattgcgactagaagctgggtttcctacatttgtagctccatctccccccgcagacaagagtttttgactagagaaggccagccttttcctgtgttgtgcaaaaaggcccttaggattgtaacattttctttggaacgatcttacgcatcttctaacagggaa

SEQ ID NO: 488 - DNA, 6000 bp, Homo sapiens
caacctctgcttccctggttcaagcgattctcccacctcagcctcctgagtagctgggattacaggtgcctgccaccatgccgggctaatttttgtatttttaatagagacagggtttcaccatgttggccaggctggtcttgaactcctgacctcaagtgatccgcctgccttggcctccaaaagtgctgggattacaggcctaagcctccgtgcacggtcaggagtgggtttacttaactgtcattagaaacattaggcacaatattatgaaacaaaacaaactttccaccttgcttaaaaaaaaattattagaagcaaatcaatgcagtgtacacgtggcagacactgtgagttgcttacccaaaagctaatctcccctccctgtatttactaagagacccctccccgccaagttttgtccctatgttgtgcagccaagaggcagggcccccttcagagtaccagaggtgatactggataagtaataagatatttcattacccttggcaaagattcatttagtaaaggaaatttgggaaactgtggccaagaagctagaggagaagtcttgctggaggcctttcggggaaaggcttccttgatctacaaaaaggaaatgaggaaaggaaatatccttttccctcctttcagtctttagccattattgtgtgtggatgtgatacttggagcctctgcagccatcttgggactgaacttgtaaagtttccatagtgaaacatattgatatgttttggatatttgtcccctccaaatctcatgttgaaatgtgatccccagtgtcagaggtggggcctggtgggaggtgttttgatcatggggacaggacggatccctcatgaatggcttagtgccgtcttcttggcgatgagtgagttcacacctgacctggttgtttaaaagtgtgtggcacctccaccctctcttgttcccactttcaccatgtgatgtgcctgccactgctgcacctttcaccatgactgaatcctacctgaggcctcaccaggaagccaagcagataccagcgccatgcttgtacagcctgcagaactgtgagtcaactaaacctcttttctttataaattacccagcctcaggtatttctttataatgacacaaaaatggcctaacacacatagctatctctagctctatagattagatagattagatagggatagcccaaagaaaccttggagatcaccaaattcaattgcctcatttatttttattatttttgttccatgttgtttggtttattaatattccccaatggaaatcacaactattaaaccaaccattatttttggaaagtcgtgataaacatgaatacaatacgattatttaattaggtgtcattttagagatagaagcttaaaatatgacccctttatgtaataattgccaaaataatatcctaccagaattaattcaatagcatgggtagcttatttctagaatattttaaaaactgaaccaaagcttactaagatgggtgaatttaatacaatgtttttagctttgtcaaagatagtacaatttagcacaaactaaaataaaaatttactgtttgctctatgctgcatcctatgttatcaaatagcttgactcaaattacttgactcaaatagcttcatacagttctcacaacaactcaggtaaacactgtcatcaaacccattttgtggatgaggaaattgaggataggcaaggttaaatagcttgctcaagatcacagagctagcagtagaaaagctgggatttgcagtaagtagaaaagctgggatttgcagtctgatttgctcaagctctgaaccactgcagttttctgcccaagaatgaatacaacttattcatggttgaggcatgtggcaaacactgttggatgcctacttagcaactatttccccttttctgctctcagtcagaacactcattttgtttaggggtgacttgtgatcaatttaatgaactgtggccaatcctatctctttttgccagtgactggtctgatgtggcatatgaccattttctggacaataaggaagattctaaagtctgggaaatatttttctccttcataaaaatgggggacagcacttccttttcttccgttcctgctctgtgcagtgacctctgtggatgtgatgtctggagctatggcagccacattgcaattaagaggtgacaaacctggagacaaaagctcacatgcatgtgatggcagagagcaaacacaaaaaagagcttgggtccttgatgacatgattgtactgctcaactaaccctgaaactatctgcacttgaaatttatattgaagatatagtaaatgacctcatgctttaagctactgccaaatattctgttccttgaggccaaaggcattctaacagatgcaatctagacacagaaagatgttttcccagagttcctgcaaaaacagatgatgtgtaggttatggagattttatccaggaatccattagtataggtagtagtttagaaaaaaaatactccaagctttgtctcagatatggttaaatctgagccatccacatggtgtctgtgctgaatattttcccctcagatgcactgtttccttttctgaaactgactgatatgaactatatcaaaagcctcccttgccctctggcgtctggttggacttggccattgacaagcaccagcaggagactggaggagggtggtgagttagatataaatcccccaggtcctttgctgggtgtttacttaggctgactgcatccgttgactgaaggtcacagactcctgtcaggtggccctgtgtgtctggatttttcggtaactgttctttcccgattggacagatctaggagctgtagcctcagggttccagcttctcttgtggtttcccacaccctgcccacatctttgcaaaatgccatttgtttcctgccaggaccctgactgatacaatggtgtcaacgaaatcactgcagctattgaagcttggtccagtctatctgaggtgtggagttttataagggctttcacctactattaaagggagacaggagactacacaaataaatgtcatgctgcaaaagtgaaacaaagatcatagctcagagaaaacactttccacttgagggcaagaaatcagagaaagctacctggaagagccggcatttgggatgaggacggataggagttttaaaagagatgagatgaagggcattccaaagacagggaagagtgtaagtcaagccggggaagagagaaagctcaagtgaaatttctgaaaaattagagctggaagggatctacgatatcttttatttaatgttcgttctcccttcacctcctttaactgagatttggccaaggtcaaacagcaagtaagtagcatgtcaggactccaaccagatctgctggctaccaggttagttcttaataatccaccttctacctccaccccactccctcacctcaggcagtctgcttacttctcagtctctcccactagactgtaacctcctcaatagcggggcttctgttttcttcacccttgaatcccagtacctagcacaatatctaacacaaaatcgtcatcgtcatcagcagcagcagcagcagctaccaaactttaagaggcaaccacccactgtcaggcactatgcagttattttgtacatcttctgtaatcttcacttttcactgaggacgctgcggctcagagaggttgtctaatttgtcttaggtcatacagcagtgccggactctattttataatatctttcatcaaccggactccgaagccctgcctcaatgggcgttcagtaacatctgttgaatgaacgaatgaacaagcaatatccactcaatgcaaactatcggctgtaacaggccaccctaaaggccccggaacctcggccggctcaggactccgcacgttgtcttccaatctaagcacaccggcccctctctgcgccccgcacaggctcagaggctccgcccgcgtctccgcctaactcgccggccacgcccccacttcggggagctcggtccctctcggattcgagttttcctcggctccagccgccgcgcagagggcctctcccggccctgcgacctacagccccttccactcccctgcccctcctctgcgccctccctcactctccaaacttcttttttccaccctctctaaacttcagtcattctagtgcccgcctcctccactcgcaccgaccaaccagtggtccccattctcgttggcggtccgcctcctgcccgccgggggccaatccctggcgcgagagtccagggccggggctcgttcccaagcgcccagcctgtgacggcagcgcgccgggcgccgcgcggcgggagggggcggggctctggatgagggatgggcgagggccgggggaagggaaaagggaggaggaggaggttgcggctggtttgaaagcggcagtttcctggcagcttgggcaggcgttggtctccgcgctacagctccgcagcggccacgatcgatcccgcgacgggtctacgcgcgcttctgcgcgccccccacggatttttcccgttcccggctcttcccccttcacctccccgcccccccgcctcagcctttcccgccgctcgggcgctgagcccagggaccagccggcggcagtgaccccgcccgaagccccttctggaacctcctggggacaattcccttttcctttcttcagcctaacccgcggtggccctcgcggagtccggtcagccccggggagcgcagccgggaggggcgtccaaggggcgtctcgcgtctgggaacggccgggcccccagcgggctgtggtcgcggggtgggggccggagcggcgaggccccccttaccgggctgcgcgggccgcccagggcccccgggctgagacggggccggagcggcgccccggccgcccgcgcggggtctcccccatggtgcagcggggttcgggatgtcgaagacgctgaagaagaagaagcactggctcagcaaggtgcaggagtgcgccgtgtcctgggccgggcccccgggcgacttcggcgcggagatccgcggtggcgcggagcgtggcgagttcccctacctggggcggctccgcgaggagcccggcgggggcacctgctgcgtcgtctcgggcaaggcgcccagcccaggcgatgtgctgctggaggtaaacgggacgcctgtcagcgggctcaccaaccgggacaccctggctgtcatccgccacttccgcgagcccatccgtctcaagactgtgaaaccaggtacgccggccctgcgtatctgtctcggggtgttggggagaggggcttcagggtgggcgtcctgggagcggcggcacctccccaccgcgtattgtcccgggtaatcttagacctctagggtgtgccagactccttgacgagggggaggggtggcgttggtgagtcccattttgccgaagggaaaactgagctctggcttggcgcggttgctctgctagctgtgctagctgtcacagaattgcgactagaagctgggtttcctacatttgtagctccatctccccccgcagacaagagtttttgactagagaaggccagccttttcctgtgttgtgcaaaaaggcccttaggattgtaacattttctttggaacgatcttacgcatcttctaacagggaaaaagggactttactatagaggcacttggtgccaaggttaccacctggtgtacctggaagggcttagctgcttcagtgtttcttgcactctagcagacatctcagagctgacagcctaactctgtcagtccaggtggttcaggtgtctgagtaccgatgacggtacaatatgtgatatgtggcagactggtgtgttcttgcagggagctgttgaatagagtctgggttttgcaggaagacctaggtgcctagcggagtgaaagcttctgtaacgcttttgatttta

SEQ ID NO: 489 - DNA, 6000 bp, Homo sapiens
tggtagaagttggttattgccatggcaacagtaaactgacatggcacactggtgagcatgttttatggaaagctgcttccacctatctctgttttagctagtcctcaatttggtccagtgtccaagccccacctccagagtcaagttccacctcctacttcagtgccaccctaaaacatgcctttttaacatatggtttttttttgagcaaaaggccatcatgaaccagcagaggcagtaaaagctttaaaaacatggcacaatatttttcttttgtaaagaaaatttacaatttctgaagaaaatagccgtttgtaaaaggtatctccctctcctgtatcaggaagaggaggactcttaacaactcttatcaatggagaaggcattggcttcaatctgcataacaaaccttactaaacacatcttgttgtttggcacacttttcctggtcattgggtaacttgcctccccaacctagaagccccaaatcgctttttctttgtttagtctaatatactctataagtccaagttctaacatccctttgggttactcaccactgggtgctcccatgtttatgagggatacacatcttaatcaacttcaatgtgcctttcccttcttaacctgtcttttcccagtctggtttacagggctccagccagagaacctaagacaagaagaggaaaaagattacttttcacctctcctacaattgggacctgtttttgtcatattccacagcttgtctatatcatgatttacttaaccaatttccttctcttagacatttaaattgtttccaattttgtctttaaaatactgcagcatataaatttatagccaagtctagtacatagccttcattatttccttatgataaaatcatccttgtggatttgttagaaatccacaaatgtttgatactctaattcacactgacaaattgcccaccagaaactatacctacttgcaattctcctggccatatacaagaatgcccatttacaccatcatcaacactatgttttcatttttcaaatgaagatgaaaaatgcatctatgttaaaactgacatttctttattaataaatagaaataaaatttttcttttgtggattgctccttttatgactttgacccattttagttttaaggtgtctatcttttctatgtttacaagaaaaatttaatactaaaaatttaatgttggccaggcacggtggcccacacctgtcatcccaacactttgggaggccaaggtgggaggatcacttgagcccaggagttcaagatgagcctgggcaacatagtgagaccccccgtctctacaaaaaataaaaaaattagccaggcatggtgccacatgtctgtagtcccagctactcaggaggctgaagcaggaggatcacttgagctcaggaggtcaaggctgcagtatgctgtggtgctgtggtcataccactgcactccatcttgagcaacagagcaagaccctgtctctaaaattaaaaaaaaattgttatgcctttgtcatgtatcttgcaagtaatttgctccttttagtacgttgtctttaatttttttatggctttttacatagaaagttttcacattttacagagtcaaatctactgacctctttctttttcattgtttctgcccttgaagccatgctcatcactcagaattgaattagttttagaggagcaaaattaatgtttcaaatagaggaacagaaagctgctcttcacatgctccatgaggaaagtgtgaggaagagaggacaagcgccctccaaagctgagatgggtcagaggatggctggcgccaccttctctccaccaggccttgacacactggagttggatggcagctggtgggtcagccactcacaaacaggaagctccatgctgctcctctgggttggcgatacttttgaaaaaatacgtgtgccctaagcatcctttcttaaaaagacattttttattaacaaaaaaggtgcttatttccaaaattttaaacttcacagaaataaataaaatgtgaaagaaacataaaatcctgggaccccaattcattatgccaaaaggaaaaattaagctgaaagttgagtcacacaagaaactgcctttccttgagttcctaagcagagagttacagataaaaagctgctgtctccacgggtagctactctatgttcaccttatcttaagaaagtgccaatttactgagcatgagaagaatacaaattgaccattcccctacctactttttttctcttgcaacatatggattcagtaatgtgactgtaccctccctccttcccctctggccagcttttccccttaactgaaggttttgaaataatcttgagaaaaaggcacaaaccacagatttttcctgtggttctgtgttcctttttgtccctaatgttgatgaaataaacttctaaattgattgagatctgtctcaaattctttttggtttacaaaggtaagaagtgaaaatttcatttcagttctctcacaatctaatacctgaaagacaagcactgtaaaaaaattcagcatcaaccctttcaggcttttttccaacacataccttaataacaacatagtatgctatggtatactggtatacccatagcatagtataaacatagtatcatatataaaaaggactaatcctatagatattgttttgcaatgtgctcttttcatgtgatttaccaaaagcatctttccatgtcttacttttaggcctatgttatactattttgatggttatacaatatttcataatatggatataccataattttagttgtttgcaattttttattacaaaaatgctacaacaaacgtccttgaacagaattttaaaacatctgtgcaatcatttctgtgggatagatttctcaaattaaaatcactaggtgagaaaaagacataaattttaaagtttggtggaaatgataaattcctttccccagaaggtattgatttacattccctctgatgttgtatgagggttcatttctccacacactcatgttaataatgtaaattatcatcttttctaattttaccaatctgatggtgaaaaatggtattttatagctaagatatatacatatatttttggtcacattagactcctcttgtaggtttgatatttcttctgcgaaatatttcttctgcaagctgatcatttatatcatttgcccattttaaaaactactttgtattgattggtaagaattattggtaagaatattttgaatattaataattttatatatattgcaaatattttgtcacgccttttcattttgttccttatttcttcatctgcatgtaaatcttacttctttatatcatcagttgtgttcatcttttctttcttactttggattatatgttatatgtagccaggccttccatactcaaactataggaatatctttctatattgtccttttagcattattgttattattttatttatttagttatttattttgagacagagtctcactctgctccccaggctggagtgcagtggcacaatcctggctcactgcaacctccgcttcccagattcaagcaatttgcctgcctcagcctcctgagtagctgggattacaggcgcacatcaccacacctggctaatttttgtatttttagtagagatgggtttcaccatgttggccaggctggtcttgaactcctgacctcaggtgaggaggtccgcctcgacctcccagagtgctgggattatagctgtgatccaccacccccggcctccttttagcattattatagtatttttgcatttaaaactttaatccaactgtagttcattattgtggatgacgctcatacaaccatgaggtaaatatttggctttcttttacccagtaacagcaaacaactgctttgacttaatttcatttccttggcaactttctgacagataatatccatatttgtacttaaagttgaaaaagaaaacgagcaccacttttgcaatttttactcactgtgacctaaagaattataaccctgaaaatgtgctttggaagtctgtcatggttatttctctttttaggcatcttttcagggcacacccgtctctgcatcactgtctgtttccttgtgtcacaaatttctgttctttttttctctccctgttccctctcatttattttttctcctaatctctcctttttcttaaccacctataatgttaatcactttaaatgcttttgactcctttgttttggtagtttaattatatttcatagtctctatgcttctttgttttggaataagtttttatttatctaactgtgaatttcactagagttgtaaaatgtatgccgaacataggatttggggattgcaagcatttacagctgatattcaatttctttcttttcaccacaaaaacgattttagaacatgaaaaatatctttggagaaacaaaaaaatcaatttcctcatcattttatgggtctacatttttcaatataatcatatgggataaatgtttgcattctgctattggcttgtgaacatttacctatatttctatgtggtcttgttagggacagtatacctaagtggataaaaggctgtgtggttgaatttggcttcttgtttacaaaagagtgatccttagtgatctacttagcctctctgttccttttctctttcactgagatgagaaaacctatccttcccaatttttttgtgtgagaattaaaatgcagcaagaaaacacacactcataaacacatctgctttggcaaaggagcacatcagaagggctggcttgtgcgcgctcttgctctctgtgtatgtgtattatgttttatgttactgtaaaagatgtaaagagaggcacgtggttaagctctcggggtgtggactccaccagtctcacttcagttccttttgcatgaagagctcagaatcaaaagaggaaaccaacccctaagatgagctttccatgtaaatttgtagccagcttccttctgattttcaatgtttcttccaaaggtaagcataagagtcaaagaagtcccaacccagctttccctgaaagtgactctcagtaactcttttgctttttataggtgcagtctccaaagagattacgaatgccttggaaacctggggtgccttgggtcaggacatcaacttggacattcctagttttcaaatgagtgatgatattgacgatataaaatgggaaaaaacttcagacaagaaaaagattgcacaattcagaaaagagaaagagactttcaaggaaaaagatacatataagctatttaaaaatggaactctgaaaattaagcatctgaagaccgatgatcaggatatctacaaggtatcaatatatgatacaaaaggaaaaaatgtgttggaaaaaatatttgatttgaagattcaaggtaagtgttcattcccttaattgctttatttcagtgtgggtgctatttggcaagttggaaaatagcatttctaatattccccagcgctgacctctgcctccaggggggctatacaggaaaccagatgcatgtctcctgccccagtggagactgtggtccaatgcgggaatgggatccacacatctgatagaccctcaagtctacctgcctacaactctgtcttcaggtggttacaggaatgtggggttgggtgaagaacctggattaaggtggcattaatcgggagggggacacaggtaggccgagggaaaaggcaactgttccaggttgctgatgaatcggcgagctaagagtggggcgagaagaagaggctgactggagagcagcgggcctttcatcgacagagcccatttcaagccaggctgccctgaaggaggagttatatggcagaaaagggctggaaacaacatatttaaggatgaacagcccttattttggatctgcttgtcagagtgatacaaggtggcaggtgatt

SEQ ID NO: 490 - DNA, 6000 bp, Homo sapiens
cccacccgaactgatcaatgtactttgtaatctcccccacccttaagaaggttctttgtaattctccccacccttgagaatgtactttgtgagatccacccctgcccacaaaacattgctctcaacttcaccacctatcccaaaacctgtaagaactaatgataatccatcaccctttgctgactctcttttcggactcagcccgcctgcacccaggtgaaataaacagccatgttgctcacacaaagcctgtttggtggtgtcttcacacagacgcgcatgaaacacatctctactaaaaatacaataatcagctgggcgaggtggctcacagctgtaatctcagcactttgggaggccgagacaggcaggtcacttgaggccatgagttcgagaccagcctggccaacatcgtgaaaaccccatctctaccaaaaatacaaaaactagccagatgtggtggcgcacgcctgtaatcccagctactcgggaggctgaggtaccgaatcgtctgaacgtgggaagtggagcttgtagtgagccgagatcgccccactgcactccagcctgggcaacagagctagactgtctcaaaacaaacaaaaaatggtgtcaagactctcagacgagattctaatggattaaggcctatatgtaaatagcaccaaagactatggaacagagatgggagaagcaagcagggaggcaggaatagtttagctgtggcagttttagcttagtccacttacataaatggttctttagggtagcacgtggagcatcctcatttccaaacattggactgagagtagagagctgtgcaaaataaccacaagtccccaactatgccctcttaattatccctatcatctaagactgttgttcccatccatcactgaacttccccgtcctcttccttcaacccctgtgttagtcaatggttgaaattttgatttggtaaaaaacctctggcgaaaaccagcaaaaagggctcacaaatcaggtctcagggaagcacagaggtagccacgagaaggcccgaggtgctcatggaaagagctcgagcccaggagctctgggaggaccccaggcgctcggagccgccgttacgtaaccggcactcagagcctccgaagaccggaaggccccgctcaggccccggctcaggccccggccccggccccggccccggccccgccccggcccggccgggcagctggtaggtgccgtgcgcaaccctccggaagctgccgcccctttccccttttatgggaatactttttttaaaaaaaaagagttcgctggcgccaccccgtaggactggccgccctaaaaccgtgataaaggagctgctcgccacttctcacttccgcttccttccagtaaggagtcggggtcttccccagttttctcagccaggcggcggcggcgactggcaatgtttggcctcaaaagaaacgcggtaatcggactcaacctctactgtgggggggccggcttgggggccggcagcggcggcgccacccgcccgggagggcgacttttggctacggagaaggaggcctcggcccggcgagagatagggggaggggaggccggcgcggtgattggcggaagcgccggcgcaagccccccgtccaccctcacgccagactcccggagggtcgcgcggccgccgcccattggcgccgaggtccccgacgtcaccgcgacccccgcgaggctgcttttcttcgcgcccacccgccgcgcggcgccgcttgaggagatggaagccccggccgctgacgccatcatgtcgcccgaagaggagctggacgggtacgagccggagcctctcgggaagcggccggctgtcctgccgctgctggagttggtcggggaatctggtaataacaccagtacggacgggtcactaccctcgacgccgccgccagcagaggaggaggaggacgagttgtaccggcagtcgctggagattatctctcggtaccttcgggagcaggccaccggcgccaaggacacaaagccaatgggcaggtctggggccaccagcaggaaggcgctggagaccttacgacgggttggggatggcgtgcagcgcaaccacgagacggccttccaaggtaagggggttcattaatcgccaaggcctcactcccttttttccatctctccccggactcacccgccaagggtgggttggaaaccgaaacgagtcagtgttgaaacgtgtctcatcctattcctgaagccagaatattctggccatgagtcattgtttccgcccatcttgattcttttggaaatggcagctcttgttcaaagaccggaaagggtgggatgtcaatttcaagtggggtcaacctgagttctgtaaatcccagtagcgattttcccgccgcgggtgggcaggcgaatcttgcgccggtttagacaaaggaggccgtgaggacctgcatgcttttctttctcaggcatgcttcggaaactggacatcaaaaacgaagacgatgtgaaatcgttgtctcgagtgatgatccatgttttcagcgacggcgtaacaaactggggcaggattgtgactctcatttcttttggtgcctttgtggctaaacacttgaagaccataaaccaagaaagctgcatcgaaccattagcagaaagtatcacagacgttctcgtaaggacaaaacgggactggctagttaaacaaagaggctgggtaagtttgccttaaggatgaaaggggccttggagtggaagtagaatgaaggattttttttagagaggtggggatatctaaaggtttttatgacgcacggctgtttgcaggctctaactaaaggaccattgtttatttgatgttgatttaagtagtggatccttagagatagtggtatggcggtcttgaattgtatcaaaaatcttggttttctctaggcaattttttgttccaattcagttgaatactcttcagtggattcaaaccatgaaaaaataagtcaccaggggaggatagctgaaataattcctaaggcggtgcctgttttaatggagaagatatggggtggagcctgcgttttaaacaaacccagatctgatgcaggatgtacttaactacgttgagaaaaactgatctgcgcaattgaggcgttactgaaatattaggtggtggagatttgagaataagggttttcgtcttttacctcatgggaactctggaagtccttttgttaggataaatcctaataagaccaagatagtactgtaaaatgaagtttaattatcatgggtccccgcttaagaaactgaagaacttattttctttttttgccccggggtgaataataattggtttactattgctttagggggaaaccttagatattttaatttaccttctctctggatagtagtgttgtaagagagcagaaacccatacttgaaaatgtgcttttcttttttgttttctaggatgggtttgtggagttcttccatgtagaggacctagaaggtggcatcaggaatgtgctgctggcttttgcaggtgttgctggagtaggagctggtttggcatatctaataagatagccttactgtaagtgcaatagttgacttttaaccaaccaccaccaccaccaaaaccagtttatgcagttggactccaagctgtaacttcctagagttgcaccctagcaacctagccagaaaagcaagtggcaagaggattatggctaacaagaataaatacatgggaagagtgctccccattgattgaagagtcactgtctgaaagaagcaaagttcagtttcagcaacaaacaaactttgtttgggaagctatggaggaggacttttagatttagtgaagatggtagggtggaaagacttaatttccttgttgagaacaggaaagtggccagtagccaggcaagtcatagaattgattacccgccgaattcattaatttactgtagtgttaagagaagcactaagaatgccagtgacctgtgtaaaagttacaagtaatagaactatgactgtaagcctcagtactgtacaagggaagcttttcctctctctaattagctttcccagtatacttcttagaaagtccaagtgttcaggacttttatacctgttatactttggcttggtttccatgattcttactttattagcctagtttatcaccaataatacttgacggaaggctcagtaattagttatgaatatggatatcctcaattcttaagacagcttgtaaatgtatttgtaaaaattgtatatatttttacagaaagtctatttctttgaaacgaaggaagtatcgaatttacattagtttttttcatacccttttgaactttgcaacttccgtaattaggaacctgtttcttacagcttttctatgctaaactttgttctgttcagttctagagtgtatacagaacgaattgatgtgtaactgtatgcagactggttgtagtggaacaaatctgataactatgcaggtttaaattttcttatctgattttggtaagtattccttaggtttttctttgaaaacctgggattgagaggttgatgaatggaaattctttcacttcattatatgcaagttttcaataattaggtctaagtggagttttaaggttactgatgacttacaaataatgggctctgattgggcaatactcatttgagttccttccatttgacctaatttaactggtgaaatttaaagtgaattcatgggctcatctttaaagcttttactaaaagattttcagctgaatggaactcattagctgtgtgcatataaaaagatcacatcaggtggatggagagacatttgatcccttgtttgcttaataaattataaaatgatggcttggaaaagcaggctagtctaaccatggtgctattattaggcttgcttgttacacacacaggtctaagcctagtatgtcaataaagcaaatacttactgttttgtttctattaatgattcccaaaccttgttgcaagtttttgcattggcatctttggatttcagtcttgatgtttgttctatcagacttaaccttttatttcctgtccttccttgaaattgctgattgttctgctccctctacagatatttatatcaattcctacagctttcccctgccatccctgaactctttctagcccttttagattttggcactgtgaaacccctgctggaaacctgagtgaccctccctccccaccaagagtccacagacctttcatctttcacgaacttgatcctgttagcaggtggtaataccatgggtgctgtgacactaacagtcattgagaggtgggaggaagtcccttttccttggactggtatcttttcaactattgttttatcctgtctttgggggcaatgtgtcaaaagtcccctcaggaattttcagaggaaagaacattttatgaggctttctctaaagtttcctttgtataggagtatgctcacttaaatttacagaaagaggtgagctgtgttaaacctcagagtttaaaagctactgataaactgaagaaagtgtctatattggaactagggtcatttgaaagcttcagtctcggaacatgacctttagtctgtggactccatttaaaaataggtatgaataagatgactaagaatgtaatggggaagaactgccctgcctgcccatctcagagccataaggtcatctttgctagagctatttttacctatgtatttatcgttcttgatcataagccgcttatttatatcatgtatctctaaggacctaaaagcactttatgtagtttttaattaatcttaagatctggttacggtaactaaaaaagcctgtctgccaaatccagtggaaacaagtgcatagatgtgaattggtttttaggggccccacttcccaattcattaggtatgactgtggaaatacagacaaggatcttagttgatattttgggctt

SEQ ID NO: 491 - DNA, 6000 bp, Homo sapiens
atcacgaggtcaggagatcgagaccatcttggctaacacggtgaaaccctgtctctactaaaaatacaaaaaattagccaggcgcctgtagtcccagctactcgggaggctgaggcagaagaatggcgtgaacccgggagacggagcttgcagtgagccgagatagcgccatggcagtccggcctgggtgaaagagcaagactctgtctcaaaaaaaaaaaaaaaatacaaaaattagctgggtgtaatggcacgcgcctgtagtcccagctattcaggaggctgaggccgaattgcttgaacctgggtggtggaagttgcagtgagccaagaccgcgccattgcactccaacctgggcggcagagcaaggctccatctcaaaaaaaaaaaaaaaaaaaaaaaaaaaaggccgggcgcagcggctcacatttgtaatcccagcactttgggaggctgaggcaggtggatcacaaggtcaggagtttgagaccggcctggctaacatagtgaaaccctgtctctactaaaaatacaaaaattagccgggcatggtggtgcgcacctgtagtcccagctacttgggaggctgaggcaggagaaacggttgaacccaggaggtggaggttgtggtgagccgagattgtgccactccactccagcctgggcaacagagcaagactccgtctcaaaaaaaaaataagtaaaataaaataaaataaaatgtatttgaaactgggtgtggtggctcatgcttataatcccagctattcaagaggctcaggtgggaggatcccttgaggacaggagttgtagaccatcctggataacatagcaagactttgttactttctttctttttttttttttgagacagagtctcgttctgttgcccaggctggagtgcagtggcacgatctcggctcactgaaagctctgcctcccggattcatgccattctcctgcctcagcctcctgagtagctgggactataggcacccgccaccatgcccagctaatttttcgtattttttttttagtagagacggggtttcaccgtgttggccaggatggtcttgatctcctgacctcgtgatctgcccgcctcagcctcccaaagtgctgggattacaggcgtgagccaccgtgcccgaccaagacttgtttcctaacaaacagggccagttgcaatggctcatgcctataatcctagcactttgggaggccaaggagggcagatggcttgaggccaggagttcgagattggcctggacaacatggtgaaaccccatctctacaaaaaaacacaaaaattagccaggcatggtggtgctggcctgttgtcccagctacttgggaagctgaggtaggagtatcactttagctcaggaggtcaaggttgcagtgagccgagactgcaccactgcactccagcctgagcaacatggtgatacccgtctcaaaaaataataataacaaataatgaataaatgcaatttattttaaagtgaaacttgcatttccttttttagcctctgtacaaggaaaaatcattgctcctcctatttcctcaatctctttccactttaccacctgataaaattttactttataaagcatgagagcaaagctacctcctccataacactttcctctagctctctcagcccaaagtgaatttcccaacctcttaactccaaaatgaagttgttaatgccttgtgtagagcatacattccatctcacattatggttagttgctgtacaagattagacattccttaaatagagaaactatttcttattcactataaccacaaaatgctctatccttgccactcatactataaacccctatggttctaggtcctgcccaaaacataaatgggtggtatggacgccgtatcaccttactaaactgtgacattttggggattaggaacttttggccaagagggagactcacgcctataattccaacactttatttatttatttatttttgagatggcgtttcgctcttgttgtccaggctggagtgcaatggcgcactctcagctcaccgcaacctccgcctcccaggttcaagcgattctcccgcctcagccttccaagtagctgggattacaggcacgtgccaccacggcccggctaattttgtatttttagtagagatggagtttctccatgttggttgggctggtctcaaactcctgacctcagatgattcgcccgccttggcctcccaaagtgctgggattgcaggtgtgagccactgcgccaggcctcattattattattattttttttgagaccaagtcttgctctgttgcccaggctggagtgcagtggcactatcttggctcaccgcaacctccgtctcttgggttcaagcagttctcctgtctcagcctccagagtagctggtattacagatgcgcaccaccacacccatctaatttttgtgtttttagtagagacagggtttcgccatgtttcccaggctggtctcaaactcctgggctcaagcgatccacccacctcagcctcccaaagtgctgggattattggcatgaggcacagagcccggtctgtaatcccaacactttgggaggccaaggtaggaggatcacctgagtccaggagttcaagaccggcctgggcaaaatagtgataccccatctctacaagaaataaaaaaattagccaagtataggggcatgcacctgtgttcctcgctactcgcgaggctgtggtgggaggatcacttcagcccaggaggttgaggcagcaatgagcactgatggtgccactgcactccagcctgggtgacagggcaagacctcatctcaaaaaaataaataaaaagtgagcttgctcacctttcctatgtctctcagcaccttgcttttgaattttagctattatttttacagatcttttaacaaaaaggctgctttaattaacgttaactaacatacatggcatataagaagatccttgttctcaagggctttacaaacctctagagtcaaatgtgccttattatcagtacaaaaataaatggtgtcagctgggtgcagtgactcacacctgtaatcccagcactttaagaggctgaggcaggtggatcacctgaggccaggagtttgagaccagcctggccaacatggtgaaaccacattgtcaggcctctgagcccaagccaagccatcgcatcccctgtgacttgcacgtatacatccagatggcctgaagtaactgaagatccacaaaagaagtaaaaatagccttaactgatgacattccaccattgtgatttgtttctgccccacccgaactgatcaatgtactttgtaatctcccccacccttaagaaggttctttgtaattctccccacccttgagaatgtactttgtgagatccacccctgcccacaaaacattgctctcaacttcaccacctatcccaaaacctgtaagaactaatgataatccatcaccctttgctgactctcttttcggactcagcccgcctgcacccaggtgaaataaacagccatgttgctcacacaaagcctgtttggtggtgtcttcacacagacgcgcatgaaacacatctctactaaaaatacaataatcagctgggcgaggtggctcacagctgtaatctcagcactttgggaggccgagacaggcaggtcacttgaggccatgagttcgagaccagcctggccaacatcgtgaaaaccccatctctaccaaaaatacaaaaactagccagatgtggtggcgcacgcctgtaatcccagctactcgggaggctgaggtaccgaatcgtctgaacgtgggaagtggagcttgtagtgagccgagatcgccccactgcactccagcctgggcaacagagctagactgtctcaaaacaaacaaaaaatggtgtcaagactctcagacgagattctaatggattaaggcctatatgtaaatagcaccaaagactatggaacagagatgggagaagcaagcagggaggcaggaatagtttagctgtggcagttttagcttagtccacttacataaatggttctttagggtagcacgtggagcatcctcatttccaaacattggactgagagtagagagctgtgcaaaataaccacaagtccccaactatgccctcttaattatccctatcatctaagactgttgttcccatccatcactgaacttccccgtcctcttccttcaacccctgtgttagtcaatggttgaaattttgatttggtaaaaaacctctggcgaaaaccagcaaaaagggctcacaaatcaggtctcagggaagcacagaggtagccacgagaaggcccgaggtgctcatggaaagagctcgagcccaggagctctgggaggaccccaggcgctcggagccgccgttacgtaaccggcactcagagcctccgaagaccggaaggccccgctcaggccccggctcaggccccggccccggccccggccccggccccgccccggcccggccgggcagctggtaggtgccgtgcgcaaccctccggaagctgccgcccctttccccttttatgggaatactttttttaaaaaaaaagagttcgctggcgccaccccgtaggactggccgccctaaaaccgtgataaaggagctgctcgccacttctcacttccgcttccttccagtaaggagtcggggtcttccccagttttctcagccaggcggcggcggcgactggcaatgtttggcctcaaaagaaacgcggtaatcggactcaacctctactgtgggggggccggcttgggggccggcagcggcggcgccacccgcccgggagggcgacttttggctacggagaaggaggcctcggcccggcgagagatagggggaggggaggccggcgcggtgattggcggaagcgccggcgcaagccccccgtccaccctcacgccagactcccggagggtcgcgcggccgccgcccattggcgccgaggtccccgacgtcaccgcgacccccgcgaggctgcttttcttcgcgcccacccgccgcgcggcgccgcttgaggagatggaagccccggccgctgacgccatcatgtcgcccgaagaggagctggacgggtacgagccggagcctctcgggaagcggccggctgtcctgccgctgctggagttggtcggggaatctggtaataacaccagtacggacgggtcactaccctcgacgccgccgccagcagaggaggaggaggacgagttgtaccggcagtcgctggagattatctctcggtaccttcgggagcaggccaccggcgccaaggacacaaagccaatgggcaggtctggggccaccagcaggaaggcgctggagaccttacgacgggttggggatggcgtgcagcgcaaccacgagacggccttccaaggtaagggggttcattaatcgccaaggcctcactcccttttttccatctctccccggactcacccgccaagggtgggttggaaaccgaaacgagtcagtgttgaaacgtgtctcatcctattcctgaagccagaatattctggccatgagtcattgtttccgcccatcttgattcttttggaaatggcagctcttgttcaaagaccggaaagggtgggatgtcaatttcaagtggggtcaacctgagttctgtaaatcccagtagcgattttcccgccgcgggtgggcaggcgaatcttgcgccggtttagacaaaggaggccgtgaggacctgcatgcttttctttctcaggcatgcttcggaaactggacatcaaaaacgaagacgatgtgaaatcgttgtctcgagtgatgatccatgttttcagcgacggcgtaacaaactggggcaggattgtgactctcatttcttttggtgcctttgtggctaaacacttgaagaccataaaccaagaaagctgcatcgaaccattagcagaaagtatcac

SEQ ID NO: 492 - DNA, 6000 bp, Homo sapiens
gcaaattatgaccttaggcaagttacctgatcattgaagcctcagtttccctgcatgtaagtgagggtaatagtgataccagtcttattttgttcaattcattctttcttcctccatccctcttctggcctctagataaattctagttccatcctagttcaagttcttgagcacatttatacacttggaaacgacactagattagaagctggggttcctcggttctggtttaactgccatcatctgcatgattttactcacaaccatcttacttcgctttagttactttaataataaaatgaaatatacaatctaaactgtttcctctgtttttaaaatactgtgtatggctgggtatggtagctcatgcctgtaatcccagaactttgggaggctgagctgggcagatcacctgagctcaggagtttgagaccagcctggccaatatggcgaaaccccgtctctactaaaaatacaaaaattagctgggcatgatggcaggtgcctgtaatcccagctactcaggaggctgaagcaagagaattgcttgaatctgggaggcgaaggttgcagtgagctaagatcgtgccactgtactccagcctgggtaacagagcaagaatccatttcaaaaaaaaaaaaattaaagtaaaataaaataaataaaacactgtgtatgaatcccagcactttcggaggctgaagcaggaggattgcttgagaccaggatttggagaccagcctgggcaacatagcaagaccccatccctagtctattaaataaaaaatacaaaatactaaaataaaatactgtgggccaggcttggtggctcacacctgtaatcctagcactttgggaggccgaggcgagagcggatgacctgagggcaggagttcgagaccagcctggctaacatggtgtaaccccgtctccactaaaaatacaaacattagccaggctgggtgacacatgcctgtagtcccagctacatgggaggctgaggcaggagattcacttgaaccggggaggcagaggttgtactgaactgagattgcaccactgcactccagcctgggcgacagagcaagactctgtctcaaaaaaaaaaaaaaatactgtgtatattagtgttccttctgttgcaaacaataaaaccgaactctggacaacttactttttttcttgtcttgctttattgcccaggctggagtgcaatggtgagatctcggctcactgcaacctccgcctcccaggttcaaatgattctcctatctcagcctcccaagtagctgggattacaggtgtgaaccaccatgtctggctaatttttgtatttttcgtagagatggggtttcagcatgttgacaaggctgttctcgaattcctgacctcaggtgatccgcccaccttggcctcccaaagtgctgggattacaggcgtgagccactgtgcccggcctcaaggataacttacttttttttttttttgagacggagtttcgctcttgttgcccaggctggagtgcagtggcaccatcttggctcactgcaacttctgtctcctgggttcaagtgattctcctgcctcagcctcccaagtagctgggattacaggcatgcgccatcatgcctggctaattttgtatttttagtagagatggggtttctccatgatggtcaggctggtctcaaactcccgacctcaggtgatcggccccctttagcctcccaaagtgctgggattacaggcgtgagccaccgcgcccggctgacttactttttttttttttttttgagatgcagtgttgctctgtcgcccaggctggagtgcagtggcgcgatctccgctcactgcaagctccgcctcctgggttcacgccattctcctgcctcagcctcccgagtagctgggactacaggcacccgccaccatgcccggctaattttttgtatttttagtagagacggggtttcactgtgttagccaggatggtctcaatctcctgacctcatgatccacccgcctcggcctcccaaagtgctgggattgcaagcgtgagccaccgcaccccgcccggccgacttactttttaaaagcttcctcttctatagaggaagcctctcacttagaagcccagcactttgctacagcaagttgtgtatcatttccctgttattgtctcctctttagatctgtgaagtcctggaacgctcccactctccacccctgaagctgacccctgcctcaagtacccaccctaacctccatgcctatcttcaaggcaacacccaggtctctcgaaagaaacttctgcccctgctccaggaagccctgtcagcatattttgactccatgaagatcccttcaggacagcctgagacagcagatgtgtccagggagcaagtggacaaggaattggacagggcaagtaactccctgatttctggcctgagtcaagatgaggaggaccctccgctgcccccgacgcccatgaacagcttggtggatgagtgccctctagatcaggggctgcctaaactctctgctgaggccgtcttcgagaagtgcagtcagatctcactgtcacagtctaccacagcctccctgtccaagaagtgactgttgagaggcgaggaggtagtgggtgaggctacctgactcacttcaaatgcatgttttgagatgtttggagattcagcaattctgtcttcattgctccaggatctggtatactgttctcataaaactgagaggagaaaaaaagtgaaagaaagcagctgctttaagaatggttttccaccttttccccctaatctctaccaatcagacacattttattatttaaatctgcacctctctctattttatttgccaggggcacgatgtgacatatctgcagtcccagcacagtgggacaaaaagaatttagaccccaaaagtgtcctcggcatggatcttgaacagaaccagtatctgtcatggaactgaacattcatcgatggtctccatgtattcatttattcacttgttcattcaagtatttattgaatacctgcctcaagctagagagaaaagagagtgcgctttggaaatttattccagttttcagcctacagcagattatcagctcggtgacttttctttctgccaccatttaggtgatggtgtttgattcagagatggctgaatttctattcttagcttattgtgactgtttcagatctagtttgggaacagattagaggccattgtcttctgtcctgatcaggtggcctggctgtttctttggatccctctgtcccagagccacccagaaccctgactcttgagaatcaagaaaacacccagaaaggccttaatgacctcataggcactcttccaaaaagacaacagaactggaatgagaggcctgggtctgtctcctgccttagcaggcctatcaatttcttgtcaatctctttttttccttgctcacattaaaaggaagcatggagttctaatgctcccataaactatgtattttggcaagacacttcactactccaggtctcactttccccatctgtaaaacagggtttggactaggtgttccctggtattctgtgatctgcctcttgctgccattctttctctcctctgcttctctgtatttttcttctgttatccctgggggtgctcaggttcacttgattgtctgtatttctgtgtggttgtagcaaggactcagcctcatgtagcacgaataggggtgtggttcatggcgtgttgacccagcagagcactccctcccactaacttgttctgcatgtgtagagtctccccattttttttaacgcaaccctttcccctttttcctaccccacagctctgttccatgtaagttgccaacagtttcactgaacagtggggtatgtgatggttttggcatgacatcttcagtatgagggggacagtttgacttcactttgagggtgtgatgtctgtagctatgtggaaggtaaaaatagtggtgtgatcatgaaccaaaggaatttatgttttgtaacttgggtactttattttgcattttgttatactattaaataattttttcctgtttgggggtcttactgtctttttttacaagtgtattcaggcctttctctgtgatagttgtttcagtctcctcaaaattgatcccccttcttcctactatacttaatgtcttctttctgttgactctttttgggaataaggagcaacaggcttctgtctcccctcatcctcagcctcccgttcaacttgtttattctcccagaaacctccttataacatacttccgtttccccagttttccttatgcttgaaaagtagatccaagataacagtcctagaaacacacacaatggtttctttttctttttttttttttttttgagatggagttttgctctttttgccctggctggagtgcaatggcacaatctcagcccactacaacctctgcctcccaggttcaagcgattctcctgcctcagcctcccaagtagctgggattataggcatgtgtcaccacgcccagataatttttttttttttttttttttttttttttttttggatttttagtagagatggggtttctccacattggtcaggctggtctcaaactcccgacctcaggtgatccgcctgccttggcctcccaaagtgttgggattacaggtgtgagccaccacgcccggccagaaacacaacggtttctactggtttttttgcttatttgtgtaaagagcaactttgagagggatatatggagtctggaaaggagaacaaattgccttcctagactcaaccgagactggcccccactagaaaatgcactctcctccccaaaacccgccccctcacaggaggcagggtttttcttttgggcaaacctgctcctggggagaggagtggcaaaacctgttttgaagatgaggttacctcccttccacacctccctccttggaggcaagagctacaacagctgagacagaaaagaggtaaggaagtgttgggggctgggacaaccagctccccaacaactcctaggtgtttaaagaaggaggcaggaagacttgtgaagatgggaactatacaagaggcaggaaaaaagacagatgttgggtaagtaagatcttggctcacttgattggtaacagtgaataaacagtccggagagacttccccaccacccagctcttactgggtcaaatctcgggttcctcaaggagacaagactgtaagagagtttgcagagaagagatgagggtggttttaggtaggaaatgtcagtatggtatggaactggggaacaggattccaggataattccctggtttaaaaataaaggaagtttctgtaatatgttgtacctgataaatctgcctgtgttcttttattttctaaccctcaccctccagaatggccatcaggaaagctgaaccagaaccgagtttaggtccaggttctcgttctggcaaatctttctccttaccttcttcctccacccctccacttatgccatgttttcccttagccactccccagctcggtggaggaaaggcaggcctaactaggtaccgtcttcccgactttgctcaatgatagctgggtgggtctagctgggttccagccacttgtaatgtgggacatctctcaccccaactttgtaggtggagcaactgctacagaggtaaatatgattaactttacattccatctttcgtctgctcccaaacttaacagcaggtaatctgcttctagcaagtggtgaaggtaagagaagcatctgtataggaggcaagagatctgagtccttttgaaggcctatcctctgctctgtatctcaattactgttcttcatttcaattattcttacctactattcagttcccttgatcttttcttcttgggggctgtcttagggtcagggagattgcagaagcaccagaactaggagcagccctgagaca

SEQ ID NO: 493 - DNA, 6000 bp, Homo sapiens
ccctgaagctgacccctgcctcaagtacccaccctaacctccatgcctatcttcaaggcaacacccaggtctctcgaaagaaacttctgcccctgctccaggaagccctgtcagcatattttgactccatgaagatcccttcaggacagcctgagacagcagatgtgtccagggagcaagtggacaaggaattggacagggcaagtaactccctgatttctggcctgagtcaagatgaggaggaccctccgctgcccccgacgcccatgaacagcttggtggatgagtgccctctagatcaggggctgcctaaactctctgctgaggccgtcttcgagaagtgcagtcagatctcactgtcacagtctaccacagcctccctgtccaagaagtgactgttgagaggcgaggaggtagtgggtgaggctacctgactcacttcaaatgcatgttttgagatgtttggagattcagcaattctgtcttcattgctccaggatctggtatactgttctcataaaactgagaggagaaaaaaagtgaaagaaagcagctgctttaagaatggttttccaccttttccccctaatctctaccaatcagacacattttattatttaaatctgcacctctctctattttatttgccaggggcacgatgtgacatatctgcagtcccagcacagtgggacaaaaagaatttagaccccaaaagtgtcctcggcatggatcttgaacagaaccagtatctgtcatggaactgaacattcatcgatggtctccatgtattcatttattcacttgttcattcaagtatttattgaatacctgcctcaagctagagagaaaagagagtgcgctttggaaatttattccagttttcagcctacagcagattatcagctcggtgacttttctttctgccaccatttaggtgatggtgtttgattcagagatggctgaatttctattcttagcttattgtgactgtttcagatctagtttgggaacagattagaggccattgtcttctgtcctgatcaggtggcctggctgtttctttggatccctctgtcccagagccacccagaaccctgactcttgagaatcaagaaaacacccagaaaggccttaatgacctcataggcactcttccaaaaagacaacagaactggaatgagaggcctgggtctgtctcctgccttagcaggcctatcaatttcttgtcaatctctttttttccttgctcacattaaaaggaagcatggagttctaatgctcccataaactatgtattttggcaagacacttcactactccaggtctcactttccccatctgtaaaacagggtttggactaggtgttccctggtattctgtgatctgcctcttgctgccattctttctctcctctgcttctctgtatttttcttctgttatccctgggggtgctcaggttcacttgattgtctgtatttctgtgtggttgtagcaaggactcagcctcatgtagcacgaataggggtgtggttcatggcgtgttgacccagcagagcactccctcccactaacttgttctgcatgtgtagagtctccccattttttttaacgcaaccctttcccctttttcctaccccacagctctgttccatgtaagttgccaacagtttcactgaacagtggggtatgtgatggttttggcatgacatcttcagtatgagggggacagtttgacttcactttgagggtgtgatgtctgtagctatgtggaaggtaaaaatagtggtgtgatcatgaaccaaaggaatttatgttttgtaacttgggtactttattttgcattttgttatactattaaataattttttcctgtttgggggtcttactgtctttttttacaagtgtattcaggcctttctctgtgatagttgtttcagtctcctcaaaattgatcccccttcttcctactatacttaatgtcttctttctgttgactctttttgggaataaggagcaacaggcttctgtctcccctcatcctcagcctcccgttcaacttgtttattctcccagaaacctccttataacatacttccgtttccccagttttccttatgcttgaaaagtagatccaagataacagtcctagaaacacacacaatggtttctttttctttttttttttttttttgagatggagttttgctctttttgccctggctggagtgcaatggcacaatctcagcccactacaacctctgcctcccaggttcaagcgattctcctgcctcagcctcccaagtagctgggattataggcatgtgtcaccacgcccagataatttttttttttttttttttttttttttttttttggatttttagtagagatggggtttctccacattggtcaggctggtctcaaactcccgacctcaggtgatccgcctgccttggcctcccaaagtgttgggattacaggtgtgagccaccacgcccggccagaaacacaacggtttctactggtttttttgcttatttgtgtaaagagcaactttgagagggatatatggagtctggaaaggagaacaaattgccttcctagactcaaccgagactggcccccactagaaaatgcactctcctccccaaaacccgccccctcacaggaggcagggtttttcttttgggcaaacctgctcctggggagaggagtggcaaaacctgttttgaagatgaggttacctcccttccacacctccctccttggaggcaagagctacaacagctgagacagaaaagaggtaaggaagtgttgggggctgggacaaccagctccccaacaactcctaggtgtttaaagaaggaggcaggaagacttgtgaagatgggaactatacaagaggcaggaaaaaagacagatgttgggtaagtaagatcttggctcacttgattggtaacagtgaataaacagtccggagagacttccccaccacccagctcttactgggtcaaatctcgggttcctcaaggagacaagactgtaagagagtttgcagagaagagatgagggtggttttaggtaggaaatgtcagtatggtatggaactggggaacaggattccaggataattccctggtttaaaaataaaggaagtttctgtaatatgttgtacctgataaatctgcctgtgttcttttattttctaaccctcaccctccagaatggccatcaggaaagctgaaccagaaccgagtttaggtccaggttctcgttctggcaaatctttctccttaccttcttcctccacccctccacttatgccatgttttcccttagccactccccagctcggtggaggaaaggcaggcctaactaggtaccgtcttcccgactttgctcaatgatagctgggtgggtctagctgggttccagccacttgtaatgtgggacatctctcaccccaactttgtaggtggagcaactgctacagaggtaaatatgattaactttacattccatctttcgtctgctcccaaacttaacagcaggtaatctgcttctagcaagtggtgaaggtaagagaagcatctgtataggaggcaagagatctgagtccttttgaaggcctatcctctgctctgtatctcaattactgttcttcatttcaattattcttacctactattcagttcccttgatcttttcttcttgggggctgtcttagggtcagggagattgcagaagcaccagaactaggagcagccctgagacatggggagttggagctgaaggaggaatggcaggatgaagaattccctaggtgaggacgtgtgagggtggctgggagaagggaggggtggtcacgaatggacggaggggatggcgcggcggctcatggctgtaatcccagcactttgggtggccgaggcgggtggatcacctgaggtcaggagtttgagaccagcctgaccaacacggtgaaatcccgtctctactaaaaatacaaaattagccaggtgtggtggcacatgcctgtaatcccagctactcgggaggctgaggcaggagaatcacttgaacctgggaggcagaggttgtagtgagctgagattgtgccattacacccgagcttgggcaacaagagtgaaactctgtctcaaaaaaaaaaaaaaaaaaaaaaaaaaaaagcaaatggacacagggatggtgaattaggacttgaaggaaaaaaatgggaaaaagaaaacagaggccgggcgtggtggctgatgcctgtaatcccagcactttgggaggccgaggcaggtggatcacttgagctcagaagttcaagactactctgggcaacatggcataaccccatctctacaaaaatacaaaatttagccaagtgtggtggtgcacacctgtaggcccagctactcgggaggctgaggtgggaggaccgcttgaaccctggaggtagaggctgcagtgagctgtgattgtgccactgcattccagcctgggcaacagagtgagaccctgtctcaaaaaaacaattaaaaaaaaaagcagcataggtgataaaatcatggtggggagagagaacctatatattgagtcctggcttgatgcctttggtgtatatgtctgccgccttttaatctcttcccctctagattgcttcctgaggaggctggcacttctgaagatcctgaagaccctaaaggagattcacaggcaggtaggtcaagtagaaaccaggcctcaagttcttgattctagtccagtaaagggctatgccacctctatccttttacagttccatttcccccttttcccaaatctcccctgcgtgagtccttcttcagcattcaccccatattatcactttcacatacaggaattctagccctctcggctctccaacacacacacccatcttggttctctttttccccctttctccagctgcaggtacccccagcactttagccctgtgtggccagcgccccatgcgcaagcgtctttctgccccagagttgcggctgagtctgactaaggggcctggaaatgatggagcttcacccacccagtctgcaccttcctctcctgatggcagttctgacctggagatagacgaattggagacaccttcagactcggagcagctggacagtggacatgaatttgaatgggaaggtgggaaacaaaccagaggactcagctggtagaagtagaggctagagctaaaggatcaggatggacttaatgggactgcagttagaactaataaggtgggaccaagggctacggccagcaaaattagtttcctcaaatggaacttgggcttataggtccaatgtgagagtagtcagtagagggggaggggagcccattgtttattaaggaaaatttaattgaatgcctgttacatactatcatgtataggactggggttataaagatgaataagagagggcctacagggaattctctgcttagtaggaaataaacatatataaaaataattgcagttaaaggttatgatctatatatgtgtagggtacagtgtagacagggagaaggaaaaggtcagttctgcctgagagatgttaggaaaggcttcatgaaggagatgattctgagctaagtgttgaaaactgaagctgacatttatcaggtagttggagagagggcattctaaggagaagaagcagaagcaactcaagcaatagcatggcatgttggggaattcaaagtatgagcatgactattttaatatgaagggccgggaggtgaagagagaatgacaaaagatagtgctgctgggttaagtagaaaaaggtcacatcatggaggcccttgctgccatgataaggagtttaggttttatcttatagacaatagggagtcatgataagtttttttgttttttgtttttgatacagagtcttgccctgttgcccaggctagagtagagtggtgtgatataggcttactgcaacgtctgct

SEQ ID NO: 494 - DNA, 6000 bp, Homo sapiens
ttttggtatagccggcccacatccaaaaatgattaatccaataataggccctgaacatcccaaattatggaaggtaatgatggcccaatctcatattcaggtttgagaagaaaaatattaccttgagggaaaaggtgagagacttcaatttgtgtatcagttttcttccaaccgaatggcgcccattcagagctgtgtcaagcctccttttatgttgatggtcggaaatattgatattcgacctaattctcaaactattacttgtcaaaactgtcaccttttcacctgtattgattccacgtttgatgtgaaaacatctgtgttgctggtgagggctagaggagtttagataccggtttccctcaatagaccttggaaagcctcttcttccattcatatcctcacagaaatgttaaagggagtgtttaccagaacaaaaagatttatttttacccttatagcagtcattatgggccttattgcagtcacagctactgttgtggctgctggaattgctttacactcctctgttcaaactgcagaatatgtaaataattggcaaaagaattcctcaaaattgtggaattatcagacccggatagaccaacaattggcaaatcaaataaatgatcttagacagactgttatttggatgagagatcgtataataagcttagagcatcgattgcaaatgcaatgtgattggaatacttctgatttctgcataactccccattcatacaatgctactgaacatcactgggaaaaagttagacatcatctggaagaaagggatggaaattttacactgaatatagccaaattaaaggaacaggtttttaaagcatctcaggctcatttaactctcctgcctgggactgacattctcactggagctgctgatggactttcaaacataaatcctcttaagtggattaagaccgttagagaatcaactatcgcaaattttgctttaatgtgtacctgtttatgctgtttgcttttagtctgcagatgcggaagatgcctctggagagagaccagacaccaggaacaagtcttaatagcaatggcagttttaaaaaagaaaaaaggggggcatgttgggaaaaaggcttacagggtgcctgcataaactggccataaaaacatgggacagtaagttgtggaaagccacaagaggactctgaggaggaaagccttcttatcgccattatgttcccatgctctgagcacaacctgctctcttatctataaacactgtgctcaagaagaaagacgctcctctgaagcactggaatgtggctagatatgcaggctcctagttaagcccactcccaccagctaactaaagatacgttgtttaagcacaaaggagattcacttaaaccgccactgctacagattatgtgtatgacgtactgcttccctttgactgtttcgccctgaacatctgcttcttagatctaagtgactgtactcaataaacagtgtggagatcagaactctgggccttttgcagcctccattttgcaactggccccctggctcccacctttatgaacacttaacctgtctcttctcattcctttgtcgccaccggacttcggataccctacgggtggtgctgagactggtcccccaaaattaagaaaatgcaaataaaaaccacaatgagatacacttcacacccactagaatgatgaaattcaaaagaactgataataacatgtgttggatagaatctggaaaaactaggattcttatatgttgctgttaggattttttaagcggtgaggccactttggaaaagtttggcagttcctcaaaaggtaaaacatggagttaccatatgaacctgcaattccactctcaggtataaaagagaaataaaaacaagtgtatgcaaaagttgtacacaaatgttcgtagcagtattatgcataagagccaaaaagtggaaatacctcacatgtccatcaattgatgaataaacataacgtggtatagccatataatggaatattatttggcaatacgaaacaaagttctgatgcattacacaactggatgaaccttcaaaacaaagtaaaagaagacagttgcatatagtatgatttcaattacatgaaatgtccataatttgcttattaattacataaactgatttagtggttgcgagaggcaatgggagggaggaatggaaagcaacttactgataagattcttttgggggtgataaaaaatgttctaaagttcgatagtggaggctgggcatggtggctcacgcctgtaatcccagcactttgggaggctgaggcaggtggatcatgaggtcaggagatcgagaccagcctggctaacacggtgaaaccccgtctctactaaaaatacaaaaaattagctggacgtggtggcgggtgcctgtagtcccagctactcaggaggctgaggtaggagaatggcgcgaacccgggaggcggagcttgcagtgagccgagatcgcgccactgcactccagcctgggtgacagagcgagactccgtctcaaaaaaaaaataaaataaattagctggatgtggtggcatgtgcctgtagtcctagttgctcagatggctgaggtgggaggatcccttgagccaaggagcttgaggttgcagtgagccaggactgcactactgccttccagccttggcgacatagatcctatctcaaagcaaacaaacaaaaaaaagtgtaaatttacagaagagttgcaaaggtagtacaaagtgctttcttacaattttcattagagtttccttaatgttacatacatatgaccatggtacaattttcaaaattaagaaattaaagctggtacaatactatttaaaaattgcagactttatttgcatttcctcagcttttctgctaatgtcttctttctttttttgagacagggtctcgctctgtcacctaggctgcagtgtgatggcgtgatctcggctaactttgcaacctcttcctcaatcctcctgcttcagcctcccaagtagctcagactacaagcgtgtgccacacctgtctaatttttgtgtctttttgtagagatggggtttcaccgtgttgcctaagctggtctcgaactcctaggctcaagcaatgcgccctcctccgcctcccaaagtgctgagattacaggtgtgagccactgcgcccagcctaatgtcttctttctgttacaggatccagtagaagattccacatctggagatcttttcctttctttatatctatcaccgacattacctactctttaaaaattttgtaaaaggcataaatttgaaaaatatatcctcattaatctaaatcaagtcattgatacaactatttaacaagacgcccggcctgctttgttttattaacgacttggagggacagaacactacccattacacccacaaacgttatcgacatcaacagaactgtaaatgacaacacggcaatactctgcaccttccctatgcctaggagctaattccactttacatatattattatttcgtgtgtgtgtgtgtgtgtgtgacggagtctcgctttgtcgccaggctggagtgcagtggcgcgatctcggctcactgcaacttccgccgcccgggttcaagcaattctcctgcctcagcctcccgagtagctggggctacaggcgcccgccaccacggccggctaatatttgtatttttagtagagacggggtttcaccatgttggccaggattgtctcgatctcttcaccttgtcatccacctgcctcggcctcccaaagtgctgggattacaggcgtgagccaccgcgcccagccctatcttattatttcacacaccaaccctggaggcatgtttggagttgcctaatttttatgtacactttttgataaggaactaacaaaaataacttgctgaagacaagggaaactgagtccagaactgaatgagaagcacatggtttcttcatcctccatcaccaggctgtctaacgaggctgaagtaccatccatgagtaagtgcgtcaagggcaaacaaacatcatcgcatatggacagtggtgtgaaattcgagaaatccgaggagggttaacaacaacaaaaagcacaccaccacgccgaacttcctcgggtcccaggttggcaactcaacgcccgggaggaatcccccccggaggcgcgccggtctaccggcctcactccctacctcctggaggtccggagtcccgctcctttccctcagcggtacaatacccgtgtcggtccattccctcaccgtgagtcgaggactagttctccagactaggcgaccgacacacgctgcctggggccggctccaaagcgcccgtcctgagactgcaaaaaagggtcgggtcatccggcaggaaacgactcaacgcgcagccgccgcggcctccaaccaccggccggcagaggggcgctaggccgccctcgatcccctcgccgcggtcccatggaggaggaggcgagccgcagcgccgcggcgacgaacccagggaggtaggttgtcatgggactcggccggccaccctggcaattccagtcaaacggcaagccagactcgctttgccggtcccttcctctcctgcccctgcagccgccaggaatggaacagtcccgcggtggggactgtgggaggcgcacgcgcgaggagtgtagggtgggggtgctggcggcggctgctttggcggcggttggtggccgtgcgggcggggagggagggggaggagagaagaggaggtggagaaggcttgggctcgcgccgctgaaggtacgcgtgagggcctgcgctggagccggcttgacagggtctgagggggagtggagaactgggcgaggaggttcccgtgggtgagcgcgtacgggatggctggctcgcaggacggccgaaggtggtggttggtgggagcagccagcgacgagcccgtagacactcgtacgcgtgcgggctgacgtgcgcgctacatggccggagtcgggcgaagcgggggaccgtggggaagaacgcgaggagggaggagtgggaggttgggggtgtcgctaggcgcccttagctccctccctctggaggagctgccgcggccactctgctgccgccgctgccgccgccattttgggttcgctttgcgaggggaaacgatcccagtgtcggttgcgggatccgcctcctctcagtttgcccctttagccctccacctttcccttctcctctctcgcatttccgccagtcggcttacccgctggccgcctcctgacaagcgggagggatccgcggtggacccagggaagcggaggagcctggcggccaccccctcttcctcacttccctgtactctcatcgctctcggcctccgacacggtgagtagaacgatttgggccggcattcgggcctaagcactctctcagcgattgaatcctgggctttctgggagccactgtcatctcccggacctggacctctgggagagcagtggtgaagatgggggaggggagagcagggagggggatcctgagcctaccgggaagtccctccaggcggggtgaaggggtgtccctgacaggcagactcccggagggggctgggaagtaagcgagtggaggcggagtcggctgtgcccctgacaggttagtttgtgtttgtaggcatgatcggagcctcccccatagtccagtttgtgtgtgtttaattaagggataagagtggtcgaggacacgatcttgagaggggattttacctgtgtgacaaggtctgtggtgtccctgccgcgttgaacggtatgtgggaacgacaggatgatctcagtgttgtacgtttaataaatgtcactggttagtttgtacatggaaagagatgtttttggtctagcagacagatggtctgttggtgtgtagcggctgtgttggtgtgtgtatgtgaggatggcaagtgtttccgtaagagtttgcctttattt

SEQ ID NO: 495 - DNA, 6000 bp, Homo sapiens
agggcgtgttggcacgcgcctgtaatcccagctatttgggaagctgaggaaagagaatcacttgaacctgggaggcagaggttgcagtgaggcaagattgtgccattgtactccagcctgggcgaggagagcgaaactctctctcaaaaacaaaaacaaaaacaaaaaaccatagcgagacctaatctcaattaaaaaaataaagaaattgtatacacatacatgcacatatatgcacactacacacacatatcacatgtacgttttgagaaaaataacaccatgaacctactacccgttaaaaattagagaaaatattaaacttttcacaaatttacatagcattcttatacaggggccatgtcaatagaaagaaaggactatcagacaatttttcctaaaacttctccattatctcactgaatcctataatctgtcctattaaaacacctttttacatttcttgcttttttttttttttttgtgagacagagtgttgctctgatgccgaggctagagtgcagtggcatgatttcagctcactgcaacttccccctcccagttcaagcaattcttggttcaagcaattctcgtgcctcagcttcccgagtagctgggactacaggtgcactccaacacatgcagctaattttttgtattttagtagagacggggtttcaccgtgttgcccaggctggtctcgatcttctgagctctgacaatccatccgcctcgtcctcccaaagtgctaggattacaggcgtgagccaccccacctgaccaatttcttgttcttttaaaagtacagtaattatttttaagttccagtaataaattaatgggtagtctgtcaaatagctactggattttatatcaggagggctttctacatgtatgtatacccaaaaatgacattaagacctttttacataaactcactgtagagatacatcccaaaacaaggtaaggaatataaatgatgtttaccttcttttcaaaccaacagttcctttatacaaaaacaccagatgatacaaaacatatttttttaaagtacaaagttccatacagaataaaataaacactttatggttattcctaagaataagtagtgacaaaaagtctttgcaattgggtaataaaatttcagcttctaggaatatgtttccctcttccttgtccttttgagagctgccactatcacacaattcacagcatctcttcaaccacagaaaattagcgtctcttcaagcacagagaccatatattaattatctttgtgtctcctgcataggattaactcagtgtttgttataactaagttaaactccaagacaggagcttcaaatcacctcaggcccaatccaaaactgaaaaaaagacgcttctcagagtttgagaacaaaaagatactgacaaagaacaaagccatagatacttgtgcgacattagcttccctttttaccaaatacagagtcatttactaatactgcagaaatgtttgcagacgataaaaagaataaattaaaaatatggatcctgtcaacatgttcaaatactaacatagactccttcaccttaaactcatactaacatccacacacccgaacaatgaaaatgaaaggttttcaaatgagatctaaatataaattggctctatttcattacagtttaagttcctaaaatcatatatataaatcatgtgattgcgcttatgctcatcttctaacttgagggcccagtgtctttcatccgattctctgaaggataagtgaccccaaaaaacttttaagaaccactaatctagcctatcaagaaacatcccattttccagaagaatacagctaagttggcttagttcatgcattcttacctcatattcatagagttcatagacgggatccttactacatgaaatcagtcttttttttttttttttttttttttttggagatggagtctcctctgtggcccaggctggagtgcagtggcgcaatctcagctcactgcaagctctgcctcccgggttcacgccattctcctgcctcagcctccccgagtagctgggactacaggcgcccgccaccacgcccggctaattttttgtatttttagtagagacggggtttcatcctgttagccaggatagtctcgatctcctgacctcgtgattcgatctcctgacctcgtgatccgcccacctcggcctcccaaagtgctgggattacaggtgtgagccaccgcgccctgccgaaatcagtctttcaaaggattccttcagcccagccaagaagttccaacatccacaggcacatatattaacaattaccagtacccaaaaacagttctctggttttaattccacactgcctccctcaacttaatacctaccaccgtcaaaacaactcccctcagattgcatccaggctatttacagagacaccttgatgatcctcacctcaaggcatggaccattcattgaatggttatatttgttgaatgagtgaaaaaggatccttcctcccacagatttcaagttaagctgtcagcacccatgcagctgctctggtacaagttaagctgtgaaagccttctccctcacgcatacaaccttaagtgtcagaaatgctctgcttcctccataaatccaaaataatatagccatggatatgcatttcatacaggtcagactcggcaaggacagctacgttccacatacatatctgacacaatcggtctcccccaaatacaagccaaccagtcttatgtgctcctatctttccagcatactcagatttgccgacaaagacttcctgaggcaccatggtatgctgaatatactgctgcagtagtagtgaaaatatgggagttacagttccaactttgtcaccaatttaacatgcggccttggagaagttctctccttatgcctaaatttcctattttgtaaaatggaagaaagcatcctaccattttcacagagattcagtatcacaaagaaactgaaagagctttcttattgtattgtaaactattactataaacccgcgacaacaaataaggccacccattctttacagctttgtagcaatgattctgttaaagatattttggcccttcacatttacacaactcactctaaccaaaggcacaaactattcttaagaccacaactggctatgccaagtttctcccctccctgacctcacagacacatgctgtacagaacactaccattgccgctctttcccaacaagtaactaggggctcccaatccctaaaatacacacacatatcaacctgcaaggaacctcccaacatttattcaagaaataagctaacttataaggggaactccattacacttacacaaataaaggcaaactcttacggaaacacttgccatcctcacatacacacaccaacacagccgctacacaccaacagaccatctgtctgctagaccaaaaacatctctttccatgtacaaactaaccagtgacatttattaaacgtacaacactgagatcatcctgtcgttcccacataccgttcaacgcggcagggacaccacagaccttgtcacacaggtaaaatcccctctcaagatcgtgtcctcgaccactcttatcccttaattaaacacacacaaactggactatgggggaggctccgatcatgcctacaaacacaaactaacctgtcaggggcacagccgactccgcctccactcgcttacttcccagccccctccgggagtctgcctgtcagggacaccccttcaccccgcctggagggacttcccggtaggctcaggatccccctccctgctctcccctcccccatcttcaccactgctctcccagaggtccaggtccgggagatgacagtggctcccagaaagcccaggattcaatcgctgagagagtgcttaggcccgaatgccggcccaaatcgttctactcaccgtgtcggaggccgagagcgatgagagtacagggaagtgaggaagagggggtggccgccaggctcctccgcttccctgggtccaccgcggatccctcccgcttgtcaggaggcggccagcgggtaagccgactggcggaaatgcgagagaggagaagggaaaggtggagggctaaaggggcaaactgagaggaggcggatcccgcaaccgacactgggatcgtttcccctcgcaaagcgaacccaaaatggcggcggcagcggcggcagcagagtggccgcggcagctcctccagagggagggagctaagggcgcctagcgacacccccaacctcccactcctccctcctcgcgttcttccccacggtcccccgcttcgcccgactccggccatgtagcgcgcacgtcagcccgcacgcgtacgagtgtctacgggctcgtcgctggctgctcccaccaaccaccaccttcggccgtcctgcgagccagccatcccgtacgcgctcacccacgggaacctcctcgcccagttctccactccccctcagaccctgtcaagccggctccagcgcaggccctcacgcgtaccttcagcggcgcgagcccaagccttctccacctcctcttctctcctccccctccctccccgcccgcacggccaccaaccgccgccaaagcagccgccgccagcacccccaccctacactcctcgcgcgtgcgcctcccacagtccccaccgcgggactgttccattcctggcggctgcaggggcaggagaggaagggaccggcaaagcgagtctggcttgccgtttgactggaattgccagggtggccggccgagtcccatgacaacctacctccctgggttcgtcgccgcggcgctgcggctcgcctcctcctccatgggaccgcggcgaggggatcgagggcggcctagcgcccctctgccggccggtggttggaggccgcggcggctgcgcgttgagtcgtttcctgccggatgacccgacccttttttgcagtctcaggacgggcgctttggagccggccccaggcagcgtgtgtcggtcgcctagtctggagaactagtcctcgactcacggtgagggaatggaccgacacgggtattgtaccgctgagggaaaggagcgggactccggacctccaggaggtagggagtgaggccggtagaccggcgcgcctccgggggggattcctcccgggcgttgagttgccaacctgggacccgaggaagttcggcgtggtggtgtgctttttgttgttgttaaccctcctcggatttctcgaatttcacaccactgtccatatgcgatgatgtttgtttgcccttgacgcacttactcatggatggtacttcagcctcgttagacagcctggtgatggaggatgaagaaaccatgtgcttctcattcagttctggactcagtttcccttgtcttcagcaagttatttttgttagttccttatcaaaaagtgtacataaaaattaggcaactccaaacatgcctccagggttggtgtgtgaaataataagatagggctgggcgcggtggctcacgcctgtaatcccagcactttgggaggccgaggcaggtggatgacaaggtgaagagatcgagacaatcctggccaacatggtgaaaccccgtctctactaaaaatacaaatattagccggccgtggtggcgggcgcctgtagccccagctactcgggaggctgaggcaggagaattgcttgaacccgggcggcggaagttgcagtgagccgagatcgcgccactgcactccagcctggcgacaaagcgagactccgtcacacacacacacacacacacgaaataataatatatgtaaagtggaattagctcctaggcatagggaaggtgcagagtattgccgtgttgtcatttacagttctgttgatgtcgataacgtttgtgggtgtaatgggtagtgttctgtccctccaagtcgttaataaaacaaagcaggccgggcgtcttgttaaat

SEQ ID NO: 496 - DNA, 6000 bp, Homo sapiens
aaggaaaatcatcatctccttggtaaggaaggattggaatttcacagtacaatattctcaaggctaagtagggagtgctcatgagaaaactgttcatgtgactccttacaaaactcaaattttgcgctggtgtaatgttttccattcaggggcagcaaagtgcagtgatgtctagtaaccctcatgatacttcccatgccaggccagctcatgggacagctcctctttcctcttcattcacgggttctgtactgaaccatttattctgacattatgagaatgtgggctttcaacatgaatatgtatccaatgaccctactttggggcacaatgatgcctgggcaaagctaattagcctttggaagtgagctggcctctttgcggggtgcttccagagtgcttctgaggcatgaccctgtaagctatttgctttcctgtcatttatgatttcccatttaaaagagcaacatgaatgtggattaagcaagattaaattaattaaacattcagtttttaaaaggaagaaatgaaaactgatcatcctagcaaaaaaaaaaaaaaaaaaaaaaaaaaaaaaaaaaagtatagatctagtcaacaaagctaccaagaaaggacccatctatcttgtacagggtcccacagctagtaagttactgagtgggaatttgaagccaagtctgcctgcgttcaaaacctatgctcatagcctctgcactgtaatgctgctttttaaagatggttccaggaaagtccagaaaagcacaggtagaagttccagggcagagcacaccagggacacaaggacagctagggctgattttgctgctagcaggatgtggtcagcaagtctgggttcagcccgggctccctagacagggaggcttgctgagtttcctccctgtggactcccgtctttgggctgccatcatctgttctctgtcctctcttggatccctcattgcagatacctgaagaatgaaaaaccattgctattttgtcatgaccctgagggaggccacagcccaggtgtcctgtccgctctgcagcatccacaagggcccaggctgacagggttggtgctggagttttaagtcctaagcccttagaacctcttttccgtgagtgattggatttttctttgccataaacaatcctaagattggtgatataaaaaaagtattaataataaccaaccataagttatggatctattaacaggtgatgtgactcagcgtctacagttatagagagcttatggtctctggggcaacctattctatcttttttttttctcatgatgggtttaaattttttttttatatatagttgttccttattgtacatggatactcagttcttgcatatgtgaaaattttgccctctgtatttggttgaaaaaaatctgcatattagtagatggacctgccaagttcaaacctgtgtcaactgtagtttccatacgtacgtggtgttttctcctcagaaatcccacaaaacaattttattttaaatgcctgaagacagtgcttatgttccctgaaccccaagtcctggatctatttctcatatgacataatgttgagcttctcttctatcttggtcaccattggggagggagaagggacacagcgagagcaacagaagggaatcaaagcgattatttagaggtgtttgcagatgtacacaagaaagagcaaccaaacccatcagaaccctgcttataaaacatcagccctggagaggcccagtcattctgtaactgtctcagaatgtcagtcccagccaccagaaaacacaatgtggacaaggactagagccaagagatggcatttatggtgagtctaaagcctcggtgatgttctatctcacaatacaatcattcatgcattcatttgttgagtcagcaatcatttattacattctaagcacttgatgtataaaggggagcaatttggatggttttctactctcacagagccataattgacatactcaactatttacccaaggggtttcaccttgatgccaaaccagcaggacatgaagcttgcccttcctgagagggcccctcagagtgtcttctagcttttgttgtgtgtcatgtattgacgtcctccagacaggtatctacttccgcacagctttgggcttccccaacctgtgcctcccattccacctccctcttcttgccggtcctcttcttgataacctcttctcaattccctaaatccctcagcttctgaaacttcttccttcactctcttctcataccctggtttgtgcctggtcattgcccagaacagcttctctgaaacctcaagcacttctctccaaatctctgaacaacttcctataccttgaactttctaacactctccttttccccagcacttcctcactgaggttccctttcccagaacttatttctgttttcactttacatcagcccatgtcctgatcttctctaagcctcatacaccagttgggcgggcccctcagcttgatctctggctttatgggcctctcacaccagccttctgtctgcagcctgagaagattccacagctgggcacatggatgctgcttacaaatgcaagtttttctacccagtgctgaaaacagatagtttacttatctttttcagactcgctttccttttagtgattatttcagacctttaccactttttagaagctgccagccaatacagcctacttgctcacattaagtaacttttatcctccaaacacagtaagttttaggtacgttcttctacctcctattgaagtcctcctctgctctctctggtgcagtggtctcttaatgggtcttaatgacccattactggtcttcatcccaattcctgctcagtgctgcagccaaaatacacaccttaaatgtgtaacacccttcggtggcttcttgtgtcctgtgggatagtgtccttcctggctaaaaagcttccttttcctttcttcatgttctcacgcctgttcataaaatactatattgggaggaaaagttttctttttcttttctcttcttctttcactcaattttccacatggaatggggaaaatatatttctgaatcatgaagcctgtgtttgctaatgggtttgtctgccctcaagccacacaaagtcttttcttttccaagggtaaactctgttgtgcacatctagctcctgaagaatggaggtaaatgcataaagccttagatcccagtggcagtctaatgtagttcatcaacagtaaagatgatattttgaaccttttctgaattctgtacctattactgtgtcacttcagaatctagagagggaaggatgtgaatagttagcatttacaaactcattcatgatataccctccattatctggctcttgttgctacttgcatatcatctagtgtctttacctttcaacatcaagaagccctggcccctgatcactaagcaggctgtaatccagtcattccaaactacctgtggttccttgaataagtaatgctgtttcacttgtctgcatatgcatagcaaaatcttttcctattctgattctccacttaactcatcctaaacccctgctcaagtatcatcattgctgtgaagtcttctctgattagctccaaacatagtaaccatttcctccaaggtttcatttctttttcttattttagagatgtgatctcactctgtcactcaggctgaggttcagtggcctgatcatagttcactgcagcctcaaactcctgggctcaagctatcctcccagttcggcctcccaaagtgctgggattacagatatgagccacctcgcctggcctccaaagtttgttatacttttctctcttaacagtggtttccacatgttattgcaattactagaccatatatttttacagtgcaaaactatcccttgttccttcatgtactgcctccacccatcacattgcctggcattcatgagtgctaaaaacttttcattgaatacaatactaagtaaatgaagaaatgtgggattaaaaatgaatgcctacaatgaaccaagctttctgctgagttacctgaatattacaaagaagcaaaaattattactgtagaggaacaattaccctgcttggaatgcagagattatgtcagcatacaaaattgattgcttgatcaatctggagtagaatagctcatgaagcatagctatacttaataatatagcaaagcagaggggcctgagagggtcttactgcttaatctctgtccatcatgtcttagacctacagacaacttgagttcaatgattatgatgcccctcacctcagggatctgtttccatccagcttccaaagatgggcatacaccagcacaagcatagaaaaataacaaatctgtatattggaccctctgcttagcagtgagaaagcaggtttgaagacaataaagccaggcctgtatgtggagattggcaccatgaccctggattatgttttatgggatatgcctccaagggcaactctgcatttatcccatggcctctggcttccaaattttctaggcacttccctctggggtaaaggaatcaaaattggcttatttcccttgcaaaccatccttggcgactaagtactgccttgtcttctactgagagatggccatatttttggcacctgcctttccttgtgggaggtgtttcctctgtttacatagcaaaggggctgtaggagagacagacggagctggacttacagcagaaccaagtcatgatagcctgtttctattttgttttcagcatttttccgccagttctggccacctcctttcctctggaacatgctgatttcagcaagtccagctctgtcagctctgccccccgagtctattggtttctgatcatctgataatgctttgcctgcactcaggacctgtctttgtccctcctcttaacatacttgcagctaaaactaaatattgctgcttggggacctccttctagccttaaatttcagctcatcaccttcacctgccttggtcatggctctgctattctccttgatccttggtgagtatctctgcacctgttggtttaggcttcagagttttctggcactttgattaggagaactttctccccgccaacctggaacagatttagatgtttttcaaggatgagcttcttcctcctttttacatttggtaactattctaatccttaaaaagccgcttaatccatacacatttgtaattcactttaacagatttttttctattttcttatatttgtaatgacagagtcatgatagtttatcccatttctctttttacataagtgttcctaaatgtactattagtaagaagacaaatgaatgggcaccgggcagcagcaagtagagccaggaaaggaagtagaactgcaagacaatcacctttcattgatcatattgtctggtttcctctgaaaagtgtttcatataatgtttttctagttttcttcagtttctcattgcttagagtaatctagagattaacctagttaatctggtgattgtggagccaaggagacctggatttcaatcctgccgttttgatttcttagcggtgtgaattcgtaggttaccatacctctctgaaattttgctctctcatctatgaagtgaggataatattatgttcctcagaggtttttaggagtatttttttttataagataactaatataaagcatctaacaatgcctggtaaatccctatgctaatcaatcacatccacttttatgtcttgatgatctagtacatcaccaaagcccacacaatcctctcaactggacacttttgtgttcaatgtaaggtactgaccacatcttaaacatccatgcatcccccacatcactcaacggctagtcctgcccctcatggatatactactgggtcttccaggctcatgtgcacttccacctgcttcatgaagcctttctggcctgtgccttctgcagttacccaccct

SEQ ID NO: 497 - DNA, 6000 bp, Homo sapiens
ttataataacgatacaaataagacacaggatcacattgatttctgcttgacagaatcagagaaaagtttaagaaaaagtgatattcaaaatggagattctacaatgtatacgatttcaacaagtgatgattcagggaagtcatttccaaactgaggaaaaagcaagatcaaaagttaaaaacaggaaaatgaatatcaggttcccggaaaaggcaggtggatttttatggttgagagtctagagatcactgagaatggtactagaaaagcaggttatgaaaagccctggggccagggtagtggctcaggcctgtaatcccagcattttgggaggccaaggtgggagaatcacttgaggccaggtgttcaaggctgcagtgagccatgactgcccctctgcgcttcagcccgggcaatagagtgagaccatgtctcttttagaaaagaaagaaagaaagaaatgtcctgaatgccgaagagttgctaactttattcttataagccatgaagagctaccagtggttttgcaccaaaggcataatagggaagttcagtgtggcaagagcacgggagacagattgaagggagaaggtctatttgccaatccaacttttcttcccactctcacctgtcactattctaacccataacccataccttcacctggacagtttccctggcctttggcagatgaaaggaagggactgagaatgtagggaaggatgtacagagtccagtgagtgggaagacagatcctaagacccgggttggacttagcttccgtccctgcctgtgccatctcctaggcggatagcgtatggatggaaatggacgatgaggaggacctgccttctgctgaggagctggaggactggctggaggatgtcctggagggcgagatcaacacagaggacgatgacgatgatgatgatgactagttgctatggcaaccatctttcagccccactggtcttttcatgctctctcctgccttcccttgtccttccctgagttcctccagggagactaggttattctctgccatagagctaactggggtctatatgctgggtgctgagacactgatccccctcatttgatgagcaaatgagctacttttccctagacaccaggccagctctctcttatctgacttctgtttcttatcccataacttacttgtatctattatgtgtctcttccatcactctccatactctttcttgtgattctcctctagccatatatatgggccccatctctgttctgttccctccatctatgcacagctttcccccactctctctaatcctgtatctttctgactgtcctgtccttggccagaaggaagggagaatactgtgtttgggactgtatctcagcaatcacttgttaatgtatttgggtcaaatgagaggcctcaataaagacatctggggcagcatgaacaagtgtattttggtgaagtctcacccctatggcaggaggaggtggccactgatggggaattcagatgtgggtgccttgctagggatgagctgggggactcttatagtggggactggggttcctccaggcagctttcccagagaagcctggattgttaatctgcttcaagtcaacaagccttttctgaacacatggtgtttgtccagggccactgttaggctctgggagaacagagagtgctaggcctgtccctgatcttgagctgattagcctcacggagaagtcaagacaagcatactaaacaatcgaagaagaatacaaagcaatatgtaattaagtgattatgtgctgctcgatagcaccctctctgcagctcttatttgaacatcaagacagagctccaattatacttccttggtgaagccttcccagaggtggcccctccagtgatgacctcttctgagttcctgctgcacttccattccagtactcagcacagtctgttattgttcttcatttacgtgtctgtcttccccactcaactgtgagccccttgaaggcaggaacccaagctttttctttgtgtccacagggtctgacactcaaaagttgtccctagtaaatgtttcctaaaggaagaacaaaggaaagaacagaatgaactcagaagagagatcagagtgggcttgatgacttcacaaaggaagtaagcctttactaggccttaaattgaagaatgggatttggttggagacaaaggagctgaggaggagacatttcagtcagtggaaaacatcaagtactggcaggatatgtttgtcatattgggggcacagagaccagagagacaagaagaaaaatcaagttgtggccatgaagttgggtaagcataatggggctgggttgtagagctgtttgaattgaatcctgccagccgaggaggcagggcaaaatttaatctggtagcgataagcaggatggggaggggagatgatggagatgccagaggtaaggggcccaacccataatcagtgactgttataataattggagtgatgttgggagaacatggacccaagtggtggccatgggaatggagaggagatattgtatacaatggggatctcccagacctgggcctgctggaggtcttggcaagaaggacccacagtctttccagaataggcccaggctggggtaagcaaaaaggagtttagggagttggggatgggagggccaaatagctaaataagcccataaataataaacatatacatatatagttttgagatgatgcccatgaacaataaacattttatatatataatatatacaaatagctaaacaagcccataaataataaacattatatatatatttttgagatgatgcccataaataataaacattatatatatatacatatacatatatatgtgtgtgtatatatatatatttttttcttttttttttttttttttgagatggagtctcactctgttgccaggttggagtgcagtggtgagatctcggttcactgcaacctccgactcccgggttcaagagattctcctatctcagcctcccaggtaactgggactacaggtgcccaccaccacactcagctaacttttttgtagttttagtagagatggggtttcaccatgttggtcaggctagtcttgaactcctgacctcaggtgatccacctgcctcagcctcccaaagtgctgggattacaggcgtgagccaccacgccaagccaacattatatttttcatggatcaggtgtaaagttgttgctgagagacttagaggatttctaagtacggaaagatgagacctgagattagatatattttcactctccacagacaagtccaggaagtgttcctagagaatgtggcaggggtgtagaaagcagaaactatgtattcattccaacttgtagctatttaataaatgtttaataagtagtatgggcactaagctagtcttacaataatattgtggagcttactgtctagcataggtcagtggaaggccccggtctaaataatagctcctattttttaagcacccatctgtgccagtccctagagacttactatttctgaatctcagaagaaccctcagaaatagacattggcaccctgatctgaccggtgaggacactaaggctttcaggcataacttgcccaaggaatgggtggaactagcacgcagcccaaggcccctgtgtcttgttgcctccagacctgagcctttcacttagaaactacatgagtctcaaagatgggtcaacgaaatagtttttgtccctacaacacagagcaaacatgatatatacaaaggcaaatgattagtgtgtgacagggaatgctggggagaggaaacagcagagaaatgctatgaaacccagagcagcaggaacttgggcctcttctaggaatggtgtagacccaagaaaggaggggctcgtttgaggtttctggaggagtctctgccaggtaggaactgagatgagatgggtgatcctggaagtggcacaaacactgaggggaatcccccaacctgggcctgctggagttcctggcaggaaggacctacccagggtcagacttctttccagggccaaaccctgcccagagctgaggcaagaccccttaggctatagagatgggggtgaaaacagatgcttctccaattcttcctttcctcttttcagtctggctgagaatctgggggaggaaagtccctggggtagaggggaagtgagagctgccacattgggcctgggcagaggggcagagctaggagatggagctaagtgtggctttgcaagttgtctatatttgcatgctgagctcactgctgctctttttctccccagaaaataaaattacatcatggtagggggaaggcaggagtggggcatgtttgggaaaggtgagaggcacgcaagagggcctgaaggcatcatcctggaaagagaagatccagggctcctcaagtccccatgtggccccaacccctcactcccaatgtggataagtctgatcagtcattttccactgcgcccctgacccttaaggcaaggcaagaagtttttacaaatattaaagccagcagctaagagaatccagcccccaaaggctttccaaccccctaaaccaaacctactctgtgcctcccaggggtcctaggcaccgtggtcatccaaaggtcaaaaggggaggagggtgccctactgggtaagaattaaatatgagaattgtttcgcagttcagggggaagagaccgtctccgctccagccctccgcccaattctgtcccccatcctaggagtcttccagaaccccagcccctcggtcccccgccccctcctgcctctccatccctccccctcctcccgccattccccgccccccgcccctccccggctctgacatcaccggccagccgggtggagtgagcggcgctgggctcgggctccggctccgcgggcggaagaggcggcggcggcggcagaagcggcggcggcggcggcgggagccgaggaggaggttccggacgctgcttaggaaccggggactcaggagtgcccgcgccctgagcgctcagctccagaggcggtgagaggggcggagaggagacatgtcgcggggaaggggcagatttcggggtctaggcttggaggggcaacgatctgggacaccgggggccagacggggagtgtggggaccccggacgagtccactttgtgtcaggcctcacggggtccgtccctcggtcggtgcgtcccgagcgccgagcgtgtgctggaggcggcgtggctccggccagcccgttccacgctgaacggcagtttgggagtcggaccggggcctgtggattaggatgcagcctgcttcccgcccagccggctcggccaggccagcgcccgcccctccctccccgctcaggcttcggactcgcctccgctggcggtctcccggcccagccctgtctcggttccgcgggcggctggtaccatgtgccctcacccccagctcactgcacctggggaagaggtgggcttggcggaaagcttgtccagagggaaggaggagctgggggtgtagagaagtgatgtatatctaacgtaaaaacccttattaatttcatataatccgtgtcaaaactgacagggaaacacgcacacctataaggcacgccagcacacacagtgacacacacccatgtgacttatacacatagtctagcacactccaaatcacaaacgtccctggactacgcatccggccgcccaccacacccccactctgtggggtggggcatcccatgaggagtcttctgaactgcgggctccaagtcatcagtccgacaggacagctgagtggacagaaagggccactgtccccaaatccatcctgattttctggcagcttttcccagccccatggtttcagattgttcctctttaaaactgtggggaaagatgggagaaaatcttggtctcattcctctaacacaaggagacaggatttt

SEQ ID NO: 498 - DNA, 6000 bp, Homo sapiens
gtcttttttgcgggcttatgtggattacatctgcattccacacatcacagctacctctgtcctgatggctattcctctaggaaaagctaaggagcaatctacgaagacaatgaatacataagggagattgtttacaaaagaaaagtgttccagtgggtatagaggaaaaaatggtcagaggtgaggtagaaattttttactttccccaattaatgaacaccttttcccttcaaccttctacaggctgtttattcttgctcctgtaggaaggcgtggcaaggtatcagctttctctttgctacccactgctacttttagaccactgtgcttccatcctcttgcaaaaattcttctccctttgaagcttatgccatctggctttactgccctttaacaccttttttttttctttttctttttgtagtgcagtggcaataatcatagctcactgcagcctcaaactcctgggctcaagtgatcctccaaacccagccttcagcacctattaacctctttttgtgccaactcttactatcatcctgggaggttttacaaaaacccatgaaaaatacagttagttcctgacctccaactccaacgaatactcccactttcaattccttaatttcaccatttctagaaaaacaggtttttgttgatggcagcttcagggccatagtaaggactgggagagggtagcattcttcttctttttttttgaaacagggtctcgctatgtcactcaggttggagtgcaatggtgccatcaggactcactgcaacctcaaactcctcagtctcaggtgatcctcccacctcagcctcccaaatagctgggactacaggcaagtgcacacccacctaattaaaaaaaaattttgtagaaatggggtctctcactatgttgcccaggctgatcttgaactcctggccaaagtattgggattacaggtgtgagccaccacacccagccagggtatcattattaagtgtagtaagattgatggtgccagcactggctggtgttgacttgaagactcactgaaagactgggactggcagccatgatgcataagggcagaatagcctgggggttgtactgcccagtgatacttggggaaaggttcaagatctggatttgactcttgtgccaagcttccaagaaacctaggttcagaggtaagagcacctttcctatcagctgcctctgtggggacatctgacactttcaacatccacccccttgaaatactcttccctttgattctgtgacaattatctcccaggttttcttcttcttcactcgctgttccttttcaaagattctccaagagctctttttctacttgtgccttaaatgttggaatttccgagagcactcttcttagccctctgctcttttctggggagcttatccaaatctatggcttcaactaccaccgaaatgttgatgtttcagaatttctggcctatatatcacagggctttctaaaaagtagttttctggccaggtaccatggctcacgcctgtaatcccagcactttaggaggccgaggagagtggatcacgaggtcaagagtttgagaccagcctggccaacataacgaaaccccgtctctactaaaaatacaaaaaattagccaggcatggtggcgtgcacctgtagtcccagctactcaagaggctgaggcaggagaattgcttgaacctgggaatcagaggttgcaatgagctgagatgtgccactgcactccagcctgggtgacagagcgagactgtctcaaaaaagaaaaaaaaaaagtagctttctgtaaaataatatgtgcataataaaataatttcaagcaataaagatagatgtaaaatgaaaagtataagtcttatccctcctaggcccactcttcataattttttaatgcatgtgtaaatgtgtcatatttattctgtgcttgctttttttctccacttatatttttctcttaagttttagatctgtgtattaaacatgccactaggacatatctatctagctatctcacaggtacctaaaacttcttcaccttctttggaattctccctcctgcaacaccctaccactagtctcctttttacatcaacaccatgaaaaaactgtctttatacgttgtgccttctcaattcaatctggtttctatccaccataactacaaaacagctttctccaaatttcctaaatgacctccttgttgcagtatcttttttggggggacagagtctcactggagtgcaattgtgcaatttcggctcactgtacctccgcctcctgggttcaagcgattctcccacctcagcctcccaagtagctgggattacaggtgcccgacaccatgtctggctaatttgtgtatttttagtagagatgggagttccaccatgttgtccaggctggtctcgaactcctgacctcaggtgatcggcccacctcggtccccaaagtgctgggattacaggtgtgagctaccacacctggcctttttatttatttgttttatttacaaaaaaaccaaagtcttgttctgttgccgagagtgcagtggtgcaatcttgactcactgcaacctccgcctcctgggttcaagtgattatcatgtttcagcctctggagtacctgcgatcacaggtgcgcaccaccatgcccagctaatttttgtattttttgtaaagatggggtcttgccatgttgaccacactggtctccagctcctggtcttaagtgattcacctgcctaggcttcccaaagtgctgggattacaggtgtgagccactgtgcctggcccttgttgcaatatctgatagatacattttatttactttattttatttttttggagacagagtctcactctgtcacccaggctggagtgcagtggcacgacctcagctcactgcaacctctgcctcctgggttcaagcgattcttgtgcctcagcctccccagtagctgggactacaggcgcgcactgccatgcctggctgatttttgtatttttagtagagacggggtttcaccatgttgaccaggctggtctccagctcctgacatcaggtgatctgcccgccatggcctcccaaagtgctgggattacaggagtgagccacagcacccggcctatttatttcattttttttgagacagggtcttgctctggtgcccaggctgaaatgcagtggcgcgatctcggctcactgcaacctctgcctcctgggttcaagcaattctcatgcttcagcctcccaagtagctgggattaccggcatgtgcaaccacacccatctaattttttttgtatttttagaagagacagggtttcaccatgttggtcaggctggtctcgaactcctggcctcaagtgatccacccgcctcggcctcccaaagctaggattacaggtgtgagtcaccatgcccggccctgatgtatatattttagttagcattttactatatctctgttacactaaacgctttcaccagtttccttgatagttctctatggttttcttctttcctttcggtttgccccttctcagtgttcttttcggcttccctcatcctatcccgcaaatgcaggtatcctctccagcccacttcatggcttcaacagctatctatatgcacacgcacacacacctcaaacctttcttttgagttcccaacccacattagctaatatcccaggggcacctaaaactcattatctcccccctaaacgagaaagaaactggtatcattattccccagttgtccaagtcacaacattcgtacctcttaaaccaatctgtatctccccatccgcactctcccttccacaggcagaccatcatcatccttgcctggaaaagagcctcacaactgctctccttgattctcctcaattcattcatccttcacactgcacgcagcgatctaaaatgcaaatgaaattgttcacacctctgctgagattcttcaaagacttttcattgccttaaggataaaaatcaattaatttacaaggcttcgcataatctggtcttcccctatctattaccactttcttaagccacaccagaacgtacccgcaccatcctccccacccccaattcccaacagccctacacggatcagctaggcgacacttcctacaggaaaccggcgttcaaaaggtaaatgctgaacaaatgaattccgagacgggatctgggcaccactttcggctccggatccgggtttacggaacgtccgggttatcaggaagctcagaggaaaggtgaaatccagatcttgacccttcactcaagttcgccagacaaaccgatccccgtggtattccgcccttatgagtcatggctgccaatcccagccttccagtgggtcttgaagtcgccaccagccagctgtggcgccaccaatgtttcccattcaagaatgctatcctcttcgatcccttattaccgccctaagcagccgtcaagacaaaccggcgttgccagcttgccccaaagcaagatggctgccaatctctatctctcctcccgaagtgaagctatccactccccgattaatgccgctgccaggctgccctcacttactatggctactccggctcatgtctcactatggcctcgaagccgccactaaccggccgggttccgggaggcgccgttcaggatgcagccacccccgcccgcctgtcccctcccccacggccgcggcggcggcggcggcggcggctgctggagcccggatgcggcgccgtgaggcaggcccgggagagcggcgcggatggatccaacatggcggcgccgagcctgagccgagagtgaggcggaggggcggccggagtggggagagggagtcgagcgggacggggcggggccgggcggggccgcaaagggcttggggaaggaaagtggagggggaggcggtggcgacgtccagcctgagaacctcaagagagggaggtgacgggacgctgagaggtgggggaggggagctgccgaggggggcgtgcaggggagatggcaactgcgggagagggcaggggtcgagacggaggagtgagggcatggggaggggcgtaaacaagggctgagactgggcccagccaggggtattagagaggccgaggtggggagtggggctgcgatccgctcgtattgaagggggtaggagcaggagggagaggctgagggtgtgaaggggaagggggctgtggcatgtggttggagggaggactggactctgatgaggggtgttgcgaggaggtgggtaaaggtcagaattggagttaagacgtttctggggggcttcgaaagtgttaaattggaggtgggagggggaagggcctaggggagaatttgggtggaaaaggagagaacggaggcttggggaatggagagagtgtcggtgggaggaggtaatggagaaagtgagagactgggaggaagaaagtttgggaggaaggggagtggaatgggagataggacagtggagctgcacgggtgatagaggttcgggggtttccctttccccggtggagaggaggagagaacagagttaagcagcatcagttgcagccaattctaattgccaggcccttagcttttaagagggtgggaagggcagaagggaatggtcatgtgggtttgcagaattggggttggatgagaattcaactgggtttgttttccaaaagactccctagcttactgttcccttgtttttcctgcttgggaaaatggggaagccggtgtcgcccaagtgtggaggagcaaaggacttttctagtttttagcattagcaatacaagagtgggggagcagacatggctatattggaaccctatatgctaaggtggaggctctggaagtctgaggagggaaagagaaaagatagagtggcatctagacaggttaattaaatgagtgctgtagtttccagacccttttgctgttttaagtctggaagggagggggta

SEQ ID NO: 499 - DNA, 6000 bp, Homo sapiens
ctgggtacaaatgaaggtgctaaaggaaaataagttattgctcatagcaggcaacatgagaaaactgagcctcctcagagcccctgcaacttctctttgttccctatcccacctgttcccttgggccagctgttgattgtgaggctctcagataaagcagattgggtaggtttcacattaaaccaaccagaagagctggttgctccacagttccctaatttaaagtgtgcttaaaccccaggaaatgaagaaacactgtccccacataccctcgcaatggaaaataaggcaaaatacaggaaagcactgtggtcctaattatgtatcaatggatgtaattctataagcttcaatcctttgaagttaactccctacatttgagaggaaacaaacacactagccacctttaagtcctagatcccaggctagatcatcaatgtactaggaattataatagcttttaggtcagtggttctgaaccaggggcaaatttgacccctggggaatatgtggcaatgtctggagacatttctgattattatgcctggtggggaaggggactgccatcagcatgtaatgagtagaagccagggatatttagaaacatcctataggacaggtgcagtggctcccgtctgtaatccctgcactttgagaggccaaggtgggaggaacacttgagcccaggagtttgagatcagcttggacaacatggtgaaaccccatctctatgcaaaatataaaaattagcctggcgtggtggcatgcacctgtgatcccagctacttgggaggctaaggtagaagaatcgcttgagcctgggaggtcgaagctgcagtgggatgtgatagcgccactgcagtccagcccaggtgacagagtgaaaccctgtctcaaaagaaaaaagaaacatcctgtaatgcacagaacagtctgccacaacaaagaatcatgcagcacaaaatgtcaataatgccaaggatgagaaaccctattctaggtggagcatggtaaagggtcaaaagaatgcatgtcactttccacactagatctagaaaaagccatctggtccctccatccaaacccatcaaacaacattccagaagaaaagaaaagcctgtcggacatacatgttcatttaactcccaagtccaactgcactaaggtgtttcatgccactccaaccttgggtcctctgtcacctgctgttgccattcagctgaggaacaggtggtagttctacatccacttctgccccatcccaggaggtctactttgacctagttcaatctggagttctatggggatattagaaatgtaatcctctgcaagacagacacaaaggatcctgctcgtaagcctcagggtcatctttaaagtcttggaactggatgagcagcaaattctccttgtgaggtcactaatcagacttatattgcttattcaatgaagcaaacatagaaatatgtaagttcctcaaggccatgtgcttgggagaaatatgaggatactgtcatgcaggttaagaggcagccctctccacttaatgcaacccagataagggttccaagaatctatctaactttaacattaaaagaatgtgatgaggcctcgcatggtggctcacacttgtaatctcaacactttgggagaccaaggcaggaggactgcttgagcccaggagttcgagaccagcctgagcaacatgacacaactccatctctacaaacaataaacaaaaattagctgggcatagtgggacatacctgtggtcccagctactctgatcgcaccactgcactccagcctggggtacagagtgagaccttgcctcaaaaaaaaaaaaaaaaaaagtgatgaaagttcagctgattagtaaaattagaaaagaaaacatgaccaatttcctctaaaaccaaaatatactcgtatttctgtgacagtgaagcaagggagctcaacttaaaacatacagagattctagatgacaggtatcagaatggtgaggagaatgtaaccctctgaacagaaaattagaactaactcaagtcttggtatctgaaacactgccaaataccaagagacgaaactccagcacacagaaagtcctgatcccactgactggtctggctgtatttgagatagtaacacatgaattctcccctacagtttcccaagaataattgattctgaggaattgttgtatttcctggagttttgcttttttctttagagaagtccaagtcagccaagggccaacagtctataggtatcttcaggatttcctcctgattggtccttctctactatgtttctacttccaagcaaagtctggtctcatcccaaccaggaatatctgtagtttttgaggtacttggctctctcagaagcccttaggggaaagcgacatgaaagaaataaaaaagagtgctgtcttgaaatgaaaatgacagtcatcttttctgaacagggatgatatttgtaatttcatagaattaagagatatctgactctctcagaagtcctcagaggaaaagtcatgcagaagaactacaaaaaaaagtggtatcttgaaacttaaattaaaactacatagaaaatcttaaagatggttaagagtacattcttgctggtgggataggaaatgtaatcaaatatctggaagtcagaattacatagtatgttttcaaaagaaggatgccaggaaccccccaacagctgaaagagaaagttagaggaaaagtttcccacggaaggaaggtgtcccagcaaccctccaagggcaacatttagtagacaatgtactagaatacagccttccatatgttaaaaaaaaaaaatgtttcagagctgaccaagaagactagacaataacaaaccaaagctgggggattgtcccaagacatctaaatctccttctctttcacctcctatctccaattaactaaagacagtgattacaacagatctcatgcactcagatggatgaatgataactcattttccctggcattctcctcctcattaatggacccaacctcaaaataactcccatgctatttccattcccttccattgtttgaaaacaataaaaaagttccagacttacctccgcaagaaacttaatttcccaggtctcttcctagcacaagtttcacagccagcagcaaaacaaaaacaaataaggaggggaaaataattaattttcaagttttactttgaaacctcagaggcccatagaattagacaatctcgttgcaaaagtacacagacaagcctaaaaccatttagagaactcacccccaacaagtctccaggcttccctaactctctattagtcaatttacaaaaacaataccaactccaagaatttccagtctcaatggcttgcggcaagacagctcccaaatttaagaacttctgggaaaaccaattaccctctggcagcttctcatcttcctccacaattccttattcctattttgttacaatattaacgttaactttcacctttagaaaaaactgggaggaaagtggttacagcagaccagcactatcctccaaattctacatttggccctttcccttaactagcacacaatgagaacaaaatatctaatggcgcagcatccactcatacgtctatgtttcaccagggaaaagtttttctacatacagtatccatgttaccccctcccttccagacttaaaacagcaaaagggtctggaaactacagcactcatttaattaacctgtctagatgccactctatcttttctctttccctcctcagacttccagagcctccaccttagcatatagggttccaatatagccatgtctgctcccccactcttgtattgctaatgctaaaaactagaaaagtcctttgctcctccacacttgggcgacaccggcttccccattttcccaagcaggaaaaacaagggaacagtaagctagggagtcttttggaaaacaaacccagttgaattctcatccaaccccaattctgcaaacccacatgaccattcccttctgcccttcccaccctcttaaaagctaagggcctggcaattagaattggctgcaactgatgctgcttaactctgttctctcctcctctccaccggggaaagggaaacccccgaacctctatcacccgtgcagctccactgtcctatctcccattccactccccttcctcccaaactttcttcctcccagtctctcactttctccattacctcctcccaccgacactctctccattccccaagcctccgttctctccttttccacccaaattctcccctaggcccttccccctcccacctccaatttaacactttcgaagccccccagaaacgtcttaactccaattctgacctttacccacctcctcgcaacacccctcatcagagtccagtcctccctccaaccacatgccacagcccccttccccttcacaccctcagcctctccctcctgctcctacccccttcaatacgagcggatcgcagccccactccccacctcggcctctctaatacccctggctgggcccagtctcagcccttgtttacgcccctccccatgccctcactcctccgtctcgacccctgccctctcccgcagttgccatctcccctgcacgcccccctcggcagctcccctcccccacctctcagcgtcccgtcacctccctctcttgaggttctcaggctggacgtcgccaccgcctccccctccactttccttccccaagccctttgcggccccgcccggccccgccccgtcccgctcgactccctctccccactccggccgcccctccgcctcactctcggctcaggctcggcgccgccatgttggatccatccgcgccgctctcccgggcctgcctcacggcgccgcatccgggctccagcagccgccgccgccgccgccgccgcggccgtgggggaggggacaggcgggcgggggtggctgcatcctgaacggcgcctcccggaacccggccggttagtggcggcttcgaggccatagtgagacatgagccggagtagccatagtaagtgagggcagcctggcagcggcattaatcggggagtggatagcttcacttcgggaggagagatagagattggcagccatcttgctttggggcaagctggcaacgccggtttgtcttgacggctgcttagggcggtaataagggatcgaagaggatagcattcttgaatgggaaacattggtggcgccacagctggctggtggcgacttcaagacccactggaaggctgggattggcagccatgactcataagggcggaataccacggggatcggtttgtctggcgaacttgagtgaagggtcaagatctggatttcacctttcctctgagcttcctgataacccggacgttccgtaaacccggatccggagccgaaagtggtgcccagatcccgtctcggaattcatttgttcagcatttaccttttgaacgccggtttcctgtaggaagtgtcgcctagctgatccgtgtagggctgttgggaattgggggtggggaggatggtgcgggtacgttctggtgtggcttaagaaagtggtaatagataggggaagaccagattatgcgaagccttgtaaattaattgatttttatccttaaggcaatgaaaagtctttgaagaatctcagcagaggtgtgaacaatttcatttgcattttagatcgctgcgtgcagtgtgaaggatgaatgaattgaggagaatcaaggagagcagttgtgaggctcttttccaggcaaggatgatgatggtctgcctgtggaagggagagtgcggatggggagatacagattggtttaagaggtacgaatgttgtgacttggacaactggggaataatgataccagtttctttctcgtttaggggggagataatgagttttaggtgcccctgggatattagctaatgtgggttgggaactc

SEQ ID NO: 500 - DNA, 6000 bp, Homo sapiens
atttataattttattctttatttattcatgtaataagtttcatgtaaaaatcctgtcattcaaaaaccatacaccacacattctcacttataagagggagctaacattgagtacatgtggtcacaaagaaaggaacaataaacaccagggcctaattgagagtggaaggtcggaggaggatgaggctcaaaaaactgcctatggggtaaaatgctcaaaactgtctaccatgatgaaataatctgtacaccaaaacacgtgatgcacaatttactgatgtaacaaacctgcacgtgcacccctgaacctaaaataacatttggaaataaattaatcttgtaattacaattttaaaatttacattaaagctggatgcggtggctcatacctgtaatcccagcactttgggaggctgaagcaggtggatcacttgagctcaggagtttgagaccagcttgggcaaaatggcgaaacctcgtctctacaaaaaatacaaaaattagctgtgtggtgccacgcacctgtagtcccagctacttggtaggctgatgtgagtggatcccctgaacctgggaggcagaggttgcactgaaccaagatcgcaccaccgcactccagcctgggcaatagagcgtgactctgtctcaaaaatatacagagagagataatttgtttttataatatttatgtttataatagatatgtataaatcatccttcacaaatcaaattatactataaatgaaatgggatagccactgatggacttaggagaagtctgctgagggtagggtatacaggtatatagcatcccagtgcctccctgtgctgtccaaacagtacaaatatgatgagcttatcattatttttcatgccttaatgtggtgattgaagagctcataataggaattagagaagtgtcagctcagactttcttgttaacttgtgtttgcattattaatattatcatcaatcaaggatttcctggcaatgatcttttttaagccacatgtcctttttgtgaaggctagtttcattgaattgaaatgatataatctataaacctatagaacccagcctaggcaagctgccacaggccacagtatgccaagagcagataacttaagtgagggtgccacagccaagccctccacatcctttggggtcaccacaaatggcctgtgcctcagaccttttgccacaagacttatgtcaatatcaactcatatattaaatacagtaaagtttaatgtaagtcttacatttagaacaaaaatatggtagaaagataatattttcttcttgttcctcagtggatggtttaactcactgactcctcttataagatcactagtctggtatatgaccagctaacagagcgtaagtaaaaccacacctacataaaaccagagacaattcttcatttcaaactaccctaattacttagaatgtgctagatccactttcttgtttcacctcattcctcccttccctgctcagcggtagtcacccacagagcaactcttctcaggtcttcaggtgatcctggtggggaagaagtgcactaaagccccactgtcatcagtgggtggtgtctggactgtgttgtttatgcatctggactgcactagcttttagtcatctctatgctctcccagttccattcacctcataactgcctaagatcaatgagtgcatgtagatttccacacctcttgcagcctgctcttcagcagcatccactttgcaatatatttgcccaagatttagatcagtctccacatctcatcttaaatactgctggagtaaaaccgcacctctgggatactgatgcatctgcaaatctccaatttccaccttcagtgttgcttggcaattcatacattcattcaataatgtatgtaggaaggtatgtatgaatgtatgaaccagtgttgtaatgtcatcaagatggctgattagaggtgcccaatgcatgtcttctctacaaagaagaaccaaaacaacaaataaataactgcacttcgagtagagtgtctaagggagaacactggaattctgcaaggaaaagatgaaaaccctctgaaacatggaaatttgagatggcagcatgaagaaggaagtaaagtgaccaggtgggattggcttggaactaagagacatttcccattgtaggggaaatgtaagcaggcaagtcccagaagtccccattactaacatgaatacctgcaattctaactacaggagaacttcacaactcttttaggccttgagccagtttagggagctgcatggaaccaacacagctatattgtttcagtgaaggaactcacactgtatccctttcagaccagtgctgctgtgccatggtgcaattttgaaaacagagccattgctggagtgccccctgccctggtgctcaaacctcctgcacctccacatcatgggatctgctgtcatcctaccacactcatataaaaagatgcaatgccatgaccccagcttgacctagcagtacagatgtgacactagcacctaaactcacatggtgtcctaaacttcatgcaacagccagtccagcacagtggggatgatgtccccaagactaggggagccaatgcatacactccccaggacctgaaacccacctgcctagtgcccaccactgttagcaacattgtccccttcaccaccagagccacggtgtactgcatgtgccccagaaaccagggaccagactgcccagctcctgccaccaccaatgaacccacaaccttgacttgaggagctgctacatctagcagcacccactccctgcagggcttgagaaatagcctttccagtggctcccatctgcagtaaagccatgccactgcctccacaaacacctacggtcttggccactgaggcactcacagatactgctggcattgattacagtcaaaaaaagatttacatgattacagcactgtgctcacccacaaccaaagccaaagtactttacccaactgacacaataggatgcacttacagaaaaaaaagtctttccttatgaaatctactagataaaattggaagaggtaactgtttcagcagatacccggatttcaatgtagggacccataaaacatgaaaaagcaagggaacgtgacatcgccaaaggaacacaataattctccagtaacagacttcaaagcaaagaaaatctatgaaatgcctgaaaaggaattcaaaatagtaatcttaggaaaactaagcaagacacaagagaataaaggtaaataattcaatgaaatcaggaaaacaatttgtgattttaatgacaaattcagcaaagaactagatatcataaaaagaaccaaacaaaaagtgtggagttgaagaattcaatgaataaaataaaaaatacaattgagcgcaacaacagactaagtcaagcagaagaaagattttgaatgtgaagacaggtcttctgaaataagccagtcagacaaaaaataaaggataaaaaagaatgaagggagtttatgagactaatggaacacaattaagtgaacaaatattttcattataagaattctagaaaaagaagaaatgaaaaaaaggcatagaaaacctatttaatgaattaataagtgatgactttttaagttttgggaaaggtatagacatccagattcaggaagcttaaaggtcccaaatagattcaacccaaaaaatatcctttccaagaaatattacagtcaaacagtcaaaagtcaaagacaacaagggaattctaaaatttatcacaagggaaagatgtcaagtcccatatgagggaatcattattagactaacatcagatttttcagcagaaatcttaaagatgaggagagaatgagatgatattttcaaagtgctaaaagagaaacagcagcgaagaatactatacccagcaaagattgtctttgctagacaagaaaaacaggaaatttgtcaccactagactggccccacaagaaatgcttaagggagtcctacatctagaagtaaaaggatgatgactaccatcataaaacatgcaaaagtataaaactcagtagcaggcatatacagaaatttgaagaaaaaaaaaggagtcaacttttgtcactgcaaacataccgccaagctataaaaataaacaataaaagaggaagaaacaaaggatatgcaagataacctgaaaacaactaagaaaatgacaggagtaagttctcatgtatcaataaccatcaatgaaaactgattaaattccctaattaaaagatataaactggctgaatagataaaaaagaaagacccaaatatatgctgcctagaagaaactcacttcatctaaaaagatatacacagaccaaaaatggaggaatggaaaaagatattccacccaaacaaaaatcaaaaatgagcaggggtagctttacttatatcagataaaatagactttaagtaaaaaactgaaaaaagagacaaagatgttattacataatgataaaaggatttattcagcaggaggatataacaattataagtttgtatccatccacactgaagcacacagatatgtaaagcaaatattattagttctaaatggagaaataaacttcaatacaataatacttggagattttgacattccactgttagcactggacaaatcatctagatagaaagtcaacaaagcaatatcagatttaaactgccctatagaccaaatgaaccaaatagacatttacaaaacattttatccaatacctgcagaacacacattcctctcatcaatacaaggtacattcttcatgaaaatccatgtgttagaccacaaagcaagtgtcaaaaattttttttaatcaaaatcatatcaagtatgttttctgacaacattagtataaaactagaaatcaataacaagagtaattttggaaactgtacaaatacatagaaattaaacaacatagactttaacaacaggtagtacttttcctgtggcagcagctgggctgagaggaacatggctgtctcctctctccaccatggcatgtgctcacccactgatataggtgtactcccaaaagggggagtcatctggcaaaaatgttactatgtctgctgtattcaaggctcctatttgactggatattgtgaactttgttcacaccaacttgcacaaaaacaacagacagccctacgttgtcagtgaattagcaggtcgtcagaccagtgctgagtcttggggtactggcagagctgtggctcacattcccagagttcgaggtggtgggactcaccgttctggccagggtgcttttggaaacatgtgtcatggaggctaaatgtttgcaccaaccaaaacctggtgccattggcatcacagagtgaacacaacccaaaaacgatatgccatctgttctgccctggctgcctcagccttaccagcgctggtcatgtctaaagatcatcatattgaggaagttcctgaactttctttggtagttgaagataaagttgaaggctacaagatcaaggaggctgtttcgcttcttaagaaacttaaaggctggaatgatatcaaaaaggtctatgcctctcagcaaatgagagctggcaacagcaaaatgagaaatcgtcactgtatccagtgcaggggcccctgcatcatctataatgaggataacggtatcatcaaggccttcagaaacatccctggaattactctgcttaatgtaagcaaactgaacattttgaagcttgctcctggtgggcatgtgggacatttctgcatttggaccaaaagtgctttccagaagttagatgaattgtatagcacttggcataaagctgcttccctcaagagtaactacaatcttcccatgcacaagatgttcaatacagatctttagcagaatcttgaaaagcccagagatccaaagagccctttgagcaccatgcaaaaagattcattgcagagtcctaaaga

SEQ ID NO: 501 - DNA, 6000 bp, Homo sapiens
aatatgcttagagatctaatggaaaaagtaaacaacaaagaagaacaaatgggtaatgtcagcagagagatggaagttggaagaaagaggaaattctagaaataaaaactatcataacagaaataacgaatgttttaatgggctcattagtggactggacacagccaaggaaagaatcagtgaacttgaagatatgtcaaaagaaacttcccaaactgaaaattaaaaaaaaaaaaaaacagaaaagaaaaaaataccagaactatgggaaaattacaaaaggtataatacacacataatggaaataccagaaggagaagacagaaagagagaaacagaaaaaaatagctgagaatttcccataattagcaattgacaccaaaccaaacagatccaggaaactcagagaacaccaagcagaataaatatcaaaaagtttacacctagaaatatcatacctgtgatggctaattttatatgtcaacgtgactaggctaagagatgctcagatagctggtaaaacattatttatgggtgttcctgtgagggtatttctggaagagattagtatttgaattcgccctcaccaacataggcaggtatcacccaatccactaagggtctgaacagaacaaaaagtttttattgagctgggtgtccatcttctcttgccctcagacactggagctcctggttctcaggccttcacactcaggttgaattataacacccagctttcctgcctctccaaattgcagacagcacactatgagactcagcctccataatcacatgagccaattcccttcttcttctttcttcttcttccttccttcctcctccttcttctgcttctgcttcttctccttctcctccttctccttcttctctctctctccctcccttcctccctccctccttcctcccctccctccctctactccccttctatatagagataacacacacattttccaaacttctctcatacaggtgtgaccatgtaactgatcccaaccaatggaatgtgaataaaagagacatgtgtcactgtaggggcaagaaaaggttgtgccttctttgttttctctccccttcactctggcagatggagaaaaccacaggccccaggtggcgacaaagccaaaagacagaaggaacacggatcctaaatcacggcatcaggagtcacctgtggcagaaacacgctggactattacatcaaccacacttctgttgtgtttgtgcctttatgcatttggggtctgtttgttacagtagctataatagtatgaccctaagtgttataattccctttcctcttctaaagaaaccactgagtgttccttaactctctgaggtgctctaacaacacacctcctctccaagaacttctaagtccttccaaggaactgaccagagcaggattttccttaccattttatcaagatgtcccaggaataacttctggctttattgggtaatatttttgaaaacagatagggtctcactatgttgctcaggctggttttgaactcctggcctcaagcaatcctcctacagcctcctgagtagctgggattacagatacaagccagcatgcctggcttcttatggggtaatttctagggctagggctcatatcttgctcttcctctgaagtgccagaatcccaggaaagagaaagatacagtcagcagtgatgctccttccccatttggttctctcctcctttcctccccatctaggatttccttgtccacatacctgaggatatgtaccacaaaatggtcaattctccttctcctgcttcagagcaactccttgagggccaagactgggagccctaaggccaaggttgcctcttgtcatcatctcaataagctacacccttaaaattgctctataacaaggcaccccagaactcagtagcttaaaacaacaataatctcttctaatggtcactggtcttcatattagcaaggatagctctgtaacacatgcctccttctgatgcctaagttggaggggcagtgactacttaagcatgcttttgtcatagcagagatcaaaagctcccagaggtgcaaagagaaacttctgaggcctcttaggactcaggactcacacacagtcacttcctcccacattccattggctgaagctcaccatagaagcaggccaagtgaaggtgcattgaagtacattctgcacatgacacttcagcaaaggtgtggcttataacactaccacagggacacaaagtaccaagactattacttcagtctacagcggtccccgaggaacagacgtatgtgggcccgtggctatattgacctggccatggggcctctgctgaaggaaatcagaaatgtgtattcaccagggaacactacagttagaaatgagtattttgtaaaatttgaggctctttggaattcctatagtttgggtactataataattcaataggaggaaggatgaagtcagaccaacagcatcattaaagaactattatgttgattaaatggatgttcggctgatattagccaccaactaagagaaactcatcctattgaattaccagagtaatgcactgtctcaaagactggcttcaatcactccccattcagactcagataaagtcttatggagaatgggaacaataacagagctgagagaatgttaggacaatatatggttcaactctctttttgcagatgaaacaccagcaaagagaagcacaatgacttagaaaaccacttaaacatgagtctgtagtgtattgtgcctaggccagcacgttgctcctagagtaagtcttgttagcaattacagacccgtaaaaaggtggatcctctaagatcctctaacagtaattgagatcatggggctgtgggctcaaagtcaagaattcgggtgggtcactcttaatttcttcccagggacacctaatccaagcccatgagaacattagggctctcagagactaaaactctaacatagtagggtttttcgtgtgtgtgtgtctgtgtgtgtgtgtgtgtgtgtgtctatctcaaaactgtattaatttcttttctaagatgctggggtgccagcaacatccctattactcttctcccttcctaatgtcctcctcactttctgtttgaatctgccatttcctcagaaaaattaagagggcaatgtcaatcaattcaaactaacatgtcactcctgttctacaaatacttacttttacacaaaaataattgttcattaaaacaaaaaagtaaattctagcctccctcccaatatttgaacgatcttttccacccacagattagatcttctacggtcttgggttgtcaccgtgattgcacttccaagatgtgtacgttatgtcatgctacattttacgtgttaagagcacagtgcacagtgacctctcccatgactgagagaagtaaaattcacatgtaagtagtagtggccacaaaaacttggaaagacaggtcttttccaacagatattcaggtctcagagacaatctgaagagtttgacggactctttccttgaccaaagtttaatcaggcttaagtcctcttcttcagcaggcctccaccctggtcccctgaccactcaccccgaacctttggcctgcccagctctattttagcaagaaccctgctaagttaggttagagagaaatcaccacccttgatatctgatcaccctggatatctgatcaaatttctcattcccccacccttgatatctgatcgccctagcctgccttcagcaagaatcctgttaagtgggttcagcaagaatccctctaggtgcttgatgtctcgtatcagtaactttccatctactgaccccttcgttctgctccttggctatacatccccagctgtccttactgtattccgtgttagacctcatctctccccccagtgtgatcatctttacacctatagcaataaccctgtataaagtcttccttactgttttaacaagtgtcagaataattttttcttcaacaagttctcaacaaaaacccatacccagaatctttttctggaatgaaaagggcttcagggcttctcaggtcacttttgttgtattgcccacagagctgagagtaaacaactcctttggacgttttggagaagaaaggtccttctatacacccacttcatccaaggaattacatgcttgggatattaagcaacagctacaaaaatcaggaagttccttctccatgtatatgacgaagttctggacaggagcccgctgccagaatacgaatactcttccccaaagacccctcctcatgcccctacacgctcttgccggtctagcctttcattgcctgaagcacggcgagaacgcctggagagctcgtccaagcaagtgcaacccgctggtgactgcaaatgagcacatggaactgtgcgcccacgctacgctcggttaaaatcaatctgggctcttcctgcctcgtccacgccgaggtcacacgcagcactggaagcggcctgcatcgggcggggcggggaaggccgagggcacggctacccaggcccgccagggactgcccggaccggccggaagccgcgcctagaggagggccccggagctcgcgcgggcgccgtcccccggcgccgccgaggcctgctgacatcagccgcgctcctcccctcgcctcccaacaccctcagctccgggccggaccctccctcctcccaccacgtgtcctccccgctccctcccgaggggccgcgcgcacgggaggacggagaggcggaaaggatggcgctgtgacagccgggccggagccctcgcgtccccaccccgcgccctggccgctgggcccggcggtgagtgcgcgcgggcgggggcggcggcggcgcggcccctcccccgggtcccgggcggctgggccgcggcagaggcgggggcgccgaggctgcgccgccgccgccgccgcctttgttgcgggcccgccggggaggcgggcggcgccggctctcgccgcccggcaggtgcgctggggccgggagggggccaggtggggaggcgggccgggcggagggggcagcggaagcgctcccggcgcggttccgcggagaaagggaaatggggcaagatggctggagaaatccgaacgcgcccgggggcgcggcggcggtggcgcaggcggggcagggcgggcggcggccctggttgcggcaccttagcgcggggaggcggcccctcccacctctgccccggagccggcagggagaccgccgccaagttcgggccccagctgcaggcatctgaagcctagacccatccatgccgcgttcgcctatcttttttggaaatatcgaaggaaccgactttgaactccagagggatcttttctttggaggttccccgatgcagccctcaagatgcatccgcactccacacctaggaattgcccgcgcccatagagggcaggagtgcggccctttgtactggccaagagtcagcgaatagagaatttgcagcccagaggcaatgggttatttccctgtcggggtgggccccagccgatttctgcacctttttgggtatccaggcataaccctcactatgtttcactgactcctgcgtttgcaaagtcccttaaggtagaatgaccctattttctgaaccagctcgtggacagaacctttgaatttggaaaatccaggcaatgggcctactgagccaaccgctccgcccatgcttaactggcttctagcacccattccagttgagtaagtgtccaatctgtgttcagacaccttcactgataggaaatcagcacctttcccctgcctctgattcctgtttgggtggcactggctgtgagaaagtactgcctttctcactgcttaaaaccttttccaggagtatttatccactggccggcctctgttctgccgtccagtctctacaaaccagtctgggttctcttccccagatagctttttaaatat

SEQ ID NO: 502 - DNA, 6000 bp, Homo sapiens
ggcgtatctactcctccacaggcccattgcagggaataaatgaagcagttacaggccctttcctagtacgtgcttcctatgtatgaggtgctgtggaggtggggagagaacaagggggcttccttgggtcagggaggaaaggccaatgtatgtaagtgactgttggcctgacccctgaagtggctgcaggctatatagcatatggacactaattttctaagctaaggaaaaacagtatcataatcacccagacccaagatacagctttgggaaatagctttgaaggcaagaatacaaaataaccagcctgaaacaagccatccagtgccttcttatcactaaataggatgagctttggagtaggatttttaatgactgtaataagaaatacagttaaaaacaaaaagaggaggttggtttgggtggcttggctgccttgggctactgaggagccccctggtgctgggccaggaagcagaggaacaggggagggatgcagtcctttgggctttctgcctacctggtccaggatcaaagtgaatgagtttgctctggcatctcattacatatattaagctgtaattagcccttctttcttcctcttcatgctcttgtggattggaaaggccaaatagggccccttctctcagtggctcctccctgggcagctgtgggttccaagtctaacactttggttagtacccttggaaatgcagtgccctggaaacccacaaagatcccacggagggcagtgatcctattcagatttacaaacccaactcaccccgcccggggccgagggtctttttctggggtgggagggaattgggggtgcttgtgttggtgggacactttgtctgggtgtgggtggcttaagtcttgggtcagaggtgagccgtgagcagctctcaccacagtgcatgagggtgcgatgtcccatgtcctccaaccggtgatcatggtagggagttagttttcttctcaaagtgctgcttaccttatctgaactgagggtggcagctgctgtggtgggcacagaaggactgtgctcttgcccttgttggcttccagcagctgtatgaatgtggacagtccgttttcccctgggtcagggtccctcacctgacctgtgagaggacaggctgtgctgggctgtctgtaaggtcctgtccgctctgaaagtctgtctgcatatgcctgtttgtcattgtgaaagggctgttcactcttccaggtaccggccctatttgatgaggtggccatatatttttccgatgaggaatgggaagttttgacggagcaacaaaaggccctctaccgggaagtcatgaggatgaattatgaaactgtcctgtccctgggtaaagctgtgttttcctttgtctcctggaagctctgagcccagagaattgtttccatgcctctcttctctggtatatccaatgtccctctctcctgaacttagactctgcctcctcaatgtctgtgcccatttattccaatttttgatttgggcagtatatcaatattgtgtcaccctactcggcaatccgtgctgcctcagaactgcccccattcaacccaggcattcacatttaaggataaaaaccatgtaaccttagaaatgtcaccatggatctgggcctgtgcctcactgttccttacgagagaaggcaggcgttaatgttaccctgtcagcctcagaagtttggggacataccctcccaaagactgtttgctcctctccccaacttccaccccaaattgatatcacacatcttatcagcagaatgtaatcatttgaagagatttcccagtttgcttatacaggtaccaaaatgttaattggatcagcagctgcattcacccttctccctgctaaatgcagttcttttattgttggtgccaataccatccctcattaggagagatctacccattcctttagacagacctattttccattatcttttttctttaagtatccctgagcctttttccccttgtttttcacaaagaaggggagagtggctcttaagtattttgaagtacttattttggtagtgctccaggacagtaacacacagctgttacctattttatttcctataaacagaattcccattccctaagccagacatgatcacccgtttggaaggggaggaggagtctcagaattctgacgagtggcagctccaaggaggcacctctgcaggtactacaagtaaagcagttcagcgtccatccagctgggaacattgtggagtgggattttcagtgtacattccacggggtatttaagaggtagaaggattatgggttttggagttttgaaatctccctctttgcagtgctaaatgtgtgacagtgtgtgacaggcaactgcttttacctcagagcttccattcttcctctatcagctctgagtaacaagacttgatgtatgaccttgtttgtggatgaagcaaaatgaggcttgtgcagcatttggtctagtgcaccttctggctgaacagggctccctcagtggcgtaccatgtgcctctgcaaactaagaatagtgagaggaagcacacttcctgagttacctggctccctgtccatctcatactggatagaaaaagcaatagcaatcatagcatacatttgagcaaatgtatctaagaagtacctagtcctttgtcaagaaaaatggttattgaggccacagttgaataaatatagcattgcctccagacggccaaaatagttttatcttttctccggaagtaagagtttaaaatgccatatttcactgactctgagacatgtttttctcccattgctttactgtttctgaaattgagaatgcctcttaaaatcagtggcatgtcatagcttaattagtagtgttttctttcttaatggcacataatgatgcatcctacaactgatgacattttagtttgggtgagatagggtaatttccccaaatcatattcaacttctgtgaccaccttctaaatataaagtgaaacctggttgcaccattaatgtgcaagaactaattttctgccttataagcttaactttgctaagtgtggtttttgctgtaggttttcttggttctaaagggatatgattcaggccatgatgcatctctgtaatattatatggtagtatggttaacatttggcttctcattcacataaaaagtattttgatgcaaacatggcccccaaattatttggtccaagcttggttcctctgttgagttcccagctctgccactttctggcttggctaccttggtgcattatgtaacctctgtagcctccccttcttcatctgcaaagaaggaacagtgatacttagagttactctattaagagaactaggtgtgggtagtccacataaattggcatatggaaaaggacttaggcaatgttacctgttattaaagttactacttttggtgaacttcagattaaggtattcttagcatttcaacccccaaaaatcagggtataagccattttacttactggcattatttttgcccctcactatttgtctcccagaaaatgaagaatctgacgtaaagcctccagactggccaaacccaatgaatgctacctcccagtttcctcagcctcagcactttgacagctttggcctccgtctgcctcgggatatcacagagctgcccgagtggagtgaggggtaccccttctacatggccatgggcttcccagggtatgacctctcggctgatgacatagctgggaagtttcagttcagccggggcatgcgccgcagttacgacgcagggttcaagctgatggtagtggaatatgctgagagtaccaacaactgccaggctgccaagcagtttggagtattggaaaaaaacgttcgagactggcgcaaagtgaagccacagcttcaaaacgcccacgccatgcggcgggcattccgaggccccaagaatgggaggtttgctctggtggaccagcgtgtggccgaatatgtcagatacatgcaggccaaaggggaccccatcacccgggaggcgatgcagctgaaagctctcgaaatcgcccaggaaatgaacattccagagaaagggttcaaggcaagcttgggttggtgtcgaagaatgatgagaaggtatgacctgtctctgaggcataaagtgcccgtgccccagcacctgccggaagacctgactgagaaactcgtcacttaccagcgcagtgtcctggctctgcgcagggcgcatgactatgaggtagctcagatggggaatgcagatgagacgcccatttgtttagaggtgccatcacgggtaactgttgataaccagggcgaaaagcctgtcttggtcaagacaccaggcagggaaaaactgaaaatcacagcaatgcttggtgtcttggctgatgggaggaagttaccaccgtacatcattttgaggggaacatatatccccccggggaagtttcccagtgggatggaaattcgctgccaccggtatgggtggatgactgaagacttgatgcaggactggttggaagtggtgtggagacggaggacaggagcagtgcccaagcagcgagggatgctgatcttgaatggcttccggggccatgccacagattccgtgaagaactccatggaaagcatgaacactgacatggtgatcatcccagggggtctgacctcacagcttcaggtgctggatgtcgtggtctacaagccactgaatgacagtgtgcgggcccagtactccaactggcttctggctgggaacctggcgctgagcccaaccgggaatgctaagaagccacccctgggcctctttctggagtgggtcatggtcgcgtggaatagcatctcaagtgagtccatcgtccaagggttcaagaagtgccatatctccagcaacttggaggaggaagacgatgtcctgtgggaaatcgagagtgagttgccaggaggaggagaaccaccaaaagattgtgacaccgaaagcatggctgagagcaactgaagggaaagggaaaggtaaccactcaggagtagatactcagtgcctttgctgacatgtctgtgttctacaaacaccttctctccattatttttctgtttttaagttcccttagagcctacagtgcagtagtgtagatcaggggtccccaacccccaggtcacggaccatactggtccatggcctgtcaggaactgggctgcacagcaggaggtgagcggcaggtgagcaagcattaccacctgagctccgcccgctgtcacagcagcggcattagattctcataggagcacaaaccctgttgtgaactgcacatgtgagggatctaggttgcaggctcctcaatgcctgaggatctgaggcggaacagtttcatcccaaagccatcctaccacccactaccccgcacttcctgggtccctgcaaaaattgtcttccatgaaaccagtccctggtgccagaaaagttggggactgctggtatagataacagaccattagcattttctcctttatatgaaacatttattatttgatttatttgtgtctattttgctctgtggcttggacccagaaacacttgtataataggtgaaatgaacaaagaatgagctgccagaacatctgagagctgtaaagttaaaattatttggacccaaagaagcatagtctgacgttgttcagttcacacaaaattttgtctgaaaagccaacttttttctttcccttttaaattatgctgaacatttagggccagtatgtgtaactgacatgctgggacagttgtactcacttttgctggcctgtaggactgtgacatagggagaacactaagtgtgtcctccgggcctcgggtctcagtcctggagctatctacagtatgttaccagcgagtaagaataatagcttctacttgcttttccctacagagttcaggagttttaaaacgtcatcttagtctcattatgacct

SEQ ID NO: 503 - DNA, 6000 bp, Homo sapiens
tggccaacatggtgaaaccccatctctactaaaatacaaaaataagttgtgtgtggtggtggacgcctgtaatcccagctactagggaggctgaggcaggagaattgcttgaacccaggaggcagaggttgcagtgagctgagatcgcaccactgcactctggcctgggcaacagagcgagacgctgcctcaaaacaaaacaaaacaaacaaataaaaaagcaattccctcacagttatagtcaacagctaggagtttagccaaatcaactaaaggcagacattttttttgtttgtggtagtagtgagtggtaagcaagagagaaaaaatggtatgtcttgtaggttgcaagggaagaaaaacatacatgtaagagagattttctaaggcagaattaacgaagcttctcagtaaaagaaagaggaaaagaagtcctatccctgagaggatggtttacggagtaactactgcacactaggttctgtactaacaaagaaaactgttaaactgcttcccaggccaaaatcaaataggatccctagctaagggcagcttgactggtatcaacactagacctcaagtgggtatgatgaaaaggagcagccaacctcattatccaacttagagggagtgaagacttcattaagaataaatctcatacgttttaattaccaaaatgatctaggacttcttagtcacaaggatgattttcatagcagattttaaaataaatattaatctcttaattcatttgctaaactatctcaagtttggatattgaataagcatattaaatatataagggacaattctttttctacagaggaaagtttttcaatcatctcccacatcactcacttggatctggttcacaggcgccgtcgctaaattctccaaagatgatgatgtattgctctccatcctaaaaggaatttaagagaacaatgtagtttattaagcattaaggataatttatcacgagttttatttgaaaaaaatcaatctcataaacaaatatagccaaacttacaaaatagaaaaaaattttacttattatcagtacaaaatgtcaatatacaaagtatttgtttcactaaaaccaaaaaggcctgtgtgcttatgtaactagcttcccaacacccttaattatttgataaaatcatatttactgtgtttaaagcttgacacactcttatttataactggcaaatttcaaatattccatcctatgccatatgacctgaccattggtttaaaaatatagtttctattttcttagtaaaacatgccaaaactctatgaacacactgtgaagcagggaatcttcaaagatttttgaggaagctacagtatctcaaccgcaatgggccatagctccaaatttcctagtctgcaaagtggaaacaataatcactggcacgtctcaaaggattttgtgaagattaaatgaattcatacgcagaaagcagataagtgccttccacatagtaaatgctcaataatgtttaacattactactattagttcctgaatacaggacctctcattatctcagtatttattatccaaaacctagctattgggagcttgtaaaaggaagcattcattgtcaggaaaattatcactaaaaaaaaaaactcaaccagtttatcatcatcaaatctttttatccctggaaccttttcttccccatccactcatctttcttggtcaaccaggccctaccgcactgttggaacaatatcaaacaccatgatgcaaactaactgcagagtaaaattacaaatcttacaagaggattatgacatataatagatgtttcaaaagagaattactcgaatatctaaagaataagagaatttttgaaacttcaaatatttaaaaaactattatccttgtgattatgttataaaactcaaatattctgccttcaaatcaatactgtattcattcattgggggtgcatttaaaatttaaatgttcttaaatgtaaacataaagctactttttatgttttgtttaatttttgcaatagtcccaagcagaattttttaaactggatagcatgaaatattagtcttctttttgagatggagtcttgctctgtcaccgagcctggagtgcagtggcgtgatcttggctcactgcaatctccgcttcccaggttcaaacaattctcctgcctcagactcccgagtcactgacactacaggtatgtaccaccacacctggctaattttttgtatttttagtagagatggggtttcaccatgttgaccatgctggtctcgaactcctgacctcatatgatcaacctacctcggcctcccaaagtgctgggattacaggtgtaagccaccgcgcctggcctgaaatactagtcttattttaagtgaatccactctaatagctttttccagtacatcttatccttggataatgaacatctgccctacacagtagtccccctttatccacggtttcagttatccaaggtcagctgtggtccaaaaacattacatggaaaatttcagaagaaaatagttcgtaagttttaagtagcatgatgaaatcttgagccatctagcttcctcctacccagggtatgaatcctccctttgtccagcatatggactctgtataagctccccacgctttagtcaacagctgtcttggtgaccagatcgactgtcacagtgtggtgatgcttgtgttcaagtaacccttattttacttaataatggctccaacaagagtgaaactccgtcttaaataataataataataatggctccaaaccactagagtagtgatgctggcaattcaggtacgtcaaagagaagccctaaagtgcttcctttaagtgaaacggtgaaagttctccacctaataggaaaaaaaaaatcacacgctgaggttgctaaggtctatggtaagaacggatcttctatcagtgcagttgtaaagaagtaaaaaattcatggcagttttgatgtcacacctcaaactgcaagttacagccacaaggtataagtgcttagttaagccagaaaaggtattaaatttgtggagacaagaacagaaaaagtgttccaactgacagcaatgtgttatgccaaaaagcactgggcctatgagaagattcagcaagggattccttgaaatgagcattttgttattaaagtgattgttcttttattattgttgttaatctcttactctgcctaatttataaattaaactttatcataggcaagtatgtataggaaaatagcatgtatagggttcagtactatccgaggttttaggcatccaccgagggtcttggaacgtgtccaccacggataagggggaacgattatgatatcagctcacctagagtgaggaagctacagcaaacatcagtttgttcagttataacaaagaagagtaagagacaggaattaaacattataacattataacctacccaatgtttacaatctattattccttgcttcctaatagtattagcaaggaacactttaaaacaaaaaaaaaagtcctgtgcgcttaactcaggaaggagttaagggtagcgagctagggagactgcagccaacctgagaggagggtgaagctttaagataaaagaaagttgagttcctgaagcctaaaccagaaaaggttaggcagcactggcctagccctaaggaagagcattggtggaataaatcagcaagctgtatttggtttatcaactaagaaagcaagtcctttcatctcaggtccagcacttaaactgtcatacccaaaccatctactacagcatttactactgaaggagctccaatagaacacaagagaatgttttcttgggtagtgagaggaggtaggaggtgcattctgaaatattacccaaataaaagtttctggaagacaccctttcccttcaatttctagttgaccttggtaaaaactgtcgcgaactatgaatagaaacatgcacggaggaagtaagtgcacaataaacatttcatttcaacacagatgaagcacctagtcatgccacatttatggagcgcctactgtgtgctaagtaggcaaagtgctatattgaccccagggatacgcagaaaaaaacacggcggggcctcaaagagctgtcaaacacttaacagcctgtgattagcccttcaggaggggtctctagcttggtctggaaagttaaacttgagattcctagaatcttgcaaaactgatagaagctcccagatcaagtagatagcgagacagactctccggccaagtgcgcagtggcaggcgcggaagtgcgagccggcaggaccgccaggcaccagccgcgcgggcgtgggcagcacagccgcagttcccttccactgcaggtcccgaagccgctgatattccaaacgaggaagtgtaaggaaagcactatcctcggtctagccgcaggcggcatcaccatcagtcagcctctatcctaaaagctctggccattcagcgggaatcatcgccttcacttcctgcagtagggtggctaagtttagcaaacaagaatgcaggacgcccggtcaaattagaattgtaaccaaacaccagaaaactgttccgtttttcctatgtccactgcagtatttgggacacacttggactaagaatcattcgctctttcagagaaattccaattgattgcggcgtcttgtattttatgtagcaattcacagagggatggcctaagtgaacatgagtgaagtattttcaacgcgagagtcacaggctcctgaagtcagcacagccgcggagggcacccttccctgcccatccctcgagcgcctctgcgtgttatgactcagagcccacgcgctagtacgcctcgcccacccggcgccggggcaaaggggcacctccgcccaccgctttctccagacccccgcaaggcctgcgcaccacgccgcggcactcctgcccgctgaccccgtacccagaggccgcagctgccgcagctcccgcagctcccgccgccctgtcaagccagcctgccgagccgctcctgctccaaaccagccgcgtccccgccagcgccgcgcggcgccaaatcatggtcagagcccggatctgcagcgagctctactgccggacaccgcggatcccgggagcccgcctcctccggcccggcccccgccttgccccgccccgtcccgcccctccggactgcccgcgccgccgccggtcacctcctcgcagctgagcgcgtcctcccagggctgcccgagcgctggattccagcgagtgccacccacgtgtaaacatcctttagaggggagaagcggctcacttgcttatctcgagggttcatccgagccccgcctctggattcttttaggtttagggacgctcataaaggctcccaggcacttggaagcagtgcatgaggatggtggcagacatgctggggaaacggaggagaaaaaacatgaccatccaaaacagaatcaaagtggtgcctcagatgtttccaactacctgttacacaagtttttgtgtggatgaaataagagcctaaatatatcctcttataattaggcaattggtcgagacccaatgtaaattatggggatattggggtttacatccataattaaaagaaaaaatccggtgttgaaggtttactccaaagaagacaaagattatttcccaccacctgccaaaaaaaaaaaattaggaaacaaaacaaaagaaattagcacagagatgtttcaccatggctttggaaatgggcgattgctgttgacaggattatttaagccactcagtggtggtaataatagcctttgtgcgtcactatttaaggttgggggtaagcctttatttactgaggacactgaaattcatcttaaagtcaaaggtcaaatggtacatctaaaattctaaacaattattacaacaatccagagcttttttgattcttcatgttcaactaagtgtaaaattcatgttacc

SEQ ID NO: 504 - DNA, 6000 bp, Homo sapiens
gcgggagtggaactgacttctttcactactgcagtcctgactatgcccatatcagatcccttatcagatttgtgctttatataatagcaatcagcttgataggtctttgttcagtgtttggaccatatagtggagctttggtaacactagaactggagacttgtgattaaatctcattaccattaatgttaagtatagccttgtgtgggaatgttacagagaaaaggacttagagacttaccgaatcgaaactttatgtcttgggaactctaaggataaaagtaattttaaaaaaagaaatggaacaattttttctatcttggataaaataacaattgaatattgtattggtcagggttctccagagaaatagaatatatataaagagattaattgaaaggaattcactcacatgattatggaggctggcaagtttaatatatgctgaaccaatgtcctagttggagtccaaaggccagaaagcttctgcagaaccaaggagatccaattatccagtttgaaggccatcaggcaggaagagctaatgttcagttccaaggacatctagcagaactctttcctggctggaggagggtcatcattttgtcctattcagacttccaactgatttgataaagcctacccacattatggagggcaatctgctttactcggtcttcaaatttaaatgttaatttctttccaaaacatcctcacagaaacacctagtggccaaatacttgggcatccattgtctagtcaagttgacacataaaagtaatcattaaagatattgggctttttttttttttttttttttttttttttcagaattgagttgagcttgactcaacagtcatctcctaggataaattgtacctgtattgataattgttctaaggtgctccaataatatggggatctgttggggctgggggatgatggtctgatctcagtctggttggctactggtacagcagaagaataacatgttgaatttccaataaaaagaagcagcaagcccaattcaataaaaacttcaaagaatatctaataaatagcctttgcgaaaccaagaaaagaaagtagagggcagtaaaagtaaggcatatgacagaactagatttgttggtttatttgctctttcaacacggatttttaaatatggaaacacagacaagtcatgcttgcttttttaaaccaacaaattaaaattgcgaacatggctaatttcaaatcagattaaataaaaaatttctgcatggaaagcatgtaatagcttttgtcttcttccttaccacctggagagctcttccccttcccttctccctctgcccccaccttgtctgcctaactcttactcttgttaaaaccttaggttacaagtttcttcctctgccattccttccaaaatatcaaattcaatttaggccttcctcttatgtattatcctaggttttcatgaatgctagtgtcatttctgtgctgttcactacagtgcttggcacatagtgggcacataaaatttatagaattcaggaacaagaggttaactatggaatcccattatttaatggtgagggactgaatatataaatggataatgggcagaacacacatgacaataaaactctgacttcgagcaaacagaccagaacaattagaacttggttaatgactaccagctttccaaatatgctccccaaaccagtcatataggatgcttcccttccagttggcctgccttcacgtcttcatgccaacaacttttttttttttttgagatggagtctcactctgtcacccaggatgtaatgcagtggagccatcttagctcactgcaacctctgcctcccgggttcaagcaattctcctgcctcagccaccagagtagctgggagtacaggcatgcgccaccacacccagctaatttttttttgtatttttagtagagacggggtttcaccatattggccaggctggtctcgaactcctgaccttgtgatccacctgcctcaggctcccaaagtgctgggattacaggcgtgagccaccatgcctggtctgtcactttacttttaaaatgtacaacttgatattttgatacatgtatatgtcttagtccattttctgttgcttataacagaatatctgaagctgagtaatttgtatataaattgttcttacagtattgaatgctgagaagtgcaaggtcaagaggtcacatctggtaatgaccttcttgctggtgggaactctgcagattccccaagccatgtaggacatcatgggacaaggcagcagagaactctgttttataaagctgccagttctactcccatgatcacccattaatccattcattcatgttccagctctcatgcccaatcatctctcaaaggccccacctgtcagcactgccacattggacagtttcaacataagtgtcagaggggacaaacattcattccaaagcctgatacactgtataataactatcacaatcaagctaattaacatagccaccacctttcatatttaccatttttttctattccctttattttcttctctctttttctttctttctttttttttccagacagtcttactctgtcgctcaagttggagtgcagtgacgcaatctcaactcactgcaacctctgcctcccaggttcaagcgattctcctgcctcagcctcccgagtagctgggattacaggcgcgtgctaccatgctcggctaatttttgtattttcagttgagatggggtttcatcatattggccaggctggtcttgaactcctgacctcagttgatccacccatctcagcttcccaaagtgctgggattacaggcgtgagccaccgcacctggccccattttctttcttgtgtgcaagtgtgagaacacaagatctaccctcttagcaaatttcaagcatacattgcgattttcctaactatagtcacattgctgtactttagctctctagaacttacctatctcgcataattgaaactctgtaccctttgaccaacatctccccatttccaccttctcccaggccctggcaaccaccgttctactgtctgctgacatatttcttaacttgctattgcagtcatcacaactatgaccaaaaataataatcacttctgtagctaccccacgaagcacaaagaagttgaaaattatcaatatatttattaatatattatgctgaattcaggcataacactttcttctgaagtactttacattctgaaatccttaaaaaaatctgtccagtgaattctgtgcttgataatagtccatctatgctgtattaaaattaaattgtaacatgatcggttcacctcataatgatctttatttcataaaacaatttgagatgaggtaaaatttgacttcaaaactaacataacaccataaatttccaaaatagttttataaaaaaattaaaaagcccacaacactatagatagataacataccttaatttttattttattttatttatttatttttttatgagacggagttttgctcttgttgcccaggctggagtgcaatcgtgtgatcttggctcactgcaaactctgcctcatggattcaagcgattctcctgcctcagcctcccgagtagctgggattacgggcatgcgccaccacgcccggctaattttgtatttttagtagagacggcgtttcaccaatattggaggggctggtcttgaacccccaacctcaggtgacccgcccgcctcggcttcctaaagtgctgggattacaggactggccactgcgggagctgcggcagctgcggcctctgggtacggggtcagcgggcagtcctgtaatggccacattacaggacaggccatcgcgcctggccacatgccttaattttcaaagtcaaatttgtctttaaaaagaatgaattcctaccctttgggggtatttatttttgcaactaacttccatccttttattaagtaatcaaacatagcccatttgaatgttggaaaagaactgtcagaaatacaagttcttattttgtactttggtaacatgaattttacacttagttgaacatgaagaatcaaaaaagctctggattgttgtaataattgtttagaattttagatgtaccatttgacctttgactttaagatgaatttcagtgtcctcagtaaataaaggcttacccccaaccttaaatagtgacgcacaaaggctattattaccaccactgagtggcttaaataatcctgtcaacagcaatcgcccatttccaaagccatggtgaaacatctctgtgctaatttcttttgttttgtttcctaattttttttttttggcaggtggtgggaaataatctttgtcttctttggagtaaaccttcaacaccggattttttcttttaattatggatgtaaaccccaatatccccataatttacattgggtctcgaccaattgcctaattataagaggatatatttaggctcttatttcatccacacaaaaacttgtgtaacaggtagttggaaacatctgaggcaccactttgattctgttttggatggtcatgttttttctcctccgtttccccagcatgtctgccaccatcctcatgcactgcttccaagtgcctgggagcctttatgagcgtccctaaacctaaaagaatccagaggcggggctcggatgaaccctcgagataagcaagtgagccgcttctcccctctaaaggatgtttacacgtgggtggcactcgctggaatccagcgctcgggcagccctgggaggacgcgctcagctgcgaggaggtgaccggcggcggcgcgggcagtccggaggggcgggacggggcggggcaaggcgggggccgggccggaggaggcgggctcccgggatccgcggtgtccggcagtagagctcgctgcagatccgggctctgaccatgatttggcgccgcgcggcgctggcggggacgcggctggtttggagcaggagcggctcggcaggctggcttgacagggcggcgggagctgcgggagctgcggcagctgcggcctctgggtacggggtcagcgggcaggagtgccgcggcgtggtgcgcaggccttgcgggggtctggagaaagcggtgggcggaggtgcccctttgccccggcgccgggtgggcgaggcgtactagcgcgtgggctctgagtcataacacgcagaggcgctcgagggatgggcagggaagggtgccctccgcggctgtgctgacttcaggagcctgtgactctcgcgttgaaaatacttcactcatgttcacttaggccatccctctgtgaattgctacataaaatacaagacgccgcaatcaattggaatttctctgaaagagcgaatgattcttagtccaagtgtgtcccaaatactgcagtggacataggaaaaacggaacagttttctggtgtttggttacaattctaatttgaccgggcgtcctgcattcttgtttgctaaacttagccaccctactgcaggaagtgaaggcgatgattcccgctgaatggccagagcttttaggatagaggctgactgatggtgatgccgcctgcggctagaccgaggatagtgctttccttacacttcctcgtttggaatatcagcggcttcgggacctgcagtggaagggaactgcggctgtgctgcccacgcccgcgcggctggtgcctggcggtcctgccggctcgcacttccgcgcctgccactgcgcacttggccggagagtctgtctcgctatctacttgatctgggagcttctatcagttttgcaagattctaggaatctcaagtttaactttccagaccaagctagagacccctcctgaagggctaatcacaggctgttaagtgtttgacagctctttgaggccccgccgtgtttttttctgcgtatccctggggtcaatatagcactttgcctacttagcacaca

SEQ ID NO: 505 - DNA, 6000 bp, Homo sapiens
cagtgcctggcatatggtggacacgtaatatttgttgaatgcaggaataagagtttaattatttgtggaatcccatcacttaatggtgagagacaatatacaaatgggaaatggccagactatatataacaacagaattctgacccataactgctgcagcaaacagatttggcctgcagagttgtatttttatttatctagaaggtgggaagaatgaagtgaggctaaagctgtaagtggcaaagaagtagaagtcactcaaagtggtcatttggggatctgtgttaagatatgattattactgattggtcttgttttttcttattttgttttttagagacagagtcttgctctgttgcccagactggagaacagtggtgattatagctactgcaacctcaaactcctggactcaagcaatcctcccacttcagcctcccaagtagctgggactacaggcacacacctggctaactttttattttgtgtagagacaggatctccctttgttgcctaggctggtctcaaactcctggctttaagcaatcctcctgccttggccccccaaattgctggaattacaggcatgagccaccacacccagcccttgttttgtcttgattcattatggtcacagagtggttttatctggttgttggtattctgaatttatttttatttaacaggaaaacacaatgatccagctgttagtgccaatccagatcctgaatggcagaggctgctcttcactttgtctataagtagcgggagtggaactgacttctttcactactgcagtcctgactatgcccatatcagatcccttatcagatttgtgctttatataatagcaatcagcttgataggtctttgttcagtgtttggaccatatagtggagctttggtaacactagaactggagacttgtgattaaatctcattaccattaatgttaagtatagccttgtgtgggaatgttacagagaaaaggacttagagacttaccgaatcgaaactttatgtcttgggaactctaaggataaaagtaattttaaaaaaagaaatggaacaattttttctatcttggataaaataacaattgaatattgtattggtcagggttctccagagaaatagaatatatataaagagattaattgaaaggaattcactcacatgattatggaggctggcaagtttaatatatgctgaaccaatgtcctagttggagtccaaaggccagaaagcttctgcagaaccaaggagatccaattatccagtttgaaggccatcaggcaggaagagctaatgttcagttccaaggacatctagcagaactctttcctggctggaggagggtcatcattttgtcctattcagacttccaactgatttgataaagcctacccacattatggagggcaatctgctttactcggtcttcaaatttaaatgttaatttctttccaaaacatcctcacagaaacacctagtggccaaatacttgggcatccattgtctagtcaagttgacacataaaagtaatcattaaagatattgggctttttttttttttttttttttttttttttcagaattgagttgagcttgactcaacagtcatctcctaggataaattgtacctgtattgataattgttctaaggtgctccaataatatggggatctgttggggctgggggatgatggtctgatctcagtctggttggctactggtacagcagaagaataacatgttgaatttccaataaaaagaagcagcaagcccaattcaataaaaacttcaaagaatatctaataaatagcctttgcgaaaccaagaaaagaaagtagagggcagtaaaagtaaggcatatgacagaactagatttgttggtttatttgctctttcaacacggatttttaaatatggaaacacagacaagtcatgcttgcttttttaaaccaacaaattaaaattgcgaacatggctaatttcaaatcagattaaataaaaaatttctgcatggaaagcatgtaatagcttttgtcttcttccttaccacctggagagctcttccccttcccttctccctctgcccccaccttgtctgcctaactcttactcttgttaaaaccttaggttacaagtttcttcctctgccattccttccaaaatatcaaattcaatttaggccttcctcttatgtattatcctaggttttcatgaatgctagtgtcatttctgtgctgttcactacagtgcttggcacatagtgggcacataaaatttatagaattcaggaacaagaggttaactatggaatcccattatttaatggtgagggactgaatatataaatggataatgggcagaacacacatgacaataaaactctgacttcgagcaaacagaccagaacaattagaacttggttaatgactaccagctttccaaatatgctccccaaaccagtcatataggatgcttcccttccagttggcctgccttcacgtcttcatgccaacaacttttttttttttttgagatggagtctcactctgtcacccaggatgtaatgcagtggagccatcttagctcactgcaacctctgcctcccgggttcaagcaattctcctgcctcagccaccagagtagctgggagtacaggcatgcgccaccacacccagctaatttttttttgtatttttagtagagacggggtttcaccatattggccaggctggtctcgaactcctgaccttgtgatccacctgcctcaggctcccaaagtgctgggattacaggcgtgagccaccatgcctggtctgtcactttacttttaaaatgtacaacttgatattttgatacatgtatatgtcttagtccattttctgttgcttataacagaatatctgaagctgagtaatttgtatataaattgttcttacagtattgaatgctgagaagtgcaaggtcaagaggtcacatctggtaatgaccttcttgctggtgggaactctgcagattccccaagccatgtaggacatcatgggacaaggcagcagagaactctgttttataaagctgccagttctactcccatgatcacccattaatccattcattcatgttccagctctcatgcccaatcatctctcaaaggccccacctgtcagcactgccacattggacagtttcaacataagtgtcagaggggacaaacattcattccaaagcctgatacactgtataataactatcacaatcaagctaattaacatagccaccacctttcatatttaccatttttttctattccctttattttcttctctctttttctttctttctttttttttccagacagtcttactctgtcgctcaagttggagtgcagtgacgcaatctcaactcactgcaacctctgcctcccaggttcaagcgattctcctgcctcagcctcccgagtagctgggattacaggcgcgtgctaccatgctcggctaatttttgtattttcagttgagatggggtttcatcatattggccaggctggtcttgaactcctgacctcagttgatccacccatctcagcttcccaaagtgctgggattacaggcgtgagccaccgcacctggccccattttctttcttgtgtgcaagtgtgagaacacaagatctaccctcttagcaaatttcaagcatacattgcgattttcctaactatagtcacattgctgtactttagctctctagaacttacctatctcgcataattgaaactctgtaccctttgaccaacatctccccatttccaccttctcccaggccctggcaaccaccgttctactgtctgctgacatatttcttaacttgctattgcagtcatcacaactatgaccaaaaataataatcacttctgtagctaccccacgaagcacaaagaagttgaaaattatcaatatatttattaatatattatgctgaattcaggcataacactttcttctgaagtactttacattctgaaatccttaaaaaaatctgtccagtgaattctgtgcttgataatagtccatctatgctgtattaaaattaaattgtaacatgatcggttcacctcataatgatctttatttcataaaacaatttgagatgaggtaaaatttgacttcaaaactaacataacaccataaatttccaaaatagttttataaaaaaattaaaaagcccacaacactatagatagataacataccttaatttttattttattttatttatttatttttttatgagacggagttttgctcttgttgcccaggctggagtgcaatcgtgtgatcttggctcactgcaaactctgcctcatggattcaagcgattctcctgcctcagcctcccgagtagctgggattacgggcatgcgccaccacgcccggctaattttgtatttttagtagagacggcgtttcaccaatattggaggggctggtcttgaacccccaacctcaggtgacccgcccgcctcggcttcctaaagtgctgggattacaggactggccactgcgggagctgcggcagctgcggcctctgggtacggggtcagcgggcagtcctgtaatggccacattacaggacaggccatcgcgcctggccacatgccttaattttcaaagtcaaatttgtctttaaaaagaatgaattcctaccctttgggggtatttatttttgcaactaacttccatccttttattaagtaatcaaacatagcccatttgaatgttggaaaagaactgtcagaaatacaagttcttattttgtactttggtaacatgaattttacacttagttgaacatgaagaatcaaaaaagctctggattgttgtaataattgtttagaattttagatgtaccatttgacctttgactttaagatgaatttcagtgtcctcagtaaataaaggcttacccccaaccttaaatagtgacgcacaaaggctattattaccaccactgagtggcttaaataatcctgtcaacagcaatcgcccatttccaaagccatggtgaaacatctctgtgctaatttcttttgttttgtttcctaattttttttttttggcaggtggtgggaaataatctttgtcttctttggagtaaaccttcaacaccggattttttcttttaattatggatgtaaaccccaatatccccataatttacattgggtctcgaccaattgcctaattataagaggatatatttaggctcttatttcatccacacaaaaacttgtgtaacaggtagttggaaacatctgaggcaccactttgattctgttttggatggtcatgttttttctcctccgtttccccagcatgtctgccaccatcctcatgcactgcttccaagtgcctgggagcctttatgagcgtccctaaacctaaaagaatccagaggcggggctcggatgaaccctcgagataagcaagtgagccgcttctcccctctaaaggatgtttacacgtgggtggcactcgctggaatccagcgctcgggcagccctgggaggacgcgctcagctgcgaggaggtgaccggcggcggcgcgggcagtccggaggggcgggacggggcggggcaaggcgggggccgggccggaggaggcgggctcccgggatccgcggtgtccggcagtagagctcgctgcagatccgggctctgaccatgatttggcgccgcgcggcgctggcggggacgcggctggtttggagcaggagcggctcggcaggctggcttgacagggcggcgggagctgcgggagctgcggcagctgcggcctctgggtacggggtcagcgggcaggagtgccgcggcgtggtgcgcaggccttgcgggggtctggagaaagcggtgggcggaggtgcccctttgccccggcgccgggtgggcgaggcgtactagcgcgtgggctctgagtcataacacgcagagg

SEQ ID NO: 506 - DNA, 6000 bp, Homo sapiens
gcctcgaaggcctcattcaccttcttgagcctgcgcttctccctcagtgtggccgcccgccgccggtccacggacaccgacttcctcttacacaccttacacgcccacggcaggcactggcctggacagtgctcgggggtccccagccccttgtcctcaaggggccctggggcctcggggctcagggtgagctccgtccgctcgtagcctggtggttcgaagccctggaggtggacaggcaggtagttttccccatcatagaagcggggttcctggtagaagtagggggatgtctcatacagctccatggggtcggaaaaggcttgttcctgccaccagcccccaagctccagcagcccctcacgccaactgctgggtgccatttaaaccctccccgctggcatggaaccagagataaatatagccaacgccacagaaacctgagccccctctaagctgttgctgcacatcaaggcgtttacagtggattagatgtgattccccttctttctcccgcatggcccccaccccaccctgccagcctgcccctggcccaggcgggctcctgtgcacgggtcgggaggccgtcgggtgtaatttgattagttttcatttctcagcagcccctgtggggcaggggcgttgggggaggacacattcccctctcatctgctcctttcaattactcctagctgggcggcctgcctgctgtctccttgcagtcccgaagaagctggtgggtatagggggaggagggaacaaggaagggtaggcttaggctggaaggggccttaagagccaacttatccatctccttgcttcctgacagcaccttaaccacactacatcagtcgatgagactcttttaaagacttccctccggaaagaatgggactgcttcagattctgggcattcatgggcactcagtatccagggataagaaggatcaagactcagagcagctaacagattccacttttggggttcccaagcagctttgagctgtatgttctcttaggtctcatctgggggggtaaattgaggcaagagaaattatttgggttttggttttcttggcaggggtaaagagaaatttcctctttaatacagcagccgtggtcagagcagagattagaatttacagcctacacgttgccaccttccccagagcggcaaggtcaagatgtcctaagctccctgtctcctccctgtctcactccggaccattgatctgtccttctatgttacctcctcaactctttttccaacaccagaattttcctggctcattaatgtggacgggggtgaaaaagtagaaaaaacagagcccttcaaactcagtttaaatctcctctctccttggccaccgggcttggttgttctgcctcttactgtctgagccatcaattttacacgtatcatgcaggtctcaaatgtcaggtagagcagggactatttaatcttcaggcctctcaggccatggtcacctctcagtaggtgcctcagggtctgagaggacaaattccttccaatgcagtgggcagaccttagacactagcagtgaacaaggctcagtcttagggctggggattatagggacaccccagacaggatccctgccctcgaacttaccatctgatagacaacggtgatcacctctttctacctagcccctgatgcccaaatctcctccgaggcggctactgttcagcttctgctcacgtcaggagacagcccgttccattgacgtgtagctttgggctgcaatctgctccctctatcttttatcctttgttcccagttttttcctccccatagactaatgtcctgctccttatcctacgacagatcaaactgacaagttcaagccagtggcaaggacaataagaggaaggggaaccctgctggggactcatgggagacttcacagggaacatgagatctgcgaggcatgtgaagaaccagtgttccttcctctcattattcacagcagggagccaggagaattctgatgtccttttgggacaggaaatggagggaaggagggaacatagctggacaacaaaagaaccctaagcatgttgagggagagcagtgaggtcttaattctgttcttggccttaccagcatgatagaaagtagcagcataggccgggcgtggtggctcatgcctgtagtcctagcactttgggaggccaaggcgggtggatcacgaggtcaggagttcaagaccagcctggccaagatggtgaaaccctgtctctactaaaaatacaaaaattagccaggcatggtggtgggcactgtaatcccagctacttgggaggctgaggcagggaattacttgaactcaggaggaggaggttgcagtgagccgagttcgcaccactgtactccagtctgggtgacacagcgagactctgcctcaaaaaaaaaaaaaaaaaaaaaaaaaaaaagtagcagcataggtactgtgtgggttctaaactttgctttcccctgaccagctgggctgaagaagagtctctatttctaacacatcccctgccaaacaaaaaagaaaaaaaaagcctcagtttaccctccagtcctatgagccctgagaaaagaagtcatgttgaagccactataggaacccccatatttgcatcttttgttattccaggatccagtgtgacttacctctaaataatgtgtcttcttcctctaaaatggaggcagagctggcttgctctatggtggtttccagaccttactgtctagttggtgagcatgggttgacatgtgaaagctggattacaagacaagggagagctatgttgattctacagcaaacatgggggctttaatcaattgcaaaccagtagtttcttcaaaagcgttttgggaatttttgggaagccaaaactgctgaagactggtgctctgcagaaggcttggggagcatgctgggccagctcttggagaactggtaggattcagatgaggagaggggagcaggggaaggggacgttgggtaggctgtttgtatggagcttggggttcaggtaagggggtgatttgagacaaacttgcacagaggggaggaggcccagctgggcagggaaggacttgagagctgaggcaaggagaccgcacagaacagtgtgatggtcatccaggaatgagatgatgaaggtctgaacaacctcttcagaggcaggaggatggattcgactgggagagggtgcatgtttcaggctagcaaaggatggcgagtatgcaagcaataggggaatggctgtattaaatgatagggtacttggcacatggatacacctggtaaatgttattcccttttcttgctttgtcttctcttctacttctgtgtgccctgcaggggaccacagcagcaggaatggaggagggaaaacctggctccaccccgaatgtgtttattcattcattcatttttttttctatcaagtactgtgcattcagcaccttgtgccaggtgctggggttactaagacatgccctctctgccttcagcatgttcactgatgagtaaggagaatgagtacacaaagtcatctaaccaaggtagaaacagcaggctagagaaagtgctgacgtaatccagagaaggaatttattaattcactccttcatctgctcaacacatatttactgagaacccactctgtgtcagttccctggctgggacctgacctggggcaagagcagtgcctagactcggcgcttgcctgcagaagctctgttgggcatgcatttggccttgtgtctggatgatgtttgcctctgaccaaacatgagggcagagccgggaggttagggtgaccttgtgtgcctggtttctgtgaatccctgtctctgtgtgtgtttgtgtatgtctgagtacagtggtttggggaccacgtcaaagcccgatgtggggcacagaccctcttggtctgagctgatagagtgacccaggtgtctttgacctgtccataccctgatgggggggattggccctgtacccatcttgttcttctctcagagccgagctgtggagacgcctcatctagaggcttggtcctcctccccttgtacacccctccacccccacaagctgccctctgatggatgggaacacattggtgccaagcacagaacagcctttgtgctccgccaccagcggcaatccatcagctccaacctgacagcagggcgtccggccctaatccccatccctgctggcttgggcacacagggccccctgccctgactgtagcctcctcctccagcagtcctgcgccctccagaggaagcccttatcccctactggggctccagggccacattgttggctccccaaccctgactgtttcaacttgattctgtctatttgcacgctgggctgatgtcatttgcatggtagcggctggatttcaaaatgctcagaaatccccttcacctgctccctgctccttactaccccttctgctgcacacccagtcacagccctctggccttcagcatcttctagtccctgctgattttgcaggtgggctgacctgggctgccatggtgcttggctaaaatcaaagcaatttttccattctggattctcatgtgcttgggaatagaggagcaagaaggagaagggtctggaagggtgggggcctctggctgctccaaacaggtctcaccatatattttcctaggctgggtctctgggtattattgatgaggatgaggtcgggggtgggggggggtgggggggggtggcaaatgcttgtgcatttcaataggacatagatgcataaaaattacatgcaaatcagcattgattatttgtggggcagtagctttgcagcaagatgagaacagatcacagaatcacagaaagtcagagctgcaaggcagtctagaatccactagtccaccttcttcctccacatatggggaaatggaggcccagagaagggaagtgacttgcccaagcgtacagaggatgagtgtcagaagtgtgaagggtgcctgttctgaatcccagagcctcctctccctctgtgaggctggcaggtgaggaagggtaagtagtaagcagcaagtgagtagatatttcccggtgggcctggggccacaagtaggcagacagtgaggggttggagagtttgaatggagggtttagagagacatcaggagaggtactgctggagagatgaaaagaagatacaggagaggtgtgagagagagagtgggctggaggtgccaggcagaggcctgagggattgagacaggggagatttggaggcagatgccaggattgagatgtgaggaggaagggagggtcccccctccaccaggcctctgaagccacacgttgtttccatggaggactgagcatcggatgaccactgggaaatcccgtccctgcctggaatctgatgctcagagccaggatcattcttcaagaatttctggctttagggtgtgggaaggtgcagacccggaggtggaaggggttgggttggaggagagtgggtgagggtcaaggggaggtgattggtggagacaaagcagagagctggttttaaaaataaccagaactaggcttagcactgtgaactggggacctggctctggtggggcctttggaaatacgggcagggatttcttacaagtatcctacgttcctatgggaacagggcctttgggccttcagctcctggttaggacaaatactatcaggacacggagggaaagtagaagacggagccctggataaggcagggcatgttgctgttctgtctcctctctggttctcaatttccccatctgtaaaccaagatgccgaactgactggtcaggatgccttttttttttttttttttctgacttagcatgtgcatctggaggaagtgctcatggagtcagggtaggaggactgttttgtatgaaccaggtttagctctgaagactcacaggatcagagagggtagatttctaga

SEQ ID NO: 507 - DNA, 6000 bp, Homo sapiens
ggtgcagtggctcacacctgtaatcccagcactttgggaggccgaggcgggcagatcacgaggttagcagtttgagaccagcctgaccaacatggtgaaaacccttctttcctaaaaatgcaaaaattagctggacatggtggcaggcgcctgtaatcccagctacttgggaggctgaggcaggagaatcacttgaactcaggaggcagaggttgcagtgagctgagatcgcgtcactgcactccaccttgggtggcagagtgagactctgtctcaaacaaacaaaacaaaacaatcaaacaaacaaacaaaaagccacacatcaaacctggctcagtcctcggacggtccaggttctagtgttagctctgccatgtggcttcccttgaacctctctcatctgtgaccagggactaataacacctgctttgctatctccctggtgtatagtgagcattcaatgggatactgtctgtgagaatttctgtatttttattataccaagaagaatgagcttgaagggaattcttttataaacactaaacttttgtgcacccgtgaggggcttttataattatatacaggtgtgtccacctaacactgcctccctctgctgtaaggtggcgagggtgtgaaagcccagaaccctcacttcatcaagttctaagattaaagggctgatgcttgagggattctcaagggattccctgaagggtaggtgggaccagggctcaaaatgatgctcacctccaggaccctcctgggtaccaagccctgcccctcactgctggatgggtatggctaagttcattccttctctgggtctcagtttccttatctggagaggttggattgaagctcagatgttcacttgttttttttttaagagccacaatgttcaaagaaagtcttataccaggaacccatacatgaaataaccagagctgcttcatctaaaacagggtggctccctgagcccccaagacctgaccctccttcccagccttggaggtcccgaggctcctctgtggagccctaaggggtcctcagtgtatcaagacccaggaaacatgttctgattctcactggagggattgtgtattggggcccttcatgccttccttacctgagtgtgaactctctctggagcctgcaggagagactatggcttttttatgcctctacccacgatgctcagctcactgtctgatacacaaaaggggctcaagaaatgtttacccaacagaataaatgaatgaatgatgatgagattaggaaagaaatgcgaaggacaaccttgctttaggaggtaggaacagttccatgctgtctggaggaacgggaactagatggccttgacctaccccatgcctccccaccgcctcacaaacacacagggaaacacgcagcctgtgttcttcccgtgggcccagtatctggcacagagaagccctgactgggaagaagtgagctggaaggagggagggagaaggaggcagagacccagggtgcaaatctgagcagaaggagggtggtagaaaaggagaggaagggaacttccaggaagtcactgcaggggcagacaggcatggttatgggccccttgggggaagggctaagggctttcctgacacccagaaatctttttgtcccaaatgcctgctcttatccaacagttctcctccttgtgcacacactggccagagcaatgctgaaaaaacaagacagggaccaaaatatccttctgcctgctggaaaggacagagaaaaattctgaaaccccctccaatccccaagctctccccacagggctgagccaagccttaacagccagtactccttgccttccttcctgggctctggaggggtgtgctgggatacttcagcctccttgggcagccctttctgacctgaggagtatagcccaatttggagagttccagggagaaaagagcagggctgctcagcaaggttcccctcacccaggagtgcttccccttcagccctccctcttccccacccacctctgcccacagtggggaggctgcaggtgcaaggggccagtggagaaacccaggacaggggcttaggaagaaaagaagtaggatcaagcggtaaaaggaccacaggcgatctttacatttactgtggcattatctcaccccctgagtcacatggaaaatagaagctttgcattgggcatcttggagggcacctaaacttggtacctgtgggatttggtaccaacattagcatccctggctgtgcagggcagatttcataattttgcattctctttccctttccacccccacgcttcactggcctggtgctgcctacttgcctttttgataaaatatcagtgctggacgctttccaaaagccagctcattatgttctcataaccatcctacaccgaggggtattcctacactgctgttacaggtggggaaaccaaggctcagcttttgaaggcaggtgaagcttggagggttgcatggctgcagtgtgtgaggggaccctggtgtggggagggtcatcttgtctaagggtcctggacacactgtgaaagccagagagttttgactcaggatacattccagacaccttggctccatctgttctgcctacagcctccctcattgtcctttcctcgttatagatctgtgaccttgcctcttcctctactcgcctccatcacaaacttccccttctctcagccctgctctctgtgcctcacaggggagctgggagttagaagacttccagggggaaggaccaagttctgtggtctccatctcagcccatctctcgcaccttggaatggacttaccagctgttggtgtaggatgggtaaactgaggccaggagaggaaaagtggcctgcttgaggtcacgcagccagtgagtggcagagtagagcctagaagccagcttccagctcttctgactctcggtcaagtgctcttttcaccgcaccaaatgaccctgctgcccaggagatctcagcaccgaccctcctacctccgtgtcaagccagaggactgaggagaccgtgtgcttcccccaaggcagctttctggaatagaccctgccttggccagttctgttgtcaaataggctggtctaatccctgaggctgggaacaggcaggggtggaaggatggagaagataagggaagaagattttggcttattttgcccagaactgagaaacaaattacctacaggcattatgcaaatgcatccactacatgtcagcaacctgtggtaagatgaatcggaggtgggagtgtatgtgtatgggaggtggtggtgggtgctcagttgccctccagagctgaagatgctgtcaatagttagacagggtgaccccactcacccatccccgtccccaagctgggcccatctgggtcttcacagtctcttctgacatctagttgagtgaccattgggaagctgagtgtaaactgagagagaaagccttgagccaaaaatggcttaagtcaagcaaagggtggagaggcaggggatggtcgcaaaggcctgcatgtctgggtggcagggggagtaggcaggacgtcaggtgctgttgggcgtgttgacaaagtcagcaggggaagtgcaaggggacgaggaggaaggagagtttacacttcctaatttctccaactagcttctagggaaggaatgtaattttgctgtctgaggcactgattccttgctccccctaaaggcagaaatggaagttatttttccccacagagggcttccccctcctcctcagaagactcaactgcccttcctccctgcctcccagctacccaggttccgggtcccacatcattcctcactgtgattcagtgcagcccccaatgggagcaacgtgcccaccctcctctgggcagaacccttttccttgcattctgagatccagtgaggggggcagtacccccagaggccaggttgggttgtggctagctaacattggggtccccagcctgactctctttgccttcctagaacccttgcccaatacccacaaacaaggatttctcaggttgggatctctgcgaggcatccatccatgtccagggtctggtcattagttaatatcagtggactgcctaaaccgaaactggcagaaggtggccaggggaggggtctggacccagtggagagagtcaggagcctgggattcttattttggtcctgttaggatttgccctgtgaccctccggaagtcccttgcttccctgagcctgcttctttatctgtaacatgaggggattggactggatgccttatggcttagcgctgtgctatgaagaggaagaaggaggaaggaaaaggagcgcagagcgggttacactgccaggagatcctgggaagctaggtcacttccctgagcctcagcatccttatctgcaaaatagaaattgctaatagactaaaaggcaattctgaaagatggatgagaaaggaatataatgactcagggtagagcctgcaaaacaatatgggatgagaagatgcagggactggtttcatggagagagcagggttttaggattgggggagggtgccagggctaccgactgctttgggagatcccagagggggcattctgaagtcctgcagaagagatgctgtgccgtgaggggtgaggggtcgctggaggccagaccagggctcccaggagtcctgcattgagaagggagagagtggacacaggaaggatgcgcctctgtccagtcctgaggctgggcgcacacaccaggcccttcgaaaagctcacattttttccagcttttctcacccagtatcacttcctttgttaagaggagggggtgggggaggagacggaggatgaggagggaggggctggcgggtgccgccgccgcccccgccccctcccggtgtgcggagcccgattgtcactcagctcctgcgccgggggcgacagagccgcaggcgcccgagtcgagtcccagccagctaccatccctctggagcttaccggccggccttggcttccccaggaatccctggagctagcggctgctgaaggcgtcgaggtgtgggggcacttggacagaacagtcaggcagccgggagctctgccagctttggtgaccttgggtaagtctgagtctcggttcacccctggggctccccaatgggggtgcaggagagggttgaaagaagagaccggaatgcccccttggggcaggccatgggcaaggttccccgacagagctggaacgggaccagaggactgctaagatccaggcaccagacgggtctcaagtgggtgggcgcagggcaggtgcgggcacgctggggaatagggagaaacgccccagccttgtcctgggctccgtccccagacccacgtctgccaccccagtcccaggtgcgaaacaggggcgctacctctttaaaagcgtccggggctgagtctctgccgtaccatgtgattgcttgaaaggccgggctgggagcgctgcggcgggagccggaggactatgagctgccgcgcgttgtccagagcccagcccagccctaccgcgcgcggcccggagctctgttccctggaactttgggcactgcctctgggacccctgccggccagcaggcaggatggtgagctccctgcatcctgttctgtgcacaggggtgggcagagccagtcatgggagacccctctgtgcgtgtgtctgtgtgtgcgcgcgcgctgggagctgcctcacacctgataaaaaagccagtggaggagtgagcgctgctattttaagttgctgaatggaacctctgggaatgataaagggaagggacaaagattaggcagagaagggtccgggtgcccctccagcctgggtaggagctgcatgtgacaagtgggacacatcacagggtacctggagttccagggcagcctgagctccctgcccctcccagacgggtctccccatcccaggcttccctgaccacacaggt

SEQ ID NO: 508 - DNA, 6000 bp, Homo sapiens
tatatacaggtgtgtccacctaacactgcctccctctgctgtaaggtggcgagggtgtgaaagcccagaaccctcacttcatcaagttctaagattaaagggctgatgcttgagggattctcaagggattccctgaagggtaggtgggaccagggctcaaaatgatgctcacctccaggaccctcctgggtaccaagccctgcccctcactgctggatgggtatggctaagttcattccttctctgggtctcagtttccttatctggagaggttggattgaagctcagatgttcacttgttttttttttaagagccacaatgttcaaagaaagtcttataccaggaacccatacatgaaataaccagagctgcttcatctaaaacagggtggctccctgagcccccaagacctgaccctccttcccagccttggaggtcccgaggctcctctgtggagccctaaggggtcctcagtgtatcaagacccaggaaacatgttctgattctcactggagggattgtgtattggggcccttcatgccttccttacctgagtgtgaactctctctggagcctgcaggagagactatggcttttttatgcctctacccacgatgctcagctcactgtctgatacacaaaaggggctcaagaaatgtttacccaacagaataaatgaatgaatgatgatgagattaggaaagaaatgcgaaggacaaccttgctttaggaggtaggaacagttccatgctgtctggaggaacgggaactagatggccttgacctaccccatgcctccccaccgcctcacaaacacacagggaaacacgcagcctgtgttcttcccgtgggcccagtatctggcacagagaagccctgactgggaagaagtgagctggaaggagggagggagaaggaggcagagacccagggtgcaaatctgagcagaaggagggtggtagaaaaggagaggaagggaacttccaggaagtcactgcaggggcagacaggcatggttatgggccccttgggggaagggctaagggctttcctgacacccagaaatctttttgtcccaaatgcctgctcttatccaacagttctcctccttgtgcacacactggccagagcaatgctgaaaaaacaagacagggaccaaaatatccttctgcctgctggaaaggacagagaaaaattctgaaaccccctccaatccccaagctctccccacagggctgagccaagccttaacagccagtactccttgccttccttcctgggctctggaggggtgtgctgggatacttcagcctccttgggcagccctttctgacctgaggagtatagcccaatttggagagttccagggagaaaagagcagggctgctcagcaaggttcccctcacccaggagtgcttccccttcagccctccctcttccccacccacctctgcccacagtggggaggctgcaggtgcaaggggccagtggagaaacccaggacaggggcttaggaagaaaagaagtaggatcaagcggtaaaaggaccacaggcgatctttacatttactgtggcattatctcaccccctgagtcacatggaaaatagaagctttgcattgggcatcttggagggcacctaaacttggtacctgtgggatttggtaccaacattagcatccctggctgtgcagggcagatttcataattttgcattctctttccctttccacccccacgcttcactggcctggtgctgcctacttgcctttttgataaaatatcagtgctggacgctttccaaaagccagctcattatgttctcataaccatcctacaccgaggggtattcctacactgctgttacaggtggggaaaccaaggctcagcttttgaaggcaggtgaagcttggagggttgcatggctgcagtgtgtgaggggaccctggtgtggggagggtcatcttgtctaagggtcctggacacactgtgaaagccagagagttttgactcaggatacattccagacaccttggctccatctgttctgcctacagcctccctcattgtcctttcctcgttatagatctgtgaccttgcctcttcctctactcgcctccatcacaaacttccccttctctcagccctgctctctgtgcctcacaggggagctgggagttagaagacttccagggggaaggaccaagttctgtggtctccatctcagcccatctctcgcaccttggaatggacttaccagctgttggtgtaggatgggtaaactgaggccaggagaggaaaagtggcctgcttgaggtcacgcagccagtgagtggcagagtagagcctagaagccagcttccagctcttctgactctcggtcaagtgctcttttcaccgcaccaaatgaccctgctgcccaggagatctcagcaccgaccctcctacctccgtgtcaagccagaggactgaggagaccgtgtgcttcccccaaggcagctttctggaatagaccctgccttggccagttctgttgtcaaataggctggtctaatccctgaggctgggaacaggcaggggtggaaggatggagaagataagggaagaagattttggcttattttgcccagaactgagaaacaaattacctacaggcattatgcaaatgcatccactacatgtcagcaacctgtggtaagatgaatcggaggtgggagtgtatgtgtatgggaggtggtggtgggtgctcagttgccctccagagctgaagatgctgtcaatagttagacagggtgaccccactcacccatccccgtccccaagctgggcccatctgggtcttcacagtctcttctgacatctagttgagtgaccattgggaagctgagtgtaaactgagagagaaagccttgagccaaaaatggcttaagtcaagcaaagggtggagaggcaggggatggtcgcaaaggcctgcatgtctgggtggcagggggagtaggcaggacgtcaggtgctgttgggcgtgttgacaaagtcagcaggggaagtgcaaggggacgaggaggaaggagagtttacacttcctaatttctccaactagcttctagggaaggaatgtaattttgctgtctgaggcactgattccttgctccccctaaaggcagaaatggaagttatttttccccacagagggcttccccctcctcctcagaagactcaactgcccttcctccctgcctcccagctacccaggttccgggtcccacatcattcctcactgtgattcagtgcagcccccaatgggagcaacgtgcccaccctcctctgggcagaacccttttccttgcattctgagatccagtgaggggggcagtacccccagaggccaggttgggttgtggctagctaacattggggtccccagcctgactctctttgccttcctagaacccttgcccaatacccacaaacaaggatttctcaggttgggatctctgcgaggcatccatccatgtccagggtctggtcattagttaatatcagtggactgcctaaaccgaaactggcagaaggtggccaggggaggggtctggacccagtggagagagtcaggagcctgggattcttattttggtcctgttaggatttgccctgtgaccctccggaagtcccttgcttccctgagcctgcttctttatctgtaacatgaggggattggactggatgccttatggcttagcgctgtgctatgaagaggaagaaggaggaaggaaaaggagcgcagagcgggttacactgccaggagatcctgggaagctaggtcacttccctgagcctcagcatccttatctgcaaaatagaaattgctaatagactaaaaggcaattctgaaagatggatgagaaaggaatataatgactcagggtagagcctgcaaaacaatatgggatgagaagatgcagggactggtttcatggagagagcagggttttaggattgggggagggtgccagggctaccgactgctttgggagatcccagagggggcattctgaagtcctgcagaagagatgctgtgccgtgaggggtgaggggtcgctggaggccagaccagggctcccaggagtcctgcattgagaagggagagagtggacacaggaaggatgcgcctctgtccagtcctgaggctgggcgcacacaccaggcccttcgaaaagctcacattttttccagcttttctcacccagtatcacttcctttgttaagaggagggggtgggggaggagacggaggatgaggagggaggggctggcgggtgccgccgccgcccccgccccctcccggtgtgcggagcccgattgtcactcagctcctgcgccgggggcgacagagccgcaggcgcccgagtcgagtcccagccagctaccatccctctggagcttaccggccggccttggcttccccaggaatccctggagctagcggctgctgaaggcgtcgaggtgtgggggcacttggacagaacagtcaggcagccgggagctctgccagctttggtgaccttgggtaagtctgagtctcggttcacccctggggctccccaatgggggtgcaggagagggttgaaagaagagaccggaatgcccccttggggcaggccatgggcaaggttccccgacagagctggaacgggaccagaggactgctaagatccaggcaccagacgggtctcaagtgggtgggcgcagggcaggtgcgggcacgctggggaatagggagaaacgccccagccttgtcctgggctccgtccccagacccacgtctgccaccccagtcccaggtgcgaaacaggggcgctacctctttaaaagcgtccggggctgagtctctgccgtaccatgtgattgcttgaaaggccgggctgggagcgctgcggcgggagccggaggactatgagctgccgcgcgttgtccagagcccagcccagccctaccgcgcgcggcccggagctctgttccctggaactttgggcactgcctctgggacccctgccggccagcaggcaggatggtgagctccctgcatcctgttctgtgcacaggggtgggcagagccagtcatgggagacccctctgtgcgtgtgtctgtgtgtgcgcgcgcgctgggagctgcctcacacctgataaaaaagccagtggaggagtgagcgctgctattttaagttgctgaatggaacctctgggaatgataaagggaagggacaaagattaggcagagaagggtccgggtgcccctccagcctgggtaggagctgcatgtgacaagtgggacacatcacagggtacctggagttccagggcagcctgagctccctgcccctcccagacgggtctccccatcccaggcttccctgaccacacaggtgcttgcctcgtgccccttggtgcccgtctgctgatgtgcccagcctgtgcccgccatgccgccctccatctcagctttccaggccgcctacatcggcatcgaggtgctcatcgccctggtctctgtgcccgggaacgtgctggtgatctgggcggtgaaggtgaaccaggcgctgcgggatgccaccttctgcttcatcgtgtcgctggcggtggctgatgtggccgtgggtgccctggtcatccccctcgccatcctcatcaacattgggccacagacctacttccacacctgcctcatggttgcctgtccggtcctcatcctcacccagagctccatcctggccctgctggcaattgctgtggaccgctacctccgggtcaagatccctctccggtgagtccacagcgccgaaggtactcgcagcaccacatgatggctggcttgagggccatctagaaaggaaaaaaggtagagcataagaccccaagtaagccagatgttctttgggccatcgtgctccagtcctcactctgcctttccgtgctccgctctgcagggccagagaaacagga

SEQ ID NO: 509 - DNA, 6000 bp, Homo sapiens
attctttttttttttttttttttgagacggagtctcgctctgtcgcccaggctggagtgcagtgacgcgatctcggctcactgcaacctccgcctcccaggttcacgccattcttctgcctcagcctcccaagtagctgggactacaggcgccaaccaccacacctagctaaattttttttttttttttttttttttttgagacggagtctcgctctgtcgcccaggctggagtgcagtgacgcgatctcggctcactgcaagctccgcctcccaggttcacgccattctcctgcctcagcctcccgagtagctgggactacaggcacctgccaccacgcccagctaattttttctatttttagtagagacagggtttcaccgtgttagccagggtggtctcaatctcctgacctcgtgatccgtccacctcggcctcccaaagtgttgggattacaggcgtgagccaccgtgcccgacaagggaggcagattcttttttttttttttttttttttttttgtagttgcaagatttaatacagtgaaaacagagctcccatacaaagggaagggacccaaagagggtagccattgccggcttggatgcccgggtttatgtcccgatcattgtccctcccgctgtgctctcaggcgatagatgattggctatttctttacctcccgtttttgcctaattagcattttagtgagctctctttaccacctgattggtcgggtgtgagctaagttgcaagccccgtgtttaaaggtatatgcggtcaccttcccagctaggcttagggattcttagttggtctaggaaatccagctagtcctgtctctcagtccccgctctcaacaggaaaacccaagtgctgttggggaggttggccgatgactgctctaatgggaggcagattctttataagatcttgtaaactgtagaatgcaccctccaaaatctatttgcataagcacacacacacacacacacacacacaccccagcagttcttgcctgcccagattcctctgcagctaaagtgatgaaacttactgggcggagcttcctaaaaagattattagggtctcctgggttggtgtgcctttaaacctttggactttaccacctcctatctctcctatctccttgcaacaaaggttaggagaacaagaatgcagaaaaaacgggtcctggatgacatctgagtgcctgctttgggcttcttgatgagtgagacagaaaataaaatacaaccccctcttttaaaagccatgcttactcaggttttccttcatttgcagctaaatacagaaatgagagaatattttggagcagggatggaagaagagaggtattccccttcccacaaccttctgatttcccagtacatcccccactggaaaaattcatttaaaatcagtataataagcattgattagatgcctactatgcatctgggcttgagggcaaactggactcaggccttttggcctcaagaagctcacagtgtgagagtggcatttgtgtcctcttgaaattcacaggactaaattgtgcccaggctgacattctatccatccataggtgcctgccttctcacttccctctcttcatgggctcttgccttgtaccaaaatccaaacccaaatctcctcacatgtgagtgttggcattcatgtctcagacatgacctatgggcttgggacttttccccgtggaccccagtgacttttcagatgaacaggtatcttcaaaaacttgagaaataggagtcctgtttgttgttcttgttgctttgtcaatataaggacacagggtctttattcaaatgttcatatctatctcttgacagaaatactatgagacatattgatggagaagccgttatctccatatgctaaatgaggacttgcaccagggaacttgcccatggttctctccaaccacttaaattctgaaattttgaaatgagagtggacagtaatttcaaatcaatggggaaagaatcaaatcttcagcaaatggcttgagataattagctacacatttcagaacaaataaagaagtcagatccgggccgggcacagtggctcatgcctgtaatctcagcactctgggaggccaaggcgggcggatcataaggtcaggagatcgagaccatcctggttaacacagtgaaaccccgtctctaataaaaatacaaaaaaaaataaaaaaacttagccgggcgtggtgccaggcgcctgtagtcccagctactcgggacgctgaggcaggagaatggcttgaactcgggaggcagagcttgcagtgagctgagatcatgccactgcactccagcctgggcaacagagcgagactctgtctcaaaaaaaaaaaagaagtcagatcctaacctcaaccctatttaacagattatagatgaaagaaaggtacaaatggcttttacatacctcccttctccctgacattttgtatgtgtgtgtgtgtgtatttacacacacatctcatataaggaaattgaagggaggctgcctgcatccctgagtcactctccctctccttctgaatgcttacctgtgcccagaccacctccttagcctcgcaccctccaggcttacagggcactcttctatgcccatcccaagtatagctgataccttccaagggccagacttggtgctaagtaccaagtacgcaaagattaataaaacaatgtcctgtttcagggagctcaaagctgattcggcagggcatggtgtgtacatgaatgataaccacgtagggttgcaggtttcctagtgaggtaagcacaaggcaagatgggaaacaaaggaaggaggggttcacagcctcacccagagtccagaacccctggcctgcctggtgcccatgctgagtccacttctggaacacccagctcagagagggggttagacctgcaggctaacacagacacagcccagaaaacccaggagccgagggggaaggagaaaggtgcaagaaggggaaacccaggtcctggtccccttctctctgcttcctggcagcagaactcagacagaacccttaagccagtctaagtctggcaggaccagtaagttctgagttagctccatactagtttctagcaggctctttctcacttcctgattcttaggtttctacattgacactccctgaagagttgggaagagacaccacagtcccctgaccctgatccataggtcacacagcagggacatccacagggtgggcgtgggccctctcatccctccctcccactcacttcacgctggctgggccccaaggtgtttgcaccccttgcagtgagtgaccttctctagtgcagcaagctcagaacctgctgccactggagttgtcccattgctgatgcagaaaggtgaagaactagcagaacactggaaatgccctccatctgggtccatggctacttaagctcaatgctccctggcaggcaggaggacaggtgctattgccctgttgggacagatgaaaaacagacacagggaggatgagtgatttgccctgactatagagtggcagggccaaggcagagcccaggcctcctgcacctaggtcagtgttcctcccagttacagtctaaactggaatggcaggcaaagcccctgtggaaggggaaggtgaaggctcaatcaaaggatccccagagactttccagatatctgaagaagtcctgatgtcactgccccggtccttccccaggtagagcaacactcctcgccgcaacccaactggctccccttaccttctacacacacacacacacacacacacacacacacacacacacacacaaatccaagacaacactactaaggcttctttgggaaggggaagtagggataggtaagaggaaagtaagggacctcctatccagcctccatggaatcctgacttcttttccttgttatttcaacttcttccaccccatcttttaaactttagactccagccacagaagcttacaactaaaagaaactctaaggccaatttaatccaaggtttcattctatgtgctggagatggtgtacagtagggtgaggaaaccaaattctcagttggcactggtgtacccttgtacaggtgatgtaatatctctgtgcctcagtttgctcactataaaatagagacggtaggggtcatggtgagcactacctgactagcatataagaagctttcagcaagtgcagactactcttacccacttcccccaagcacagttggggtgggggacagctgaagaggtggaaacatgtgcctgagaatcctaatgaaatcggggtaaaggagcctggaacacatcctgtgaccccgcctgtactgtaggaagccagtctctggaaagtaaaatggaagggctgcttgggaactttgaggatatttagcccaccccctcatttttacttggggaaactaaggcccagagacctaaggtgactgcctaagttagcaaggagaagtcttgggtattcatcccaggttggggggacccaattatttctcaatcccattgtattctggaatgggcaatttgtccacgtcactgtgacctaggaacacgcgaatgagaacccacagctgagggcctctgcgcacagaacagctgttctccccaggaaatcaactttttttaattgagaagctaaaaaattattctaagagaggtagcccatcctaaaaatagctgtaatgcagaagttcatgttcaaccaatcatttttgcttacgatgcaaaaattgaaaactaagtttattagagaggttagagaaggaggagctctaagcagaaaaaatcctgtgccgggaaaccttgattgtggctttttaatgaatgaagaggcctccctgagcttacaatataaaagggggacagagaggtgaaggtctacacatcaggggcttgctcttgcaaaaccaaaccacaagacagacttgcaaaagaaggcatgcacagctcagcactgctctgttgcctggtcctcctgactggggtgagggccagcccaggccagggcacccagtctgagaacagctgcacccacttcccaggcaacctgcctaacatgcttcgagatctccgagatgccttcagcagagtgaagactttctttgtgagtatgattccttcctgtcctttctctcttcctgggactgcctgaactagacattctcctggaactataagaaccctcctcctgcgcctccacctccatccccaacacctattcccccaaacttaaattcttaagagaatcctagatcaagccatgggtttggtgagttaagctaagccagatgatacagtaaatgtgcaggaaacctgccttataaagtaaatgcgttctctctcgtgctgagaaacttataagatcctgctggcgctctatactttattggctaggagaagtaaagaaatgtctgattcgaggtgaagatgctccccatgccttgcagcagggaaatttaaattgcctctgcttagagcgtttccagacctgaaagaccagtggtttagggaagcactctacatgagggaaacctgcattagaaggagcttcttaatccctgggatctttccaagctaaactggatgtctacagtggggagaaagaaaagcagagaacaggacatgaggggggctcaaggccccgaagggttgacataggtgtcccttaaagccgaatgtagctccgcagaaagaagaccaggactgagtcaagcttctgctttcccttcaaaatcggccagattttttaaataacttgactctgaggaggaggacctgatttaagtgatggtcccatcactgttgaatcctctgtttttaaaactccccttttgatttttttgggccagagccaattttatttaaaaaaaaaaatctctaaatgaaagggcatcaaaaagaccgcatttcagttatttccccaaacctcaagttcattctccttt

SEQ ID NO: 510 - DNA, 6000 bp, Homo sapiens
gtgtgcctgttgacaagaaagaggggctgagtagcaggggaaggagagtggggacagggaggtgtgggtggaagcctgggctaaggctagcgttacagcacctgagtcaagagggcagatccctaagttagagaccaccacttaatgttccaaagacatctagggactcctgggtcatggctcttcaggtggtggatgggcaatgttctctagtaccttggacaccatggccaggccaatctcatttcatcaccatcaccttcaagttattccccagtttggtcattgggagagacttctcattggccaccagaacaactctaaattcatatgaacctttcagtttccccacctgcaacttggaaataaagatactgctgctcttattgggaggataaaatgaaataacagatggaaagttcctggcacggcatacagtaggcactcaatgcgtggtggtttatttcactctatttctgtctacggtccgtcacatcttacacttcattgtctgtcacctgttccatgactcctgccctgcctcccacacattcactgattcccatgaccccgtgtccctcctttgtgaagcctcttcccactgttccagctcacgtcgacaccccctctctgagctcttatactatggttggccccgggtcctcctgttgggtcctccctacttgtagcatgggtgtaagtttcatcttctcacgtagattttagcttctcaagttcaggaactgggctcattgcttcttttgattctcatgcctgacaagtcacaaggtgagcaataggttctttagaagagacctgcgaggtgggtaggggtgggtgtgtggcaatggaaagttacccaaagtaatggggaaaccatctggggcacttctgtttggggatttccctggaccacattttgtgacctgtaccaagcccggtgctttgtcaagctggaatcctgctatgctccccactttccatacctatttctgcccatggcactcatgtgaattggcaaaagtgctgtgggatggaaaatattggaatctcagggaaaagggtcagtgagtgcatccttcagggcaggatgtggggtcccaaaactgctttgtgcctggcagatcacccaaacacttcctccatttccccatgccagctaaagcaaccttggctgttatgctctggcccaggtgtctttcagggcctttcattctccacacaaaaagcttaggcataggggccagtctagatccagacacaagggccagctggagaattgggaagtacagtaacacctggccaccaaggctggtacagttcagcctgacaacagtctgagggcagtagtctgttgtgaaaggggacagatatgtcaccttgaagctgcagcacttttctagaccaagcccaccttcttgaacatttcagtctctttgcatccagctgggtgtattctgtcatatacacaagttgcctttggctctgaggctgctttataagaactagtcctggatggtgtttggtcagggatgaggtttgagtttgctcagcccaagcaggtatgcttaaattactctcagattggatgcctcaagagcctggcctactcctctcctactgaccatctgttttctactcaacccaagccaactcaccatttgactccttcccacacctttaggattgtgaactgtagaatgctggagttggaaggagctgtagagactagctagtctaccttcttcctcattctatggatgggcagacagacccaagacttggggcgatttgctatgagcttcttacagcctctgcatactacacatggataactgtttaccttcctgctcctggatcagagcctgccctcaagttatcccccatagcccactcttgttccatcagttgtgtctgaatcaaagactcccttctttttattccttctattaacagccttaaaactcaccttccccaagaagaagccttctttgattaattcagttcatttttgtatgaggattttccagagaaacagaaccaatataaatatatatatgtgtgtgtgtgtgtgtgtgtgtgtgtgtgtgtatgatttattataaggtataaggtatggctcacatgattatggaggctgagaagccccatgatcacctgtctgcagctggagacccaggaaagccgatggtatagttcgaaggccagttggagagtcccatggtctagattctagttcaggtctgaaggcctaagaaccagaagctcccaggcaggagaagatggatgtttcagtccaagcagtcaggcagaaaaggggaattctcctttcccctacttttttgttctactgttacgctttgtagatcagaccatgcccacttacactggcaggggcaatctgcttcactcggtccacaacttcaaatgctaatctcttccagaaacattctcacaggcacacccagaaatcatgcttaaccagacatctggaaatcctgtgattcagtcaggttgaccataaattagccatcacaatcctccattctttacgaggctggtggcttgtactatgttaattttcacttaccattgtttttcccccatgagttcctgtaggattacagccatacaccaagtaatggtgtctgtcaataatggaccacatatatgatggtggtctcataagattatgatgctgtattttactataccttttctatgtttagatatgtttagatacacaaataacctaccatcatgttacaattgtctgcaatattcagtacagcatcatgctgtacaggtttgtagcctaggagcaataggccttactgtatggcctatcttattgtgtaaatacactctatgatgtttgcacaatgacaaaacctcctaataaggcatctcccagaacatatccccaccgttaagtgacacatgactgtattttaatgtgttctatatcaccttcattagtctggcagcttcctccaccattctgggaggcccagacagtaatggctgtcttgtgatctttgtctggattctcaccctttgtccagcccaggactacagactcagggatgttcacagcccagtaaatgggaagtattgctcgaaaaccggatcacaaagcctccttgtgctgaggctggggtaagacttggaggaagaagaaccttccctgactccttcgctggggtcagcctctaagggtcagggctcactccctgcagtgtagagactttgctgcgggacaggatgtgaacatccttggcttttgcatggtcaagttaagtcacttgtccggggtcatagtgacacaatcattgccaaacctgttcatttcaccagggccccatgggattttgccaagtcagtcctcctttgtactttcttgctcaactggtgtagaattctcaggcaggaagggaattcatggcggagggtggggtgaggtggaggtcatgtcgtacatcctcctaagcagacacatggacgtcagaggcaccagagggtttccacattgacctgcagtcacccatttacacatcccccacctccgagagttcaggtattcttgcaaatgtctccatttctgctactgtagcttatcctgagccctttactgtttttcctggaaaacaagaaaatgtttgggaatttgtatattgggaatgggcaggtgtctacattcatttgctttaaaaaattatttgaaacattgccctttaaatggaaaaatcattttcctgatcttttttctcaaggacatttcctgctgcctcctccagacctactcttatcactcacaaaccctagaggttccgtggccaaaggaggacagcagctggccatttcagactatgtccccacagggatcaggactccctgggacatgatgggagtctggagaaggtgtcgtggttggcaggaagtgccacattcagggatattgacttctggctctttctccacgtgactatgagatgaagcaatttctgaagagggttaagataaaaaccttagatgtcatccaacctaatccctgattttacaggcagaagaagtggatttcagagctagctagtggcagagccgtgactcacaggccacagacctcctgacaggcagtcctttctcagagagcccagcaccttctgtgtttggttgtgttgaggtggagttgaaggaggaagcatggcacacctgctgtaggtcatggggacagatgacattccccagacctcttgctgcctagttcctcttttaattttttttgagatggggtctcactatattgcccaggctggagtgcaatggctcttcattcataggtgcgatcatagtgcactgcagctgcctagttcacattcttcacctggcccgttgttccatccagtcttgacctcgctagcctgcagggggcgtgtgcaagcccacactacagcccaggcatcccctctgcaagggaagtggtgctgttgtggacctgcagtccttggggggcttcaatttgtatagaaatgacaaggacagagcaaaggaaagtgggatttaattttaagcgcccaccttcccacccccaagtcaatttcctgtgacgctaataaaagcttcaggatctcttactttcattagtcctttccacagccaaagtaattatatacacatttttttttcttaaaagacagttctccctcccattatatatgcctctgggccccataaaatctggccaccctcttccccgacccgatttaccaaatgtcagagtcccacagcgcaccgagaaacaccactgtcctcctggagctctcccacacaatacaggccttgactgagggtgtgattcggttcagagtagctgggttgaatttttgtaaagaggttgccgtgtgtgcacttttgccgacctcaaagccaccagaaggagggagctgagtgtacctttttgtaatgatgactctctatgattttctccatagagcggtgcttgcacacactgacaggagtccaagaatgtgcactgagggagcgtttccgcacagatctgcgtgttccttaccactcacacatgtgcacacacatatccatgtgtgtgtgccagtgctttggggctctgttccacggggtaagtaatttctgctatagggaccctggatgtggagccattctctgggaccagagatatccagtttatttcaagactctggaagactgggttttcagacacctatgaactgacaggactgcctttgtctgtcataaagttccttattgccagactgctggccaggtttaggggagaagggggggtcaccatactggagatgctgagggtgagtgagggagtgtagggtggaaaggcagacaaataaaccatatctgcataccccttccccatcagctcccatactggtcatggcccatttcttcacacaacaagagtcttcaccaaggttgctagctgcaatggtacagtccagctagctgcagcaaaaagggggaatttactgtaaggagcctggggtgtctcagaatatccatgggatggaagctgctgcacgacacagagggactggaaccaggagcagaagtcatcagaaagccagaactcagcttctcgctctctgaggccacgtagtcactcctttctgcttttcttggcagctttctctgcatctctgagcagtttgcagaggactgcaactgcacagctctagaggctaccagtctttaattcaagggaccagccaagactgactagtgctctaaagtcccaagaccaaattactgggagacagagactaacagaacagcttaggtcagttgtccactttccaatcagctatagccaggagaccagggtcacatggctgcctgtggaccaaggtcagggtggaaaacatcatcaatggtgtcccaagttaaatggcttgtcctctgtgaagaccctctgatcaatcctatggaggaagtgacctctctcctgaa

SEQ ID NO: 511 - DNA, 6000 bp, Homo sapiens
tgccaagggaattctcaaagctcaaagccatgggggtggaggccctgcttccctccgtcttaagaaggatgtgacttgggcaagtttcagttttagcaggatcgccgtgtcttcagagggaaagaatgttctcaaccttgaatcttttgccaagaaatggtcctgagtgttttgaggggcaaaactgctgctcctgctgctcactcaagcactgttacttgatatcagcggattatttctctccagaggcttgggtcccctggatggagggcaaccctagctgttgccccagggggaaggcagggaggaggctcggacggagttaagaagcctaggtaggctgagttctagctctagctggctgcatgatccttcaatcattgagccttagccttcccatctaaagaaaggaggacatcttccctattgatatggaagatcttccctgttgacatggaattccgagtgtgaagtaatgctatatgtgaaaaatgccctggagatcataaagtgatggacagatgctgtttgtgaatgagaagagtattggtggaatagaggaaaacatagactctcttcagtgagttaagtttatgtttcttgcatctgccgattcaaaaacatgtatggcatttcctccttcttgtaggagcttcctgtatgttatactgtctgttcctcatttgccacatgttatagatgagaaaactggggctaagggaagatagactgacctggttttcccaagatcacagagctagtaagagtaggggaggaattatcacccccatttctccggatgaggaaactgaggcacagagagattaattcatttgtctgaagttatagagccagcaagtgtgaaagttatacctgagtctaaaagaaaaaaatcttttttttgagatggagttttgttcttgttgcccaggctggagtgcaatggcacgatctcggctcactgcaacctctgcctcctgggttcaagcgattatcctgccttagcctcctgggattacaggcgcccatcaccacaccctgctaattttctgtatttttagtagagatggggtttcactgtgttggccaggctgttctcgaactcctgacctcaggcaatctgtccacctcggcctcccaaagtgctgggattataggcatgagccactgcgccaggccccctgaatccaaatcttttaatgttactaatttagggttcatggactcttgaggggttctcagaaagacatcagaaggaaagtttgcatatgtgtacatttttgtggggagagggattccatatattgaatcaacttctcaaatgaatcagaaatcttggacctgtagttggtgcataagtaactctttctgtatttaaacattgatcatactacaagaaaagctttagtgatggcaagttactctggcacttaaaatgtgcttaattgttactgtgcttcaaggctgtgagtcaaaatgattgaattgcctttgatgcagctggccaacttgaatttttctttctcctggcttaataactcttcaatatctataagatgtcaagatcaaaatttttccttctgataccacattttgtttaatcttcaacttaggtgcaaaccctagacgaaaaaagactgtaattcaactcttcagtagccaggattgcctgtctccaaccccttctgaatctagttatgttggatactgggagagaagcatgtagactctttgggcctgacctttctgatttttctctggaagggcttcactgaaggggcacagaagaataatgtttctacagcatagatccaggggctcctccccaccaggaacccagcttagcaggcaggctgttcatgtggaactcgccaaaaccccgtgcaggtggatgtgcggaaacaccaaagaactgcacgattgtccctgcctttggaaggtctcattccctgtcattccttcattcagtcaacaaacttggaggacccagtatgtgctacattttgaggataaagtgatgaacaacacagacaagatccctgcccttgtggagtctatattcaaaccagagcttgaccttcaaactgagagaccaacttaaaaatggggccatctggccactaactgttatacaccctctgcttgggacacacggtctcagccctcctccaccttcaagtctgataggagagagatttcagagtggcccaaacaatctaaagtaaaagtgaacagagttcaaaataagtcctcaagggctgaggggagaccaaggggaagataatgcggtgagggcactgagagagggattcctagaggaattgtaccttgctttgaattttagccctaagctgcaaatcctagctaacttctaagtagatgctgacagctggcttctatttggtctgccatattgaatggctttgtccccaggacatggtggagatttagacaacccagggcagaaaatcctctaggaaaggaagtctgaactacaccgctggctttctgaaaggacaggatttgaggagctgggatggtagtaggggagagggcagctgggtggggtttcttccaggaaacaatgtggatgcaagatgcagtcctcgtccctggcctgcccttaccgctttagtatttcagatgagtcagctctcactctgccacctgctttctgtaactctgcagcaggccagcagcctccagtccaccctctcctcctcccagggctctggggtgaagccctccccaggaactccctggctcccagtacccatgggagaagctcttttcaactgacatgatttattttaacaataagaggaaaaaaccacatccgatttccacagaattagagttcctcctgacacgcctggacttgccagttgggaaggacactctcaagccatcctctatgccatttgccgttctgctgttcctttgcttggagggaagagatgcctgtttctatagggaggaagtttgaagtgagaagagaggacaaagattctgtgaatggaaagagcactggactgagagttcagggatgtggcctccggtcccagctccaccactactcagttgtctgacgaaggaaacagaaagttgtgatacaatgtgggtgacacattgcctagaaagaagtgccgttgtgatacgcttatgttggtgggatgggggaaagaaataacaggtttgtatggagtgttatgaaagaattaaatcttaaccttccattggggtaagctgatggaaacaaccatagcaaaggacagactgaatatttttttattctctttatagaaaataacagtaaaaaaaagtattgacataggagaaggaaacaaaaagttgtcaggagttaatgaatagaaatattatttttttctggattttatggtgtttgtgttatttgttagcttttatgaatttgtaatttgttgtaatttctttctaaataagtatttacttttgtctctaattttgtccatctatttttgaattcaattttcaaattcaaaacgcttctctcggccgggcacggtggctcacgcctgtaatcccagcactttgggaggtcgaggagggcggatcacgaggtcaggagatcgagaccatcctggctaacacagtgaaaccccgtctctactaaaaatacaaaaaattagccaggcgaggtggtgggcgcctgtagtcccagctactcgggaggctgaggcaggagaatggcatgaaccccggggggcggagcctgcagtgagccgagatcgtgccactgcactccagcctgggtgacagcgagactccgtctcaaaaaacaaaacaaaacaaaacaaaaaaaacaaaaagaacaaaatgcttctctctgggcctcagctgttccctcatctgtaaatgagaagggtgggccagatgctctttcatgtctggtgtaatgaagccctggagtgggctgcctatgactgcacgcagctgtaccacaccccacctgggtgtctttgggtgaagtacttggtagctccaagtctcatcttccttatccaaaatgatggacacaaaaatagtattgacctcatggaataggtgtgaagatgaaaacagacaatgcatatggatgcttcacacagaccctggggtggcaaatgtgctcagtacttgttagttattagtgtgagtctactcttttagtctatgaattttgttagaggaactcctgcttaccaggcctctggtttaataaaacatgactggagtgacacatttctaagctcaccaccacttataattacagaagattgatggctatataggacatctcccaccaagcctgcagaatgtccagatgtcccaagtacagcccactttactcagagataacgtcaatgagcagactcaagttgaaggattaatggtcactagagcaccaacagcccctacctttagtgagcacatctgcacattccaagtttaatcatagctccttatagtttcttataagcagagatgttcctaaaggacaggggttcctcctcctgctttctgggcatgccctactctctaatggagtagtttccaataaatttgcttctttgtctgtgctccaattctttcctgtgtgagatctaagaacccactcttggggtctagattgggatcctcttttctggcaacatcttgagtatgtgaccatgagaaatgttagaaattggagtgaaaggtacgtaaacatttgaacccaataccattctctggttctcccagaggcacagtaaaaaaaagtattgacatagaagaaggaaacaaaaagttgtcaggagttaaagaataaagatttttttttctggattttgtggtgtttgtggtatttgttagcttttatgatttgtaatttgttgtaatttctctttctaaataaacgtttacttttgtctctaattttgtatttctatttttgaattcaatttattttcccgcagacagggtctcactctgttgcccaggctggagtgcaatggtgaaattatagcagactgcagtcttcaactcctgacctcaagcaattgtcctgcctcctcaacttcctgactacaggtgtgcatgaggactacaggcaggcatgtgccaacacatgcagctttttttttttttttttttcagagatgtggtctcgctttgttgcctacactggtctcaaactcttggcctcaagggatcctcccacctcggcttcccaaagtgcagagattacaggtgtgagccactgtgcccagcctgaattcaatttcttaaaaggactctccccacccaattgtatgagctatgcatggccagatttagcaaatacaaatacaagacacccagttaacttggaatttcaggtagataaacactgagatgttttcattgaaattcaaagttaaatatgcatcttgtatccagcgggaatataaaaaaggaaagtagtggtcaactcaaccagggttgaagtggggaggaggaggggagtggggagaggaaaggaagaggggagaagtttcacaaaggaagtcacactggagctaggttttgaacgttaggttggtgtttacaaggtaggtgaggcagcggggctttctaggtgagatgagcctgtgaggtgtgggagatctgcaagagagatgaggcggaaaatgtaggcgaagtccaggctgtgatgggtctggatgctgtggggagcagatttcctgctactgggaggccccagggcgttatgctgggagttttagactggagagttccaagactgggtttgcattttaaaaagtccacctacctagggaagagtggattgttcaggagaggaatggggaggcatcagttgggctctttccattactatccctccatcccatcaccactggggctctttcataacatttgaaccacagagcccattgacataagatgtgtcacccagggtctgaggctttgaacagactttgaccaagatccctgtgggca

SEQ ID NO: 512 - DNA, 6000 bp, Homo sapiens
ttttaaaggtcccacctctcaatactgccacactgaggattaagtttcaacatgagttttggagggaatgttcaaaccatagtggtacccatgacacagtgttgccatttatctgtttgcaagtgtatctccactctactgagtcattaaagcacaaggactgtgtcttaatttattttaaaatagctttttaaatatataatttacataccataggttatctgtttaaagtgcacagttcaattttttttttaaatatagacacagagttgtgcaaccatcaccgtatctaatttcaaaacattctgttactctccaaagaaacattgtattccttagtagtcactcctttcctcccacccaccctattcttaactctcagccctgggcaaccattcatctatattctgtgtctataaatttgccttttctggacatttgacataaatgttttcatagtaatttattttttgtacactctattctgccattcagtaggtgcttaggaaatgtttgttcgatgaatgaatgaatgtactaaagattgagaaactgcttggaagcatggcaccggggaaagaacactggaccaaaagccagaagacctgcactctaggcctggttatgtcatttatttatgtgacttagagaaaatcacttgacctttctgactctcagctttctagtctgtaaaggagggataataatatctgccctccttatttcaaaagtccacagtaagtgtcagatgaaaaaaatcacttggaaatattttgtatagctctaagcaggctgtacagatgtaagaataatttatgtttgtgtttactctcatcccttgaaatgcctataaaaataaatcacttattacacgaatgacacagggagaaggaagaacgacagaatgccagtctaaggagatcaaccagtgggatatgggctcctggaatgactgcagttaactcagggaaaagagctaacaaatgccctggttatcccatatccattaccacatgcatttcccagccaaatgggaagataaaaatctgttctcgagtgaaaattaaactcaattcactggaagaaaaatgatcatataatttcctcttatctttttgctcttaggaaattctagttaatatgctaattactttctgttttgcagggcctttgcatccatcgcaaagaggggagattcaggtttaagagtgagctctttattgcctcacacagaagtggaagtggagaaggaactctggtccatggtggctcagtctctttctctccctttaggtttagaggactttgtagggggaatgtgagtatatttatttctcaaatgtgaaattcaggctctgcagagagatatacaggacagagataggataagattattagaataaaacctctgaatctaataaggagtagtttggaggaaaaaaaaacagtcttgtatgtgaagatttatctttagataaacttttcttccacccaacatttgtaaaactccccaagttccatcctttcgtagaggttagcagagcctcagaccttggtctgatccaggagagtttggataaaaatatatgaatctggacaaaagggccagccccacttccttcaacctcttaaagtctgagacttggggctttcccagaggtgggccagtgagccaggtctccccactgtttccacctggcctttgggcactgccttccaacttgtcaccttgtttttcccattcccctgatcatctgatcagcctactgcctcctttcccaataaggtcatgttcttctcttcctctgctcctattccagctatttcccccatagccactgcttccttctaatccagggtttcttaccctcagcactattgaccttaggtcatatagttctttgtgatgaggggctgtcctgtggcccataggatgtttagcagcattcccagcccattccactagataccaatagcacctcccagttatgacaaccaaaaatatctccagacattgcccagtacagatgggcatgaagtatgaagtatgaagtatgaagtatgaagtcaccttatttagatcccctaaaccagtccttcctcccttcatctggagctcttgtttattaaacatttaccatggagaagacactgaattaaatctttcatgcgttttatgctgatggttctcaaaatttaatgaacataagcatcaccttggaaggttcttaaactacatattctaattcagtcattttttcggggaagggcttgagattctactttacttttatttatttttttcgagacagggtcttgctctgtcacccagggtgtaatgcagtggcaagatcatggctcactgcagccttgacctcccaggctcaaatgatcctcctgcctcagcttcccgagtagctgggaccacaggcatgtgccatcacaacgaactaatttttatttatttttgcagacagggtcttgccatgttgcctaggaggacctcaaactcctgggctcaagcaatcctcccaccttggcctcccaaagtgctgggattacagacgtgagccactgtacccagcccaagattgtacatttctaacaaggtcccagataatgctatcactgctggctcatgggccacacttggtgagcaaagctgcaggtcatcacatcctcatggtcttatgaggactctatttcacaagtgaggaaggtgagcctcagagggctcatatgtggctcgatcaccttttgaacccaggtctgcctgcctccaaagcttgtactcataactagattctcaactgatgttgggccaaggttcctaggttctctccttgaccttccttctgaagtaataatgctatgataagctcatcggaggctgaggcccaggcacatgtttgcctgaactatccatgttatatgattccttcctcagacagagtgagctactcacgatcccaggtgtaccctgaggccagccaaggtgtatccatgacctcatgcctctgttccagcctgccctttaacagctcatcccacctgcctgccctccccgcctatctgcagacagtagtctaggatttcagctgccctgggggctcattttccctctcagcttcctgctttagctgtctcctgcctcccactcacctattactccagcactctcacctggtcttcttttctgtctcatcactgcctcttgacatctttatctcatagtagttagttaggggttcttggtaatgccctaaatccacatggtgggaaggggggagtgggggaagagagtgcgctgtggggctgtgcctacttctggagggtaagactcgggccctccaggaacaaaggattcaggctggtggcagctatagccaagcagactgctggccagggattgcaaaggagtattttgtttgcttaagaaaataaacaacactgagtatgagatggagggagggggtgttggtgccagagagattgggaagagtctgccaagggtgtgttctactcactctcctcttttctttcatctccactgagctggaggcagttatcctgtcccccacgtcacattcctactcccgtttcccatgcctggacccaggttgggcaaactcttcctgtaaagaaccagacaggaactattttaggctctgtgtgccatatggtctcagtcacaactactcatctctgcctctgtagcacgaaagcaattagcaacaatatgtcaacaaacatatgtgaccccatgaaaactttatttattatggatacggaaacctgaaaataatgtctttcttttgattttttccccaatcattaaaaaacgtaaaaactactcttaggtcgcaaggttaagccattctcagcttagcagtggcaggctggatttggcttgtgacctacagttggccaatccctgattcccaaaatgtattcctcagggatgtgggcaaatacttatgggaaatgctggattaaacagagttaagaagcatcagacatttccaggacgggctagcacatgccagggctctctaactgacctcattaggattcatctgtttcatggaggatcttgcaagacaagaattcctcaaacctagagtctgaggactgtgctttgggaaacactgctctgcttgatgccctcactgggcacatggtagaatctagagctgagtgccttgctagctggagatagggtcagagctcttgactgccctggcagtcttgacacatcacgctgtctgtgtcccctgagtggttcagagccacacaggccaagactagcccaccagagcaccaggcctcccagctttctgggcttgtccatgcgtacatttccttattcttcctggtttccagaacctaaggagaggcacattttggttgagtgattataaccctagggaccatgggtagctgcatgtcaggaaacactcctcaacttcctggccctgatggattaaaggagaggtacttacaggttatttcttcgctgtggactactgtcccagcatgaatagggcatcattattgaattattttgacaggaaggagactggtgtatgctgcacagtaataatgtatttacatgtgtacagagtttaccaagcacctctgtgttgtttttgcctctgtttattacacttgcccttggggggaggtgggacaaattttttaaaaatttatacatgcagagactgcagcgcagagaagctaagagacttgcccctgcccacacagccagtggtagagcctgaactcaaacccaggtctcatctcacctcaggggctgctttccccatcgctgtattgtccttaaagtgatgggtgactaggcaatgaagtaattctctaggaaagcatgaccaatttccctttctccacctccctctttttcctccacccctcccccatcagcccccatatatatgcccaaatctccacaaagccttgcttgcctgcaaacctttacttctgaaatgacttccacggctgggacgggaaccttccacccacagctatgcctctgattggtgaatggtgaaggtgcctgtctaacttttctgtaaaaagaaccagctgcctccaggcagccagccctcaagcatcacttacaggaccagaggtgagcatgggggattcttggttacttttttttgaaggactagacctctgctttatttgtgaaaaggggtcaaggtggggacagcagaagtcaatttttttgagtgttgatgtagggacaagacatgactgtgatgaggagctgctttcgccaatttaacaccaagaagaattgaggctgcttgggaggaaggccaggaggaacacgagactgagagatgaattttcaacagaggctgcaaagcctgtggactttagccaggtgcggtggctcacacctgtaatcccagaactttgggaggctgaggtgggcagatcatttaaggtcaggagttcgagaccagcctggccaacatggtgaaaccctgtctctactaaaaatacaaaaaaaaattagttgggcatgtgtttttgatattttcagatacaaaaatcccagctacttgggcgactgaggcatgagcatcacttgaacctggtaggcagaggttgcagtgagccgagatcatgccactgcactccagcctgggtgacagactgaaattctgtcaaaaaaaaaaaaaaaaaaaaaagcctgtggagtttgaaagaacagaatgaaaagacattgagggagatgctaaagcatagcccccgtcccccgtgacccataacccaggggtcgccgcctccctagcccaggtaccagcagaaccgggtcttctctggtcttcctcccggtgtaggggtgggaggcagtttctttaggtgtcagaccagtgcctgcagtaagaaaggttcttaaatgattgtgtaaagaagtacgaaagaaagggagaaagtaagaaagggagggagcgagagaggaaagaa

SEQ ID NO: 513 - DNA, 6000 bp, Homo sapiens
ctcccaaagcatggggacgacaggcgtgagccactgcacccagccaggaacttgtttatagcaattgattttgttttgtaaagctaaaaaatagatctctgatttagacttttccaaaactcaagacagaacatctctcctaagaacattaaacagcagcgagaggaactgactgtgctatggtctatgaaaccggtcccccaggcagagaaacaagtagagtttcccaccccatccctcccagctttcctaaaataattatctctactaaggagtctgcgcaacaaaaataagagatcatctcaaaaaggctacatgtctaagtggacagtggacatgctgagaggcaagctgtgagactgagaccaaaggtcccagcaggctgtggagcaaggcaggcatggagagaggatcatcggtataggagccaagcagctctggagtgtctcttccaaggctgattcttaaaagggcagccaagccactctccctagagccaaaaatctttgtcctagatacagggacatgaatatcctaaaatccaggttgttgctgttatgtcacattgaagttgatccaaaagtcctgcatatttggagttttaacctcagaactccaataggaatatggccatagtcaggaaagaaatcttagtcatcaaaatcctaccatttattatctttaaaaaagtcacatggctgggtgcggtggctcacacctgtaatcccagcactttgggaagccgaggcgggcagatcacaaggtcaggagatcgagaccatcctggccaacatggtgaaaccccgtctctactaaaaatacaaaaattagctgggcgtggtggtgggcgcctgtaatcccagctacttgggaggctgaggcaggagaattgcctgaacgcaggaggcggaggttgcagtgagccgagatcgcgccactgcactccagcttggggacaaagtgagactctgccaaaaaaaaaaaaaaagtcacaaatgggcttattgttgtaaaggtaaatgctccaaggccctgctgctgtggagtggcttgctctgggacaggcaagcctggggtcctgcggtgcttggaaggacgggacaacagggtccctgagtcaggtacctctacctggggagggggcttgttcttggtgagtccaccagacaaggagattcttgtggtctgtcattgcagagaacagtgttgggtcatggagaggaccacctgaggatggaggccctcagtttgggaaggcccagaaaatggcccttgtaacccggccatgcggaggtcaaagcagagaaaagcaataaccaagcagaacccatgacaacaagctccacccagtggcggtggctcatctccactgcactctgaccacatcgcaggctgtgtgctgagtcccttgtaacacttgcctcatgtgatcctcacaactgccttacgagaaacgttcttcttagcccatctgtaacatagggaggatggcagagcctaagctaaaaggtcatcatacagagcgaatgaacacacctcaaggacttcactttccattggatctggcattatttattccctccacccgctgtcggggggctgtgaatgttttccatcaggttcaccccttctggaccctagagggtgttgggccattggctcccttgccccatggtgtgctccagcctggcagacactcccctgggagtaagagtgccagggcaccatggtagccctgtgagtcagaaaggagaaatcgagcttagacgagaaaaaaagaaagaagaaaataaggatgtaagaattgtaaagttcacaatttcaccagcagtcagtcttcccttgggccccaacccccatgacccaggggcaacagctaaaggtaaatggaacaagcccagttctggggattttgatcccctcaaactcccgacattcgccgcctgcccagccgtcctcacacccctaactcttaagtcttgtaacctaatgggatgttttcagggtttcacttgggccacacgtgatgcaaaaagctctcctgcccactcccatcccacacaccttccgccctgcccggcaggccccagcctcagcccagccaaaccctgatcttcacagacatgcacacacactcacactccacagagcacacacacaaccacacaccacacacacacactcaaccacacaccacacactcataaccacacaccacacactcacacactctacagagcacacacacactcatggacgcacaccacacacacacaaccacacaccacacacacactcaaccacacacacactagacagagcatagagtgcgcacacacacactcatagccacacaccacgcagtgacacacactcataactacataccacacacaacacatagcacacacacatagccacacaccacacattcacacacactcatagccacacaccacacattcacacactccacagagcacacacacactcatggacacacatcacacacacaatcacacacacataaccacacaccacacacactagacagagcacacacactcatagccacacaccacacacacactccacagagcacacacacactcatagccacacaccacacacacactccacagtgcacacacacactcatagccacacgccacacactcacacactctacagagcacacacacactcatggacacacaccacacacacaatcacacacacataaccacacaccacacacactagacagagaacacacacactcataaccacacaccacacactcacacactcaaccactcacacactagacacagcatagagtgtgcacacacacactcatagccacacaccacgcagtgacacacactcataactacataccacacacaacacatagcacacacacatagccgcacaccacacattcacacacacacatacatcacacagccacgcatcctacattcacacacataccacacagcacatacacactcatagccacacatcatacattcacacagacacattacacataacacactcacactctcatagccacacactacatgttcacactcactacacacactcacactgtagccacacaccacacacacaccacacacgtatcacacaacatacattgcacccttacacacacctcagacacacaccacacatacttcacacgctcaaacatcagagtcatacaacacacatcatacactcacacattcattcatacatatattcatactcacacactcttgcccccacacacatcacgttcattcactcatattccccttctctgtctctccaagacagccccaggcctcaagcccagtgcatggtggagcccagctgtgtgacagctctggggcattgggaagagcccgctaagtagggaagggtggggctaatcccagctgggagctctggcactaaggagaggcccgaggctgccctctgccatcttggcccatttcagggctggaggacatcacaaccacagctgctccgggccaggggagattcagatagggatggggcagggcaggctgcccacccccccacacacttcctctgcacctgctctgagcctcacattcaacttccaccacggatgttgttgttttagagaacatgtgacaaatctgctgtgtgggggcgagcagggagtggctgacacaaccactgtggagcccgggtctgtcaggcacatccccccagaaacagtgtgagtatagcccggatcctccaggggcacaagaggtcctttcacctggggttggggccctgagaactgacctccagggatgaaacttccaggaacagagccctgagaatgccctcataagtaatacccctgcgcagctcacagtgaaggcttcttaaagcacttccatgcctgtgagttctgctgggcctcagaaaagccatgtgaggtgggcagggtaggggcaatccctactttatcaaggaaaaaaccgaggcccagggaaatttgcccaaagctagaaagtgccaagccagtacaagacctgaggtcttctgacttgcatccaaaactcttcccaagatgccctgtggcctcagcatctctctccatcagtcatgggccttacccttgggcccttggggtcctgaaggagagctctaccagggtgctgtgacttcaggcaaagtggctgcatgacctgtcacaccccagttctggcattgccttggtggtcactggacagaggcctgagcccttgccacagggcagcaccttgtggggacactttggggagattaagggtgaaggttggctgaggtgctggggagctatgtgaagtcctcaggaactgtgttctgcaggagggaatggcagggatcatctagtcccagcttcgtttatttcctagatgaagaaattcaggctcagagaaaagtaatggattgctcaaagtccttagttagtacccccacatagaaggtgctcaaaaactattgtaaaggtgagttaactggtgactggtaaggactacagtcagcatcttctgacttcaggcccaagcgtctgcccatacagcctttctcaggcagggaaaattggtgataaggctcttttatcctgaaggcagaatgaaagcaaatgaccccagcacggaagccaatgagtatacataaagcacgggaggccctgctaagaaaaagcaccaagacaaaggaatatcaggcctggtcactgctaatagtctggaggaacttcttagatgccttttgaacagggtgaccctttcttactccacacaacatgttttctcagctcctgacttccgctgtggtttgtcagcactctctttttagcctgagaatagttagcaaacaagggaggttgtcatttcctcatcgtcaagctttgttcctcgtgggggctagaaatctctttccagttccagattgtgaagggttcctgagtaagcagcgtgtctccatccccctctctaggggctcttggatggaccttgcactctagaagggacaatggacttctggctttggccactttacttcctgccaggtaagtaccgtggggaaacacttcagacctctgaatgaggcttgaattggccacaagtagaataattgcctggtagctctagctctgatgtttctggatggattcagttgtgaaccaacacctagggcaggacaagaatggaggccatgtgaggtgttggatgccttcctcactccatggtaatgctcctttctccactccagacactctcctgtttcagtcaggtgttaactctatcacccaggctggagtgcagtggtgtgatcatggctcactgcagtcttgtactcctgggttcgagtgatcctaccaccccagactctctagtagctaggactacaagtgcatgccaccatgcccagctaatttttaatttttttgtagagatggagtcttgctgtgttgcccaggatggtcttgaacttgtggccttaagtgatcctcctggctcagcttcacaaagcgctgggattacaggtgtgagccactgtgcccagccaggtgttaactcttaagagctgaaggtgtcatctctcctaaacatattagcctattaatatgggatcttaaagcaagtgtctccgtacttctttcttcttacctctacactctttctatagatctttttcagtcccgaatttccaactttcaaccctaaatgaaaattccgtaatccattcagtagctctaatctatttcctgaattccatatctcaacttacaactgtctcctgggcaacctctgcttcaatattccaccaagatttgaaatgtaaactgcctaaccttacctcaattcttcattgatcaccatccaaaccagctatttcacctgtctgaagtatcgctgatcatcagccacaaaatgccagaatggctaattaccacctcttcccatgtatcctcat

SEQ ID NO: 514 - DNA, 6000 bp, Homo sapiens
tccacctgcctcaacctcccaaagtgctggaattacaggcgtgagccacagcgcctggccttattcatattaattttcaaaaaatgcaaagttatagcgacaaaggagatctcttgcctgaggccagggctgggggtgtggattgactgcaaatggacacggggagatggatttgttctaaaatttcattgtggttatggctgcacatctgtatacatttactaaaattcatcaattgggtgaatcttatgttattaaaagtacatcagtaaagttgtttaaacaaggaagaagaagtatggaactggaagggctgtacaaaacctgtatcacaatgagaggccctcatttgtgccaacagaaagtagcatgggatttcagaggatagaagtggcaaggtcatggaatactgaggtgtgattagagtcaaagacccttgaactttgtgttttttcctaggatgggcccttcctgagcttatgcctttctttctaatgcttctgtcctgttttctgtgaaatggaagatgtgactaaccagggttccaagatcattgcttgaaatctcagcatatagagtaagcaccattctcaaaaataaataccaaataaatggtcttccttgttaccaacctattaaaaaatccaagaccaaactgtgccaatcaaacctattatcttacttcatgattcctaaggctaaacaataacttttaaatctatattgtaatggcttctggtgattatgcagaattaatatgttaaaatgttttcctagcagtgataggaattgcatgtgtgaatcttattaaagaaactgtcaaagaggacagaattcatacttagccaggtgtacaatgaagacaggaggtctaatgtaaaaacaataaaaatctcatttctccagccaaggctgaccatcagacaattaaaccatgaacaggaataaagaagggtgtgtttatgtatcaagcaggggatcccctggaataaatacataatatatggccataggaacagtacaggtctgcttttttcaactggtgctgaccctataacacagtaaataacaatagagtaaaacaaggtagaacaaaagaaacatggttttttcttaagctcctaagttaaaggtgcagctgctgaatgcacatacacaggttcttttgcaaagggaggcttaaaaaaatttacatcggtccctgccccatcccagtactccccgcctctcttcttgtggtggtcagcacactgacaggcagagctgagctaaaggttatttgatggaagcagagggatcagtcattcatatattgtctcaatacaacacctacttagtgagcaagctgagtattctctgtgcacaagaccctgagatctgcattttgcctggaagtggtttgctgctacagtatatcacattttccatgtgtggttctgtttacagacaaagactttccattgtaacttgcaatggagtcaaagtcgcaatctatggcccaaggagaggattttccctccttatctgatctcactgatctctaggtgatgggaagtatgaacttttgccctgcaagctaactcactacattgatcagtctcgtcacagaggagcagcctgaggaagataatgcatccatctactattccagtaggcggcgtcctcacctctccatcagcaccatctttacattggcagccagggctgcagtctctcaccctaatttatacagcaaattaaacagctgaaatccatgtcttcgggcgtctggggcaatcttacggtgtctagaagcaacagataaaagggttagtgcttttcttctgcataaaactgtagtgtatagttcagccctggtcttattttgtagctgaatttagtttgaaggttggattctcttcaatgttagatataatgttgaacttaatgctgaatattttcaaaacactaaaagtactaaaatttgtctttaagttgttttgtttgaattcacatcagtcatttatttgaggggtagggtatagtggctaggagtaccagaaccagacttcccagaattcaaattctgcctctctcaaactaagaattttgtgattctgggcaaattgctcaatagataagattttccatctataaaatggagttgattattaaatgagttaatataaaaaacactgagcacagtacctggtatataaaacgtaataggccgggcacagaggctcatgcctataatcccagcactttggtaggccgaggtgggtggatcacttgggatcaggaatctgagaccagcctggccaacatggcgaaattccatctctactaaaaatacaaaaattagctaggtgtggtggtgcacgcctatagtcccagctactcgggaggctgaggtgggagaattgtttaaacccaggacgtggaggttgcagtgagccaagatcacgccactgcactctatcctgggtgacagagcgagattccatctaaaaaaaaaaaaaagaaaccttaataaacgttagttatcacttgaaggtatttaatgtttttttatatgtgcatttatgtacatacaggattcaaattccgctttatgatcaacagggaattgggactatgttactgacttctgactaatacccgtctaaaattcctttaccctttccacttagacgcagccctcgagttatgcggcccccatttcccaccacaataaagatccacctctctatcccaggttttattccatcatatttaaggcttggatgtaatttttggaacaattgactgctttatttagttggtggggagaggagtaggagagagaagcaaattacagtcaatgacaggaccagggattctgagcatacctgcatgtatgcatactagacactgatgttccagccagtgaaaggagatataacttctaaaaaacagtatcaactttattatgcttggaagtaatgagaagagaggcaagaagcaggcaatggtaagagaaagcgggtgggacgtagtggcttgcacatttaatcccagcactttgggaggtcgaggtgggaggatcgcttaaacccaggagtttgagaccagcctgggcaacatagtaagtctccatctcttcaaaaaaaaaaaaaaaaaaaaaggagctgggggaggtgggcgtagtggtgtgtgcctgtagtcccagctactctgggggctgaagcggcagaattacttgagcccaggagatccagcctgcagtgagctgtgatcatgcccctgcactccagcctgggtgacagagtgagaacctctctcaaaaaatacacacccacaaaaagagagggaaagtatagtgtatggcagaacaggaaggagaacttgggttcactaagcacctactctgtgttaggcgtacaggagtgccatctcatttaattctcatgagaagattatgagacagatctacagtcccaaagcaacacccaccagtgcctctcccccacggagcggttcatctaactcaccaaccaaaaaaggtttggatctggatttctggctctttggagaaataagagatcaggtaacaataggctggcactgggtggtggctgctccactagatcctccacctgctctttagtgcaccagcgcctccctcctttctccatgaccacaacctctgcctccctcctgtatgtttcctgccgagctcctgtgcacatctgagtttttgactcccaaggtgtgtattattctccccttttattgacgaggacggtaactgaaactcagagcagttaagtacttttcccacggtggcctaactgaaagtaaaggatctagatagaattggaattttggtccatttcatttatatagaatgtattgcccttggagagaatatattgtaagaaagagcccgtatctaagagtgcgcaggccaagcgcggtggctcacgcctgttgggagggcaaggcaggcggatcacaaggtcaagagatgagaccagcctgaccaacatggtgaaaccccgtctctactaaaagtacaaaaattagcccggcgtggtggcacatgcttgtaatcccagctactcgggaggctgaggcaggagaattgcttgaacctgggaggccagggttgcagtgagccgagatcgcgtcaccgcactccagcctggcgtgagagcgagactccgtctcaaaaaataaaataaaataaaaaatacgtatagagagagagagagggagagagacaggcagacagcagacctggattcaagttccagctgcagagcttgctgagcgtgtctaaccttgggtacgtcactccacgttgctgctctggccctcagacagctcatctgtaaaatggggatgaccaggcctacttcaccagcttgttttgaggaccacaggagatgtttgggaagccaaccggggagctctacaactctcagagattgctggtgttaggccaacagcaagaggagggctggcaaatttgtgctaccctgaaggaaagtccaggaaggactgatttgagccagatctcaagcaaggccttgagcaaatgggtcaacacaggagaggacgggctgagccttgttgtgcctgacggaagagcaagacggccacaattcagacgcacgtgagggaaatcagatgactggacttgtagatactaacggttctgaagcgggtaggttagctttccaaccgcctggatgacggtctcagcctcctcccgaccccttcctgcgcgtccgctcttcccctgcgcccgcccgcgcccctccgcccgcgccccggccccgccccaggcctcgcctccgcttcgccgccgccgccggccgcagccaggagcagcagccgcgcctgcagaccggcctcgcggagcccgcgcgccgagccccacgtgagtccggcgggtcgccgccctgggcaccctcgcgacggaagggccggggtggggacaccgacgagcgcttttcatctcgtcccagttactttgaaaccgaaagcgcctgctggcgtccggccggtccccgaccggcggggagggcgcgaggcggcggctgggccgggggaggcggaggggcccgggcttgcgggagaccggcggggcaggtgaccgccgacggcccggggacagcgggagcggtgcggagcgggtttcttagccggggagaggtgtggcgagggcggagactgggggtccaaagctggggagctggtccagagggcggctgtggaccggaggggccaggttccgtcggggtgcactggcggggaggactttcaggcacgtcccgcacatccgcactgcaaaccaggccctggcccccttccgcacccgaaggcaccctctccacctttgcagggctttccaatcaaagcaactccagaatgaaacttcaggattgcaaggaatggaagcctctaccagctgttcgtttgcgcgtcttcctttagaaagcagctacccccctcccccagaaggcgagctctaaggaaccttgacgcaaaccaaagctccgagaggtggaaggagttgcccagaggcacccagagaattcgcagattctgagttctccgtaccagatggtctccactttgttcctgttctgcagggtcttggtggttctgagaattttcggggccacgctcttgctgcgggtcccactgggccactctggctggccgactttctctgctcattcggcctccttctgctaagtttccatatttgggtatttcagatttactttcatgagaactcagttatctcgctgtggcaggcagagctgcctcaggcgagcattgaggttggtgaaaccaggcgaggctccctgccagggctgcccctgcagcccccaccctccatagccttgggctctgacccacctcctgtgaggataggcatctggtaaccagtttaattctgtaaatatttattgggcaggtgctgtgtgagaactgggctggggccagtggaatatggttatttcc

SEQ ID NO: 515 - DNA, 6000 bp, Homo sapiens
tgaggcaggagaattacttgaacccgcgaggcagaggttgcagtgagctgagactgtgccactgcactacagcctgggcaacaagagtgaaactccatctcaaaaaaaaaaaaagatggcctgctctgacacacagcaattcttctgctggtttttaatttaaatttgaatgcctttaggctaggcatgcagtttccagctccccagaaaccccacaatgctctatggctattaaccacatggaaggagaaaaccagttttactgaatatctgccagactccaggctctgtgtatatattgactcatttaatctttccagcaaccccaagtggcacacattactatttctatttaccagtgggaatacagacactatggaagttgggcaacttgctcagattatataactacaaccagcaaatcataaacccagatatgaacccaggcccaccagattctgaagtccacactgtttctactacaccatcattgaaagtagaaggttttgactaggctatgtattaaagaggcccctctgcagcagcatgaaaaggaaaattgaatacagatggacctggggcaggaaaatgagtcaatgcttaattaaggttgcccaggaaagagtccctgtggccctgaactgggaatagacagatcaggactggctgagggggacaggataaaggtgactgaggaacagcagcgatttctgcaacagagagaacagagagaaagaggcggcctcggacaaatgtctaaggtgcttctgaaacatcatggtgaagattctgaatattgcaaatcatagtggccaagaagataactgggtgagggatggaaatttgatcagcctttccttaaaagtgttggtttaagtcttgggaatggccaagggctcaaggagagaagcacagagaattgaaatccaacctgaggacccagccttggccccatacctgcacttgcaggacagaggaggataagaagctggaggtcaaggaagggaatgctggtggggacggtgtagcaacctccaaggagataagtaatagctgcagcgtgggctggtatgggctggtgactgaggagtaccaggtcctggaaacctacacaggacaatcagagcagcgcagcaggtgcacggtgccgagtgaggagcgagtgcaagagctgtccactctttacagaagcttgtcagtgaaagaaagagaagagggactggggaaacatggagtcttcttactaacagaaaactcagcttgtgggggagggaagaagtctgtgggagggaggcagggagggaacctgcctcagagggaggaggagagagctgacttgggagtgtacgtggaaaaggtactctcgccttgttctggaggagagcactttctccttgagagaaaaaaaaaaaaagccatggaaaaaaattcaggaatgttctgaattggtaaggagggaagttgatggagcctgtggtgtcaagaaatgagacatggggctctgctgaaagtaagtgagatatcctgggagggcactcactgggctctgtcacttaatactgggtctctaagacctgcacatcacacggatactgcacagtgtacagaccatttgcatgtatactgcttttgctacagcacgatccaagcatgcaccaccacctgcctccaggtacaaatatgcaaaatgtgctcaccactgtcactgtaaacagactgagttcctctgtcaggactaatgagtactttcacttttatctcctgcctggtcctccaagccactttctcacaagataggacttgctggaggccatatgggtcaaggctgctgagtgatccttcaaataaagctttcctctgggcaaggcaacaaattcatgctggcccactcctgggtggtggcagcggcagcagcagcagaggcctgccagctctgaggactccctctgccctgcagcgtgttctcctctgccccaacacacacagatactcacttgctacacctctgctggagctagaactcctatccagaatcccagaaaaagccacaacctgggcagaaaaaagctcttcagagactgagtcagacactgacccctgatcagtgacaaaggtgtcaggcagcttttgatgactgtctcgctggttctctcatcctcctcctgcccagaatcctggcttcctttaattaagatactatgggaaaaacacaggaattggagaaagaagacttgggattaggtcctgccccatccctacatgctgtgaggtctttcaaatcacttctgagcctcagcttgcaaccaggtaaagtggaaggaatagcatgtgcctctcccttctcctgaggaggtagtgagaagttaatcagatgagatgggcttctcgtaagctgtacagtgttattctaatttctggatttaagcaagtcctgctgggagctcaacctctctctgccaagcctacccagcacttgttcctggcagctcagaccccaagggagacgtaccctgaatgaattcaattcgattcagcaaacatctgtttaggcctactctatgccaggttccaagacacacatgaaaacagacaagggtcttgcccggagtttgcctggctaggcagagctaacagagtggatgtctgttcttgtggtggttaggccagagtctccagcagaacttgctccatgttgctggggacagaccacagaggcattatcagaatctgggtccccttgctgacccctcagacggaggaagaggtgggcagatatggctctctgagaagccagggtgaggggcctggagcaggggaacaagacacctcaatgctctgatcctggtccagcagtggagctcagggagctatttaccgcctcagtgcttcaccctcacaatctgagagatgtagagaataagcctgctctaactcatgagggcgtcatggaggacgaaatgagaacaaaacgacaagaacaaagagaaaatgctttgcaaaggaacgagctttacaaacaaataattatttttccttcaaggtcctccccagtaaagctgagctaatcagaggaggtttgtctaagtactgaggtgcctttcccactgcaagcctaacaagactgactctgaggcatctagctccccgactgtgcaaatcatccccactgaaacatcccagtccctatcgtcaggacgttcagtggacggcagctcttttccacactctttccatcgccctactacccaagtccagcgggcttgctgctgacagagggaaataccaccatcctaccctgcccgtcacaacaggcctctcagcccagaggccgtgggagaagtcgccttctccatcacttcccatgttccagatgctggctcagacactttctcctgcctctgtccaggagccagggatctgagaggtgatccattccatagagttacaacaaaaacagtaactgtaacaaaatcaaaaacctttacagaagctaggcgttttccacttccatcttacatccatcgttcctgcagcaatttctgtctttctagttcaaattagagttagggatggaagtgtttccacccaaaccatcaattacattaacacccctgttttcagctttgtgagtacataaggcagagcagctgcactgggatttgagagttcctagcccagccttttgctgcctaaaattatctcgcacacacccaaaactgttctatttccagaaatggttcaactaatttctttgcatctcaggtcttccagagcccttttaaaatgcaagtatctctggaggaaataaccatattccactggccccagcccagttctcacacagcacctgcccaataaatatttacagaattaaactggttaccagatgcctatcctcacaggaggtgggtcagagcccaaggctatggagggtgggggctgcaggggcagccctggcagggagcctcgcctggtttcaccaacctcaatgctcgcctgaggcagctctgcctgccacagcgagataactgagttctcatgaaagtaaatctgaaatacccaaatatggaaacttagcagaaggaggccgaatgagcagagaaagtcggccagccagagtggcccagtgggacccgcagcaagagcgtggccccgaaaattctcagaaccaccaagaccctgcagaacaggaacaaagtggagaccatctggtacggagaactcagaatctgcgaattctctgggtgcctctgggcaactccttccacctctcggagctttggtttgcgtcaaggttccttagagctcgccttctgggggaggggggtagctgctttctaaaggaagacgcgcaaacgaacagctggtagaggcttccattccttgcaatcctgaagtttcattctggagttgctttgattggaaagccctgcaaaggtggagagggtgccttcgggtgcggaagggggccagggcctggtttgcagtgcggatgtgcgggacgtgcctgaaagtcctccccgccagtgcaccccgacggaacctggcccctccggtccacagccgccctctggaccagctccccagctttggacccccagtctccgccctcgccacacctctccccggctaagaaacccgctccgcaccgctcccgctgtccccgggccgtcggcggtcacctgccccgccggtctcccgcaagcccgggcccctccgcctcccccggcccagccgccgcctcgcgccctccccgccggtcggggaccggccggacgccagcaggcgctttcggtttcaaagtaactgggacgagatgaaaagcgctcgtcggtgtccccaccccggcccttccgtcgcgagggtgcccagggcggcgacccgccggactcacgtggggctcggcgcgcgggctccgcgaggccggtctgcaggcgcggctgctgctcctggctgcggccggcggcggcggcgaagcggaggcgaggcctggggcggggccggggcgcgggcggaggggcgcgggcgggcgcaggggaagagcggacgcgcaggaaggggtcgggaggaggctgagaccgtcatccaggcggttggaaagctaacctacccgcttcagaaccgttagtatctacaagtccagtcatctgatttccctcacgtgcgtctgaattgtggccgtcttgctcttccgtcaggcacaacaaggctcagcccgtcctctcctgtgttgacccatttgctcaaggccttgcttgagatctggctcaaatcagtccttcctggactttccttcagggtagcacaaatttgccagccctcctcttgctgttggcctaacaccagcaatctctgagagttgtagagctccccggttggcttcccaaacatctcctgtggtcctcaaaacaagctggtgaagtaggcctggtcatccccattttacagatgagctgtctgagggccagagcagcaacgtggagtgacgtacccaaggttagacacgctcagcaagctctgcagctggaacttgaatccaggtctgctgtctgcctgtctctctccctctctctctctctatacgtattttttattttattttattttttgagacggagtctcgctctcacgccaggctggagtgcggtgacgcgatctcggctcactgcaaccctggcctcccaggttcaagcaattctcctgcctcagcctcccgagtagctgggattacaagcatgtgccaccacgccgggctaatttttgtacttttagtagagacggggtttcaccatgttggtcaggctggtctcatctcttgaccttgtgatccgcctgccttgccctcccaacaggcgtgagccaccgcgcttggcctgcgcactcttagatacgggctctttcttacaatatattctctccaagggcaatacattctatataaatgaaatggaccaaaattccaattctatctagatcctttactttcagttaggccaccgt

SEQ ID NO: 516 - DNA, 6000 bp, Homo sapiens
ataaagggcaggagggcagtgatttaggagagactagtcagcaaatgtgatgatgtgattacagtttagatcatcaaactaacataatatgctttcccaggctgtatatggcctcatataccacatgcccagatgatttgggcctgccgacttattccaggtagagtacagataagcttgggagggccagggaggcttcagagaggcactgatgggatctgataaaggacacaggtctgtgggtgccacctggaaggtgtgtttccatcgggcattgctctggagctgggaatgggaaggagagaggggagaaagaggttgatggggcattgccgggctgaggatggagaatgggccagagctccagggggtggggaatttgggcccatgtgctgcatttttgtttcctcatcagtgtctgcctatggtaggttcccagcaaagaaatgatttacaaaaagtgactgaatcaataaatgtttagcgcgagatagtccagtgtaaccatgaattcaaaattgggtgaaatgagaaggcaaatagcatgtcaggcagtcaggttatctcagagtgggggacattgatggagagactcaggggcaagtgcttattaataatagcccttatgacacctctgtgtactaccactataagttcttcatgcatagaggggtcagcaaacttcttctgtaaagaaccaggtagtaactgtgtatttgaggccttgtgggccatatggtctgtggggcaactgctcagctcctctgtggtagcacataaacaaccatagacaatatgtaaatgaatgaacatggctgtgttctaataaaactttatttacaaaacatgtgatgggccaacccctgatgtatatagtattgacgtatttaatcttaagaagttctatgtggtaactactgttattatcaccattttattttgttttttgatatatttttcttttttttgaattgtgataagtcctacttttttatttttatgggtgtgtattaggtgtatattggctacatgagatattttgatatgggcatacaatgcataataatcacatcagggtaaatggggtatccattatctcaagcatgtatcatttctttgtgttacaatcatcccaattcttttagttatttttaaatgtacaataaattattgttgactatagtcaccctgttatcaaatactagattgtattctatacgattattctgactatatttttgtactcattaatcatccccacttcctctacccaacacttcccccaccccacaactacccttcccagcctctagtaaccatccttctactctctgtctccataagttcaattgttttaatttttagctcccacaaacaagaacatgtgaagcttgtctttctgtgcctggcttatttcacttaacataatgtcctctagttccatctatgttgttgcaagtgataggatcttgttcttttctatgactgaatattgtgtataggtaccacatgttctgtatccattcatctgttgatagatgcttaggttgcttccagatcttggttcttcagtgttgcagtaaacatgagagggcagatgtgtcttcaatattctgatttcctttcttttgaatatatacctagcagtgggattgctggatcatatgtagttctgtgtttagttttctgaggaacctccataccgttcttcatagtggctgtactaatttacattcctaccaacagtgtatgagggttccctttactccatgtcctgtccagcatttcattatcatcgttttacagatgaggaaacggagaaacatagcgactaagtaatttgcctgaggtcacgtggctatgaaggggtatgggcaggatatgaatccaggcaagtctactccagagttcatgctggtaattgtcatgccatgctgactcttggaaccttggaggggcagggaggaaccccagctcttcatcccctgagggcctccaccactacctggcagtaggagctcactaggcctccatttcctcattttaaaaaaaggggaataatgataatatatatatcatatcatatatcaccctgtctcctacgctggagtgcagttgtgccatcatagctcactgtagccttgacctcctgggctcaagcaatcctcccacctcagcctccggaatggctgggattacaggtttgagccaccacacctggctgaggggttaaaatgagctaatgcatataattagctgtctctgtgcttggacatagcctcagtacttgtaatcctaacccatatctgactccagccttaggctccattcacttcttttaatacccttctcttgccctctgcctcaatcggaactctcctagattgtcttcacggccctttctcactgtggcctcacagtgactcggagtttccacactgattattgagtcatctgagttattgggtactctggcctggggactaatgggagctcgaggaactgtccctaggtagcagtggggactgttacagagctggagccaaggatgggggcttcctagtggagaacaaggcttcctagtggagaaagctgctgtgtgggaagatcagtagagctttctttgttattttttcctcttggtctggtttctgagagcaaatctaaaggtctcctggataccttaaaagtaccacctggagtcaggtagactctacatggttctgaggagaagagttccactaaaggcatctctgtaagtgggactgacttgaggcagcagcagctttcgtcaggccagcatgggtgtgcagcctggagggttgggggaagagggatgcccttcagcctttgcactcccatctactcactgtcagtgcttgctgtaccgccaggagaatggggaaccagaggtttcctgacaacttggagagaagtcacagttctctttaaagtaattaaaattatactcacatcattgtttgtcctgttcccaagacaacttccttctgtgaagacataaggaaaagcaaagaaaacatacccttatctctgcctctaagacatcaaagccagtcatcctggggcaagaacagtgcgtcggtggactgtggtcacatgttgtctggttgtcgtggtgtcacctggtctctgcatgagctcccagccacattaggtgtaatggaaaatggccttattggttctccctttctccaaggccttcgtctttgacctgcctggttaaaggggtttcttcttcagtttttgagggaaggcctctttaggccatcacagacagaagctttggaaaaactgtgagaccatttcagttctcctttgtgccaggaggatagcctaacagataaagtgctttctcctccttcgttttcctttccttttttaagttaaggtctttctctgtcgcccagggtggagtgcagtggcgtgaacaatgaacacggctcactgcagcctcgacctcccaggcccaagcgatcctcctgccacagccccccaagtcgctgggactacaggcgtgcaccaccacaccctgctaattttatttatttatttatttagagacataattttgctcttgttgcccagtctggagtgcaatggtacaatctcggctcaccgcagcctcctgggttcaaacgattctcctgccttagcctcccaagtagctgggattacaggcatgcgccaccatgcccagctaatttgtattcttagtagagacaggatttctccatgttggtcaggctggtcttgaactcccgacctcaggtgatctacccacctcggcctcccagagtgctgggattacaagcatgagccactgcacctggccaactaatttttgtattttttgtagagatggggttttgccatgttgcccaggctggtctcatactcctgagctcaagcaatcttcctgcctcggcctctcaaagtgttgggattacaggcttgagccactgtgccagccctgcgctccccccccctcctttttttttgcttcctggtagtaactgttcttcctggaagagcagaatcacaggattcaacgccagccatgaccttgagagagaactgccgatcctagcaggagagcatctggaacccaccgagggcatggattccagagacccgttgggtcactgcatcttgggattgaacattttaacttttctttatcaccagccacagtctctcctctttaagcccaggacccattggtgggccttgggtgggtttggggaataacatatttgtatccttcccatgctgctcaagtgggtattaggcagttgaccaacactgccagcaagacctgagcagagctgagaaatggacagtttgccttctggcagcctgtccacagagagaggggccatctggtgtcattagagccatggaggagcaccagtcactgttgagatgctgcccagcacccagggatcggggagagatcccctggcttgcccctcttcccactcttcccatcccagtgcctctcattggctgaacctaaccagaagccagggagcctggaaaacagtttgcggcatcaaatttcaccctacctcatgctgcagagctaagcagagcaagagtagggggtggatctgggcaaacaggcaaatgactggcatgttcccttaattccacttcagctacagttaattgctaaccattctagaacttttgtgatagcaggaaattctttaacctccttcatctagaaaatgcctcctctttcttcaagaccagctgagatgatttcttctctgtgaaatcagcacagacacctcagaaattgttagctacccctcacctaggctgtaccagttctttgtcgaaatctctgtttgtggtacttgccagtgggatattgtaattgatcatttttgtgccttatttcttctgtccttggagggactcaagggcagatgcaacgtcacagcctctgcattctcaggacctaacccaggatcagtgcagggatgtgcagatgagtgggctgtggggtgtcctgctcacggtttcatggatggtgagtggcagagcagagacagaggtctctggtcctgtgcccttttcactctgggattttatctgtagtaatcagtaattccccaagaatcagaacttgaaaaccctgaagacaaattttgtggacttatgtcttatgcactataacataatatatttaaaaattccccagtttttcaaatcttcattaatccaaactggatgttggcaggggtatggaggtggtatggatagacagagcaggatctacctttctttgttaaaccttaaactctgcaaaatacatatcttttttgttataactgaaggctaagctcacgttgcttcagaatgtgagaatatttgtcatatgttctccagaaatgaatccgtagagatacgtaagtaaagaatgtaaatggtggcatccacagctttcctttggaattcctaaaaaattctcatggaaaagatgcatcaatttatgaaacaagaagatggcatttcaaagaaactcaacaagagttcttagggaatagatgggatgtgactttcttttgtctcttttggcttgagttaacaactcttcagtaggagtaccacactgtacatcccattgatggcaagaatacgaatgccattgactgcagaaaggtgatatataagctctatttttagcagttttgatatgttttttttttcctgacttgcaagaactgagctgctttgttgttcctgttacgtaagctgttatacacagaggggaaagattttaataaaatggagtgcttactcatttccactaaatagctgcctgggaatgacagaataccagctgaaagtatctaattaattagataaatatatttgttaggtaaagaagcatagcctttctagttctgctgttgggctctctcatgtcagtgaacaaagtgggtccaggcttgaggaagcttcagaagg

SEQ ID NO: 517 - DNA, 6000 bp, Homo sapiens
acccaggaggtggaggttgcagtgaacggagattgcgccacttcactccagcttgggtgacagagagagaccctgactcaaaaataaaattaaaaaaaataaaatagaatgtgaagaaccctggaatgaacactgtccatgtaatcattctctaatattaaataatattaaatagtatatatagttatatattacatataatatattaaatactataatatattgtttataataaatacattattgacatgtaaataaatgtttatttttaataataaataacagaatatttaaaataacttttaaaataaaattagagaatatttaaaataaaatttaaataacttattatttgtgttacctaggctggagcgcagtggcacaatcatagctcactgcagcctcaaacttctggactcaactgatcctcccacctcagcctcctgtgtagttgggaccataggtgtacaccgcaacacttggctaattaaaaaaaaaaaattgtggagacaaggtattggggtctcactgtgttgcccaggctggacttgagtcctggccttaagtgatcctcccatctcagcctcccaaatttctgggattacaagcatgagccaccacacgtggccaataaagtattattaatggttaaaaatatttcctgactttaccagtctgaccattcctagcttctcttgggcttgcacacctatatttcctctgcctccttttctttatcatttctggaatagcttactgtcccttcttttcatcttcttaatcctttccctttcttccttgagttaggatatgcccttctctccttttttccttttcctgtgtccttttaccatctgctatgcagagacccatacctgatgctggaggttgggatgaagagtccacaaaagaaataaaaatgtccttgaagaactggtaaattaaggaaaatatccaagaactaacctgagaatatgagcacattattagatcatctaaaacaaacttggtgtacttccctcttcacctatcttcccctgtcctctgaatttcccccagccaagactggctttcccatctctggtacaagcagccctccccatgccctctcctcagcagagacagtgggcagcatcccctgagagcctaccctctgccttgccctgtgcaagcctttctgcccagctgcccaccctgttctctctccctccctaggccttccagctgacttctttcctaccaccctggtcagcaggtcccactggcctgttgttatctgttgcaggatcaccttcagcagtgcttatttcaacctgtgcagtgttctaatgagaagtgccgggagccagtcctacggaaagacctgaaagagcatttgagtgcatcctgtcagtttcgaaaggaaaaatgcctttattgcaaaaaggatgtggtagtcatcaatctacaggtgaaaaacaacacatacaacagtcatctttatggagctaaattatgcctgagtggtcacagtgaatcaggtggaatgccagaagaacattcctgcatttatttttgtacagaattaggtctaaagaatttgctttttggagagaagttctgtgaaaagcttaaaaccttcttgttggtagcactccatttattattggcaaaaatattatttgaacacatgctgtgtatgtgtaatgaatgctgggtgctgagtcacaaggaggtgacaataatgtctactctctgaattctgcagtgtagctggggaggcaggatgcaggcataaaaagaaagcatgggtaccttttacatgtcccgaaggagctatgctggcagttccccaatctaccttctttgaatcctgtgttctatgactttcttttggaataattggaaaatttaatattttaattaagttcatttacacctagaaagtggacatctttaatccttttttggaattaggcaataacttcctgtagagagtaagccacgtgacatataatccccaaagagacacaggtgtaatcactgtgaggccatgaaagacaaccctttgttttattgcactttctctatttcagaatcatgaggaaaacttgtgtcctgaatacccagtattttgtcccaacaattgtgcgaagattattctaaaaactgaggtaactgcaaataatcctctctgtagattttatggaagataacgttttagtaatcattgtggtctgtgtttgatacagtcccaaagataagggcccagggcttaaattacacgcatgaccatgacgtatctgtcttcccttctctttttcctgcgaactctcttcaactttcatcatagctctttcttgccaggcctctctccttctcctggtccttgccttcttcccaagccactcttggctccctgattgctgcagttggagaataagtgatgaatttctatagcttgtgactatccatttcgtaggtagatgaacacctggctgtatgtcctgaagctgagcaagactgtccttttaagcactatggctgtgctgtaacggtatggaatgactttttgtttctgcctatacattctactgtataattcacttggcaagttcagtttactctctgttccatcgaggatggagaaagacatacagttctgagaaatttaaggctaattattttagagttctccagagaaacagaaccaatgggatatatacatatatagagagatttattttaagaagttggctcttgcagttgtgggggctagcaagtccaaaatctgcagggcagctcagcaatctggaaactctggctggagtttctatgctgcagtcttgaggagaagcatttttttcttcaggaaaccttagtgtttgctctgaaggccttcaaatgattggatgaggcccaccacactatggagggtaatctgcttacttcaagtctaccaattgttttcatcacatctgcaaaataccttcacagcaacatatagacttgttttgagcaaacaattgggcaccatagcctagccaggttgacacataaaattaaccatcacaataattattcgggttttttttttttttttttttttttgagacagagtcttgctctgtcacaggctggagtgcagtggcatgatctcggctcaatgcaacctctgcatcctgggttcaagcaattctcctgcctcggcctcctgagtagctgggatttcaggcacccgccatcatgcctggctaatttttgtatttttagtagagacagggtttcaccatgttggccaggctggtcttgaacttcagacctcaggcgatgcgcctgcctcggcctcccaaagtgctgggattacagcaccgtgcctggcccacagtaattatttctaattttgattccattgcctccacctggtttgggaaccttctggggttactcctctcatgattacaaatcctggttttatggtgatatactcttgtatatcaccaagtatactgaaacaaaatggacttaaaatcgtgttttaatatgtatgttattaccttttaaatactttaaaataataatgaattacacaaaataaaaataaaatttgatttctacttcagtctttttaatagattccaggtggagcaaagttttaggcattaaaatatgtcatgctctgtattattctgtattttctgtaaatctaaaattattccaaaataagaagttaacttcagaaatcatgaaaatactagaaggaaaaatgagtgaatttttttattcttaaagaggctggtgcgatggcttatgcctgtaatcccagcattttgggaggctgaggtgggtggatcatttgaagtcaggagttcgagagcagcctggccaacatggtgaaaccccgcctctactaaaaatacaaaagttagctgggtgtggtggtgcacgcctgtaatcccagctacttgggaggctgaggtatgagaatcccttgaacccgggaggccaaggttgcagtgagccaaggtcgcgccactgcactccagcctgggcaatagagtgagactgtctcaaaataaacaaacgaaaaaacccccccaacaacaacaaaagccctttcttaaatgactaacacaaaaccagaagccataattttgataaatttgtaaatatttaaaacttctgtatgattttaaaaaataccataaagtcaaatagcaaacagtgaactggagggaaaagtttgcaacatatgatcagacaaaaaaaaggggggggctattttccttaatatacaaagaaaccttacatgttaataacctactcaacttaatggaaaaataggcaaagaaatatagtatatgggcagttccagaaaaaaattcatttggctgataaatgtaagaaaagatgctcagtttcactcctaaataaatatacattataacaagaaatatactttaatatcatcaaattgacaaagattaaaacatcttatgatatctcactttttttagggcaatttggttatctctatgaaaataaaaaatgaatccacacattgaccctgcatttctgctaggatttatgttacagatatcctttcttaagttatacagtgatttcacatacacaaagacacacaaagatgtttattctactattgtttgtatagcaaaaaaaccccacaacccaaagctaaaaacaacctgtaagtctatcattaaaacaccaactatataattatgtattcatattttagaatactatgtagctgataaaaatgagatatatgtaaaaaattaaatatagtatgttctcatttgtgttaaaaatgtgtatatccttactgacactctggtaaaactaggaaagtgggtgtggagatggacagaagaggccttttactttttattcttcatcttatgttgtttgacataagcacatatttcttttattttaaaaaccatttgaaaaaatgtatattctgagaaggatttaaaaaaaaatcagcgaagagtctataaatttgtcacatatcaaaccagaggttgtcttggctgcaaaaagaatagggtttacctttcttgtgcatgagcacaattgtccagcttgggcaacatattgaaaccctgtctctaccaaaaaatacaaaaatcagccaggtgtggtggcgcaccctgtagtcccagctccttgggaggctgaggtgggagaatcccttgagccagggaggcagagattgcagtgagccaaggtcatgccattgtactccagcctgggcaacagagtgagaccctgtctcaaaaaaaaaaaaaaaaaaaaaagcagaattgctttctagctctaaaaatgatctttacagtcaggcccaaatctccagttggtttgtattctagaacttgcctcagcaccagagcttgggatggctgggggagttattctccggaaccttatttaggacagcctgtcaccaaagaagccaaccctaacccgaatgaaaattgatgataaatatttagttaaactgcatggatcaccttgaacacctaacaaacatttgcttttactgtaatataggcagtctacaaaaaaaaatattttaatgattagggaaaaagcaaccatttcttcttgcaaatgtagtctatggttttgagggcaacaaatttgtatgggctgaaattaaaatcaggtggcattcctcctgcccatggcagccagtccgtgattggaggcagcatggaaatgtgcttgacaggaggaagaactagcgttgacttaaaactgatttgaagaggccaggcgctgtggctcatgcctgtaatcccagcactttgggaggccaaggcaggtagatcatgaggtcaggagttcgagaccagcctgagcaatatggtgaaacccccgtctctactaaaaatacaaaaattagccaggcatggtggcatgtgcctgtaatcccagctactcgggaggctgaggcaggagaatcacttgaacccaggaggtggaggttgc

SEQ ID NO: 518 - DNA, 6000 bp, Homo sapiens
gagtatcttttcaagattcataatctgcatttttttaatatagggtctcactctgtcacccaggctggagtgcagtggcacagtcctagctcactgcagcctcaatttcctgggctcaagcgatcctcccacctcagcgtcctgagtagctggtactacaggcatgcaccaccacatccgtctattttttaattttttgtggagatggggtctcactatgttgcccaggctgctcttggcctcctggcttcaagtgatcctcctgcctcaaacctcccaaagcgttgggattacaggtgtgagccactgaaactggcctgacctacaatttgaatactactgtacagtttacattttgctgtcaggtattattttatttattttttcctctctacaataatgtattatagatcaggtcttgttttatttgagcctcacaggaaagctgaggtgagggtcgcaggcaaggagtcggaccacaggagtggtcgcagcattcagcggagagtgaagcagcgaaggctggaaacctcatctgcttctcgtgaacttcccactgccccaagtgactgatgtccttacacaattgcagccagttcgccagctgcatgagtgacagtggcataattgacgattgccaaaaacggaaacagcccaactgtcctttgcctagggaatagaaaaccaaattgtggcctatccaacccatgaaatacttaactgcagtaaaaaggaataagctactgatctgaatctcacaggcatcatatgaagtgagcggactcgctcaccaaaggctgcacactgtttatgtgatgctctggaaaaggtaatgctttagcaggtggaagaagtggggctgcgggtggggacagaggctgactatgtggcagcacagtgggtggggacagaggctgcacagggagcatgtgcagctgatgcaggtgctctgtgtgggctgtggtggtgggtagctatatgcttgtgagcactcacaggcctgtgcatgaaaaaggtgcgaatatttattttattgtacatatttcaggtgtataacatggcagtttgatatacatagtgaaatgattgctgcagtcaagcaaattaacatgagttaacatagccaccatctcacataataatctttcttgtgggtggtaaaaacatctaaaatctctcttagcaaatttcaggtttataatatttttaactatcgttcccacactgtttgttagatctctcggcttatttatcctacataaccgaaatttcgtaccctttgaccgtcattttatttcctctaccccggtaactctctgtttctatatattcaactatttttttttgagacaggatctcggtctgtcactcaggctggagtgcagtggtgtgatctcggctcactgcagcctcgacctcccagactcaagcaatcctcccacctcagcctcccagcctctcaagtagctggggtgacatgtgcacaccactgcacctggcttccttccctccctccctcctttcttttctttttttcatttttttggtagaggtgaagcctcactatcttgcccaggctggtctcaagctcttgggctcaagtgatccactcacctcagcctcccaaagtgctgggattacaggtgtgaggcaccactcctggcctaactttttttttttttttttttaaggttccacatatgagtgagatcatgtagtgtttgtctttctgtgcctggcttattatgctttgtgtaaagtccaccgggttcatctatgttgtggcaaatagcagagtctcaatttttaatactaactaagattgtattgtgtatatatgccccaaactctttatttattcatctgtcaatagacacttgggttgtttgcctatctggaccatggtgaataatgctgctatgaacatgagtgcacagatgtctttgtgaggtggtgattttatttcctttggatacacactcagaagaaggattgctgggtcatacggtagttctatttttaatttctttaggaacctccatattgttttctgcaatggctgcaccaatctgcattcccagcagcaatgtgcaagggttccctgttcttcacgccctagccaatgtttgtctcttgtcattttgctaatagccatcctaacaggtttgaggtggtacctcattgtgggtttggtttgcatttccctgatgattagtgatgttgagcacttttttgtatacatgttgaccatttttgtttcttttttagagaaatgtctattcagttcctttcttcattttaaaaatcagattatttgttttatgctttgagttgtgtgaattccttacatattttgcatattaactacttatctgatatatggcttaaaactattttcttccaatttgttggctaccttttcactctgttgattgtttcttttgctatacaggagctttttactttgatgtattcccacttatttatctttacttttgttcctttgcttttgttgagacattaaaaatatccatgccaaggctaatatcaagaagttttctcctctgttttctattttttatatttagttttttatctgtttagagattgggtctcattctgttacccaggctggaatgcagtagtgtcattatagctcactgtaacctcaaattcctgggctcaagtgatcttcttgcctcggcctcctgagtagctgggctacaggtgcacagcaccatgcctggctaatttttttttttttaattttgtagacacaaagtctcactatgttgcccaggctgactgtgaacttctggcctcaggtgatcctcctgcctcagcctcccagagtgctgggattacaggcatgagccaccatgcctggcttcttctctattttcttctaggagttttacagttttagatcttatgtttagatctttaatccattttgagttggtttttgtgtgtgccaagttttattcttttgcgtgtggaaatccagtttcaccaaaagcttaatttttcaaaatcttatatttttcttgatttttttttcacacttctatagccaacatctttattgaagagattgtcctttctccattgtgtcttcttggtgaccttgtcaaagaattagttgactgcatatacttgagtttatttctgttccactggtctatgggtctgtttttataaaggcatggatttttactgcatatgaattatacctaaatttgtcttttttttttcctttttctggagaatggggtctcactatattgcccaggcaggtctcgaactcctgggctcaagctatcctcccgcctcttgcctccctgagagctgggattacaggcgtgagccactgcgcccggctgaattatacctaaattaacttgactaaacaaacaaaaacaaaaagatcccaggttcagccaatgagctcctttttttttttttgaaatggagtcttgctcttgtcacccaggctggagtgcagtggcacaatctcagctcactgcagcctccacctcccaggttcaagtgattctcttgcctcagcttcctgagtagctgggattacaggtgcccgccaccacacccagctatttttttttatatttttagtagagatggggtttcgtcatgttggccaggctggtctcaaactcctgaccttgtgatctgcctgccttggcctctcaaagtgctgggattacaggcatgagccactgcacccaggctgagctcctttcttttggagcatatttggtctgctttctctctagcttcagcacctgaagtttttgctgctcctgcctcagctccagccccgaatgacacctttcacctggttcatggagactcaggtctgctgtcatgcccctaagcaggactagatgcctctctcatgttgtagagcattctctctgcagttctgtagaaaggtggtagtcatcggaaccaactgcttattctagcttctctgtgccaggctctgttttaaaggcctcacgtttagccattcactcagtgttttctgacagccttctaggataggtaccgttatttgggttgatgtagtgcttggtcaaatgcagtataatgaagggatcaaggagggggcaattccaagcaaaaccacttgttcatccatcctgagtctaggagatttggaagatctaaagaagtagcaggcaattattgtcacccttttacaggtatgaggcacagacagacccagtcatttgctgacatccctccactgaactgggtgctcgtccttttcactcacccagaggctgagcgagtgcctctcacccaccaagctctgttgaacttgtgcctttgccggtctgtggtcctgcggccgtctcatgagctgcagagtaggtctgtgtgtgtctctcctcaagctactcaagctgaggctttgtgtgcatgcctgccacataccagccattccgtgagtgttagtggaacaggtgagtcaatgagtcagggagtaaaatttgtgctttaaaagtagaacatgtcggagagaacctgtactgccttccagccatcttgctgtgagaggacagggcatggactctggagtttgaaggctgggtcaggtcatgctctggattctttactcactcgcatggcatgtccttagtttcacttccctcactctcagtggagccgttgcagcgggcagtgtcagaggcaacatccatttagcactgccgatttgacccccagccccatctcatactggcctcccaccctgcttctgtggggtgcctcagaggagagcaaggtgaaccccagtatggaaccgagacacggttttgacaacactgttgatcccatttggaaaatccagctatgtgattaaccattagtctctctgcctctgctctgatgtaagtggagaccacatccttcctgccccttctggggctgcgactgctataaattcattgcatttcctctctagctgttcctgaggctggcatctgggtaagtccagctccgcggggcagtgtgggcgacaggaccgggagagcagtgggggagattgtgttcagagggcagaacttgtcctggttaatgcactaggaatttcttctggcgtctccaaggttgtgcttcaacaacatttctggaatgttcttttatcattatttgggctctacgtgtgcaagttcgtgtgtgtgtatgtggcggggggaagcggggaggacagcggcagcaaccatagtttacacccacgacttcagcagatttgcccagtatccctcccaggggagaagatggatgggatatacagaaggaaacaaacctccttaaagaccaaagggcagcagatttttgtgctggtgttagggtggaaggagcacagaagaaaggcagaatcctgatgcagatggaaggactgatggggcaggagctgggagggtatgcggagctaatagggctgtctggagagcagtcacctcaggatgggcaggagctgggagggtatgcggagctaatagggctgtctggagagcagtcacctcaggatgcacagggctgggtttgcagggctcaggaggcgaggagtagataggcaggaatggagatgggacgggagagatgagtgagtctgaggcatcttgacattgaactgcagtcacagaaattccaatttggagagctccaccgttttccaggctctctgcctcccttgagtgttatttatggctttaggttgaggtgctttgccaaatagagtataatcaagggatcaaggagggaacaattccaaacaaagccaacttgttcatccatccggactctaggagatatggaagatctaaagatacagcaggtgattgctagtttttgtggaactcacagtctagttgggaagactatgttggtgaatgctgcagtgatacacctgtgataaatgctggggaagtgtgtcttttagtcatctattttgttgtctttgtctttgtc

SEQ ID NO: 519 - DNA, 6000 bp, Homo sapiens
tggtgattttatttcctttggatacacactcagaagaaggattgctgggtcatacggtagttctatttttaatttctttaggaacctccatattgttttctgcaatggctgcaccaatctgcattcccagcagcaatgtgcaagggttccctgttcttcacgccctagccaatgtttgtctcttgtcattttgctaatagccatcctaacaggtttgaggtggtacctcattgtgggtttggtttgcatttccctgatgattagtgatgttgagcacttttttgtatacatgttgaccatttttgtttcttttttagagaaatgtctattcagttcctttcttcattttaaaaatcagattatttgttttatgctttgagttgtgtgaattccttacatattttgcatattaactacttatctgatatatggcttaaaactattttcttccaatttgttggctaccttttcactctgttgattgtttcttttgctatacaggagctttttactttgatgtattcccacttatttatctttacttttgttcctttgcttttgttgagacattaaaaatatccatgccaaggctaatatcaagaagttttctcctctgttttctattttttatatttagttttttatctgtttagagattgggtctcattctgttacccaggctggaatgcagtagtgtcattatagctcactgtaacctcaaattcctgggctcaagtgatcttcttgcctcggcctcctgagtagctgggctacaggtgcacagcaccatgcctggctaatttttttttttttaattttgtagacacaaagtctcactatgttgcccaggctgactgtgaacttctggcctcaggtgatcctcctgcctcagcctcccagagtgctgggattacaggcatgagccaccatgcctggcttcttctctattttcttctaggagttttacagttttagatcttatgtttagatctttaatccattttgagttggtttttgtgtgtgccaagttttattcttttgcgtgtggaaatccagtttcaccaaaagcttaatttttcaaaatcttatatttttcttgatttttttttcacacttctatagccaacatctttattgaagagattgtcctttctccattgtgtcttcttggtgaccttgtcaaagaattagttgactgcatatacttgagtttatttctgttccactggtctatgggtctgtttttataaaggcatggatttttactgcatatgaattatacctaaatttgtcttttttttttcctttttctggagaatggggtctcactatattgcccaggcaggtctcgaactcctgggctcaagctatcctcccgcctcttgcctccctgagagctgggattacaggcgtgagccactgcgcccggctgaattatacctaaattaacttgactaaacaaacaaaaacaaaaagatcccaggttcagccaatgagctcctttttttttttttgaaatggagtcttgctcttgtcacccaggctggagtgcagtggcacaatctcagctcactgcagcctccacctcccaggttcaagtgattctcttgcctcagcttcctgagtagctgggattacaggtgcccgccaccacacccagctatttttttttatatttttagtagagatggggtttcgtcatgttggccaggctggtctcaaactcctgaccttgtgatctgcctgccttggcctctcaaagtgctgggattacaggcatgagccactgcacccaggctgagctcctttcttttggagcatatttggtctgctttctctctagcttcagcacctgaagtttttgctgctcctgcctcagctccagccccgaatgacacctttcacctggttcatggagactcaggtctgctgtcatgcccctaagcaggactagatgcctctctcatgttgtagagcattctctctgcagttctgtagaaaggtggtagtcatcggaaccaactgcttattctagcttctctgtgccaggctctgttttaaaggcctcacgtttagccattcactcagtgttttctgacagccttctaggataggtaccgttatttgggttgatgtagtgcttggtcaaatgcagtataatgaagggatcaaggagggggcaattccaagcaaaaccacttgttcatccatcctgagtctaggagatttggaagatctaaagaagtagcaggcaattattgtcacccttttacaggtatgaggcacagacagacccagtcatttgctgacatccctccactgaactgggtgctcgtccttttcactcacccagaggctgagcgagtgcctctcacccaccaagctctgttgaacttgtgcctttgccggtctgtggtcctgcggccgtctcatgagctgcagagtaggtctgtgtgtgtctctcctcaagctactcaagctgaggctttgtgtgcatgcctgccacataccagccattccgtgagtgttagtggaacaggtgagtcaatgagtcagggagtaaaatttgtgctttaaaagtagaacatgtcggagagaacctgtactgccttccagccatcttgctgtgagaggacagggcatggactctggagtttgaaggctgggtcaggtcatgctctggattctttactcactcgcatggcatgtccttagtttcacttccctcactctcagtggagccgttgcagcgggcagtgtcagaggcaacatccatttagcactgccgatttgacccccagccccatctcatactggcctcccaccctgcttctgtggggtgcctcagaggagagcaaggtgaaccccagtatggaaccgagacacggttttgacaacactgttgatcccatttggaaaatccagctatgtgattaaccattagtctctctgcctctgctctgatgtaagtggagaccacatccttcctgccccttctggggctgcgactgctataaattcattgcatttcctctctagctgttcctgaggctggcatctgggtaagtccagctccgcggggcagtgtgggcgacaggaccgggagagcagtgggggagattgtgttcagagggcagaacttgtcctggttaatgcactaggaatttcttctggcgtctccaaggttgtgcttcaacaacatttctggaatgttcttttatcattatttgggctctacgtgtgcaagttcgtgtgtgtgtatgtggcggggggaagcggggaggacagcggcagcaaccatagtttacacccacgacttcagcagatttgcccagtatccctcccaggggagaagatggatgggatatacagaaggaaacaaacctccttaaagaccaaagggcagcagatttttgtgctggtgttagggtggaaggagcacagaagaaaggcagaatcctgatgcagatggaaggactgatggggcaggagctgggagggtatgcggagctaatagggctgtctggagagcagtcacctcaggatgggcaggagctgggagggtatgcggagctaatagggctgtctggagagcagtcacctcaggatgcacagggctgggtttgcagggctcaggaggcgaggagtagataggcaggaatggagatgggacgggagagatgagtgagtctgaggcatcttgacattgaactgcagtcacagaaattccaatttggagagctccaccgttttccaggctctctgcctcccttgagtgttatttatggctttaggttgaggtgctttgccaaatagagtataatcaagggatcaaggagggaacaattccaaacaaagccaacttgttcatccatccggactctaggagatatggaagatctaaagatacagcaggtgattgctagtttttgtggaactcacagtctagttgggaagactatgttggtgaatgctgcagtgatacacctgtgataaatgctggggaagtgtgtcttttagtcatctattttgttgtctttgtctttgtctgactgaaacaagtgatggaagacatggtctcatatctctggtcaaaatcctggctctgttccttcctggttctaaacccctcggcaggcttcctagtccccctaagactcagtttatgcatctataaaatggggctaggaataggtgcacctcatagagctctgtgcaggttagatggggaaaaacatcagtgagtgcctagcctgtggaaagctctaaattaatgtgaattataatgataacaattgcgaattttgcaaggagacattaaaggatgtatgtttttatttattttattttattctattttattttttgagatggagttttgctcttattgcccaggctggagtgcagtggtgtgatcttggctcatcgcaacctccgcctcctgggttcaagcgattctcctgcctcagcctcccgagtagctgggattacaggtgcctggtaccatgcccggttaatttttgtatttttagtagagacgggatttctccctgttgtttggtgagcctggtctccaactcctgacctcaggtgatccgcccacctcggcctcccaaagtgctgggattacagggatgtatgtttttattattctccattatgcactcccagcttcatctcacttcaatccactggttgatagaagtgcagtcaaagactgtcccctcctctgcaagcttttatgttctctctcctctctccctagccacgtcctgttctgttatcaacacacttactcacctcctggccttctccttctattgtctctcatccctcttccctcacaaaaacagaagcaaagagccagagccttcagtttggaggaactgaaaacattctcttctgctttctcattttgtagatgaggaaactgaagttgaggaatagtgaagagtttgtccaatgtcatagccccgtaatcaacgggacaaaaattttcttgctgatgggtcaagatggcatcgtgaagtggttgttcaccgtaaactgtaatacaatcctgtttatggatttgtttgcatatttttccctccatagggaaacctttcttccatggctcaggacacactcctggatcgagccaacaggagaactttctggtaagcatttggctaacttttttttttttgagatggagtcttgctgtgtcgcctaggctggagtgcagtggcgtgatcttggctcactgcagcctccacttcccgggttcaatcaattctcctacctcaacttcctgagtagctgggattacaggcgcccgccaccacacccggctcatttttgtacttttagtagagacacagttttgccatgttggccaggctggtcttgaattcctcagctcaggtgatctgcctgccttggcctctcaaagtgctgggattacaggcgtgagccactgtgcccggccttggctaacttttcaaaattaaagattttgacttgttacagtcatgtgacatttttttctttctgtttgctgagtttttgataatttatatctctcaaagtggagactttaaaaaagactcatccgtgtgccgtgttcactgcctggtatcttagtgtggaccgaagcctaaggaccctgaaaacagctgcagatgaagatggcaagcacccgctgcaagctggccaggtacctggaggacctggaggatgtggacttgaagaaatttaagatgcacttagaggactatcctccccagaagggctgcatccccctcccgaggggtcagacagagaaggcagaccatgtggatctagccacgctaatgatcgacttcaatggggaggagaaggcgtgggccatggccgtgtggatcttcgctgcgatcaacaggagagacctttatgagaaagcaaaaagagatgagccgaagtggggtgagtggaaggaagacttttaaaaaaaattgtggccaagtgcacatagtgtac

SEQ ID NO: 520 - DNA, 6000 bp, Homo sapiens
gttgttgttgttgtttgtttttttttttggtgagatggaatctcactctgtctcatgatcttgcgatcttggctcactgcagcctctgcttcctgtgttcagcgattgccttgcctcagcctcctgagtagctgggatcacagacctgtgccaccacacctggctaatttttagtagagacagggtttcacaatattggccaggctggtctcaaactgttgacctcctgcctcagcctcccaaagtgctgggattacaggtgtgagccaccactcccggtcatgttttaatgttattttattttatttttgagacggagtctcactctgtcacctaggctggagtgcagtggcgcaatctcggctcactgcaacctccacctcccaggtccaagtgattctcgttcctcagcctcccgagtagctgagattacagacgtgcaccaccatgcctggctaattatcgtatatttttagtagagatggggtttcaccattttggccaggctggtttcgaactcctgacgtcaagtgatctgcccacattggcctcccaaagtactagcattacaggcatgactgaccgcacccggatgttactttatttattttttttgagatggagtctcactctgtcgcccaggctggagtgcagtgcgtgatcttggctcactgcaagctctgcctcctgggtttccgccattcttctgcctcagcctcccgagtaactgggactacaggcgcccaccaccacgcctggctaatttttttgtatttttagtggagacggggtttcaccatgttagccaggatggtctcaatctcctgacctcatgatctgcccgcctcagcctcccaaagtgctgggattacaggcgtgagccactgcgcccagccgtattttatttttttgagttagggtcttgctgtgttgcccaggttggagtgcagtggctagaccgtggctcactgcagcctcgaccttcaggctcaaacagtcctcctgcctcagcctcccaagtagctcggactacaggcgcaaagcaggatgctggactaatttttaaaggttttggagagatgaggtctcactgtgtggcccaggctgatctcaaattcttggtctcaagccatccttccacctcagcttcctaaagtgctgggattataggtatgagccattgtacttggctaggacattttttcactacgtatccctgactactaataggtttgagcatattttaaatttttatattgtcaaatatttttatcatttaaaaaatggctcctgccttgctaaaaagttctttcttgatccaaagttataaatattctaaaatgtcatatttttatttttgtattttttcatttagatcttcaatccatctggaatttttaattttttatatttttgagatgaagttttgctcttgttgccctggctggagtgcaatggtgcaatctcggctcactgcaatctccgcctcccaggttcaagcaattctcctccctcagcctcccaagtagttgggattacaggaatgtgccaccacacctggctaatttattttttagtagagtcagtagtagtttgtccatgttggccaggctggtcttgaactcccgacttcaggtgatctgccccccctcagcctcccaaagtgctgggattacaggagtgagccaccgcgcctggctggaatttattttcgtatattgtgtgaagtagggatttccatttgtgtttttcagttttgacaataacattttattagtacaaaagagttgatactaactcccttactaattgtagtcacatgagactgatatcagagctattaggccaatttatttttttatttattcattttttatttattcttatttttattttttttgcgatggagtctcactctgtcgcccaggccagagtgcagtggcgcgatcccggctcactgcaagctccgcctcctgggttcacgccattctcctgcctcaacctcccgagtagctgggactacaggcgcccgccaccacacccggctaattttttgtatttttagtagacacggggtttcaccgtgttagccaggatggtcttgatctcctgacctcgtgatccacccgcctcgacctcccaaagtgctgggattacaggcgtcagccaccgtgcttggcaggccaatttattaacttaggagaatagaactactaagtcagccagaatattaatgttcttttttttttttttttttttttgagacagagtttcactcttgttgcccaggctggagtgcaatggcactgtctcaggtcactgcaacctccacctcctgagttcaagcgattctcccgtctcagcctcccgagtagctgggattacaggcgcatgccaccactctgggctaatttttgtatttttagtggagacggggttacatcatactggtcaggctggtctcgaactcctgacatcaggtgatccgcccgccttggcctcccaaagtgctgggatttataggcgtgagccacagcgcctagccttaatgttagttcttaaccagtggtagaccagaagtctaattgggattttttgtttttgtgtttgttgtaatacaatttctgtttctcatttatcctacctgaaaagcatactgcatctctgacctctcagcatactaacaataatattgatcacatagcatttcttgtagttcataaacttcacgtgtcaataatatactataaatataaatgaattaatgaacaacaggatgctcataagcttacagacatctttttctcaaaaaagctgggaattttgtttctgttttattgggatactgactctcaacatttcatatattgcattccaccaacgtagctgagagtcaatttatgaaatattttgtagtgtaagacagaaagtggggaggaccaagtatgtcaaccactaggagtgtggtgcctagtcaggaattgggaggagtgtagcaagaaaggaaggacaacaggatttggtcattgattggtcagatggatttcagagggattggtatgaaggaacgcttcaaagattttttttttaatttaagttccaggatacaggtgcagaatgtgtaggtttgttacatacttataggtgagccatggtggtttgctgcaccaatcaacccctcatctaggttttatttatatttttttttgagacggagtttcgctcttgctgcccaggctggtgtgcaatggtgcgatctcggctcaccgcaacctctgcctgctgggttcaagcgattctcctgcctcagccttctgagtagctgggattacaggcatgtgccaccacgcccggctaattttgtatttttagtagagacggggtttctccatgttggtcaggctggtctcgaacttccgacttcaggtgatctgtccgcctcggcctcccaaagtgctgggattacaggcagcagccaccgcgcccagccaggttttaagtcccgcatgcattagctatttgtcctaatgctctccctccccttgacccccacgcaaccaaagatggttttaaggcttctaggactggagatgattactttcagaaatgaatagtggtgaccagatgaaataagacttttggatgtagataggaccttagcgatatatttccagctttttattttttattttaaggatgaagaaacagctttaagttggttgcctaaagtcacgcaggtaattgatgcagtatggccagaacccatactaggcttaagggacagtgtaccataaactcgtagaggtcctttaaacagatagaaacgctgtgctccaggcagatgccataacaaacactggctctagatctaccatgggttatatgggtccttagttaagattagatatggagtcacagtgtgccagaatttcagggagagaggaaagtggaagggctttccactaagccttttgaactactaggtacccctcgttttacatctggttatctcatttaaatctatgacgttttaaaatacttattaccatttaagacatgagaaaaattaagtttagaaacggctagatagctcacgctagaaaggaaggactccaaattttaaccaagggcagatgtgcatggaggccaagtcatttccttcccatgctctcatactgacccaacaaacccattctgcacgtgagaaaactgaggcccggaggagggaattcacacacgtttgaagccaagctggggccagaaagtagatcggctgatctccaaacctccacgtcaaaggtcttcccaggaggacatatgccttcaaggattttacaatgtataccaccctacaagtgatgggagagaggggaaaaaagcaaccgactaaggagaaaagcaaggagcagaaaaaggagcaaaagaggagctgtcagaacggtgtgaggagagtgggaaaggagccgcctccttttgcctctcttcctacttattaacaaaacagaacgactatccaacgtatttcagggagctaagtcttagccagcttcagctgtgttttaacccttagctaaatatagacaaggctaaggcaggccaggtgtacacttcaggaagacgtggaaattcccagggcggaccaaaacttgagctgttccggcggtagtgatttgaggtcagtttgaaagagaagttgagaaagcggccgaggggcgaatttggctgcactacacgctcgccacaaagaggaagggccgccggccgccggggccgagtgcgcttccagcccaggcggagcggtagacgcaacagcctccgcccgccacgtgacccgtagtgttgtggtctggcccgcgtgggtggcgggagcgccgagagggcgggggcggcgatggggcgggtcacgtgatggggtttaaatctcccgcagccggagccgcgggggcgccagtgccgcgcgtcgagcgggagcagaggaggcgagggaggagggccagagaggcagttggaagatggcggacgaggcggccctcgcccttcagcccggcggctccccctcggcggcgggggccgacagggaggccgcgtcgtcccccgccggggagccgctccgcaagaggccgcggagagatggtcccggcctcgagcggagcccgggcgagcccggtggggcggccccagagcgtgaggtgccggcggcggccaggggctgcccgggtgcggcggcggcggcgctgtggcgggaggcggaggcagaggcggcggcggcaggcggggagcaagaggcccaggcgactgcggcggctggggaaggagacaatgggccgggcctgcagggcccatctcgggagccaccgctggccgacaacttgtacgacgaagacgacgacgacgagggcgaggaggaggaagaggcggcggcggcggcgattgggtaccgaggtgcgcagggtgcgggcggccggaactgcgcatctcctcctccctctccccgggctcctactggcctgaggttgagggcggctgggggctcggggcaggctccgcggcgttcccctccccaccccggccctccgttcagccgcgctcctccggggctgcggttcctactgcgcgagctgccagtggattcgctcttttcctccgtccgtggcccgcctgggcggccttgttctttccgcagcagccaggtcgggagactctcgcagtcgctttaaaataagtttctctccccctcttactcttttagcatattgcttttgttagagctttttttttctttttctttattttttattttcattgcttttctcctctaccccccagcacacttaagtctgcaactttttggctgtcccgttggtctgcgttttcaattgctttttgcaaacttgacacctgtgcagtttgctttttttggtctatatttttatgactgaaattacaatttttgaaagaggaaagctgtttctatagtcacagcttgcaaaatttaaagaa

SEQ ID NO: 521 - DNA, 6000 bp, Homo sapiens
tagtagagatggggtttcaccattttggccaggctggtttcgaactcctgacgtcaagtgatctgcccacattggcctcccaaagtactagcattacaggcatgactgaccgcacccggatgttactttatttattttttttgagatggagtctcactctgtcgcccaggctggagtgcagtgcgtgatcttggctcactgcaagctctgcctcctgggtttccgccattcttctgcctcagcctcccgagtaactgggactacaggcgcccaccaccacgcctggctaatttttttgtatttttagtggagacggggtttcaccatgttagccaggatggtctcaatctcctgacctcatgatctgcccgcctcagcctcccaaagtgctgggattacaggcgtgagccactgcgcccagccgtattttatttttttgagttagggtcttgctgtgttgcccaggttggagtgcagtggctagaccgtggctcactgcagcctcgaccttcaggctcaaacagtcctcctgcctcagcctcccaagtagctcggactacaggcgcaaagcaggatgctggactaatttttaaaggttttggagagatgaggtctcactgtgtggcccaggctgatctcaaattcttggtctcaagccatccttccacctcagcttcctaaagtgctgggattataggtatgagccattgtacttggctaggacattttttcactacgtatccctgactactaataggtttgagcatattttaaatttttatattgtcaaatatttttatcatttaaaaaatggctcctgccttgctaaaaagttctttcttgatccaaagttataaatattctaaaatgtcatatttttatttttgtattttttcatttagatcttcaatccatctggaatttttaattttttatatttttgagatgaagttttgctcttgttgccctggctggagtgcaatggtgcaatctcggctcactgcaatctccgcctcccaggttcaagcaattctcctccctcagcctcccaagtagttgggattacaggaatgtgccaccacacctggctaatttattttttagtagagtcagtagtagtttgtccatgttggccaggctggtcttgaactcccgacttcaggtgatctgccccccctcagcctcccaaagtgctgggattacaggagtgagccaccgcgcctggctggaatttattttcgtatattgtgtgaagtagggatttccatttgtgtttttcagttttgacaataacattttattagtacaaaagagttgatactaactcccttactaattgtagtcacatgagactgatatcagagctattaggccaatttatttttttatttattcattttttatttattcttatttttattttttttgcgatggagtctcactctgtcgcccaggccagagtgcagtggcgcgatcccggctcactgcaagctccgcctcctgggttcacgccattctcctgcctcaacctcccgagtagctgggactacaggcgcccgccaccacacccggctaattttttgtatttttagtagacacggggtttcaccgtgttagccaggatggtcttgatctcctgacctcgtgatccacccgcctcgacctcccaaagtgctgggattacaggcgtcagccaccgtgcttggcaggccaatttattaacttaggagaatagaactactaagtcagccagaatattaatgttcttttttttttttttttttttttgagacagagtttcactcttgttgcccaggctggagtgcaatggcactgtctcaggtcactgcaacctccacctcctgagttcaagcgattctcccgtctcagcctcccgagtagctgggattacaggcgcatgccaccactctgggctaatttttgtatttttagtggagacggggttacatcatactggtcaggctggtctcgaactcctgacatcaggtgatccgcccgccttggcctcccaaagtgctgggatttataggcgtgagccacagcgcctagccttaatgttagttcttaaccagtggtagaccagaagtctaattgggattttttgtttttgtgtttgttgtaatacaatttctgtttctcatttatcctacctgaaaagcatactgcatctctgacctctcagcatactaacaataatattgatcacatagcatttcttgtagttcataaacttcacgtgtcaataatatactataaatataaatgaattaatgaacaacaggatgctcataagcttacagacatctttttctcaaaaaagctgggaattttgtttctgttttattgggatactgactctcaacatttcatatattgcattccaccaacgtagctgagagtcaatttatgaaatattttgtagtgtaagacagaaagtggggaggaccaagtatgtcaaccactaggagtgtggtgcctagtcaggaattgggaggagtgtagcaagaaaggaaggacaacaggatttggtcattgattggtcagatggatttcagagggattggtatgaaggaacgcttcaaagattttttttttaatttaagttccaggatacaggtgcagaatgtgtaggtttgttacatacttataggtgagccatggtggtttgctgcaccaatcaacccctcatctaggttttatttatatttttttttgagacggagtttcgctcttgctgcccaggctggtgtgcaatggtgcgatctcggctcaccgcaacctctgcctgctgggttcaagcgattctcctgcctcagccttctgagtagctgggattacaggcatgtgccaccacgcccggctaattttgtatttttagtagagacggggtttctccatgttggtcaggctggtctcgaacttccgacttcaggtgatctgtccgcctcggcctcccaaagtgctgggattacaggcagcagccaccgcgcccagccaggttttaagtcccgcatgcattagctatttgtcctaatgctctccctccccttgacccccacgcaaccaaagatggttttaaggcttctaggactggagatgattactttcagaaatgaatagtggtgaccagatgaaataagacttttggatgtagataggaccttagcgatatatttccagctttttattttttattttaaggatgaagaaacagctttaagttggttgcctaaagtcacgcaggtaattgatgcagtatggccagaacccatactaggcttaagggacagtgtaccataaactcgtagaggtcctttaaacagatagaaacgctgtgctccaggcagatgccataacaaacactggctctagatctaccatgggttatatgggtccttagttaagattagatatggagtcacagtgtgccagaatttcagggagagaggaaagtggaagggctttccactaagccttttgaactactaggtacccctcgttttacatctggttatctcatttaaatctatgacgttttaaaatacttattaccatttaagacatgagaaaaattaagtttagaaacggctagatagctcacgctagaaaggaaggactccaaattttaaccaagggcagatgtgcatggaggccaagtcatttccttcccatgctctcatactgacccaacaaacccattctgcacgtgagaaaactgaggcccggaggagggaattcacacacgtttgaagccaagctggggccagaaagtagatcggctgatctccaaacctccacgtcaaaggtcttcccaggaggacatatgccttcaaggattttacaatgtataccaccctacaagtgatgggagagaggggaaaaaagcaaccgactaaggagaaaagcaaggagcagaaaaaggagcaaaagaggagctgtcagaacggtgtgaggagagtgggaaaggagccgcctccttttgcctctcttcctacttattaacaaaacagaacgactatccaacgtatttcagggagctaagtcttagccagcttcagctgtgttttaacccttagctaaatatagacaaggctaaggcaggccaggtgtacacttcaggaagacgtggaaattcccagggcggaccaaaacttgagctgttccggcggtagtgatttgaggtcagtttgaaagagaagttgagaaagcggccgaggggcgaatttggctgcactacacgctcgccacaaagaggaagggccgccggccgccggggccgagtgcgcttccagcccaggcggagcggtagacgcaacagcctccgcccgccacgtgacccgtagtgttgtggtctggcccgcgtgggtggcgggagcgccgagagggcgggggcggcgatggggcgggtcacgtgatggggtttaaatctcccgcagccggagccgcgggggcgccagtgccgcgcgtcgagcgggagcagaggaggcgagggaggagggccagagaggcagttggaagatggcggacgaggcggccctcgcccttcagcccggcggctccccctcggcggcgggggccgacagggaggccgcgtcgtcccccgccggggagccgctccgcaagaggccgcggagagatggtcccggcctcgagcggagcccgggcgagcccggtggggcggccccagagcgtgaggtgccggcggcggccaggggctgcccgggtgcggcggcggcggcgctgtggcgggaggcggaggcagaggcggcggcggcaggcggggagcaagaggcccaggcgactgcggcggctggggaaggagacaatgggccgggcctgcagggcccatctcgggagccaccgctggccgacaacttgtacgacgaagacgacgacgacgagggcgaggaggaggaagaggcggcggcggcggcgattgggtaccgaggtgcgcagggtgcgggcggccggaactgcgcatctcctcctccctctccccgggctcctactggcctgaggttgagggcggctgggggctcggggcaggctccgcggcgttcccctccccaccccggccctccgttcagccgcgctcctccggggctgcggttcctactgcgcgagctgccagtggattcgctcttttcctccgtccgtggcccgcctgggcggccttgttctttccgcagcagccaggtcgggagactctcgcagtcgctttaaaataagtttctctccccctcttactcttttagcatattgcttttgttagagctttttttttctttttctttattttttattttcattgcttttctcctctaccccccagcacacttaagtctgcaactttttggctgtcccgttggtctgcgttttcaattgctttttgcaaacttgacacctgtgcagtttgctttttttggtctatatttttatgactgaaattacaatttttgaaagaggaaagctgtttctatagtcacagcttgcaaaatttaaagaacgtggctgttcctgaagacattaccattctgtaatgcagttaggagtgggtatgggagagagagtacttttagagctgttcatattacttttattctaatcttgctcttgtgcggtaatggtgtttgggctaaacatgctttttttgtatgtatgtagtattgagacacaaacttaacacttctagcataatgaagcagatatgttgcagttgtcatgttcttgaaggtttctttttttttttttttttttttttgagacggagtctcgctctgtcgctaggctggagtgcagtggcgcgatctcggctcagtgcaacctccgcctcccgcgttcaaccgattctccttcagcctgccgagtagctgggactacagacacccgccaccacgcccagctaatttttgtgtttttagcagagacggggtttcaccatgttggccaggatggtcttgatttcttgacttcgtgatc

SEQ ID NO: 522 - DNA, 6000 bp, Homo sapiens
ccagtagcatgcacaaagttgatttcttttaagtttatatcacattttccagcttcggctagcaaggcgctgggaaaatgagcagttttaatattttgtgactctaagccataagggtggaaaaaaaaattggaaataatagtttggagagtcatagccagatactgaaggaaactagaagaatttaggatccaggtcagtccgcagatagacctctaagacgatgaacaagactagaattttttttttttttatgagacggagtttcgctattgttgcccaggctggagtgcaacagcacgatctcagctcactgcaacctctgcctcctgggttcaagcaattctcctgcctcagcctcccgagtagctgggattacaggcacctgccaccacgcccagctaattttgtatttttagtacagacagggtttcaccatgttggtcaggctggtcttgaactcccgacctcaggtgatccgcccacctcggcttcccaaagtgctgcgattacaggcatgagccactgtgcctggccaagactagaacttgataatcacgaggatgttctatagttttccattgaaactatattgtctctaaaatcaccgttatttttattaaagatgatcaaaggctgacttgtttgcaaagtaagtctagtcattaaacttgacctcattatttacataagtatagcaagaatagtgattgattttgatcttaggctttttatttttattattatttttttgagagtctcactctgttacccaggctgaagtgcaatggtgtgatctcgcttcactgcaacctctgcctcccaggtttaagcgattcccttgcctcagcctcccaagtagctgggattacatgtgcccactaccacacccggctaattttttgtttttttttagtagagacggggttttgccacgttggccaggctggtctcgaactcctgactttagacgatatgcccaccttggctttccaaagtgctggggttacaggcgtgagccaccacccctggccagaatcttaagaatctgagaatcttaggacagctttcttcggctccacaattcttccatcctccttgtgtgaccttgcattcatgttgtatccaccgtcttcacagtggcatacatgacaaactgaaagcccctggactgtttggtgtttggatctctcattactacacaatctgagtgctccccattgtttaaaatggctcctcaggctctctcaccagttccccctccccttccccctcccctcccctcctctcccctcccctccccttctctcccctctcctcccccttttcttagaaggagtcttgctctgtcgcccaggctggagtgcaagggtgcgatcttggctcactgcaacctccgcctcttgggttcaagtgattctcctgcctcagcctctggagtagctgggattacaggtcatgccatcacacccagctaattttatcagttgtttcaaagcccagtcctctgctgaagagcttccataggtgttcaggctcacaatgacaatgaaaagagagagtttaattttaatttttaaaaatagagacaagggtcttgctatgttgcctaggctggtgttgaactttcggcttcaagcaatcctcccacgtcagcctctcaaagtgttgggattacaggtgtgagccactgtgcttgtccagaagagagactttcaggattcttcctcagtgggttcatagggaaaggaataaacgaaggaacatatctctcaaattggacttttaaaagccctttggccaagcgcggtggctcacgcctgtaatcccagcactttgggaggccgaggcgggcggatcacgaggttaggagatcgagaccactctggctaacactaaaaacactggtttttcttttagtagagaaactctgtctctactaaaagtacaaaaactaattagccaggcatggtggcgggcgcagtggcgggtgcctgtagttctagctacttgagaggctgaggcccgagaatggcgtgaacccggggggcggagcttgcagtgagccgaggtcgcgccactgcactccagcctgggagacagagtgagactccgtctcaaaaaataaatgaataaataaataaaataaaaaagccctttaagggtatgaagcccagccaaggacctgccatcagattttgcttgcaatacctatggatttgggtgaattcctcttaagaggctaaagtatcttaagccccaaagcatcttaaggtttctgagcctgccagaaagtgacatcccttactcacttaaaagccagaccttattggctccataaagtgaagcttattttttttaagttgtctgatcatatttgaaaatatgacatatgggttaaagtcttggcaataaaaccaatgtctctaattgtgtagtgctacaaggttatcaaattcatattgaatttatgcgtattactatactgtcatgaaaataagaatactaatagtttctgaattctggagggatcagatagggagaaaaaaataagttttatctttgttcacaatggtatattttaccaaattgctgtaagctatagatagcttaagagaaaatagaaagattccttaaatttggaaaaaatattaaagaatgcgcaatgtggccgggcgcggtggctcacgtctttaatcccaatactttgggaggccgaggcgggtggatcacgaggtcaggagatcgagaccatcctggctaacatggtgaaaccccgtctctactaaaagtacaaaaaattagccgggcgtggcggcgggcgcctgtagccacagctactccggaggctgaggcaggagaacggcgtgaacccgggaggcggagcttgcagtgagccgagattgcgccactgcactccagcctgggggacagagcgagactccgcctcaaaaagagaaagaagaaagaaaggaaagaaaaaaaaagagaagaaagaaagaaagagaaagaaagaaagcgcaatgttagccataaaatggaatgagttctgatacatgccacaacatggatgaaccctgaaatcaatgtgctaaaacaaagaaaaccaacacataaaaggccacatattgtatgatcctatttataggaaatgtctaagacacagaaatgttagtggttgactgagactgggaagagcagggattagggggctgttgcttaacaggtatgggtttctttttctggtgatataaaggttcttgaagtagtggtagggatggttgcacaaccttatgactatactaaaagccactgaattgtactttttttttgagatggaatgttgcttttgttgcccaggctggagtgcaatggcgttatctcagctcactgcaacctccgcctcctgggttcaagcaattctcctgcctcagccccctgagtagcgggattataggcatgcgccaccacgcctggctaatttttgtatttttagtagaggtggggtttcactttgttggccagactggtcttgaactcctgacctcaggtgatccacctgcctcggcctcccaaagggctgggattacaggcgtgagccaccgtgcccagcctgaattgtgctttaagatattttaaatagtgaattgtatgttaagtaaattttatgtcaatttttaagacgagttaagaatgttacagggtataactagttcaactattgtggaagacagtgtggcgattcctcaaggatctagaactagaaataccatttgacccagccatcccattactgggcatatacccaaaggattataaatcatgctgctataaagacacatgcacacgtatgtttatagtggcactatccacaatagcaaagtcttggaactaacccaaatgtccatcagtgatagactggattaagaaaatgtggcacatatacaccatggaataccatgcagccataaaaaaggttgagttcttgtcctttgtagggaggacatggatgaagctagaaaccatttttttttttttttttgagtcggagtctcactctattgccagggctggagtgcagtggcgcgatctcggctcactgcaagctccacttcccgggttcacgccattctcccgcctcagcctcctgagtagctgggactacaggcgcctgccaccacacccggctaatttttttgtatttttagtagagatggggtttcaccatgttagccagtatggtctcgatctcctgacctcgtgatccgcccgcctcggcctcccaaagtgctgggattacaggcgtgagccaccgcgcccggcgaaaccatcattctgagtaaagtatcgcaaggacagaaaaccaaacaccgcatgttctctcataggtgggaagtgaacaatgagaacacttggacacagggtggggaacatcacacaccggggcctgtcgtggggtggggggaggggggagggatagcattaggagagatacgtcatgtaaatgacgacttaacgggtgcagcacaccaacatggcacatgtatacatatgtaacaaacctgcacgttgtgcacatgtaccctataacttaaagtataataataatttaaaaaaagaatgttacggggcatatcctttctctcaaataatggaacgaggttaaaaaaaaaaggttaaacataaaatggcggcgggctggatcggatcacgtgaccgccatttctttccttcccacccaaaggaaagcccttccttcagagcaagcgcaagacatatagccccgctcattgttaagcgaggccaaggcaacccttaggcgcgctctatttcccctttcgtagcgaaagggccaggcgtattgagcggtcaggggagcgcgcacgcagaacgtcagccagtaagcgccgttcctccgggagatgtggaggaggggggcggcgtggaggaagagggggaagttggcgcatgcgcctaaagctgacgggtttgaaatggcttcgatgttagccgggacccgactcaggtgaaggtctggtccccgtagttggagcagtgggcggccaagccgggtctcttaacatcttgtcgaatctgtggaagggccgggagcgatcttttgggtagcccggcggccccgggcggcgacggtggggctcttgtgggactgggacgggagggacgcggtcccttttgtgcgggtcggagcaggcccggcgcggccagccccacccccaccgctcggctcctcaggtgcccccagcgcccctcagcctcggcatggcgacgctgcagtccgccgccccattgctcccgagccgctgcggttttaccctcctggccccccggcccgggacatcgtggcggctcccggcggcgtgggtcttggggaatagaggctttctccgtgcgtggtaaacgagcccagggctctcgggagccatcgagtgtcgtggggcggtgggttccgccttccgtcgccggcggccggcacggagctgggactggaggaagatggacggccgagctctggcccttgagggtcgtggcggccgaggagggggtgcacgggcggagaatcttcgccttttctggtttatcttggggggaggggttttcccagtggttctttaagggacatccattatctcaacggccttttccttcgaggtcggggttggaaaagaagccccctaggttccttttctactttggaaagtagagatgttcgttatttaaatgatatctttaaatacctgtgatgggggtcttgtcccagtatccgttattggttttaacattaccctggcctcactccccaacccattgccagaagaaacacgcaggctgtatttcctgtgaatataaagttgtgaactttttgttaacaattgggtggatacagcagatggtcttcgtttaaatgtgacaacttgtagtcccagaaaggagtgctttttctgagtctccctctaatgttatcttgtaaaatagggcatt

SEQ ID NO: 523 - DNA, 6000 bp, Homo sapiens
tcctctcccctcccctccccttctctcccctctcctcccccttttcttagaaggagtcttgctctgtcgcccaggctggagtgcaagggtgcgatcttggctcactgcaacctccgcctcttgggttcaagtgattctcctgcctcagcctctggagtagctgggattacaggtcatgccatcacacccagctaattttatcagttgtttcaaagcccagtcctctgctgaagagcttccataggtgttcaggctcacaatgacaatgaaaagagagagtttaattttaatttttaaaaatagagacaagggtcttgctatgttgcctaggctggtgttgaactttcggcttcaagcaatcctcccacgtcagcctctcaaagtgttgggattacaggtgtgagccactgtgcttgtccagaagagagactttcaggattcttcctcagtgggttcatagggaaaggaataaacgaaggaacatatctctcaaattggacttttaaaagccctttggccaagcgcggtggctcacgcctgtaatcccagcactttgggaggccgaggcgggcggatcacgaggttaggagatcgagaccactctggctaacactaaaaacactggtttttcttttagtagagaaactctgtctctactaaaagtacaaaaactaattagccaggcatggtggcgggcgcagtggcgggtgcctgtagttctagctacttgagaggctgaggcccgagaatggcgtgaacccggggggcggagcttgcagtgagccgaggtcgcgccactgcactccagcctgggagacagagtgagactccgtctcaaaaaataaatgaataaataaataaaataaaaaagccctttaagggtatgaagcccagccaaggacctgccatcagattttgcttgcaatacctatggatttgggtgaattcctcttaagaggctaaagtatcttaagccccaaagcatcttaaggtttctgagcctgccagaaagtgacatcccttactcacttaaaagccagaccttattggctccataaagtgaagcttattttttttaagttgtctgatcatatttgaaaatatgacatatgggttaaagtcttggcaataaaaccaatgtctctaattgtgtagtgctacaaggttatcaaattcatattgaatttatgcgtattactatactgtcatgaaaataagaatactaatagtttctgaattctggagggatcagatagggagaaaaaaataagttttatctttgttcacaatggtatattttaccaaattgctgtaagctatagatagcttaagagaaaatagaaagattccttaaatttggaaaaaatattaaagaatgcgcaatgtggccgggcgcggtggctcacgtctttaatcccaatactttgggaggccgaggcgggtggatcacgaggtcaggagatcgagaccatcctggctaacatggtgaaaccccgtctctactaaaagtacaaaaaattagccgggcgtggcggcgggcgcctgtagccacagctactccggaggctgaggcaggagaacggcgtgaacccgggaggcggagcttgcagtgagccgagattgcgccactgcactccagcctgggggacagagcgagactccgcctcaaaaagagaaagaagaaagaaaggaaagaaaaaaaaagagaagaaagaaagaaagagaaagaaagaaagcgcaatgttagccataaaatggaatgagttctgatacatgccacaacatggatgaaccctgaaatcaatgtgctaaaacaaagaaaaccaacacataaaaggccacatattgtatgatcctatttataggaaatgtctaagacacagaaatgttagtggttgactgagactgggaagagcagggattagggggctgttgcttaacaggtatgggtttctttttctggtgatataaaggttcttgaagtagtggtagggatggttgcacaaccttatgactatactaaaagccactgaattgtactttttttttgagatggaatgttgcttttgttgcccaggctggagtgcaatggcgttatctcagctcactgcaacctccgcctcctgggttcaagcaattctcctgcctcagccccctgagtagcgggattataggcatgcgccaccacgcctggctaatttttgtatttttagtagaggtggggtttcactttgttggccagactggtcttgaactcctgacctcaggtgatccacctgcctcggcctcccaaagggctgggattacaggcgtgagccaccgtgcccagcctgaattgtgctttaagatattttaaatagtgaattgtatgttaagtaaattttatgtcaatttttaagacgagttaagaatgttacagggtataactagttcaactattgtggaagacagtgtggcgattcctcaaggatctagaactagaaataccatttgacccagccatcccattactgggcatatacccaaaggattataaatcatgctgctataaagacacatgcacacgtatgtttatagtggcactatccacaatagcaaagtcttggaactaacccaaatgtccatcagtgatagactggattaagaaaatgtggcacatatacaccatggaataccatgcagccataaaaaaggttgagttcttgtcctttgtagggaggacatggatgaagctagaaaccatttttttttttttttttgagtcggagtctcactctattgccagggctggagtgcagtggcgcgatctcggctcactgcaagctccacttcccgggttcacgccattctcccgcctcagcctcctgagtagctgggactacaggcgcctgccaccacacccggctaatttttttgtatttttagtagagatggggtttcaccatgttagccagtatggtctcgatctcctgacctcgtgatccgcccgcctcggcctcccaaagtgctgggattacaggcgtgagccaccgcgcccggcgaaaccatcattctgagtaaagtatcgcaaggacagaaaaccaaacaccgcatgttctctcataggtgggaagtgaacaatgagaacacttggacacagggtggggaacatcacacaccggggcctgtcgtggggtggggggaggggggagggatagcattaggagagatacgtcatgtaaatgacgacttaacgggtgcagcacaccaacatggcacatgtatacatatgtaacaaacctgcacgttgtgcacatgtaccctataacttaaagtataataataatttaaaaaaagaatgttacggggcatatcctttctctcaaataatggaacgaggttaaaaaaaaaaggttaaacataaaatggcggcgggctggatcggatcacgtgaccgccatttctttccttcccacccaaaggaaagcccttccttcagagcaagcgcaagacatatagccccgctcattgttaagcgaggccaaggcaacccttaggcgcgctctatttcccctttcgtagcgaaagggccaggcgtattgagcggtcaggggagcgcgcacgcagaacgtcagccagtaagcgccgttcctccgggagatgtggaggaggggggcggcgtggaggaagagggggaagttggcgcatgcgcctaaagctgacgggtttgaaatggcttcgatgttagccgggacccgactcaggtgaaggtctggtccccgtagttggagcagtgggcggccaagccgggtctcttaacatcttgtcgaatctgtggaagggccgggagcgatcttttgggtagcccggcggccccgggcggcgacggtggggctcttgtgggactgggacgggagggacgcggtcccttttgtgcgggtcggagcaggcccggcgcggccagccccacccccaccgctcggctcctcaggtgcccccagcgcccctcagcctcggcatggcgacgctgcagtccgccgccccattgctcccgagccgctgcggttttaccctcctggccccccggcccgggacatcgtggcggctcccggcggcgtgggtcttggggaatagaggctttctccgtgcgtggtaaacgagcccagggctctcgggagccatcgagtgtcgtggggcggtgggttccgccttccgtcgccggcggccggcacggagctgggactggaggaagatggacggccgagctctggcccttgagggtcgtggcggccgaggagggggtgcacgggcggagaatcttcgccttttctggtttatcttggggggaggggttttcccagtggttctttaagggacatccattatctcaacggccttttccttcgaggtcggggttggaaaagaagccccctaggttccttttctactttggaaagtagagatgttcgttatttaaatgatatctttaaatacctgtgatgggggtcttgtcccagtatccgttattggttttaacattaccctggcctcactccccaacccattgccagaagaaacacgcaggctgtatttcctgtgaatataaagttgtgaactttttgttaacaattgggtggatacagcagatggtcttcgtttaaatgtgacaacttgtagtcccagaaaggagtgctttttctgagtctccctctaatgttatcttgtaaaatagggcatttttggtgatctacttgatgtaaaatgtttttgctgcattttggatgttcatttgccctttttctacttaacagttgttatttctgctgaaatctgcgaagacgtcctcgacacattaaacatttctttctattgtaatatccttttgtgatatctgtagcttggttggactttaaaatgtggatccttttcttgatagatcgatgctatagaagacaaacaagggaaggttttttttccttttgcatcatggctcaatttggaggacagaagaatccgccatgggctactcagtttacagccactgcagtatcacagccaggtcaggcttctaaatacatgtactgtaattgtttgtgggggacttgttaaaactacgtgaattagggccgggggtggtggctcacgcctgttatcctagcactttgggaagcggaggaggtggatcacgaggtcaggagttcgtaaccagcctggccaacatggtgaaaccccgtctctactaaaaatactaaaattagccgggcctggtggcacgcgcccataatcctagctactcaggaggctgaggcaggagaatcccttgaacccgggaggtggaggttgcagttagctgagatcgcgccactgcactccagcctgggcgacagagagatactccgtctcaaaaaaacaaaacaaaacaacatgaattaggctgttctgatattctgatattgtaaagtgtttgcaaattgtgaattcattaactttctctgtgaagctcctttaaaaatccatagatcaactaacaagctgttttacatagtagtttggacagttttgtagttttttttttccccaaacatttatttttttatttatttttatttttatttatttatttttttgagtcttgctctgtcgcccaggctggagtgcagtgacgcaatctcagctcactgcaagctccgcctcccgggttcacgccattctcctgcctcagcctcctgagtagctgggactacaggcacccgccaccacgcccggctaattttttttttttttgtatttttagtagagacggggtttcaccgtcttagccaggatggtctcgatctcctgaccttgcgatatgcccgcctcggcctcccgaagtgctgggattacaggcgtaagccaccgcacccggcagttttgtagttttttaataccttagattaacttttaattgatttaattctgttagagtttagctactcattcattacaatatactgtatttggcatgttaagttgtcagta

SEQ ID NO: 524 - DNA, 6000 bp, Homo sapiens
attaggccaactttgaaaaaacaattttagtcactctcagttatttaactttgttcctctaattttatcaggtaatgccttcgaactttgtttagacacgctaaacgtttttttcttttatcttttaaagctggtttattgcagcctcctgttcgtatagtttcacagccacaaccggcacgacgattagatcccccatcccgattttcaggaagaaatgacagaggggatcaagtgcctaacagaaaagatgatcgaaggtatattttctaaagtgtactgtggatggtggcaatggttgtacaacaatggaaacatagttaatgccactgaactatgcttataatataaaattttaaaatggtaaattttatgttatgtctattttactacaatttttaaaaagttaaacaaatatactgtggattcttgcttatattacctactctatttacttcattgaagagcttttccataatattagaaatattagtaattttagaaaaatttgctttcagtcgtgagagagagagagaaagacgtagatcgagagaaagatcacctcagaggaaacgttcccgggaaagatctccacgaagagagcgagagcgatcacctcggagagttcgacgtgttgttccacgttacacagttcagttttcaaagttttctttagattggtaggttattccccacccattgttttcttgagttactaatttcatataatttgatagaatatgtcacagaggtatttttcttgcaagattgatttcccgacagttagtgttcttcatataagggcagaaatgcaatttgaaataacttaattatctacaatgctgcattatttttatacccccatgaaggatatcgactggtattgaaaaaggcagcccctcaaggaaattcctctgtcataacgttattcccctaaagttagaatcagttaagatctagacttactgataacttgaagatcatgtatagtccattgtgtatgataaagcaataatagagtagtaaactgattaatttcaagtttagccctggcagtgtagtataatagaaacattgatatgcgtatatactcacatacataatgtattcacatgtatagtgtatgtgtatgtatatacataaatatattattcaccctttgaatcagaagccatgacaaattaccagaaatttcttttttcttttttctttttttttttttttttttgagatagggtcttactctttcacccaggttggagtgcagtggcatgatcttagctcactgcagcctctgcctctgcctcctgggttcaagctattctcctgcctcagcctccctagtagctgggattacaggtgctcagcaccacacccagctaatttttgtatttttagtagggacggggtttcaccatgttgttggccaggtttgtttcgaactcctaacctcaagtgatccacctgcctggccctcccaaagtgctgggattacaggtgtgagctactgctcctggccaagttgccaggaatttctgaggttcacctgcaaaacaaaggtaatattaactagcaaaattattgtgaggtttagttcatgtatccaaaggacttaacccagtgtgtggcagttgtatagtctcagtaattaatggtgggttatggtcgcaacttaggtaatagattaatagatggaaaaataacaaattgacagtaaaataagaaaatcattaaaagcagtgttcagggctgtttagcctaaaagcaaatagctatatgcaatgcagtggcctaagaggatattattatgtttaaacagagtgataattaccgttcataatacttgcctatcagaggtcaaaatttccagatattcagttctagatttagtaacccagtgaattttagtcaagctacttaatgccaagaaaattttgcttggtgactttgcttaattatgttacatagttggcgttcatttactcttacttatggtcaaatcagcacctacttttttttttgtttttgtttttttttttgagatggagtttcgctcttgttccccaggctggagagcaatggcgcgatcttggctccctgcaacctctgcctcccaggttcaagcaattctcctccctcagcctcccgagtagctgggattacaggaatgcgccaccacacctggctaattttgtatttttagtagaaacagggtttcaccatgttggccaggctaatctcaaactccttacctcaggtgatccagtcgcctcagcctcccaaagtgctgggattacaggtgtgagccaccatgcctggcccagcaactactcttaactttacactagttttcttcttatagctgcttactcttatacttaaaaatctgtagtctgcatatttccgagaaaccagtcgaaaccaaaaccacttttcccagcctcaaagatattaaatagaggagctctgattttaacccatctgttctcaatattgaatgctcttttgggaagagttgatgcataggatatgaaattgaacagctatttagcttcttctcaattagaccttcaggggccaggtgcagtggctgacgcctgtaatcccagcacttcaggaggctgaggcggacagatcacttgaggtcaggagttcaaggccagcctggccaacatggtgaaactccatctctactaaaaaataaaaaaattagctgggcgtggtagtgtgcgcctgtaatcccagtttcttgggaggctgaggcaggagaatcgcttgaacccgggaggcagagattgcagtgtgccgagattgcaccactgcactccagcctgggagacagagggagactgtctcaaaaaataaaaaactaataataataaattacaccttcacagtttagttttttgtttttgttttttttttttttgagatggagtcttgctctgtcgcccaggctggagtgcagtggctcaatctcggcccactgcaagctttgcctcccgggttcacgccattctcctgcctcagcctcccgagtagctgggactacaggcgcccgctaccacgcccagctaattttttttgtatttttagtagagacagggtttcgccgtgttagccaggatggtctccatctcctgacctcatgatccgcccacctcggcctcccaaagtgctgggactacaggcgtgagccaccgcacccggcctcacagtttagttttaccactttgaagtaaattccgagaacattaaatggatctcttgcaagtaaaaatgattttaaagtttccatacttctcatttgtagttgtgtaaatcaagattttcttatactaatatgattataagaaacttcgtgcccatgaaatgatttatttgtacttatatcttttgttttattataaattttactcctgtggggtaaaacatgacttcataaattctggtgatacggaattgggaaacaattatacatacttgctttttgtaacacttccttaaaaacaaaactcagatacttgtttcatgtttttattattttgacagcagaatcatatccaaataaagtataattataggcctggcactggtggctcatgcctgtaatccagcactttaggaggctgaggtggaaggatcacttgaggccaggagtttgagaccagcctaggcatatagtgagacctcacctctacaaaaagtagaagttagccacatgtggtagtgcacccgtagtcctagctataatacttagaagctgacatggaaggattgcttgagcctaggaattcaggttatagcaagctgtgagtatgccacactgcactctggcctgggcgacagagcaagattctgcctgtagataggatagaatagatagatagatagatagatagatagatagatagatagatagatagatagatagattctgtctgtagatagaatagatagataaatagatgaataggtaggcaggtaatagtctgttaactgacaggtttattactctgtatttatttttatacttcaaataaagacatctctgcatgtagattacttcatctttcatacttctgcttttagttgtcttttcatcttacattatacttttaacagacatctcttagccttttgccagattgacctttcagttcctctcttttaaaagctctacttcttaggaaaaaggaaatgatcctttaaaaaatcagtgtgagatttaaaaggcaagaaatttatcccctctatacataataatcaggtatggatcttaatcattcacagagaaagggttgtggaggtgcagataatccaaggaacatatgaattttgctttttgtggatttttgtatttaattttgaatgtaagtatgcttgatctaggaacttactatagtaaaataaaagttataatttttctacactcaaaaacctgattgaggggcgtacagaaatactaatactctcattgctgttttgtatctattcaacatgaaccataattttcaagtaatccacagttccaactgaggaaaacctgcttttgtacagatcttttctggagctgagattcaagttatttcaaagcgtcttctgtaacaaaaagtatcaaaataaggataacactgagaatactatttattcaaagctttgcgtatataaatttgaacgtaatattttcatatgtctctatgcaaatctatagctcattagtaactgactttgtcttttttcagcttactttttactatatccagttatatttgctacagaattaaatgtttgtgtaaccttttttattaaggctatttattcactacttatgtctgtttttcagtcccagttgtgacatgatggaactaaggcgccgttatcaaaatttgtatatacctagtgacttttttgatgctcaatttacatgggtggatgctttccctttgtcaagaccatttcagctgggaaattactgcaatttttatgtaatgcacagagaagtagagtccttagaaaaaaatatggccattcttgatccaccagatgctgaccacttatacagtgcaaaggtttgtattcagctgtgatatgcagcttaaatttcttagcagttattcataataaaagggtatgtagaattatccttcagaaagtgtttgttaggtagacccgaatacctgttttcttcttaactgcttgatcctattttggttacataatttaatttaagctctctttgcctcatctcttgagctgtaaaactagttattctaacattttaaaccttattaaaaatgtgaagataaagttgatattaatgagatatttggaatgttgtatgacttctggtagcctcagataaaacttaatgttagatgaatgcactaaatgtcaatcttaagggaaacattcagtatattgtgtatagtctatagttttgtttaaagcattgtgtgactgaaaaagcatcccttcaaaagttaaaactaagtaattataaggtatctaggcctggcgtggtggctcacgcctgtaatcccagcactttgggaggctgaggtatctaatactgtttctgctatagtattacttcctatttttatttaaatttcagacatcttatatttaaagataattagtagtgcttctcattttttcacattactttagacttttgacaggattgaattatttgactataataggtaatgctgatggctagccctagtatggaagatttatatcataagtcatgtgctcttgctgaggacccacaagaacttcgagatggattccaacatcctgctagacttgttaaggtaaaaggacacatttgttttaactttagatgtattcactttgcttagctgtaactttgtacacataaaatctaaagccctacattttaatatttgttgattaatgagtaattttagtattaaggcacccagaatttaatgatgtagatgtttttctcattgcagattacaactatat

SEQ ID NO: 525 - DNA, 6000 bp, Homo sapiens
attaaatagaggagctctgattttaacccatctgttctcaatattgaatgctcttttgggaagagttgatgcataggatatgaaattgaacagctatttagcttcttctcaattagaccttcaggggccaggtgcagtggctgacgcctgtaatcccagcacttcaggaggctgaggcggacagatcacttgaggtcaggagttcaaggccagcctggccaacatggtgaaactccatctctactaaaaaataaaaaaattagctgggcgtggtagtgtgcgcctgtaatcccagtttcttgggaggctgaggcaggagaatcgcttgaacccgggaggcagagattgcagtgtgccgagattgcaccactgcactccagcctgggagacagagggagactgtctcaaaaaataaaaaactaataataataaattacaccttcacagtttagttttttgtttttgttttttttttttttgagatggagtcttgctctgtcgcccaggctggagtgcagtggctcaatctcggcccactgcaagctttgcctcccgggttcacgccattctcctgcctcagcctcccgagtagctgggactacaggcgcccgctaccacgcccagctaattttttttgtatttttagtagagacagggtttcgccgtgttagccaggatggtctccatctcctgacctcatgatccgcccacctcggcctcccaaagtgctgggactacaggcgtgagccaccgcacccggcctcacagtttagttttaccactttgaagtaaattccgagaacattaaatggatctcttgcaagtaaaaatgattttaaagtttccatacttctcatttgtagttgtgtaaatcaagattttcttatactaatatgattataagaaacttcgtgcccatgaaatgatttatttgtacttatatcttttgttttattataaattttactcctgtggggtaaaacatgacttcataaattctggtgatacggaattgggaaacaattatacatacttgctttttgtaacacttccttaaaaacaaaactcagatacttgtttcatgtttttattattttgacagcagaatcatatccaaataaagtataattataggcctggcactggtggctcatgcctgtaatccagcactttaggaggctgaggtggaaggatcacttgaggccaggagtttgagaccagcctaggcatatagtgagacctcacctctacaaaaagtagaagttagccacatgtggtagtgcacccgtagtcctagctataatacttagaagctgacatggaaggattgcttgagcctaggaattcaggttatagcaagctgtgagtatgccacactgcactctggcctgggcgacagagcaagattctgcctgtagataggatagaatagatagatagatagatagatagatagatagatagatagatagatagatagatagattctgtctgtagatagaatagatagataaatagatgaataggtaggcaggtaatagtctgttaactgacaggtttattactctgtatttatttttatacttcaaataaagacatctctgcatgtagattacttcatctttcatacttctgcttttagttgtcttttcatcttacattatacttttaacagacatctcttagccttttgccagattgacctttcagttcctctcttttaaaagctctacttcttaggaaaaaggaaatgatcctttaaaaaatcagtgtgagatttaaaaggcaagaaatttatcccctctatacataataatcaggtatggatcttaatcattcacagagaaagggttgtggaggtgcagataatccaaggaacatatgaattttgctttttgtggatttttgtatttaattttgaatgtaagtatgcttgatctaggaacttactatagtaaaataaaagttataatttttctacactcaaaaacctgattgaggggcgtacagaaatactaatactctcattgctgttttgtatctattcaacatgaaccataattttcaagtaatccacagttccaactgaggaaaacctgcttttgtacagatcttttctggagctgagattcaagttatttcaaagcgtcttctgtaacaaaaagtatcaaaataaggataacactgagaatactatttattcaaagctttgcgtatataaatttgaacgtaatattttcatatgtctctatgcaaatctatagctcattagtaactgactttgtcttttttcagcttactttttactatatccagttatatttgctacagaattaaatgtttgtgtaaccttttttattaaggctatttattcactacttatgtctgtttttcagtcccagttgtgacatgatggaactaaggcgccgttatcaaaatttgtatatacctagtgacttttttgatgctcaatttacatgggtggatgctttccctttgtcaagaccatttcagctgggaaattactgcaatttttatgtaatgcacagagaagtagagtccttagaaaaaaatatggccattcttgatccaccagatgctgaccacttatacagtgcaaaggtttgtattcagctgtgatatgcagcttaaatttcttagcagttattcataataaaagggtatgtagaattatccttcagaaagtgtttgttaggtagacccgaatacctgttttcttcttaactgcttgatcctattttggttacataatttaatttaagctctctttgcctcatctcttgagctgtaaaactagttattctaacattttaaaccttattaaaaatgtgaagataaagttgatattaatgagatatttggaatgttgtatgacttctggtagcctcagataaaacttaatgttagatgaatgcactaaatgtcaatcttaagggaaacattcagtatattgtgtatagtctatagttttgtttaaagcattgtgtgactgaaaaagcatcccttcaaaagttaaaactaagtaattataaggtatctaggcctggcgtggtggctcacgcctgtaatcccagcactttgggaggctgaggtatctaatactgtttctgctatagtattacttcctatttttatttaaatttcagacatcttatatttaaagataattagtagtgcttctcattttttcacattactttagacttttgacaggattgaattatttgactataataggtaatgctgatggctagccctagtatggaagatttatatcataagtcatgtgctcttgctgaggacccacaagaacttcgagatggattccaacatcctgctagacttgttaaggtaaaaggacacatttgttttaactttagatgtattcactttgcttagctgtaactttgtacacataaaatctaaagccctacattttaatatttgttgattaatgagtaattttagtattaaggcacccagaatttaatgatgtagatgtttttctcattgcagattacaactatatcttatttgtacgctactagttcaacagtcattttgatgttttatatttgtaacatagtagaatattagtggtaataggattcagagtgtctttggatgttgttgaagtttgaattatagcttgtttctttaaaagaactctatctgaagaaatattttaaaaggatgagttatgatgtgtgtaaatcctattccattgctgaaatgcagtgtggaacacaatgaactgaactcttccttgactgacagataccagaggtagtaaaaatgatattggaaaggtttgtacctttccttctcaagtatcttattggtaatttgacagggtgcgtaatatatgtaaatgattctttgttttgaattagtttttagtgggcatgaaaggcaaggatgaagctatggccattggaggccactggtctccttcgttggatggaccagacccagaaaaagatccctctgtgttgattaagactgctattcgttgttgtaaggctctgacaggcattgatctaagtgtgtgcacacaatggtaagtactaattcatttcttgattagaagtgttttactgatagtttatgtagttgttcttatcgatcagccttttccccccggcttattttagcaaccctggtcaatgcaggtaatctcaaaggaaaatccccatttgtagctaaagtttatttggtgccaaaatgttttgggggaaaagggattaagaactaatcaaaataaactgaaaatttaaatgttttgttatgttgtactttggaagttggatgtatgttgaaaatacttttcatttcatgcatagctggagaagatcgtcaagagagaacttcatttcattataattcttttgttataaaatgatgtagttgcgattatttttgttcagccatattttctcttgaggcttatttgtcctgtgtattttagtgtatctcttgtgacttaatttgagaatattcttttttagcacatgaaatctgaacagctatccagcttcttcaggtattctctaaaatgcgggtagctctgtaatcaaacttgaaaatgccttgggggaacatattcttcctttaacttattaaatattgtacaaatgtaccaaaagaggaactatggcttctataatttttttttctttagaccaacctcaagttcttgcagcaaaatttctttacttgatgtgctacaagtgaactagggtctttaaaatgtattttagaattttttttccaacatgcttcttcccttgcaacaggtaccgttttgcagagattcgctaccatcgccctgaggagacccacaaggggcgtacagttccagctcatgtggagacagtggttttatttttcccggatgtttggcattgccttcccacccgctcagagtgggaaaccctctcccgaggatacaagcagcagctggtcgagaagcttcagggtgaacgcaaggaggctgatggagaacaggcactgaacgctaatccctttttctatttccgcttctcacaggcacaggaacacaggcacaaatgcacaccacacactacataataaacacacatggaggaacataactggtaacagcgactggtaatccagctttcagcagtatagttgtatgttcttttctcttaaaatttctgtcttattatcctaactttaagagtgctgagacctcaaaggaaaataagttgtgcttaaattgcacagaattttgtttttatcataggtctagttgctggaatctgggaccagttgttgaacaagattcagtattaagccattttaaacattttgccattttctaaaatttaaaaaattttctttttcatggtcatcagttctagtcatggatatttgaaattggacaaccacaagtctgagagatttgaaatttcaggctatgtggcaacgtctttggtacatttcaaaggtctgactaaatcagtctttgggtggcttgaaaattgaggcaagatcacacactgtgtggtttgtggagaccggcagtgtttgtgcatccctgatatcctttgtgttgtaatttatcacccttttgtgtttcacagatctggctttgattggctgatgagtgtctttgtgatcagttaaaagtggtagaatgtatgtacgtggacttgcctaaataataactttaggagaagacaatctgaaacatttgtgaccttgcacagatcagcaacagacttttaaaaataaattatttttattttaaggtttcataatagtaattacattcttaactttgtatgtcaggatgaagaagagaaggatgatggtgaagctaaagaaatttctacacctacccattggtctaaacttgatccaaagacaatgaaggtaactttgataaggatggattttatttatttttttcaattaaaaagttctttctgagatggagtctcgctctgtcgc

SEQ ID NO: 526 - DNA, 6000 bp, Homo sapiens
aacgtgtgaggggaaccccactctccaaggttccagtggctttaaaggtgtcctcgagaaaatcagaggaacagggggatgcttgttttccttccttccttctctctctctctctctctctctctctctctctctctctctctctctctctctctctcttttttgctttaaagtatgctgaaaggacactttaaaccaagtctgaatggctcggcaggactggggcgcgggtgctggcaggagccggagaggcgacatctggccatgggagcatttgtttcaaagttcaaggccgttcgctcagggtcaaggttagtccggcgggccgttcggagaccagccccagcgtgccaggaccgtttccggggcctggccggggcgttgccgcggggtcggggaccagcacgagtgctgagtcacgccccgcccgggagcgcctcgggtcagtaactcgggaagacgaccaagcgggagcgggagcgggagcgggagccggagcgagagcgcgcgggcgcggccgacaggtgagatcgcgccgccaggcgggctctcgagaccccgggcgccccgggcgggaccgggacccggaagaggggcgagcggattagaggcctggctcacgccgcgtctggcgtggggaggtcggtgcgcgcagttgtggcgctgcgaggagagggatactcgactcaggcccgcccctctctgtctcccccaaaaaacgcaacagggagatgtgctcctggccgagggcaaagaaaactccaccctcctggtttggcccctaaatccctgctaagttttcctaaggaagatgggcttaggccgggaagggcgaaccggggaagagggaacacggggcgggtgtaacccggatcttgcgaggaccgtccgagggtccgctgggtagaagcggccggtccggacagaagcaggtgtgagaggaaagggagaaacctcagtctctaagaggaaagaaactggagtcaacccagtgcccataggctcgggggagctggggggtgcagcactaggaagtctgcttctcccttcccgaagccctgggtgctgcagggacaaagaccagcggtgagtaaactaactctgatgggacgcgtgcagtccacctggaactgaattagtggcctatattggggctctccttccaacaccacctgatcaacacaccctacctttccctacaaggagagtctttttgaccctggaatttaaggtgaggatggggagtggtgaggtctcttgggggctgatgatcctgtaggaggacaggcatagggcagagagtcagatatagtttgggatgggacttgcaggtttctggactgtgcacctgtgttcaaaagcctgtatcaggttccagtgtgcgtgcatgcacctgccagagagccccgggatctcagatcacacctgccctcaccccagcacctagagaggagttctccaaggagcacagtgtgtcaccaagaagagggcactgagccccagccagggtgggctgggcaggcttagcactacctagcccagaagtgatgggctgggcaggccggtggactccagggccagcctgacttttgtctggtggccaaatgaagccagcgtccaggtacaggtggtgggcagaccatggggaccacaaaactggctctgaggaggatggacaaattgcttggcctaggttttctgtgcgggagtgaatatgacatccagatgaacctgtctgccccagagctgccctcccctggggataaaaggaggctgcctcccttagactttgagtcccttttcagaaactggtcttttgggggttctgttcttcaagtagtccctgaggggctggccatggagtgtcccaggaagggaggccgcccaaccgtctccatcctgctgtgtcccgcaggtggaggaaacctccatggtgctgtgagtcgtgctgtagtggccttcttatccgggacggccactctgggaatgtggctctccagaggctgatgttgaaacctaccctttgtgtgagccatgacgactcaaaaagcatcgtgttttatttgtaatatttgtgaagcaatactggagcaactctgggatgacattcttgctttgatcagagcccacacggttcctgctgtgtgtcttctgaggcacaacctctgaacagctttggcataaatgtaacttcctggtttttcagtagtcctatgggctgcttattgtggaataatacccttgagatcagggtggatgctcttggcagagaaaacaggattgactgagcaaatttttgtgtaaatcagattgtgtgtgtgtgtgtctgtgtgtatgtgtgttgtggcagggagcaaaggtaaagttactgaggggttcctggacaatcagggtttgttccgctctcttaggccttcttttaagctaacattcttgaacctagacagacatagttaagattctctgtgattcccactggggctttggtgttcagttcaaaatcagatggtggatttagcagttcctcaaaaagttaaacttcaagttaccatatgacccagcaattccatacctaaatatatactaaagaggactgaagactggttcacacaaaaacctgtacacaaatgttcatagtggcgttattcacatagtcaaaaggtggaaacaacccaagtgcccgtcagctgatgagtggataaacaaaatgtggtctattcatacaccagtaatggactgtttttcagccaggaaaaggaatgaagcactgataacatgctacaactcggatgaaccttgaaaacatgatgatcagtggaagacgtcgcaaacaaaaagccacatagtgtataattccatctacatgaattgtctagaacagacaaatctatagagacagaaagaacattagtagctacccagggctagggtaggtggggtacaggatttattttgggggtgatggaagtgttctggaattagatagttgtgatggttgcacaacctggtgaatacactaaaacccactgaacttacatctttttttgaaatttaaattaaaaaaaatttttttttgagacagagtcttgctctggcgcccaggctagagtgcagtggcatgatcatgcctcactgcaacctcgacctcctaggctcaagcgatcctcccacctcagcctcctgatatcagggaccacaggcatgtgccaccatgcctggctaatttttgtattttttgtagagatggggtttcaccatattgcccaggctggtctggaactccggagctcaagcaatctgcctgcattggcctcccaaagtgttgggattagaggtgtgagtcagcctacatctcattttttttttttaaaagatggggtctcatctaggctggagtgcagtggtgcaatcatagctcactgtgaacttacatcttaagtggtaaattgtatatgtgaattctattttgattaaaaaattagatggtaagcggtctgtcctattattaaagacattatttctgcaaaaatgacatatgcttgtttgaaaaaaattcaaacaatacaaaagcttaaggaagaaaatgaaaacattatctatgaccactattagcactttggttcagacagcaggtttgatgtgttgagaattgaacttgggcaagttgttgaacttttttccaaaataaggagaaaaaactcataccttaaatcgaagatatgggcaaaagtgcaacagatgctaactgctgtaatcattacctgtatatgtgtatacataccgaggtggatgtgtcttattggccataaatgggattagatctttcatgtggttctgtggcctgactttttgggactgggcaaactaatctgcaacatatattttatatatatatatataaaacgtggctgctgtgtattcattgctactctgtgccaggcaccatgctaaaatgctttacgtaaatgatctcattgaatcttttctacagctcgaaatcacagtggcttacccctgtaattccagtgcttcgggaggctaaggcaggaggatcccttgaggggctaggagttcaagatcagcctaggcaacatagtgagaccctcatctctacaaaaaaaaaaaaaaaaattagccagctcaggagttcaaggttataatgagttatgatcatgccactgcattctggcctgggtgatagagcaagaccctgtccctaagaaaattaaaaataagtaaataaataaataaatattgcctgactttttcttttcttttttttacttttgagacagggtctcacattgttgcccaggccgaagtgcagtggtatgaagcactgatccatgctacaacttggatgaaccttgaaaacatgttttgtgtaaatcagattgtgtatgtgtgtctttgtgtgtgtgtgttgtgggagggagcaaaggtaaagttactcactgcagcctcaaactcctgggctcaagcagtcctcctgcctttgcctcctgaagtgctaggattataggcaggagccaccacacccagcccttgcctgactttttcatggacagactttttgtataaaaacgtcattcacaggctgggcacagtggctcgcacctataatcccagcactttgggaggtcgaggcaggccgatcacttgaggtcaggagttcgagaccagcctggccgacacggcgaaaccctgactctactaaaaatacaaaaaacaattagccgggcatgatggcacatgcctgtagttccagctacctgggaggctgaggcaggagaattgcttgaactcaggaggcagatgttgcagtcagtgagctgaaattgagccactgtactccagcctgtgcaatagagtgagactccatctcaaaaacaaaacaaaacatcactcaccctttaaaaacaactggctacacagtactgcattgtatgggtttataatattttatcctgtagcctctcattggtggcagtttccattgattgatggagtgtcacacaggtggaggtttgcacagcactactgctatgttagaacatacaactgggcatccactaattccatacgtgcattttcatctcctacagggtgtgtggctggaaatgcagctccatggcttaagcccttgctttaggtgtctggccaagtagatcatggccaagcagaggggagttcactgttttctggggccaggcaagaaccgacactggcagagccaaagagagtcggcatgtccaagagtattgggcaaggggctgccaaagaggcagggtgaaatctgctggagagtcactggcctccctattccacaagtaagcgtggcaggggtcagtagaggagagagaagagagagagagcagattgcaggagaggcctcaggcagcctgaagaggaaaagtgcctcccctccctggccctgctctggtctgggtgtcccctcaggccccaggcccttcacagggaaccccagataagcaatttgccttccttgggtgaggcaagagtttgccctttcggggaagcaggttgatgatactaggggcctgggggtcaagggcttggctcctttggtcaactcattgcccctgaggtccactctggggtcactagactttctttccctggaggaaaccccatgaagggcccggagcaggcttgtatgtccacctgattgtcaaagctgccctggcatggcaggctgtctgtctgtcggcccctgtcacctgtcctctaagcctctccaccttctgccacaggtgccctgaactctacctgcctcctcccttcctgccactgggcctctggcccaagttgtttcctctgctaggaaggccccctgatctcagctctttttcagggctctaggctgtcctttttgagtgtccctgggtgctccagtgtgacctgacgcacagtggactcccctgtccctatccccggccagctgcgtagcccctctcaggggccatgcccagctaactt

SEQ ID NO: 527 - DNA, 6000 bp, Homo sapiens
tgagagtagagggaaaacacgatttgaggagagtttttcctaaaacacggggcaatcacagaacactcctgggatggttgttcctccctttacagattaggaatgggtccagaggtcatggctagtttaagagaagttctacagtaagttaatggtagcagaatcctagatctgaggtctgactttgctgtgagagggagttgcggtgggcggggaggagggtttattcttgcacgtgtgggtactgatatggtttgggtgtgtccccacccaaattttatcttgaattgtaactcccacaattcccacgtgtcatgggaggaacttgttgggaggtaattgaatcgtggggctgggtctttcctgtgctgttcttgtgaccgtaataagtctcactgatctgatggttttaaaagtgggagtttccctgcaccagccctctctttctttgcttgccgccatccatgtaagacgtgatctgctcctccttgccttccgccatgattgggaggcctccctagccatgtggaactgtaagtccattaattctctttttcatcccagtctcaggtatgtctttatcagcagcgtgaaaacggactaatacaggcatcaaggcacccacaggctactctggggagactgatgtgtcagcccattagtgcaataagcagggaagctctgtccagggaagagtatgtctgggggcccagaaggggtgggttaggtaaggcttcaaggtgattcaggctctgaaccatgaaaagagagttcagagtttaccaagtggactggaaacagagtgttccaggctgagagtggcaggagctgggacaaggaagtgtggcacagcttccttgtggagagaaaattggaaaagtgcaagacaggcccagggaccagttacagtggcttggtgagagagaagatggctgaggcaggactggtggtggtgagatcaagtgacaacacaggaggtagaactgatgagctccctaatttgagaccaggtgctgtatctcacgcatgtaatcccagcactttgggaggcttgaacccaggagtttgagaccagcctaggcaacatagcaagaccctgtttcttcaaacacacacacacacacacacacacacacacacacacacacaaattagccaggtatggtggtgcacacctgtggtcccagctacttgggaggctgaggcaggaggatggcttgagcatgggagttcgaggctgcagtgagctatgatcatgccactgcactccagcctgggtgacagagggagaccctgtttctaaaaaagaaaaacaaagatctaatttgggaccatgagtggcactcacttgccatgtcctgttagcctggtccctggatgcctgtgtgaagggagacagcctcataaaccagtccactggcctggaactcatgccctagcaagaagtgcacttctgttgtatttgagccattacatttggaatctattggtcattgcagcagaacttaccttcattaatatagcctctccctagctgggaacactataccaaatcatgtgttgggggagagaggaagaaacgaggatattcctctcttctttgaagcttacaaatttcgttggaactacgtatggaaaaggagaacatttaccaggctcttcagatctaagagttgcctgttcttcgagtgggcatactgcctctgtttctctgggctcctgagatgacccagtaccttggagctcctccagccctgggagccagcagaaaagccacctgttgtctgtaaggaagtacccacaggcctggctgagctcattacagcagagagccagcaacgcttcctcctcttagattccgtcatgttagacaatctgcctgctctccccactaaccgtcaaagttccatggaatgaacttgccactttttcaggatcctaaccaccgcactttcctgctacctctggcacttggaatttcagagacaaaaccccttttttaggcagcgagccctgattttcagttccaaagctatgggcactgctgagtgggaccagaggagtggtgtgcagtgagctacctggaggggttgcatgagaccatgtcccctctcctggatggaggtgtcttctggttgccaagaaagtattgagtgataatcagaaaaattccttgattttcatggtttgttgctttgtagcaggtcttaaggaaaaaaaaaaagtttttcatggtttgggacaggtccttagagatgggccacaccagccctggcacacctgagcccagtgttgggccacctcacacctctctcgcctctcttccagctttatctttgtcctgctctttctggagtcctttccttgcatcctgccagctggcatccccttcatccttgcacgcctaccttctacacaaagccttccatgaccatcccaagcctcagggctgattccgtgcagtgggcaggctgtagcctctctgttcacctctctgtgtcacatcttactgggtacatgcccagtaaattccccacaactgagattctgctttgcctgagcagtgccctctggctccttagggatgatgcttgctgaggggtttcctggctttaaggtcatggttcaggctgggctcagtggctcacacctgtaatcccagcactttgggaggccgaggtgggcagatcacttgaggccaggagtttgagactagcctggccaacatggtgaaaccccgtttctactatagccgggtgtggtggcaggtgcctgtaattccagctgcttgggaggctgaggcatgagaatcgcttgagcctggaaggtggaggcttcagtgagccgagagcatgccactgcactccagcctaagcgacagagccagattcgtccccctaccccccaaaaaggggtcatggttcagacctccattgtaggcccacccccttgctttactagctgagggaccttgcctaaattctttagcctctaggagcctaaatttccttatctgcaaaatggagattaataaaacttaccttgcaggacctttgtgaaaaaaacaaaaacaaacaaaaaaacttgagaagtcattcaaagcacttagttcgtgatcaataaatattagcttattgtttttctaagacgatgagtaggatttttcatcaaaaataaatcattctggttgccttgggcaaaataatctgcaatataaaatatctataataaatggctgctgtgtattcattgctactgtgtgccaggcaccatgttaaaacactttataaaaatgatctcattgaggcctttccacaactctttttttctttttttagagatggagtttcgctcttgttgcccaggctggagtgcaatggcatgacctccgctcactgcaacctctgccttcctggttcaagtgaatctcctgcctcagcctcctgagtagttgggactacaggcatgtgccaccatgccaggctaattttttgtagagacagtgttttaccatgtttgccaggctggtctcgaactcctgacctcaggtgatccacccacctcggcctcccaaagtgctcggattacagacgtgagccaccgtgcctggcccttatccacaactcttaaagtaggtgctaatatttgcagtaagtagatggagatggcttatctttcgctgagttagcttggtctgatttgagctggcaatacactgccttccaggtcattgtcctgcctgtgggtctttgcacatccagaccacacttccttcctctttacctaaatctacctctttctcatccttggagagaagtatttgcacccttcctttgccctcagtctttcttttttattttttcatttcatttcatttattattattattattattattttttttttgagacagaatctcacagtcacctaggctggagtgcagtggaatgatcatggttcactgtagcctcaaactcctgggctcaagcaatcctcccacctcagcttcccgagaagctgggactacaggtgtgcaccaacaagcccggctaatttttgtaggtctcgctatgttgcccaggctggtctccaactcctgggctcaaacgatcctcccgccttggcctccctaagtgctgggactgtaggcatgagccaccgtgcctggccatgcccaatctttcttactgcagttggtgatacatggtttttgttttctctatacatgtattttttggtggtgtgtttaatatctgtcttttcccagactgtcgcctccgtgaaagcaggaaccttgtcagttttctctccaagttatccctccaacgcctagcacagtgcctggcaaatgtaggagctcaacagggtttgcggaattattatgtgtatgtctgaaggaaggatgttggcagtgcgcccaacgtgtgaggggaaccccactctccaaggttccagtggctttaaaggtgtcctcgagaaaatcagaggaacagggggatgcttgttttccttccttccttctctctctctctctctctctctctctctctctctctctctctctctctctctctctcttttttgctttaaagtatgctgaaaggacactttaaaccaagtctgaatggctcggcaggactggggcgcgggtgctggcaggagccggagaggcgacatctggccatgggagcatttgtttcaaagttcaaggccgttcgctcagggtcaaggttagtccggcgggccgttcggagaccagccccagcgtgccaggaccgtttccggggcctggccggggcgttgccgcggggtcggggaccagcacgagtgctgagtcacgccccgcccgggagcgcctcgggtcagtaactcgggaagacgaccaagcgggagcgggagcgggagcgggagccggagcgagagcgcgcgggcgcggccgacaggtgagatcgcgccgccaggcgggctctcgagaccccgggcgccccgggcgggaccgggacccggaagaggggcgagcggattagaggcctggctcacgccgcgtctggcgtggggaggtcggtgcgcgcagttgtggcgctgcgaggagagggatactcgactcaggcccgcccctctctgtctcccccaaaaaacgcaacagggagatgtgctcctggccgagggcaaagaaaactccaccctcctggtttggcccctaaatccctgctaagttttcctaaggaagatgggcttaggccgggaagggcgaaccggggaagagggaacacggggcgggtgtaacccggatcttgcgaggaccgtccgagggtccgctgggtagaagcggccggtccggacagaagcaggtgtgagaggaaagggagaaacctcagtctctaagaggaaagaaactggagtcaacccagtgcccataggctcgggggagctggggggtgcagcactaggaagtctgcttctcccttcccgaagccctgggtgctgcagggacaaagaccagcggtgagtaaactaactctgatgggacgcgtgcagtccacctggaactgaattagtggcctatattggggctctccttccaacaccacctgatcaacacaccctacctttccctacaaggagagtctttttgaccctggaatttaaggtgaggatggggagtggtgaggtctcttgggggctgatgatcctgtaggaggacaggcatagggcagagagtcagatatagtttgggatgggacttgcaggtttctggactgtgcacctgtgttcaaaagcctgtatcaggttccagtgtgcgtgcatgcacctgccagagagccccgggatctcagatcacacctgccctcaccccagcacctagagaggagttctccaaggagcacagtgtgtcaccaagaagagggcactgagccccagccagggtgggctgggcaggcttagcactacctagcccagaagtgatgggctgggcaggccggtggactccagggccag

SEQ ID NO: 528 - DNA, 6000 bp, Homo sapiens
aaagccatgctgcatcctcaacactttgcttagagatttcttctaccaaatatactctttcgttgctcataagttttgccttccacaaaacactagaacacaaacacaatgcagccaaattctttgccactttataacaaggatcacctttcttccacttaacaagaagatgtttcttatttccatctaagacctcatcaaagtagcctttaccgtttatatttctaccaatgttccacttgcaaccacttaaataatctctaaaatgattgaagctctctctacagttctcctcgtcttctgaaccctcactagaaaaaccctttatagtccgttcacagaaatacaagtttttttcagcatgaacctcaaactcttccagcctctacccattactcagctgcaaagctccttccacatttttaggtatttgttacagcagcaccccactcccagcacaatttcttgcttagtctactcctgctgccatagcaaaatatgttagactggataatttataaataatagaaatgtatttctcacagttatggaggctggaaagttcaagatcaaagtaccagcagacgtggtatctggtgaaagtttgctctctgctccacagacggtgcctgttgctgtgacctcatatggtggaagggcagaagagcaagaaggtacaaacagactccctcaagcccttttataagggcactaatcccattcatgaaggcagaaccctcatgacctaattacctcctaaaggccccactccttaatactattgcattgaggattaagtttcaacatgaatcttggagggacatgaacattccaagatagcaagatttatggcactgttctatctaaagcaggtattttataacctaaaaaaatcaaaaccatatacgatatccacatgcaaaagaatgaagttggacccctttccatacacaaaaattaactccaaatggataatagacctaaatataagagctaaaactataaaactcttagaagaaaacataggaataaatcttcatgatcttggattaggcagaaccttcttagatatggcattaaaaatataagcaacaaaagaaaaaaataggtaaattgaacttcaacaaaagtaaaaaaatttttttttttttgagacagagtcttgctctgtcacccaggctggagtgcagtggcatgatctcggctcactgtaagctccgcctcctgggttcatgccattctcctgcctcagcctcctgagtagctgggactacaggcgcccgccaccacgcccggctaattttttgtatttttttagtagagacggggtttcactgtgttagccaggatggtctcgatctcctgacttcgtgatccgcctgcctcggcctcccaaagcgctgggattacaggcatgagccacccctcccggcctgtaaaatcttttttttttttttgagacagtgtctcgatctgtcacccaggccagagtaaagcggtgcgatcttggctcattgcagcctcgacccctcaggctcaagaaatcctcccacctaagccttctgagtagcttggactacaggggtgtgtgtgtgccaccactctcagctaatttttttttttttttccagagacagggtcttgccatgttgcccaggctggtctcgaactcctgggctcaagcaatcctcgcacctcagcctcccaaatagctggaactatttggaactatcccaaaaagcaggcacacatcaccatgcctggctaatttttgtattttttgtacagacagggttttgccacattgcctaggttggtcttgaattcctggacttaagcgatcctcctaccttggcctcccaaagtgctggcattacagatgtgagccaccatgcctggccaaaagtaaaatatttttatacttcaagggcaccctcaagaaagtgaaaagaaagacaactgccaaaataggaaaaaatatttgcaaattctatatctgacaagggtctagaagtcaaaacgtagaaagagctattacaattcaacaataaaaagacaactcagttcaaaataggggcaaaggacttgaatagacatttctccaaagaaggtgtacaaatggccaataagcatatggaaagatgttcaacttcattagccactggggagatccaagtcaaaaccacaatgaggtacgacttcacacccaccaggatggctataatcaaggtttggcaaggaactagtggaaccttggtttgatttggaaaggaggaattagaactctcataagctgctggagaaatgcaaaacaatgcaatcacgttggaaaacacttcctcaaaaagttaaacctatagttaccacatgtcccagcaagtccactcctagatatatactcaggagaaatggaaacatatgtccacacagtaacctgtacacaaatgttcataacagcattattcataacagctaaaaagtagaaacaaccaataaatccatcagttatgaatgggtaaacaaattgtgatatgtccatataatataatattattcagccatgaaatggactaaagtactgatacatgctacaacatggatgaaccttgaaagtattatgttaaatgaaacaagccagacacaaaaggccacatatgctatgattctttttatatgaattgtcgaaaatgggaaaattaacagagagataaagtagattagcgttatgaagaaatgagaaatggccaggcacggtggctcacgcctgtaatcccagcactttgggaggccaaggtgggctgatcacttgcagatcaggagttcaagaccagcctggccatcatggtgaaaccccgtctctactaaaaatacaaaaaaaaaaaaaaaaaattagccaggcgtggtagcgcatgcctgtagtcccagctactggggaggctgaggtgggagaatcgcttgaacctgggaggcagaggttgcagtaagccgagatcatgccactgcactccagtctgggtgacaaatcaagacttcatctcaaaaaaaaaaaaaaaaagaaaaagaaaaagaaaaagaaatgagaaatgaccaccagtgggtataggttttatttctggaaagtgatgaagatgttctaaaattgactgtagcggtggctgtacaactctgtgaacatactaaagccattgaatcatatacttgaaatgggtgaattatatggtatgtgaattacatctaaagattgttgttactaaagaaaaccatatacatggtgtctggtgattgaacaaattacgcacttgttgaaacttgtgtctctgaggaaaaactctgcttaatgcacattcaagtgtcaagtttcagaaggacagctgtcatcagttaaacgagtcaaaaacagtcatcaccctcaatgtcatttcggctctttaatggatcccctaacaaccactagcatctcttgggcattagccacttcataagccacttgaaacctgccaagtgtacattttatcattagctggaaggatgtgtagaattccaaagtcctctctttgattttataggtgaggaaactaacgctcagaaagggggttgatatctatcgccgtgaggcatacggtaagtttctggtgaagctgggatcagaacctgtttagactttgcctctcttttcccgcagatactttgcaggacttctatgtccctcaaaccggccttcctgtcatggtcaggaaagaaactcctcacagcctcagcatccaagtcaggccatgggtgacagctggaaagtgatcaggaggctgcagtttctagaagagggtggggacactgcggagagaagatggggccagattccgagaagacagcataagcccctgttcctgtaagagcagggacggaagcagggacataaacgcaagggatgagccccaaagtgtgacccatgagacatgatgtcacatgtggtctggagcctgcggccacttcttcccatcatatacacagttatgagaacaagttgtgagaaccacctcctcccttacccagctgcccccaccccagaagccgtgtgattttgccccccagtgccctgtgagtcactccacccatggaaacctcaccccaccctgacctcaagcaaggcagagtgcagaagacatgtcctccggtgctaccagaccactctcaccagcacccacgacctcagcagggctggagccagcgtggaggccactggctgtcctcacaaagcgaggagcaggagcccctgttcgaggaacatgcttggagttcggagcctgggctagggtgggatgtaggttgagcaggaagtggatggcaagattagagcaacatctctcttctcccactcagggaggagggaatggccacaggctctgacactcaagaagggccaggcacagttccaagcacttcacaacaacccctagggtctacatgacctacaatcccaattgttcagtgaagaaactgaggcacagtgaggctgaagaaccctaccagtccacactgctggtgcataaccgagctgcccaagccccggcggtctggcgtgtaggcccatgctctgagccgccgcctctgcttgcctcttacatcccacacatgcgatgctgtgcatcagaagcaaggagatggccctgctggcctgttcatcaacaccagggccgagtctcaaagtcctcagcgccccgccctcctccgcctgtgtgccctgagtccccgagccccagcagctctactcggcagatgagcctctggccctgctgctcgcttcctgagggctgtcagtggggagccggatgagggctgaggacagggtgggtgcttgtgggaggggagagcacaaaggacctgtgaccacagctgggggcggggcaggaagtagaagtgatgtgagtggtggctggtgcaaggagccacagtgggctgcctggggggctgatgccaccattccaggagcctcggtgaagagaggatatccatctgtgtagccgcttctctatacgggattccaggtaaggagagagcagggattggggggcctggggccctgggtggaggggaagaggctgatggagcaggaagtgctgtgacctataagacaagacacctgggtcacagacggtgcccatcactaactcgctgggcagccctgtgtccaccctgggcctcagtttcctcatgtatgaaatgaagaggtagcgtgcagtttctaaggccctgcaagtgctgacattaaagcttctaagaaagctggaaagaggctccctgggacagaataccatgagagtcaggatgagggctgagttcactggattagggttatgactgtgcccgcctcctagctgggatgagcccagggcctttgaagattcccctggcctctttgcctccctggggcgagccacgctgcctgaaattccacccttcaagtcacacctttgggcagggcaggaggctccagctataatgggggctctccatagccctcttgtctcagaacctgtggtacccaagggcaaaggcctttgaagagctcagcttggataaggttaggcttgggtaaggttagagaaaggaggttccagatcataaacaggcccaggcaaggccccagaaacaccttaaaattaggaagaaccttccagacaatcattgtccatagtaggcaataggggggcccctgtcactgccgaaggccacagagcttggcagggagtggcaaagaggggaggggcagcaagaaaggatctgaagagcaaccatcgaggcctctccccacacaaaatccaagggtgtggtcaggtctgcccctttttttttttttttttgaggcagagtcttactctatcacccaggcgggagtgcagtggtacgatcttggctcactgcaacctccgcctcctgggttcaagcgattctcctgtctcagcctcccaagtagctgggattacaggcacccgccaccatgcc

SEQ ID NO: 529 - DNA, 6000 bp, Homo sapiens
attgccttcctgtaatgcaaacatatccattgtaagtccatgcctctgccaacttcatgtatgattttatcgtgacattcccttttaaaattatagtgctatattgatttcaagatagtaaaagagagttacaaaacaatatttgttataaacaggggtgttggatctggttggtttaggacttactgatctacaagcaataaaacctgcaggaaaacagtagatctgtagctctcagacaagccttgcaaaggtctagcatgccctagagagggcaaggggcacgttggaaggactaatcaacttgttaggatcaggtcctgatggggatcgaaaccagcttccagcaacaatgtgagagggctaggctgggcttagtcaatcacacggctcagattggaatcttatttgagtacaccctggatgtatgcggagggtgttagaccaataattcttggccgggcgcggtggctcacacctgtaatcccagcactttgggaggctaaggtgggagaatcactggagcccaggagcagcctaggcaacatagtgaggcattgtctttataaattaataataataataatagtaataattattgagtgcttatggtggatcaggcctcatatgtgatgggcacacacatacatctcttacaattgccacagcagtcttagggtagttgttaattcttgctttacaaaggaggaagcccaggcttggacagttacaacaacttgctggaggccacacaatgattcctgggtagaaagctgtctccctgccttcaaagctattttgaggccacacaatgattcctgggtagagacctgtctccctgccttcaaagctattttgtcaaaggaagtttatatttattcagtgtttgagaaacagctgctctcagtttttaatgttttgctaggagtgactgtgcagcctggatagcaacaatggtgggtgtattagtccgtttcacactgctattaagaacttccctgagactggggcatttataaaggaaagaggtttaactgactcacagttccacacggcttggggagggctcagaagacttacaatcatggcggatggtgaaggggaagtaagccccttcttcacaaggcagcagcagagagaagaacgaaggaagaacttccagacactcataaaaccatcaaatctcatgagaatcactcagtgccatgagaacagcatgggggaaaccacccccatgatccaatcaccctccctccctcgacacatgggaattatgatttgagatgagatttgggtggggacacagagtcaaaccctatcagtgggcttctttacgaaagatgaggtttccttgggaaataactcttggctctctgagggcttggccactctgactttgatcaaactggcaactggggtatgtacctgagtgaggtcagggggcccatgataactcggtgacttgctgccccttgctcactccagttggcaatgtcggggcatttggtccctgctgtgggggctcccatgtctgtctggcccttggcctctcctcccctggtggccagctctgctgtgatcagctgagcctgctgctggagctatgtgctggtttcctgcctcttcttgggcattctgggctctaggaactgtttgttggtttcctgtgggccattcctttccaggatgggcctagaggctgcaaccctcctaagatctgcccacacccctgtcctgaggtgagcttctcaagaaggtccccggctgagcaaggggtgtcaggagcaagaatggaggcaggagagtgtgtgcgcctgctttttagagtgggagtgtgcactcatgcatgagtgggaggctgtcattaacttggccatggatggctgccattttaagcagaaccagatttgctggcatgaattgtttaaatgatggcaggcacaagcactgcagggagatcctcctagcctaaattaaagaagccacagagggaaaaaatcccagaccatcttgctccacacctccctcccccgtcccaagccttccgtcatctgcgggaatttcagtgcctcactgacacctgaatgacaatcttttgtcatcctggaaggcaccatgatggtaccaaaggacaactggggagcattggttccctccccagccccaaacaaacacgttcttcatcagcctccttaagccatcccaaacaacccacacgcttaatacaactatcgtgccttctatccgggcaaagtgccatgtgtctgtagacacagctactcaggaggctgagacaggaggatcgctcgagcccaggagtttgaggctgtagtgagctatgataatggctgtaaatagccactacactccagcctgggcaacattattgagaccatgtttctaaataagcaaacaaaaattgtgctttctctgcaaacagagtgtctagggaagtgctttttactttcttgtgcattaagatcatctggggaccttgttaagctgtagattctgattcaggaggtctggagtggggccccaagaacctgtatttataacaagctctcaggtaaagccaatgctgctctcagggaaaccacactttcagaatggaagttccagatagccctcctctgcctctgaccagccagctatgtgcctgctaacgtcattctgctgtcagagggagtgtggggtaggagagcagggtggtctgaagtctttctctctctctttctctctctctctctctctcacacacacacacacacacacacacacacacacacacacacacacagggcttcatcggctcagagagttgcaaacccagacccatgttctaggctgggctctgccaggaactgctaggagtcgcatctctctctggacctcagtttcttcacgtgtatttgtgtattctctggggtggagctggcgaatagctggagacccctctagccctaccattttttgattctaattaaccaaaaaggatattcgaggtccccgctacaaattctgaacccttggcttcccctccaaactcccacacaaactccaccccatcctgcctgtgtgtctttgggaggatcatttccttctttggtcttggtgtccttgtttacaggttgagggatgataagagtcacctgatctgggcaagtcaggccataaataaggcttgtatgtaaaggtgcctagcatagttcttggcaaagcaaggatcagtcgatatgattgcattggtttgagcatctgggaagaatgagcagactgcatactgtgtgttagggtgtagggaggaatcagacgtgaccctgccctctagtcatctgggtgcacagattctagattaaaggatgtgggggtggtaactaacaaggagatggagaggaggtgtgcagttcctgggggatctgatgaagaattaaagcagaagggtaggagatggagaatgggaaggcatacctgaaaccctaaagcaactcttgatgagtaggcattggcaggaggccccagaacattttctgaccctcaaacactgagaatgcatgtctgctggggaatagtagtgagggggctaagggtatgggggtgttcatgcctgagtcaggggctctggatggtagaaatgtctgggagttctgacggaatgggggtgaggaggcctaaagataacctgttcatagtctttcagggccttaaccattatggctggggaagtgggaagtgccgatggggtatgcagaggagggcagctgtgatagtacatttcatcctgaaagcactacatgtggataatgacggtagtgatgatgccctaattttagtgtcatggcaacattttccaaggggatggaattgggtaccctcattagtgtcatttttgtttgagagatttcaagagtctatctaggtgtcattttaaaatctattgaaaaaaaatcttgaatgcaggtcactgaccagttggttccatgtaactgcactgccttctgctaccactaaagcaatgttatgacaacctggacaagtcatgggaaacctatgtgagacttagttttttctttttctttttggagttgggggtctcactatgttgctcaggctgatctagagctcctgggctcagacaaccctcccgcctcagcatccccaagtgccgggattaccgatgtaagccactacacccagctgagacttagttttttcatctggaaatgaaggcgacctttgtgatcccagtgggcccttgcacttgtgtataaggtgattcccagcactgctcatgaaagtagtgatggcagagtagcctctgctctccattttatttttggggtgggggggggcagtggtggaggggaggatgaggatgatatttccattaaataagtttccttgttgcttttcttcaggcaccactgacctcgatggaaaaatgaagtccctggcccaggaaagagacccaactctgtggctgttttggattagtttgtacaatgccctgcagacctactctctcaggaggctccaagtgaccaaatgtgacaagaaagttttttgtccaaggcagtttggaagagaagttggtgaccgtcgggataccacagccgccccaggacggcctggttgagacattcactggagggtctgggtgcagcccgctgcctggccggtaggcggcgcgcacaggccgtggggcccgggtctgggcgtgcgcgcggctggtagcagcggggccgcgcacgccagggtccgggagccgggccggtgcccccggagccatttccgggaggggcgaggccggcggctgccgggcctccaatctcggcggcggcggcggcaacaggggagcctgggtctcgcggcctgcgagtccgtcgcgtgctgagggagacgcaggaggtggagccggccgggtgctcgagggaaggagactggaagctggttccggcgtgaggaggtggaggggccgccgcgggctccggggggcggtgagggtcgggacggaggcgccgcggggtgaggagaggacaggggccgggtgggccgagggcgggcagaggcggcggggcggctgcggccggggcgggggcgggggcgggctgaaggcgtgggcaccagccgctgaggtccaagcaagtggacggcgggcgggcgcggggccgcggtggggcgggtctggagcccacgcctgccgcggggtaggcatgggcggccaggatttgctggtcctccgacgggaggggtgacaacgagagcgaggccgtgctgattctgaagggagtgcggaggaggcaggaccctggtagcctcggcaccttcagcccgggttaggtggcctgggctgggctccccaccccgatcgcgcgcagacggggcgtttcccctagtttccacctgggtggaatgctttgtgggagtctgggtctggattagtttcatcagctgtgggagggaaacctagttgcagcaggattttgattcgctggtctggggtgctaggggtggactgtgatatctgggaatgaaatctgagccttcaaaggagggagagaaccataacttggctgctctggcgaatctaggcgggctggcgagacagtttaaagctctagaagtaaacaaacctggttcccttttacagagtctgaaaaaggggagcgcggagaggaggctggaagaggaagatgcctagcacagaccttctgatgttggtgagccttttgcagacatcctcctggttccaaggcatttgtctccgtttttttagtccaaaggatcccagtgtgtagatttcacctctgatgcttgcttttggtagctgagcgttttgccaccttttattttgttttgttttgttttgtttttttggagacggagtctcactctgttgcccagactggggtgcagtggcatgatctcggctcaccgccacctctgcctcctgggttcaagcgattctcctgcctcagcctcctgagtagctgggattac

SEQ ID NO: 530 - DNA, 6000 bp, Homo sapiens
ggaaggaaagctgcctgcaggcatttctcatttgagaaagatccttggccaggcacggtggctccggcctgtaatcccagcactttgggaggccaaggcaaaaggatcgcttcagctcaggaattaaagaccaaccggagcaacatagtgagacattatctctacaacaaatttaaaaattagccatgaggccgggcgcggtgactcatccctgtaatcccagcactttgggaggctgaggcgggtggatcacctgaggtccagagttcaagaccagcctgaccaacagggagaaccccgtctctactaaaaatacaaaattagccgggcgtggtggcgcatgcctgtaatcccagctactcaggaggctgaggcaggagaattgcttgaacccgggaggcagaggttgcggtgagttgagatggcaccattgcactcaagcctgggcaacaagaacgaaactccatctcaaaaataaaaaataaataaaaataaaaattagccacatgtggtggtgtgcacctttggtcccagctacacaggaggcttaaggcaagaggactgcttgaacagcccaggaatttgaggttacagtgagctatgatcacaccactgcactctagcctgggtgacagagcaagaccctgtctcaaataaataagcaaacaaataaataaaaattagatatatataaaaggtcctcctatagctctgatagggccatttattaagacctgctataccatttcttgctttagggattacatatgactttttagaactgtggagatgggcagattacttttccagaaatttttttagtacatctttcatgcctcagaagcatctaggggaatataattgggagttgggtagacaggttcgaagtcagtgattgagtcattagatctagatggggtttgggccttggaattccatttttattgttccatctatgattctgatctcagtaagaaccactgatccagtgtagccctcttcttttttgaagatgagaagactaaagcccaaagggttagattgcattcattataaggaagactttgaatgattaaagagatagtgaccaggggattgtatgtgactgaatttactttttcttccttcatttatttttttgttttaagactggaaaatatcaaaggcatctttgtttttgggaatccccaattgtcagtcattgctctgggatcccgtgattttgacatctaccgactatcaaacctgatgactgctaaggggtggaacttgaaccagttgcagttcccacccaggtaagcttgaagaagcctctttcccttattttgctccatgattttggaagaacttgggtggtacagtaacctgaagtatagagtttgactgctagaggctagcacgttagtagcaactgtagtatataaaggatttctctcttgccacctggaattattagatacaaagaacaagaccattagctttaaactctggcagaattaggtgacagcctcctagaccagtggttggtcatgaggtttttctctcagtctctagcctttctactctccaatccatcttgtacacagccatcaaattgctcttataaaatacttgttacctggctaatatttagttcaagatcttcctgggggtctctaatcattcaggcctgctactgccttctttattagacttttctaacctaatcttccatgatgcctttgagtaaatgcaccactccaactgagtacaggtctgttcatgtcctctgtgtacagcttagccttccacacgttggtgcattgccagtcccatctggactatctttttccctcttcacaattccagtaaaccccactaaattcctccagggcgaggtagaatttcttctgtgccctgaagtcctttaagaccccagccatgtggccctgtccccatgagagcacatgggggctgattatctaagataaaagtgtctcattgatggtgacgtggttgaaggaatggtggtggaatttgtgaggggatgggtgggacaaagcagccaacactgttcatcctcttagcatggttctcagtcatgccgagaagctctgaggccagcccatgcctgacaccccaagcatgagagagccgagattcccaggactaggaacaacttggatgactacacttgtcagaaatattgtgaaagggcaaccaggaaattcccgtatttggggctgcatcattttagaacattttttctttcttcaaggttcatctctctctgtctcttctttcctagtattcatttctgcatcacattactacacgcccggaaacgagtagctatacaattcctaaaggacattcgagaatctgtcactcaaatcatgaagaatcctaaagcgaagaccacaggaatggtagggacacttggagttttttttcttctcttggaaatttaggtgttggtggagagtttgaaggaatcatatgacccggagtctgttcctgcctctgcccctttgccacagacatcttttatttgttgactggagctgatgatctctgcatcacccaccccttagggttgctgaagtctcaaatgagatacactataaagtaccttgtaagttagagacttctgtataaaagcagctggtggtagtgtccatttgaaaagaaaattttgtcacaggaaagatagtaaacatgttttttctggaattttcttaggctagtccctttatgcagaaaggcagactggaaagtccctgtgaaaaattgactatgccagctgtttttctgatagaatgatgggatgccttaggtggaaatggggtagggcagtgcacatgcgaagctaggactcggggagaaggggctcattgctgcagttttattcttgcttttggacctggcctcactaataatgtctctttctttggatttgtagggtgccatctatggcatggcccagacaactgttgacaggaatatggttgcagaattgtcctcagtcttcttggacagcttgtacagcaccgacactgtcacccagggcagccagatgaatggttctccaaaaccccactgaacttggaccctttctagtctcaaggggattccagccttcagaaggttcttgggatatggaacaggccgtgcacaactttgacatctggtcttgctccatagagcacaactcaagatagaccatgagacagcttgagcctcaggattcttgttcttcctcttatcttccttttgtggtttttaatttgaagaccccagagaattccattacataatgattttgcccttgttataaatgttaccctaggaattgttttaaccatttccttttctaaactctctagctttcaactttacttaaacattgtgtggtagctctgacctgtcctgattctttagagaagctggggtacagtttatgagatagctagagcttctttgttatctcaggcaggaggcgtttacataacagatgtttcctcagctgggtgtgaggtatactctaagcaggaggctttttcagccttctctctcttttttttttttttttttttttttgagatggaattttgctcttttgcccagtctggagtgcagtggcatgatctcagctcactgcaacctccacccactgggttcaagcgattcttctgcctcagcctcccgagtagctgggattaccggcacccaccaccacgcctggctaatttttcaattttctttttcagtagagacgggttcaccgtgttggccaggctggtcttgaactcctgacctcaggtgatacccgcccccccgcctcagcctcccaaagtgctgggattacaggcgtgagccaccgtgcctggccctgtctctcttaagagtaggttcattgtctgtcttagagtcacttctattgcaactcattttctttttccagggcacagatcgaccaagctgccgttccctattctgcaggacaggactattctagcatacctgcttcgtccacccaggcagggtttggggtggtctcttctgtgcctgcagtccccatttgacacttggttgccaccatctttggagattattgtttggaatgatgcttccattggctttttcttgttaccatggactaggaagaaaacatggtttccaaataatctgggagcttttggccatggtgccgccttcctgaattggcagtggtcagagcacacctgaaccctatcctgggctggtgatgagcagaaatcagacctttttctatgcttttttgaatatcagagtaggatgaacacccagattcaaatatgtcaccaaagttggtggtggtccttccctgcacccttgcgttaagccattatgtaatgaaaatgtgtttgcttgaaggaacagctcaaagcaccttcacaagttgccttgacttaccctaggtgggtgtgaaagagcacccgtagcaaggaaaattttctctattagtgtgttcttctgcctcttcccccttgattcagctttcagaggtactatggcagttttgcctcaggtgctgaacatttctcagccctggctaaaagggagcagcacagggagagaaacaggataggaaagcagaatggcgagcagcctatggcccagggcctgtaatcccttcccaagactagctgctcagggtggtgcagggacaggaccagaccctgcgcctatttcctgccttctttcccctatagggaactctgtaggctgagccactgtcctgctcttatgacattatatcttgtgcctttctcctcagcagtgagcagtgagctactcctggcccaggccctaggggaaatggatcagtctttgaggtttctatttggggaggggagtacttaagatgagtcaaaagacactttcctctgttccattccccatctcagggactcctgaatattcagcctctccaggctggtgtcttctagtttcccccactgggaatgctggctgggagagccatgactaccagacttttcctcaggctccttggcatgttagtctgaattgttcttgagcactgtactactgacccaacaactgtgactagctggccacgccattcagggctggtgtggcatttatgtgtgtgtgtgtgtgtgtgtgtgtttttcctgtttgcccagcagtgcattgtgggttccaagagtgggtagtgtgtgtatgtgtgtgtgtcagagggagacctggcaggcacctctttgagagtagctgtggtcagagctgtttggtcagtgcattatgttgaatgaggtccaggaacccagagccacccagcagacaccactgtggcttgccagctgccaagatggagaagcatgtgcccctgtagagcgtctccccagaaccagaccccgagccactcgcttcctctgtgctgtgacaacattggtgccaggggagatggtgtttttcaaagggacctactgtagccactttaatttacaattaagagccttagtttgacttaacacttttgtaggcttttcattgtgtatttttgtgtatgtgtgcatatagcagctactctgtagcagaggtgggtagagacacttaatagtatcatgtcgcatgcagatgtcacatcggcctctgcaaaaactgtactgtcttgtttctgcattagacttaagtagtcatgtgaatatactgctatgtcacttttaatattacgagttttatacttggaaaatggtacttgcttcttttaaatctctgtcttctctaacctcccccttcccatttcaatgctcccttcctaatttcagcaataatctcaaaaagcaattaaatagttaaatgaccctaattgtaattactgtggatggttgcattcatttgattacttgggcacacacgagatgacaaatggggcagtggccatgcttgaatgggctcctggtgagagattgccccctggtggtgaaacaatcgtgtgtgcccactgataccaagacc

SEQ ID NO: 531 - DNA, 6000 bp, Homo sapiens
acaaattaaggtattatgaaagcatggtcattcaaaggaggcacccgttctgctgctcctttgtaactttcttttgcccgcctgtttttcctctgccctcctgtttgctgctcctttgcaactttcactccaagctttacaaacatttttagtgtcttaagtttcctccttccccacaacacacaaattcatatagtccagccctgtgtattctatttccagagccggggatagcttcccttttcttcttctgccaaatcatgtttctgccttattttaaaagtctactcaaaattcatctacagcaaaccttcttagatgcattttttctacagggagaatgctccaatcactccagtgatttcatcagcacacttacttgatgtaagctcttatattttctcacatttgcagtatattcaccattaggttgtaaacttttggaggcagccagtgtgttcatttttcccttagggcaccctgcccttctacatatagtagaaactcaggaatttggttaagcaactttctattttccccaaaccttaaaagagctgtctgcaatgaccatctcagacgttgttagtttcagaaagtttccctaatttattttaaggaaagaacagataagatgcataagataagggacattctctggctgtaggctttctttagcacatttcaggattattataacataaaagccttgccctattttccttaagcagcacgcggctgcctagtgtacttgccttaggaggtcaaacacattaggtataccaacatatcgaccaccaaaagccaatgcacagaacagaggtcctcgggcaaacaggttgaaccatagttgcaaggtcaagccattataatgcaaagcatccaagggtgaccatcatgctttcccctgcgtttctgcaaagcacagattttcccagggattgctgagcaaagagccccttactaaagaaacagcagactccatggaagagtgtcaattttatgatccactgctggtttgggctgatttgcttttaactaattattgatcaccgtaatgactaacttttgagagagccctgccaaaaataaatattccttaaatgaggtacaccaatgtttttttccactccagtccttgaaaatggtgagttagagcagagtttcctaaagcatggcctgaatttacggaaccatggtcaacagaatcacttgggcaatttgttaaaatgtattaggttggtgcaaaagtaatcacggtttttgccattgaaagtaagggtcctaatacattcctggggctcacctgagccaggatttctggcatggggcctagagatctgcatttaaacaagagccacacagaagcacttggacagagggtaagaagggaatgtgatactgaagtctcaaaaatacagaagaatagtaaggaatgatcttcatcaatattatcatagctttttcttgttagattataggatcccaggcttatgtcctcagagaacagaatggagagcagatttatagacagggaaggggattggacaggactgtgggcctgcattctattttaggccctgcctctgattgtctgtgtggctttgaagagttcactaagccctttggccctcattttgtaatctataagtgtgtgggcctattattttaatatcctgtctacctctaacaatttctgattgaaatattgaatttgaaaatataaataggcagtataaactcttctgtttatctgtggcgtctgtgaggtaataagcagaagaggttgatagtttcacaaaaggaaagcatgacttagacagagtgcctaaaattctgtcccgggaaccatgatctcctcatctactggctgtctgtgtttgggcaatcacctgcatatcagtttcctcatctgcaaaatgacaatggcacttgccagccaccacttttcagggctcctgagcaggtcaaagacgtaacctgctcaaatgttttgaaaactattaagtgccaatcagattatcagttgtcactcaaatttggattaattaggtcagatattaggtgtcaggtggtgtttaaatccttgttgtccagagtgacatgggaagcactggaagcttaggataccattaggagatcctgaggcttgagtgagaagatcccataaagagcaacacggctcaaacagcgccaagagggcaggctgtgtgccaagatcagcctgggagtttatacaacacttattttagcttcagacatactttagcccctagaaaagaaagtgaacaggaagagaccctcgagatatctttggatgcatcaagaattttaaaagctgcaacttggaattcaaagcattcacttccttttccaacaaaattgagaccctatagggtaattttatactgaagagctcccagttctttaaacctgattggaatttgagatagttggaacaggacaagactcttattacctatgataaaaggcatcatcaggtaggggcaagagtatggactctggaggtaggttggattcatatcccagttttcaacaatttattttgagtcccttggcaaatcatctagcatctcacctcagttttttcatctataaaatgagaaggatgtaacacctgcttcatcaggtggcgatgaggacagatgcgagaatacagtggaatactgaattctggtgactttcaatattctattcctcagcactaacccatgcttacatgcattttatgacaatccacgttacctaagcccaaattattacctgcaacgcagcttggcaaccttcaaacactaaccaaatcaggtatcagagcccttgtttcttgaactttcaaagacagaagatgaacatataaaatagaatattttgtttcatgattttgttactgtaagccatgtctggtaaagaccaatacaaggaaaatgggctgaatctgtgaattacatcagcaggttcagaataaatgatggctcacacaccagaactcatttcaatcatccctaaatttaaaacaggaaaatggttggcaaagttgttccctttcttcctctggagaaactacttgaaataaatatgaatttgaattttacatgaatgatatctcaagagtttgttagtatgattatcatacttcaagtttatggcttatccagaaatcaaacaactatagtaaccagataaaagtccttttttttttctgtaacatataacagtaattagagttttctacttgtgaccttaaggtgtgttgtcatggtcttgacatttctgcagaagtaaactattcaattcagtagtttctgtgtttgcagttatatgtatttaacttgtattttgcatatttaatttgtatttaaatcgctaaaaactggtaactcagaaatgttacgtatagacatcctcatttatccagaatatttgactaaccagacacctaattatgttttgagtggtcctatctatgcatttaatgaatgttcttattttgtagccagcatatgtaatacaggtgattcctttcagcgatgggagctggacaaatctatatgcagggtttttgatcatcttgggtttaaaactcataatggagcaattaaaaccatgtttgttttcctgaatccatgacaacaataactttatcccaaaaccagctgtgaatgttggtaacacgggcactctgctgacctgaaggaatgcaggcacagtgcattttgcacacatgtttgtcggtagagtacttttttggtagagaggaagagaaaattctggcttctttagagaagtggatgtaggcaatccctcctccaaaagtagtcaaaataccactccagagaaccttgactttataagggaaggcagcttctgaatcactgaaagccttttcctccttaattctcactggctggcctggaatgaggctctgctaaaaatgttagaggcagctgttgatataggcatttctgtcctcttttctagtaccataatgtgtgcatgttaaagagattctgcaggtcccttataccttattcatcccttttaaagccttcttcttggaaagtagatgtggaggatctagaattggaaaagtttctgtctttcagaactttgtgtaggtttggtattcataaaacattacattatttgatgtctccccccaacccccaccccgcaatactacacagagatgaaaaatgtgtttaggtagaagatcctcctaaataagaaggaagggtctggaaagctgttatctgggttgtattacaactttgtgtttttttctctcttattaaataatactcaagacaaacacttttataagtaggatcttgattattgaggcaagaagtataatcttaagcagtgagaatgggggaaattggaacacattgttattcccataggatcagcatagatttccgtaatgtccaaattaccttgccatttctttcatttcccaaaaaaagctctttagtgtcaattttccatcaaaaaaaaatctttggaagaagtgagtatttccacattctgctatgccttagggcatcagctgtgcccaaactcatgcttgtaaggctgaatggtcactctgcttttgatgtctctatttgaaaaagcctacaaatccaaagaaagcatgcccccattggcatagtctctgttgtgcaaaggagactttcagagctttaggctccatctgtcatgatcatttttcaaacagactattttttagatcagttttatgtttgcagcatcaagatcacttttttttttggctggtttactcctactcaaattgtttctggctctctgggatgaccagtttctcaaggaaagaaacctcctctgaccaccatatcatcctcccaactatatcttttcatatacgttaatagcactctatctttccttcatagtacttactgtagtttgtagtaatacatttgatacaattatttcattcgtatacatcttcctcaccagcctagggaagggacactgattgttcaccatcatatcccagtatctagcacagtgcctaagggataggaggggctcagtaaatatctcttgcaaggatgttgttaaattgtaaactctgccaaggcctttatgttgaatgaatgaatgaacgaatgaatgaatgcctctaactcttcataaaataaacactttttggaaaaaattgctcatggcagacgtcagatgtaaccacactgataactggaaagaaaaatgaatttagatgggttttagagatagaacaatgtttctaatattcaagcagtccataaatcccttatacttaatgttaaaattcaggatatgatacctaaagaaaggttttactgtacttggatcaaggcacctaccaactttttctctactcataggcaaagtcactaccctgtttaaggaggtctttggacgtttccatctcaagaaacagctcttcaatctctcccttgtattccaccttccagaaccacccagaaattccagtaaagtcttattgacctgattgtctgtcctcttcgctgagttccttttgaatgcagcaaattgctgtgcccttttctgacttccatttcacttttatccagcttcataggagcttaggcccctgcttgttgaggagggcgttcagttagtgctgagactacctgaataggtctggttctagctactcacaactcagagaggtagtgaatgctaggaggtaggaagaaggacattcaaccagaatactaaaattgcatttagatagtccagaaattagacagttggcacagcattagaattccccatttatccttacaatagtttgctgagaatgatggttgggaattgaacaatgagaacacttggacacaggaagaggaacatcacacaccggggcctgttgtggggtggggagagcggggagggatagcattaggagatatacctaatgtaaatgacaagttaatgggtacagcacac

SEQ ID NO: 532 - DNA, 6000 bp, Homo sapiens
tttttggcaaggaatgctgattttccatttatggttataatgtaatgttttattttaaaaacaaaatgacttagggaacaaaataagttgacttaaaaataaattattagttaaatatatatttagtatatacaagtagactacagaaatggcaaaatagattgaagttgaagaaacattgccttaagctaagcccactcaggatgaaattttatctgcccccaaatcaacatctcttgaaaagtggtccctatctttccttgtgtcagttcttaacacccagggggtaggcatgcttctcatgtttgttttcatagaatatctgtgttttcaggggaccaccatatgcaaaaatgtcaggggaggggtactcaattggattaagaagccagggcccacagaacagatgttttcaccctactaacccaattgctgtctgctttttagttgccacagtctaaacattctttaatgcattgtctttttcagtcattgctcaagaggtaggttagtataccagttttcatagtgggaaaaattaggagacttaataatttgctgcatatcttggtggccaagttttccagccctggtcagttaggctttaggacacttttcttaggcttcaggaatgtgagcatggaagtagtacagaaaggaagtagtacagaaaggaagtaatacaggaaggaagtagtgcaggaaggaagtagtgcaggaaggaagtggtacaggaaggaagtggtacaggaaggaagtagtgcaggaaggaagaagtataggaaggaagtagtggaggaaggaagtagtacaggaaaagtggttgtaagccatttaacttactttttttcatctgaactgtgacccccaaattatcaatttgtcttgtgaagtcacttcatttaggaaaagcaatgtaaaagtaaaaattagtatttattgtgtgtactaggtgatttgcatatgtcatttctttaatcctgtaggaaataatatgttctccaggaggtgacaatgtctatatgattagattcacagattacctatccaaatctaagatctccgtcctctctcttcctttcccaagaacccatacatatttctattaattggtagaaataattattaatagactttgtcacttggccactgtgggctctgacgccctctagtgacagaaaaattctttggtagaagaagtaatatccctagatagcagtctacagaattgtttaagcaattatctttacttgagcttgaaactagaatagctaatttgtaacaattaacttttgtaacaaaagaattattatactgatcaaagttctgataatttatcagttaagattttttcagttgtaagaatctagcttaagcagaaactaagaatttgtagagttgggtaactttgggtggtccagggttcaatttcagaaccaaatgcatccagaacttggatagctctaccaaccttgatctttcagcatggtttcctctcagtgtggtttcctctcagcatgagttgactgttttcagctctggcagggccacaagctcccttcacaaccaaccacatcagtttcacatctcacatatttctacttcaaatccaatgaaaaagaaagggtttgtgtcccagtgtttccagtaaagatcccaaaatctactccaactgaatgtgatgtgctgattggcttaagccaagtcacatttcccacccactacctccctccacctacacatatacccaagccctgggattggtaccaatgccactgtgatggttaattttatgtatcaaattagctaggccatggcacttggctatttagtcaaacactatcttagatgtttctgtaaagcaatgttttggatgggattaacatttaaatctttacactttgagtaaaacatttgctttctataatgtcaataggccttatccagttagttgaaggccttaaaaaagaaaaaaaaaaagactgacttccactgagtgagtgagaattatgccagcagacggcctttggacttgaactataactttttcatgggtctccagcctgttggccaatgctaaagttttggacttgccagcctctacaatcacgtgagccaactcctatctatctttccatttattcattctcttggttctatttctctagagaaccctgactaaaagaaccactcacatcaaatagttaagaagaggggagagggacagtttttctaaagacaacttggaagtactattaccagaaggaagaagaaggagaaaggcaggataaacagtcatggatatacactatagctgggagttattaaaatcaacttattgcaatttagtaaaaacaatttggttgacaacattttttaaacattaggaccaaaggggaaaagaacaaaagtcttagtggtaaaaagatgtagaagtttttttttttttttgttttgttttttatcttaactcttcctgtttttttacatagtcaagattcttgtttaagtgttattcagaatgttcagaaaccaggatatcttttgagtagaagctttaacttatatggtatggtttgaataaggatggttgtccaaaatatctccaacatctgttggagtgcctgaaattctattattaaaattttatttctttgcccttgaaggcctgaggactctcaggaatatgctggtaaaataaaaataacctttagagatgcccaaactgttttccccagaacaccagcattcattaggtgttcattcaatagattcttcaaaggattccaaaggcaaagaagtttggggaacagtatatataattacccaaccctttgacattagcatactaagggccctgagaagttttggattcagaaagttttcaaattaaagtaacccagaattttctaagattatttgaccatgaaacatatgtctccccacaaagcacatattcctatctccttgaacttgaggataattagacgtacgtgggcagagggtaggggaagggggtatggcatagaaagagcaggaccttgggagcaagaatatctaagtttaattcctgactctgctatttattaactaaccatctttgccaatgttgcttaagcttttttggctacatttttttatttgtaaagtaagtttaataatcactcatctcactgggctataatgataagtattaagtaaggaagatccacatatgtgagttgctggcttataattcacactcaagagatactgattttgtcaattgtcctttcccctttttttctctcttccctccttccattccttcttcccttacctctcctttccttccctcacaccccttttccttccttctttttacatttttttatttaaatgaacttttcattttggaatagttttaggatttcaaaaaatttgcagagataatacagagaatgcccatataccatcctccttatcccacttctttttgtgtctattagatgctcagagtgtgtgcacaaggctggcacgcccagggtcttcctcatggcactaacagtctactgaaaggtggaacagagacaagcctatcaacacctacaagactggtggtaagtgcagtgacagatgcaaaacacagggtgatggaaagccctcaggagggtaacctaacctagatttgagggcccaaacaggctccagaagaaaatgtcaactgagaggaagcctgaaggatgaacagtgggctaagcaaagggttattaatgtgttattaatgggttgaatctaattgggaagggagagaggttgcagagtgaggtgcagagcttggtggacgatgccaaaggaatactgaaacctttagtgtgtccagtctggaactgcatccaaattcaggttcagtaatgatgtcattatccaaacataccttctgtaaaattcatgctaaactacctaagagctatctaccgttccaaagcaatagtgactttgaacagtgttcaccagagcacgaaagaattacaagatttttttttaaagaaaattggccaggaaataatgagtaacgaaggacaggaagtaattgtgaatgtttaatatagctggggctatgcgatttggcttaagttgttagctttgttttcctcttgagaaataaaaactaaggggccctcccttttcagagccctatggcgcaacatctgtactttttcatatggttaactgtccattccagaaacgtctgtgagcctctcatgttgcagccacaacatggacagcccagtcaaatgccccgcaagtctttctctgagtgactccagcaattagccaaggctcctgtacccaggcaggacctctgcgctctgagctccattctccttcaagacctccccaacttcccaggttgaactacagcagaagcctttagaaagggcaggaggccggctctcgaggtcctcacctgaagtgagcatgccagccactgcaggaacgccccgggacaggaatgcccatttgtgcaacgaaccctgactccttcctcaccctgacttctccccctccctacccgcgcgcaggccaagttgctgaatcaatggagccctccccaacccgggcgttccccagcgaggcttccttcccatcctcctgaccaccggggcttttcgtgagctcgtctctgatctcgcgcaagagtgacacacaggtgttcaaagacgcttctggggagtgagggaagcggtttacgagtgacttggctggagcctcaggggcgggcactggcacggaacacaccctgaggccagccctggctgcccaggcggagctgcctcttctcccgcgggttggtggacccgctcagtacggagttggggaagctctttcacttcggaggattgctcaacaaccatgctgggcatctggaccctcctacctctggtgagccctctcctgcccgggtggaggcttaccccgtcttagtcccggggataggcaaagtggggcgggcgcgggacgcgtgcgggattgcggcggcagcggcgcacgcgggcacctgggagcggcgggctgctgcgggaggcgttggagactggctcccgggggctgttaggaccttccctcaggcccgggtgctcagaacgctggaggacttgcttttcttgggccttgatgcgaagtgctgaccccgctgggcaggcggggcagctccggcgctcctcggagaccactgcgctccacgttgaggtgggcgtggggtgcggacaggaattgaagcggaagtctgggaagctttagggtcgctggagggggaccccggttggagagaggagcggaactcctggacaagccctgacaagccaagccaaaggtccgctccggcgcgggtgggtgagtgcgcgccgccccgcgggggcggggagagagcctgcagccttcagaacagatattgctcattttctggcagttctcagacgtaggaaataagtcagcaccgaagcagtggttaagccggagggctcggaagaacggcaccttttctttctcgaaaaagttatatgggggctgaatgagcttctggaggcttgtttaccgttttttattgtcacacagaaaaagaaactgccttgtctcccttccgggaattctctctttaagactgtaagtcgctgcctgagtggtttcattttgttttgtttttctgcccttctctttcttcttttgccctttcttagcttgcactcccatggtgatttctgcttggtctcctgctggggttggtggtactcgttcccaccgcacagaacccggcgcctattattggccaagaaacttgagcagcctgttttgaaaagtccctcgctcagaaatgccagcttgcagatggctaatcaaagagacgtggatccaggaggctcatttgagtaccggagcctctgagagtccatggatttttattttattgggccccaacaaagtgccaggcatagcgagagaagtgtttacaaatgtgat

SEQ ID NO: 533 - DNA, 6000 bp, Homo sapiens
accaatgatctctgtgagaatggctaaaaaccaaagctaaatcctcagcaaaaaaacaagagtcttcacccgcatactctgacttcctctcgctctctttttcaagatatctgccctcacaaataaaaagtattcacatttctcatatcttatatttttatagcctcacaaaacacagaggtgaatagaaacacaatgctgcctgacttcattgaaggacaggctatcattaatgaatccaatgtcaaattgtcaaatttactctaattttgccagtttatcccagtccatgccttaacacaacctatagtaagcttgctcactttgctgggctgagtacatctgctgattgaatttgtagtcagatttgctaattcacaaggctggccttgctctaaaggtatgattttttgtttctttgttttctttgtagacggagtctcactctgtcgcccagcctggagtgcagtggcatgatcttggctcactgcaacttccacctcccaggttccagtgattctcctgccgcgacctcccgagtagctgagataacaggcacgccaccacacccagctaatttgtgtattttcagtagagttgggtttttgccatgttggccaggctggtctcaaactcctaatctcaagtgatccatgatccacccaccttggcctcctgaagtgctgggtgacaggtgtgagtcacctgcccagcctaaaggtataatcttatactaaattcactatcatttctacttagtgggactcaggctagttgtcctatataactatgattgccatttctaaatgtctaaagatggggtgactgggctgtacaacagtttatttcaaatcaagaaagcagttgtgatcaaagggaagaaccacctcatttccttccggggaaggtgaagttaccaatcttacaaaagtcaatttctctctgatttgggctttactactcacactgtcacttcaaagacagtaaaggtaggcaagtggactgaagatttgttcctgcttgagactgaattgaagatatttaattggtgttagaagtagaactatataaaaagctaaagactttttttaaagcaaggattttccagaaaataaagaggatttattaaatgttatttttccacttttatgaatatatatatacatacatagcaaaaagaaaactacacactaaggctattgtagtgttgtaccttataaggaagtacaaggtacaacatataaaattatgttgctttttatcgttttgaattattttattatttttcatcacaagtcctaaaattttaatatgtaagttctatgagtaattttttagtaacaagaaaaagtcatatatatatatgtatcccagtacatttaagaaatgctttttttcaatagtaaattataaaaataagtaataaattaaaaaataaataataaaaattatagtaatcccagctcatttaataaatgctctctctataatgtatccaataaaaaatatgagataaaaattatgtagaaatagaaaaaggtttgtgtaacatgcaaaggaacaaaaaacagactatatatagctcaaattaaacatgcaattatgtatatgtgtagacaaggctaagaatttataagtaaaatcaaaattctttacattagtgtggtgagataaagtataaatgtagtttttaaatatttgctttttgtttcacatcatgtggtcattttttctatatttacctatttaaaaataagaaagggatgggttcactgtcctaaatttggtttcaagttgctttttatcaatttcaagttttaaattgtgttattttatttttcatcataagtaaatagtctttagtacctattacaaaacatgtgctcatcaagggacttttggggcccaagataatttgccaaaagcaattaacttcctaggggctttcaagtggggggatttccttacttaggtttcagaccatctcttaagaaacagttattctctcaaactggcagtttactctggtaatctggcacccctaaagcaatgtagtagccttcaaagagattcctttgaaacactgacacttctcctatgtgtcagtataagagtattcagaaggaaattacttgtccagtgtctcaaagagcttactcagagacaacgtccaaattccagaacttctttgcctctaatttgctgctaagggtggtaactgtatttcaggcatgaacattagaggatttttcatcagtctaactatagctggtagtgggggtgctgccatttatcaatttaatttttgcttgcaaacctggccatcatttacaaatttgtgtttttccatcctggttgctaatgtcttaattcatattttatcattttattgtatttgtaagacttctcaagtcctttgtgatgtaaatatggcccattaaaaatgaaaataaacagcccaatatgttcgttaggttggcttaagaaaaattattaaattacaaattaagctacaaaaataaataaatattccattttatgctctttgggttggtttaagaaaaatgattaaattacaaattaaataactgttctttattttccccacaaaactattctgtatgactgcttgtaaatacacagctttattttccaaaggccctctccctttcctttgaccataagataaccattctacaaaatgtaaaggagagcaaactggctgtccagtgattgcctggccaatgtcctaaataatgcaagacaaaacctgttggggcccaataaaataaaaatccatggactcttagaggcttcggaattcaaatgagcctcatggatccacatcccttcaattagcaagctggcatttctgagcgagggactttccaaaacaggctgctcaagtttcttggccaataacagggtcatgcacaataaaaaaaaaaaatgcaacccacagctatttctcaaattaatttgtaaagtaagtttgactctttttctgtctcctttagaaatttgtcaactttttgggatttcaaacttttttattgtaagtgtcggagtaaaaacactcagaaataggaaagagaaaactaacaccaggaaggttgagagaaggaaagagaaagagaagcaaaaggggttaaggatggggatacttgttgactatagttatcaccagagtcagaggactaggggaagaggggaaaagcagaaaacagctccccacccatctatgtccagcccattaatagaattaaaatttgcttctgtattccaagtaattagcactttgcatctattttatttattgctactactaagaaaacataaccgtgaaggcataaaagcaaacattttctgtagacacatgaggtgacacaagagtgttgaaacttctttaaggataaaggcctgatgttaggcatgtcgtgagcgcaaaaccaatttctgtgtaactaaatttaaaagagtcatattagaggggagaaatggaagataaactgcaaaacgtaaacaatgattacttaggtgatagagttatgtctgatctttgtatttgactcatctgcatttataaattttatttaataagccttaatttcctaggccatatatcatatacaaatataagttatacctaacttataggtattataatatgtatatatacataaatgtatgaatatttacatatgcgtgtgtgtgtgtattctttcagaaaagcaaagttttcttcgggctttaaacacgcagcctctggtaaaggtgctattggtacaaaagttcaacaagcatagctccaagctttgacaattttcttacactttactaatactgctgtccaaaaactatgagattttcaaagcagccaacattgcagtggtgcaatggttaataacaagagagagaagagtgtggcctgaggttgtataaatgttttctcaatcttgaatcattaattttctccaaggaagtttctaaagaatcccaaatagtgcacactatttctgaaaggaacaggatttttttttctaatcataaaatggacccagacatctcagcctcttggtgtaatctggatatcagatgcaatcagcgaacagcctgagttttggaattagatctgagttcaatcccatatctcccatttactagctgtgtgatcttggctgaattactgaagctctctgaacctcatttcgccatctgtaaaatggggatgtggttatcttccccactacatggctctcgtgagaatccgcggagatcacatttgtaaacacttctctcgctatgcctggcactttgttggggcccaataaaataaaaatccatggactctcagaggctccggtactcaaatgagcctcctggatccacgtctctttgattagccatctgcaagctggcatttctgagcgagggacttttcaaaacaggctgctcaagtttcttggccaataataggcgccgggttctgtgcggtgggaacgagtaccaccaaccccagcaggagaccaagcagaaatcaccatgggagtgcaagctaagaaagggcaaaagaagaaagagaagggcagaaaaacaaaacaaaatgaaaccactcaggcagcgacttacagtcttaaagagagaattcccggaagggagacaaggcagtttctttttctgtgtgacaataaaaaacggtaaacaagcctccagaagctcattcagcccccatataactttttcgagaaagaaaaggtgccgttcttccgagccctccggcttaaccactgcttcggtgctgacttatttcctacgtctgagaactgccagaaaatgagcaatatctgttctgaaggctgcaggctctctccccgcccccgcggggcggcgcgcactcacccacccgcgccggagcggacctttggcttggcttgtcagggcttgtccaggagttccgctcctctctccaaccggggtccccctccagcgaccctaaagcttcccagacttccgcttcaattcctgtccgcaccccacgcccacctcaacgtggagcgcagtggtctccgaggagcgccggagctgccccgcctgcccagcggggtcagcacttcgcatcaaggcccaagaaaagcaagtcctccagcgttctgagcacccgggcctgagggaaggtcctaacagcccccgggagccagtctccaacgcctcccgcagcagcccgccgctcccaggtgcccgcgtgcgccgctgccgccgcaatcccgcacgcgtcccgcgcccgccccactttgcctatccccgggactaagacggggtaagcctccacccgggcaggagagggctcaccagaggtaggagggtccagatgcccagcatggttgttgagcaatcctccgaagtgaaagagcttccccaactccgtactgagcgggtccaccaacccgcgggagaagaggcagctccgcctgggcagccagggctggcctcagggtgtgttccgtgccagtgcccgcccctgaggctccagccaagtcactcgtaaaccgcttccctcactccccagaagcgtctttgaacacctgtgtgtcactcttgcgcgagatcagagacgagctcacgaaaagccccggtggtcaggaggatgggaaggaagcctcgctggggaacgcccgggttggggagggctccattgattcagcaacttggcctgcgcgcgggtagggagggggagaagtcagggtgaggaaggagtcagggttcgttgcacaaatgggcattcctgtcccggggcgttcctgcagtggctggcatgctcacttcaggtgaggacctcgagagccggcctcctgccctttctaaaggcttctgctgtagttcaacctgggaagttggggaggtcttgaaggagaatggagctcagagcgcagaggtcctgcctgggtacaggagccttggctaattgctggagtcactcagagaaagacttgcggggcattt

SEQ ID NO: 534 - DNA, 6000 bp, Homo sapiens
ctttgtctccaattccattcccagccccaccccaaggaaatggtagccaagacaactccaggtattctgagcagaacacaggaaggagtcaatgggaggggacctccatgttgattcatgaaggcctcgggtcctgacctctctgatggactccactgccccagtctaattagacatttaagaaccttctctgcagctgctgccttagccccaagatacccaaccagacttcccagttcactgcttctatggcacctctgccagtgcctccatctcctctatgcagtttctacctcatgcaacagccatgggaagagatcggctgcctgggcaatgaccagaacagaagacacagatgcgctaacagattccttcgatgacagtttcatcagttctgcagattaaagactttcaccagaaaaaaaaattacctgattttgccctgaggcagccagggagggctttgtccttgacaatcccactgacttatttaacaggtagctcaaaacccaacagaaactggaggaggctgctccactgcagggatggtttcaattcggtaactggagtattgtactctccttgcaccctggctcatccccacaaaagacctttcaaagaaaacacttaattacctccttgcacaagccctgtaagccctaaggtgaaaagaaactcagcagacaaggtccacagagaaggagaaggcacaattcagtagggacctacgctcagcaccaggataaagaaactgtccattcctgccacctcctaggaagctaaaagaattaaggggaggccgggcacggtggctcacgcctgtaatcccagcactttgggaggccgaggcgggtggatcatgaggtcaggagatcgagaccatcctggctaacaaggtgaaaccccgtctctactaaaaatacaaaaaattagccgggcgcggtggcgggcgcctgtagtcccagctactcgggaggctgaggcaggagaatggcgtgaacccgggaagcggagcttgcagtgagccgagattgcgccactgcagtccgcagtccggcctgggcgacagagcgagactccgtctcaaaaaaaaaaaaaaaaaaaaagaattaaggggagtgtagaaaagagaaaaaaaggccgggcgcagtggctcacgcctgtactcccaacactttgggaagccgaggcaggcggatcacttgaggtcaggagtttgagaccagcctggccaacgtggtgaaacactgtctctactggaaatgcaaaaaaatagctgggcatggtggcgcgtgcctgtaatccctgctacttgggagcctgaggcaggagaatcgctgaaacccgggaggtggaggttgcagtgagccaagatcgcgccagtgcactccagcctgggagacagagtgagactccacctcaaaaaaaattaaaagctcacgctcaaacttccacccctattgtttggaagcatgatttggcttgtagcatgaatttttaaaatagtagacacccacaatcaaatgtaagagtgggacaaaacagattaccccacaacaaatctaggtggcttttggactgtccacactgctgttcattccctttctataggtcatggagagtttcctatttgccaaaatactttttgtagcaatggcatgcaaatccaatgcactccttgtttgtaataaactcgaattatatactacctcacacctcttctagtcttaaaaaaaaaaaaaacttctattctccacttttcagatcattcttaaacatgtcctaaattcttcagcgctgcaggaaatgtctgcctcaaagaccagatttacccaattctttagggttcaattctgtccctaagcagttccgtaacctcagacaaatcattcaactctactgggactcaatctccttgtgttcacattcagtgagggagtaggattaaatgctaaggtcccttccagctctaaccttttatgattctgtaactatacagatacagtcaacccccatatctgcggagggattggttccagtcctcccttcagataccaaaatccatggatgctcaaatctgatataaaatggcatagtgtttgcatataacctatacgtatcttcccatatactttaaatcatttctagattactcataatacctaatacaaagtaaatgctacacataaacactttttttgtttgtttttgagatgaagtctcgctctgttgcccaggctgtagtgcagtggcaagatctcggctcactgcaacctccgccttctgggttcaagcaattctccctgcctcagcctcccaagtagctgggattacaggcacctgccacctcgcccagcaaatgtttgtatttttagtagagacggggtttcgcaatgttggccaggctggtcttgaactcctgacctcaggtgatctgtctgccttggcctcccaaagtgctgggattacaggtgtgagcgaaccaccatgcccagctgcccccaaatatttccaatccatggttggattggatcagcaatgtgaaacccacaggtatgaagagcaaacttctttggtaagtgtaaatgaaatgtttataaagcacttagcacaatacccggctcatggaagtactcaataaatatttgttgaatgaatgacctggagggatgcagaagtggaaagcctggccagatgtctatctgtcctacaaataccagcaaggacactcctgccaatgtggtaacactaaataagtgtctgctgttatcattcttcctgattcataaagagagaaatacaaactgttattaaaatcatggcacttaggagctagaagtcgtttttgaaaacaagcccaaccagaaatcagcccaaccgtgtaaacagaaagctcctagacgcacagatacagatttgggtgaacaaagtctgaggctagggcctctctccattagctaatggggtatgggatgccaggaaaattacatatgtagtaagtgggccgcaactgaacacacagacttttctttttttttttttttgagatggagtttcactcttgttgcccaggctggagtgcaatggcacaatctgggctcaccacaacctccgcctcctgggttcaagcaattctcctgcctcagcctcctgagtggctgggattccaggcatgtgccaccacgcctggctaattttgtatttttttagtagagaccgggtttctccatgttggtcaggctggtctcaaactcccgacctcaggtgatgtgcttgcctcagcctcccaaagtgctgggattgcaggcgtgagccaccgcacctggcccagacttttcatctcaagaaatagaagtaaagcaaaattcaaaaagatgtgtgtaggggagaaggggctaatctcagtgaacgggaggaaacagagcaaagcgcagctttactaccaccccaagcacaagcccgagtactctgatccttcagtaatagtcacaggccatactggtcatctgccaccagactggaggagattgctggccacaacactcccctcttcccatggctttaagtcacatctgtttcccaatgggaaagtcgactgaggggacagggaaggacagacggcaaagccatcagaagtcaggtgaactgagatcaaagtcgtggcgaatgtcatctggacaaagacgctgctctcaggatgtttgcaatctcaagtaggagatacccaacatcaataaagagtagcattttattcatgtgcagacctcccttctgggctaacacgctgagaagaaaaagagtaacaactttattttggggctgcttatcttttgatgacgggcccacacaaccagagttcggctttttcaaccagagaaagcttactgaagtggggatgaggggccgcgaagaggatcggaccgcaggactggaagctgcagtttaaaaaaccgggaaaaggccggaggcagtggctcatgcctgtactccctgcactttggaaggccgaggcgggcggatcaagagatcaagaccatcctggctaacatggtgaaaccccgtcactactaaaactacaaaaattagctgggcgtggtggcgcgcgcctgtaagtcccagctgcgcgggaggctgaggcaggagaatcgcttgatgccgggaggcggaggttgcagtgaacagagatcgctccactgcactccagcctggcgacagagcgagactcctcaaaaacaaaacaaaaaaaccgggaaaaggttttatttctcaatgacagccgcgaggtgaaactgcgatggactggaagtcaaaaaccgtgggttccagtttgggctctatcttaactatcttgatcattttggacaagtcaaaccctgtctctgaatctgaggttccatatctgtgaaacagacgagttgggtcgcttgacctccttccctcctgctctgagcgtaacgattgctcggaaggtgcgctcgggctgaggagggcacggccccgcagggcggggcgaggagagagcaggaacccgcactcaagacaaggccccagggcagtgccctacccagaaaaagggactaggatggggagcaagggccgaggcttcgcccttacctgccgcctgccgactccccagtcagccaaaccgagccccgtagcctctgccgccgctcactgccaccccctccgactcggcgccccggccgggcccggctcaatccaaaccaccatggcccgccgcccgcagcgccaggcagcggacccggacccgccgccagcccatcctcaaccacacgcgcaggcgccagcgtggacctctgaagttccgcccccggatttgtcccggggtaacctgggaaatggagtttactcgcaaggataaagagtaccaattgacacgtgtcttactgcggaactgtgcctgggtttggccaatgagaaatcgacttcgttttcatcctggttttgggacagcggcaatcatggcgccacctgtgagatactgcatccccggtaagtgagcgcttcccgtacagagtcctggataggggctgaagcaagaaggctaaacggcctacagcttctgggggcccgtgaccgatgcagcattttttctgcaggcgaacgtctgtgtaacttggaggagggcagcccgggcagcggcacctacacccgccacggctacatcttttcgtcgcttgccggctgtctgatgaagagcagcgagaatggcgcggtaaaggaagcggcatgccatctcccctctgtttttcccttaggctgcccttgagttccagtccttaggcatgggcactgcggacgcgtctttagtgcctcagtggtacaatgttggtctcttagtttcttctagccgtatcgccgctgtggtgcacttagccaccacacactagttgtgttgatctcgcttggttgtgctgctgaccctcggggagggaagttgggacaaaagcagatgcgaactcagtatcccatcccagcccagctcagcccagcagtgagttgcatactgtatgaatgttgcttacctttccgactttatctagcgccactatctccacctcactgacgcaatctagtcatactgtcttttctgtgtttaaaagttataatcacagtctctgcttgccctttaaaaattttttataacatactagcttctttcagtgtcggtaatgcgccaagctttctcctgctacagagcctttgtaacatgccatctatctggaacgcttctatcttcctaggcctatttaattcctacctcctttagatagcttctctactatcacctcagagaagtccttctggacccactaattgaggaaaggagttttgtggggtgttttgtttttgtttgttttgttaaagactcacaaaaaactctgttccttttcttccaagcactatgtcagcatatgatgagacactcaggtatatgtttcctactagacttctcccctgcttaaatctaagtccgtg

SEQ ID NO: 535 - DNA, 6000 bp, Homo sapiens
atggaccccacatacaggatgtgtactttggcaaagcgtgaattgatgctagagacctgcggaatagagaaaagatcagcatcagagtataagcagttgtcagctcaaggaggcagcaataaactggggattactagggcttcagtgcaagcaaccctactaagtagagaatttaagacaaattaactcctacttctctctgcgtaagtgacacatgtaaagaggaataagagccactctggccacctggtagagttactatgggaaacaaaggtggtatgggtttttttttttttttttttttgagacggagtttcactcttgttgcccaggctggagtgcaatggcgcgatcttggctcaccgcaacctccgcctcctgggttcaaataattctcctgccttagcctcctgaatagctgggattacaggcatgcaccaccatgcccagctaattttgtatttctagtagagacagggtttctccatgttggtcaggctggtctcgaactcctgatctcaggtgattcgcctgcttcagcctcccaaagtgctgggattacaggtgtaagccactgcatccggctgggtttttttttttttttttaaatcttttcacaacttgcccttcagagaggtatagactttttaaagtatagatggctaacaattaaaaaaaaaaaaaaaaaagaggctggacacagtggctcatgcctgtaatcccagcactttgggaggctgaggtgggcgcatcacttgaggtcaggagttcaggaccagcctggccaacatggtaaaaccccacctgtactaaaaatacaaaaattagccaggcgtggcagcacatgcctataatcccagctactcgggaggcagaggcagtagaattgcttgaacccaagaggccagaggctgcagtgagccgagatcgtgccactgcactccagcctgggtgacagagcaaggccctgtctcaaaaaaaaaaaaacaggaatggcaaaaaataaagtcttttgcttctctgcagaaaaagaactcagcttcagatgttcaaaaataggcctcctaatcatcctctggcatccctgtttcccagacacaggtagaactatgtattcagggaatcagctcagtgaaggaactatgcatgcctgaacttggctgccttgattattatcctagaaatctgtaagcctgcacagtccagtaaaactttctgtgatgacagaaaagtcatgtgctgaccagtatagcaaccactagccacaagtggctattgagtacttgaaatgtggctaatgtgactaaggaaatcaattttatttttttcttgagagacagagtcttgccctgttacccaagctggagtgatcatggctcactgcagcctcaaccccctgggcccaagcgatcttcctgcttcagcctcccaagtagttgggaccacaagcatgtgctaccatgcctggctaattttttattcttcttcttctttttttttgagacggagtctcactctgttgcccaggctggactgctgtgacgcaggctcactgcaacctccacctcctgggttcaagcacttctcctgcctcagcctcccgagtagctgggattacaggcatgcaccaccacgctaagctaatttttgtatttttggtagagacagggtttcaccatgttggccatgattggccaggctggtcttgaactcctgaccacaggtgatctgcccacctcggcctcccaaagtgctgggattacaagcatgagccaccatgcccggcaatttttgattctttttgtagagatgaggtttcactatgtttcccaggctggtcttgaactctgggctgaagcaatcctcctgcctcggcctcttaaagtgctagaattaccagtgtgagccactgtgccctgccagaaataaatttatgtagcttgtggctatcatactggacactgcagttctggtatggtcatgatttcagtattgaatgggcattctaagcatggaggtcaggaccaacttaccttacaggttacaatagctcccacatctggcagtaactgggactctgtttctctcactacagacaccactggaagctacagagggaacaacaaaaaactgaaatgtcctgactaacccttgggtcaaggcatttgtggcttgagagtaatataggaatgtcttggtataaaggtgagagttggagtatggattcatttatagcccagagcagaaggccttagaaattttaggaaataggaggaccaggaggctacagaatgctgctagaagacatacatctctaaacttctttttttgttgttggagacggagtcttgctctgtcgcctagactggagtgcagtggcacgatctcggctcactgcaaggtccacttcccgggttcacgccattctcctgcctcagcctcccgagtagctgggactacaggcacccgccaccatgcccagctacttttttttgtagtaaatctctaaacttctaataagttttttggtgattctctcagaatttcttggtatacaactatattgcctataatcattgacaattttactttttttgtttttttttgaaatggagtttcactcttgttgcctaggatggagtgcaagggtgccatcttggttcactgcaacctccacctcctgggttcaagtgattctcctgcctcagcctcccgagtagctgggattacagaagcctgtcaccatgctcgggtaattttttgtatttttagtagagatggggtttcaccatgttggccaggctggtctcgaactcctgacctcaggtgatccacctgccttggcttcccaaagtgctgggattacaggtgtgagccactgcgccctgccgacaatttactctttcctccaaagttatactgcttccttctgtttcttattttattgcacaggctgaaatttccacaaaaatgttacataatagcggctatgcttgttttcttctattttaagtgaatacttgcagagttttctctttgagcatggtattggctgttggtataagacagatattttgagcctcatcttttatcaatctctccgttgctcacaatgcttcagctctcctggccttctttcagtttccccaacttactaaattcttcccactttcagatctctcttcaacctattctttctgccagagctgcactctctccacccacctgactcttacctactctttagatgattcagcttaaatgtcacttctgctgactaggatgggtttgcctgttacatgttctcaaggtgccctgtaatattctttcaaagcaccaccacatatgtaaccatatgctcatttgagcatttatttgtttacaatttgtgtctgtgtcctttgatagcagaaaccaagtcagcgctgtgcctgacacatgaaaatactcaagtgatatctatgaaatgaacaaactcaggactgttaagaacattcccaacaatgactgaatagaaagccccttgaatcagacagcttaagttacttactcaaagcagaatcaaagtcaagttagccagaacgtaactgttctaattctgaatcctctttctattgtgctccttcaaatattgcttatatgatcctgagctaatcctggatctatctctgaaactagaaaggtaggtattactcacacattcaacatttattgaggagctgccttgtgctatatacggatggtatggtggtagggcctgctttcacggacttagatttaagcaggggagaagtctagtaggaaacatatacctgagtgtctcatcatatgctgacatagtgcttggaagaaaaggaacagagttttttgtgagtctttaacaaaacaaacaaaaacaaaacaccccacaaaactcctttcctcaattagtgggtccagaaggacttctctgaggtgatagtagagaagctatctaaaggaggtaggaattaaataggcctaggaagatagaagcgttccagatagatggcatgttacaaaggctctgtagcaggagaaagcttggcgcattaccgacactgaaagaagctagtatgttataaaaaatttttaaagggcaagcagagactgtgattataacttttaaacacagaaaagacagtatgactagattgcgtcagtgaggtggagatagtggcgctagataaagtcggaaaggtaagcaacattcatacagtatgcaactcactgctgggctgagctgggctgggatgggatactgagttcgcatctgcttttgtcccaacttccctccccgagggtcagcagcacaaccaagcgagatcaacacaactagtgtgtggtggctaagtgcaccacagcggcgatacggctagaagaaactaagagaccaacattgtaccactgaggcactaaagacgcgtccgcagtgcccatgcctaaggactggaactcaagggcagcctaagggaaaaacagaggggagatggcatgccgcttcctttaccgcgccattctcgctgctcttcatcagacagccggcaagcgacgaaaagatgtagccgtggcgggtgtaggtgccgctgcccgggctgccctcctccaagttacacagacgttcgcctgcagaaaaaatgctgcatcggtcacgggcccccagaagctgtaggccgtttagccttcttgcttcagcccctatccaggactctgtacgggaagcgctcacttaccggggatgcagtatctcacaggtggcgccatgattgccgctgtcccaaaaccaggatgaaaacgaagtcgatttctcattggccaaacccaggcacagttccgcagtaagacacgtgtcaattggtactctttatccttgcgagtaaactccatttcccaggttaccccgggacaaatccgggggcggaacttcagaggtccacgctggcgcctgcgcgtgtggttgaggatgggctggcggcgggtccgggtccgctgcctggcgctgcgggcggcgggccatggtggtttggattgagccgggcccggccggggcgccgagtcggagggggtggcagtgagcggcggcagaggctacggggctcggtttggctgactggggagtcggcaggcggcaggtaagggcgaagcctcggcccttgctccccatcctagtccctttttctgggtagggcactgccctggggccttgtcttgagtgcgggttcctgctctctcctcgccccgccctgcggggccgtgccctcctcagcccgagcgcaccttccgagcaatcgttacgctcagagcaggagggaaggaggtcaagcgacccaactcgtctgtttcacagatatggaacctcagattcagagacagggtttgacttgtccaaaatgatcaagatagttaagatagagcccaaactggaacccacggtttttgacttccagtccatcgcagtttcacctcgcggctgtcattgagaaataaaaccttttcccggtttttttgttttgtttttgaggagtctcgctctgtcgccaggctggagtgcagtggagcgatctctgttcactgcaacctccgcctcccggcatcaagcgattctcctgcctcagcctcccgcgcagctgggacttacaggcgcgcgccaccacgcccagctaatttttgtagttttagtagtgacggggtttcaccatgttagccaggatggtcttgatctcttgatccgcccgcctcggccttccaaagtgcagggagtacaggcatgagccactgcctccggccttttcccggttttttaaactgcagcttccagtcctgcggtccgatcctcttcgcggcccctcatccccacttcagtaagctttctctggttgaaaaagccgaactctggttgtgtgggcccgtcatcaaaagataagcagccccaaaataaagttgttactctttttcttctcagcgtgttagcccagaagggag

SEQ ID NO: 536 - DNA, 6000 bp, Homo sapiens
acaaaaattagccaggcgtggtgagacacctgtaatcccagctactcaggaggctgaggcaggagaatcgcttgaacccgggaggcagaggttgcagtgagctgagatcacatcactgcactccagactgcgcaacagagagagattccgtctcaaaataaataaataaataaaataaaataatttcaaaattaaaaaataaaaaataaaaatgtaaggaacacagaccacttcaattcttggaaatgggtttcacatctatgaaatgaatgggtaagatgagaatgactgctaaagttactgtccattctaacctctgaatatatcagaactcaagtcctgtgaggacacaaacaagcccacgacagctttaaaggaaaaaaagggggcaggcacggtgggtagctcatgtctataatcccaacacttcgggaggttgaggcaggaggattgcttgagcacaggagttcgagaccaacctgggcaaaatagcaagatccaagccctacaaaagatttaaaaattagctgggcatggtgacacacacctttagtagtcccaatttctcaggagaagctgaggcaggaagattgcttgagcccaggagttcaagactaaagtgagctatgatcatgcctgcattccagcctgagcaacagagtcaggcctgtctctggaaaataataaataaatacaaagaaaaagaaaagattcctggcatcggttagcaatggaaggaaatcatgcttactccttagcataaattccaagcatctctacacacacacgcatgaaatataatatattaaggggaaaatggaattaagggaaaaaagaaggaaagaagaaaaaaagaacatacacaaacttaagcaaccaaggtcgattgtttaaatgaaaaccaactttaacaaacctcaacactaaggatttcaaacttctctcttgcggacttgctgctttctctcttttcgattttcaacttttttgtttttgctggccccttctggctcttttttcttttggtggatccctcttcagtagaaatctagaagcgggtagggggagcccacaaagacccaaaagaataagaagcaatctgagttttccctcctatttcaggtcatcactcaccttgctttgttactccttcactccaccctaccccatcccactcccaattgttcctttaattcttgcttaaaaaaaaaaaaaaaagggggggggccgccaatgttccctctgcccaaggtctgagaagcctccttcatgttcccaaagtctcttctctcttgtgttctccctctcttgactgggatgaacactgggttccccagtttgagaagcaatgtagaatagtgcatgaaaatggacaccagagttacacagacccaagttaaattctcatcttttccaccataacaagctatgtggtttcagctaaattatataaaatccaggcacagtggctcacaccagtaatcccaacactttgggaggccaaggcgggaagatcacttgagattaggagttcaagaccagcctggccaacaggctgtatttttttttccactaaaaatacaaaaaaattaagccgagcatggcagcacgcacctatagtcccaggtactcgggaggctgatacaggagaattgcttgaaccaagaagtggaggttgcagtgagctgagatcacaacactgcacttcagcctgggcgacagagcaagacactgttcctcatcatggaattgcaatcagtgcttcacagtacagttgaaaagattacataatacagacctaaagccacacactcaaatgttagttccctttccccaagcatttggagcacagcctagtctaggtgagactgtgaagtctaatgcaaattctgaccattacatgtggcaaggaacccctgtaaaaatgcaatgatcagtcagacacagtggaacatgcctgttgttccagttactcaggaggctaaggagggaggatcgactgagcccaggagtttaagtccagcctgagtaacagagtgaaacatcatctctccccatctcttgaaaaaacaacaacaaaaataacaaaaacatcagctgggtgcagtggctcacacctgccatcccagcactttgggaggtcaaggtgagcagatcatctgaggtcaggagtttcagaccagcctggccaacatggtgaaaccccatctctaacaaaaatacaaaaattagtcaggtatggtagcaggcacctgtaatcccagctactcacgccactgcacttcagcatgggcaacagagtaagacttcgtctcaaaaaaaaaaaaaaaaaaaaaactgcttcctctccatccttaatcaacatggcacatggcaaagagtgtctaagaacaaggaacagcactttatttattttgtttgtgtgttttttgagacagagtctcactctgtcgcccaggcaggagagcagtggcacaatattgggtcagtgcaacctccaccttcttggttcaagcaattctcatgcctcagcctcccaagtagctaggactacaggtatactaccatgcccagctagttttggtattagtatagacggggtttcaccatgttggccaggctgctcttgaattcctagcctcaagtgatccgcctgcctcggcttcccaaactgctgggattacaggcatgagccactacgcccagctaataacagtactttaatactaaatgccaagcttcaaaagatacagccttgtggtggtatggcctctctaaatgagttaaatttatagaagtagacttcaatgcaaaaaaaatctggaaaaataacacattctcaaataaggctcatttttcacaagacactacagtaaaagtttccagtgagtgtcaccaaacaagcatactacttacatcaaataagttgtcttgttcaactgactgctggaaagctttctctggtttgtggatctttcttgtacctcctcgggggaagctttcttccaggtttgccatgtttgggtctcctaaaaacaatgcaaaggataatggtgacatgttgtcttggtagcagatttcagaaaggtgttatcaacgggcaagagacagaacgttccagcaatatgctagacaacattcaggactacaacatagatggtttagatgtcaggcccggaataatccatacttcatctttccaaaggtctctgcttcaaaaccacaagtccacccaccttcttccagaaaaagaagttatagattcaatgtagcacatactcactaagaagctacagttaagtcagagatacactgtagctctacagatgaatatataatcctctgccttcaaagaacatgcacactttttggaagataaaacaattatgcaagtaacttaaaatgcaaatcagattataaatgatcacaaagatgtaggaagggataaggcaatgtaggaagggataagtaaaggaggcaagcttcataaagaagatcttttttagcttaagggtaaaagatgaacagaagcttgacaggtagaaagggaatgtgagaaaagacatggatgggaaaagcctattatttcaataaacaccagcaatttccctatcaaacaactgctcaaaggcttgctgttgtctctgaggaattattcaactagaccactgggagattaaagcataaaaattgaagttaaattttaaagaaggccgggcaccatggctcacacctgtaatgccagcacttcgggagcccgaggcgcgtggatcatctgaggtcaggagttcgagaccagcatagtcaacatggcgaaaccccgtctctaccaaaaacgcaaaaattagccgggcgtggtggcctgcgcctagtcccagctactaggcaggctgaagcgtgagaattgcttgaggccgggaggcggaggttgcagtgagctgagatcatgccgccgcactccaacctgggagacaaagtgagactctgtctcaaaaaaattaaaggagaagttgggcttttttgtggaagaccttgaattagatatgggtagtttgctttggcaagtcagagacttaagcagggaaagcgagagaacagtaagcaagaaaaatatactgcaggctatagattggacatgaagagagacagtattgaaggcaagtaaattcggtagaaggattcaaatgcactgtttcctgttatctcagtgacagaaaaaaaaaaaaaaaaaaaggattcaaatgcagtacagcagagaaaccatgagaaccagaactgggtataagtgaaaacagaagacaggagaggttagttctgacagacacttggtaataagactctacaagggctttagactaaagaagtgatgaccgggtggggccaaggatatggaatcagggatgggtatatgattcatagaaacaggaaagtttggggggtctagtttgctgataatttcacccttaatttcctttcaagcaaggggaaactgaggctctgaaaagtaaggcgatccaggggcacagaagatacttaggctactttccgaacacaaagcctggggttacaggggctgctacaacagagccggcttcgaagcggggctaaggtggccgaaccacactcatctagcgtgtgcctggcagggaaccaggcctgggacagacctgacagccatgaggtttcctcctttttcgcctctgcctttactcaccagcgccacggcgtctgcacccagctaccactaacctcgcgccgcggtactcacacacgcggagaccaggatacccacagtccagtgcaattcttccggaagtgtgggcgggctcaacaccctacttccgttgctgtgttgcggaggtgacctagagacaggaatcggaagggcgggatttggagccatagccaatcgtcgcattaggccgaatcgcgggggccggctaaacgcgtgcgggggaggtggcttcttccggccgggccgagaggtggttacattcgttgaaggacaccagctgcggaatttgcggctttggcaggtgggtgaagaggggagtccgggcttggacctggcgcctgcacgttgcaggaccgcccgccgtttctggccgaggagcaactcgagttcttagctttggaggagagaaacggtggggaatgggaaaggagctagaaaaaacgaggggcgcaagggggcggccagcgggtgagaagcctcgaggtgaggcggataggtgcgcccaagggctcccacagtttccgaagacccttagattgcattcgccagtggagaaaaatgaggccctccgcgaagcgtccctcgaggtcacccagtgacgtaatattggacgaggactagggcttctgatccccatcaccggccgaattaacctcttttcttctgtatgtccatagctgtttgttcccaccgagctgtgctttaggaagctggccagccgggcctcctttaggtgcgctgcagcctttttcaaagcgagtgaatgtggcccggcccctacagttcgccaggcccgctgtaaaagggttagatttcagtctatagacgatcagtgggaaggcctttcctaggaggtaaccagaacagagagctgtaaactccgtgaatgcaagaggctgcttctgttacctgagtggttctcactcatctttgccttccttacctcgtgatctcaccattccaggtaggtgttaagttagaaaggaaaatagcaatatcgaggaacagagaaagtaacaagagctactggtcactttggacctttaataaagtgcccatctcacaggtggagagaggcacggaaggattagttacatttaagagcagttagtggccgggcgcggtggctcacgcctgtaatcccagcactttgggaggccgaggcgggtagatcacctgaggtccagagttcgagaccagcctgagtagtatggtgaaaccccgtccctaccaacaatacaaaaattagccgggcgtggtggcgc

SEQ ID NO: 537 - DNA, 6000 bp, Homo sapiens
ttcaccatgttggccaggctagtctcaaactcctgacctcaggtgatccgcctgcctcggcctcccattgtgctgggattacaggcacaagccactgcacccagcctctttttcttttttttgagacacgattttgctctttcgcccaagctggaatgcagtggcgtgatctcggctcactgcaaccttcgcctcctggacttaagcagttctcccaccctggctaatttttgttttttggtagagatggggtttcatcatgttgcccaggctggtcttgaactcctgggctcaagtcatctgcccgccttggcctgccaaagtgctgggattacaggtatgagccactatactaggcctctgtatttttttttcttgtatgctataaattttgcaaaatgacaatggtttatttttatactaaatgttagggaaaaatcctaacatcaaaatggctaaattataaaggtttaaatgtcaacttcttaccatttatgttgctttcacagctggagtttttttggaccttaacttgaaatataagacaatcaatgcaatgcttccatatgtggccagtacacactgagaaagaaagaaaaaagtaaacaagacttgttgttccatctatattattttaaaatataactgcttaaagttatcaatacttacgttcattctacctgtgagagtataagagttgaaatattttttaataccagtgaactggtattgcgcatcactttctggacctgccatgatttcaatcttttaaaaaaagaaagaaagcaacattaaattggtttggatgtaatttaaaagtaaataaattttgtcttgttttagtctaaaaactcaaggtcactgcatataaatactgtaaatttttatctatatctcacccaacacagtagtagcaaagatggtggaaaaagccttcctgaaagaaaagcttttggaagtaggattttaccttgatcgctatttcatgaacacctcagaatacatcaaatcacacaatagcccctgctaagttcattctctgacccaatacagcttaatattttcattcctggctccatcacaccacagtccattgaattaatccattttaaggctactcaaaaattggagctggtatttttcaaacattcaacgggtgaccatcaactaaacagctcaattacaacccctacttatacaatttttcttgttataagtaatttaggacctccatgggagaagggagaagggataatttattaaatggagttaataatagctactggtggtagtaaggaagctggaatccttgcaccaccaccaaaatagataaaagatttaaatgtaaatagtgaaaccaaaaagtcctggaagaaaacatggggaaatatttaagtcatctcagggaagggaaaatattaagaaaaaaagccaaaaaccaaaaaaaacataaaacctattagtcaaagaaatgtaaaatgagatcaatatttaatcatcaaacaagcaaaaataaaattatggtaagtagtagtattaagtatgtgagaaaactaagaattctctctctgttgcttggagtataaactggtaaaaccagcctggcacggtggctcatgcctgtaatcccagcactttgggaggccaaggcgggtggatgcgaggtcaggagatcgagaccatcctggctaacacggtgaaaccctgtctctactaaaaatacaaaaaattagccgggcgtggtggtgggcgcctgtagtcccagctactcgggaggctgaggcaggagaatggcatgaacctgggaggcggagcttgcagtgagcctagattgcgccactgcactccagcctgggcgacagagcgagacgccgtctcaaaaaaaaaaaaaataaataaataaaaaataaataaactggtacaaccttcagaaagtgcaagttggcagtatcttatcgaattataaaatgagtataccctttcatctagctggtgtttttctccaggaatttacccttattgaaatattacaaagtggaaacacattgtgtggttcaaagatggtcaatgaaatactgtttatgaaaatcttaaaagtccatctatagaagactgattaaaaaatgatggtttccattaaacgacacacaacaggcacagatctttgtgtactgacatgggaagatgtcccaagtaacgttcaattttgtaagaaaaaatcttatttctggattttataaagcacgtcaatggttctgggtcttgtccctagaccagcagcattagcatcactggaaacttgttagtgcaaattcttaggccctacctattgaatcagaaactctgggtccaggaatctattttaataaggcttctagataattctaaagcatgctaaagtttgaaaaatactgcagtaaatgaaatagaaaaatagtaagtgtattaaaaaaaactctggaagaatatatagcaaaggcagcttaatctatagtacctgtgtattttacaaaggcatgaatttcttttatagacaagacgtattcaaaaggtcaccagaacaagagctgaaaattcgtatgcatgaccgcctatctaccacgaccgacgccacgccgagtcgattggcaacacagacgagccggtcgaggtccggtcgagattggtaggcagtgacagtgactcagctgggtcttgatgaaatggaagagggagatatctgtcagggagtcattactatggaaactggaactcccccattcaaaggctttcagaggcattcttgtgtaaagaattggcaatgaaaatttgagaaaaatgaccttaattttcaagtttcaagaaggttcttggagcaatgaaggaaatccaaacttccttaggcctcttcagagaccttggccagtctagcccaagtaggaaaatctccattaaaaataactttatacacttgatcttagccaacagaagcgataaaagcaactttataatgtagctatcaactgttccactttactaaacttactaaagacatacttccccccgccccccgcccccccaccagctccattcatttcatgatacatttttggattcacttcttagggtttgaagtaggtttttaggagaaacgctacagaaaataagggcttcactttgaccattaacgaaaacctccactacattacatctaactaaactttttaggaggatatgcccaacaatactacagcgctttaaatttccctttaatttacacacaatatgggaggaaggctgatgttttgtgatatcccacagaagactaattctgattgcagggaagtgcatggttcaagaactgaaatcaatcactcaagttagtctgggtcttaaaggaggaggactcttgagaggctcaaatggagggccaaatggggaacgggattgttgctggtgagataatggagtaaggtcgaaaaatttggttctgcactcttcagcacggtgcaggttactttagggcaaagataaaggaacccttgtgtttacagtgccctttgtaagactcctagttgtgatttaatgttgttaaacggtggtatgttttaattaagttgctaactgcccttcttgagacaaggtctcgctctgtcgtccaggctggagtgcagtggcgcgatctcagctcactgcaatctccgcttcccggggtcaagcggttctcctgcctcagcctcccgagtagctggaactacaggcgcgcgccaccacgcccggctaatttttgtattgttggtagggacggggtttcaccatactactcaggctggtctcgaactctggacctcaggtgatctacccgcctcggcctcccaaagtgctgggattacaggcgtgagccaccgcgcccggccactaactgctcttaaatgtaactaatccttccgtgcctctctccacctgtgagatgggcactttattaaaggtccaaagtgaccagtagctcttgttactttctctgttcctcgatattgctattttcctttctaacttaacacctacctggaatggtgagatcacgaggtaaggaaggcaaagatgagtgagaaccactcaggtaacagaagcagcctcttgcattcacggagtttacagctctctgttctggttacctcctaggaaaggccttcccactgatcgtctatagactgaaatctaacccttttacagcgggcctggcgaactgtaggggccgggccacattcactcgctttgaaaaaggctgcagcgcacctaaaggaggcccggctggccagcttcctaaagcacagctcggtgggaacaaacagctatggacatacagaagaaaagaggttaattcggccggtgatggggatcagaagccctagtcctcgtccaatattacgtcactgggtgacctcgagggacgcttcgcggagggcctcatttttctccactggcgaatgcaatctaagggtcttcggaaactgtgggagcccttgggcgcacctatccgcctcacctcgaggcttctcacccgctggccgcccccttgcgcccctcgttttttctagctcctttcccattccccaccgtttctctcctccaaagctaagaactcgagttgctcctcggccagaaacggcgggcggtcctgcaacgtgcaggcgccaggtccaagcccggactcccctcttcacccacctgccaaagccgcaaattccgcagctggtgtccttcaacgaatgtaaccacctctcggcccggccggaagaagccacctcccccgcacgcgtttagccggcccccgcgattcggcctaatgcgacgattggctatggctccaaatcccgcccttccgattcctgtctctaggtcacctccgcaacacagcaacggaagtagggtgttgagcccgcccacacttccggaagaattgcactggactgtgggtatcctggtctccgcgtgtgtgagtaccgcggcgcgaggttagtggtagctgggtgcagacgccgtggcgctggtgagtaaaggcagaggcgaaaaaggaggaaacctcatggctgtcaggtctgtcccaggcctggttccctgccaggcacacgctagatgagtgtggttcggccaccttagccccgcttcgaagccggctctgttgtagcagcccctgtaaccccaggctttgtgttcggaaagtagcctaagtatcttctgtgcccctggatcgccttacttttcagagcctcagtttccccttgcttgaaaggaaattaagggtgaaattatcagcaaactagaccccccaaactttcctgtttctatgaatcatatacccatccctgattccatatccttggccccacccggtcatcacttctttagtctaaagcccttgtagagtcttattaccaagtgtctgtcagaactaacctctcctgtcttctgttttcacttatacccagttctggttctcatggtttctctgctgtactgcatttgaatcctttttttttttttttttttctgtcactgagataacaggaaacagtgcatttgaatccttctaccgaatttacttgccttcaatactgtctctcttcatgtccaatctatagcctgcagtatatttttcttgcttactgttctctcgctttccctgcttaagtctctgacttgccaaagcaaactacccatatctaattcaaggtcttccacaaaaaagcccaacttctcctttaatttttttgagacagagtctcactttgtctcccaggttggagtgcggcggcatgatctcagctcactgcaacctccgcctcccggcctcaagcaattctcacgcttcagcctgcctagtagctgggactaggcgcaggccaccacgcccggctaatttttgcgtttttggtagagacggggtttcgccatgttgactatgctggtctcgaactcctgacctcagatgatccacgcgcctcgggctcccgaagtgct

SEQ ID NO: 538 - DNA, 6000 bp, Homo sapiens
tgtgggcttttaagttgaccttattcattttggggcacttccctgatttctggtaaggtatttcaggcttaactttctttttttgtactttatgcgcctgaaaccggaaattagccatttctctaagaaacattatttcctcttagtggggattggtatttagatatcaagctgtgggcattctctaggggggtgacattgcttctaagaaatatacatatgaaaaattctaattcaatttaacatcagaggttttaacatcagtttttcccactataagaggaaagaagtacaaatataaaagaaggtggatcttcttttaaaaatacaaaaaggatatttgtatttctttcctcttagagtttctactaataaatttcttgtttgttttatagtaggcctgagtttcaaaattacattaccaataccactactggcaataaatatgtggtgtttgagggcttttgcttgtttttgttctttttgctctcagaatataaaccactaagaatgtatggttggagtactattaagcaccacttctaaataagtagtaaagaactgccatttcaaggccaggcgcggtggctcacacctgtaattccagcactttgggaggccgaggccggcggatcagaggtcaagagtttgagaccagcctggccagcatggtgaaaccctgtctctactaaaaatacaaaacaaaattagccgggcatggtggcatacgcctatagtcccagctacttgggaggctgaggcaggagaattgtttgaacctggcaggcagaggttgcagtgagccaagattgcgccactgcactccagcctaggcgacagagcgagactcgtctcaaaaaaaaaaaaagaactgccatttctggccaggcccggtggctcatgcctgtaatcctagcactttgggaggctgagggggggtggattacctgaggtcaggagttcaagaccagcctggccaacatggtgaaactccgtctctactaaaagtataaaaattagccaggcgtggtggcaaatgcctgtaatctgagctactcaggaggctgagacaggagaatggcttgaacccaggaggtggaggttgtagtaagccaagattgtgccactgcactccagcctgggcgacagagagagactccatctcaaaaaacaaacaaacaaacaaacaaacaaacaaacaaacaaagcctgacatttcttatcctgtaaagccttagactataatctttttcaacctgaagaaattctcgttttccgtttttagtggcatatttttgttttttagtggtacagtcttctgttcctcaatggtacgtgtaaaatacagaataattgaaatgcacatcctaaggctagcagtgcaatacaaatttaagcaaacaattcaggattgctatgactgatgaacatctgaagacctgcgctgaccaacaccattttcaggttgttttccatcaactttaaatggatgatgccacctaagcttcatcccaggatatatgtgttccatgtactgtatccaaaaacactcaataagcacaaaaaggcaagtagcttgtcctgcagcaaattatgcaaagattcaaatcacttattaggactaaagaaaggagcataaaacaattactatgattatgtacacaactctaattcatcacctttggcatttggtcaagatagaaaaaacgcggccaaatctggggctacttttagtcaggaaatgatacaataaaagctgagataaagaatgcagtctctgccccagggaggtggctcaccctgtaattccagcactttgggaagacaaggtgggcagatcacttgagcccaggagtttgagaccaacctgggcaacatagcgaaactctgtctctagcaaaaaacaaataatacaaaaattagccgggcatggtggtgtatgcctgtagtcccagctactagggaggctgaggcaggaggtttgcttgagtctgggaggcagaggttgcagcgagctgagattaaaccactacactccagcctgggcaacagagtaagacccagtctcaaaaaaaaaaaaaaaaaaaaaaaacctatttgaccaacatgtattactttattgcatattcttctgctttacagtgggctggcacatttccaaagagctatacttaatttttttttttttaatttaggccaggcgctgtggctcaagcctgtaatctcagcactttgggaggctgaggcgggcggactgcctgaggtcaggagttcgagaccagtctggcgaacatggtgaaaccccatttctactaaaaatacaaaaaaattagccaggcgtggtggcgcacatctgtaatcccagctacttgggaggctgaggcaagggaattgcttgaaccagggaggtggaggttgcagtgagctgagactgcaccactacacttcaacctgggtgacagagggagaatccatctaaaaaaaaattaattttttaaaatttgtgacaggatctcactatgttgcccgagctggaatgcagcggctattcacaggcacagtcagtgtgtgctgcagcctcaaacttctggatgcccttctcagccttccaagtagctgggtgccatcatgccatactttaattttctttagtagaaaggaaatagctgtatattctgatgacaatttggagcctttacattttatttatttactgtctttcaataaaataaatatcacgtttcaaaactaaaggtttaagatacttttttttaaataaacatgattaagtttgaatgcaaatgttttaagaaaaatcagacactgaaagtaaattttgacacttcaaaggaaatagtaattcagaaagcctatttgaagtattgctcttagttttgtctgctccagttttgtctggagcaacaccgcatacaattgtgaaaattaaatgaacctgtgtaaagtgcttagaatggtatctggcacatacaaactgttatttctttgtgaaaattaaaattcaatatagcttttctttataaatgaatgttgcatagataaaaacaatcctaaaaacaatcctgaaaaaattattaagatggtatagaaatctatgatggaacttataatgaatatttgcctattttctgatctatggggttcaggaaaagttctcatttaagagatttttacacaataaggttgactttatattcaaggaagttcctcctcgcatcggttcttaaaacacacaattacaataacagaagttctctaaaactacattttattttaaacgaatatttatttaaaagcacatgctttctgttttgtctgccttcttaattctagctacacactgctgccctctgctgcaatttcaatctttcacactcacaaacccgacctagtttccatctatacaggttatctgactcactgcaagggttatgtgtgtgtgtgtagagaacaaaagggaaggctccttgaaaagaaaactaggaactaaagatgttggcacagttcaaaagagcccatctgagaagtgggcctttttttttttttttgagacggagtttcactcttgctgcccaggctggagtgcaatggcacgatctcggctcaccgcaaccgccgcctccaggttcaagcgattctcctgcctcagccacccgagcagctgggattacaggaatgcaccaacatgctcggctttttgttgttgttgttgttgttggttttttttttttgtatttttagtagagacggggtttctccacgtggtcgagctggtctcgaactcctgacctcaggtgatccgcgagaagtgggcctttttatggatccagcaacaaactcccaacctcccaggaaaggttgcttcctgtcatctatataaaactttgtgtctcaggcctttattgcttttttaattgaaataaattatatatatatggtttaaaaaaaaaagaaaaggaaaaagggtaaacagcaaagagggtaatcaataaaacatttggcttccactccaaacctctgaacagttttgtgtatccgtccagaaagcgtatatattattacaaacatacacaaggggcatttctttttgaacacaaatgtgagtattcctaccactctttaccattctagactaacttggacgttgttccctatcaggcgagattaacccaactaaattaaaaccaagtaggttttaacaaaacagattttaaagaaatcaatcttctctccaataggttatttctgtcacgatttaattagctttctgttactactaaggcttgtatcatataaagtagtggttctcaggctgggcgcggtggctcacgcctgtaatcctagcattttgggatgccgatgcaggaggatagcttgagcccaggagctggagaccagccagggcaacgtaaagagagcccccaccaacaccccccgccacccaccaccaccgccccggaaaagcagtggttctcaaacgtcagcggacattggtatcatctggtgagcttattaaaacaagagtctctggattcaggaggtctggggtggggcttgagaatttgcatttccaataaattccaagccggaactccaggaagataacctgcattccgcgcctggcgaagcccagctacgccatttccttcctaggccccgcctacttcgtgtccctgacagccagggactggctagagggcgcgcggagtcacgtgagtcgagcgacctcgcgcgagagtttgtatttctcgcgagacttcaccgtctctgtcttttcctccttccagtgcccggcgttcctcccttccccctcgccgccgaccgagttcttccttttcagaccgggtcgccttgctgtcgtcgcggtgattttcctgctactgctactgctgctgctgccaccgccactaccactgggctcatttgccccgaccccttcccgccgccccgcccccagccccacacaaggtaacaacccccctgagggagagagtaaggcctggccgggcccgggtccctcccgaggtgaagcggaggcccaaggctgaggagcccgcctcgccggagacgcccaggcgctggccctggatcccggagccacggccgtctctcagccagagctgagcctcggcggcccggccggcgctggcctccgtgcggcggcggcaaacacggcccgcaggggaccgggtcgggtggggctgggcgccgcgcggctccctgtggagcctgcctgttggagcgcggcggggctccggcggtggtcttggagctggcgtgtggatttccacgtccgaatgatcgagttgtggcgggctttgaggtgctgcgtggcggggaggagagcagcctgggtcgctgtaactcttagggggcctttgcaggctcccagcctttggttggacgggaattttacgaaggagaagggtcctcggaaacgtggtacatttgcttataaaccatcaaaaaaggttaattggtatcttattttcaggaaaatgactgagctggatttggcgaaaggcacattcgttagaatgcctaaatgggagagtacctgtgctgttctttttgctgaagataatgcaccgataaatatttaagcgactgggcgaaagatttttgttttggagaggcacttttaaatacactcttaattgaatagttcaagtaaagatcgtagtttgtgtagttaatttaaaaacgcacttgtttggctttggaagcatactgtagtgcttaaaaataagtatttggattgtttttgaaagtttcgacttttccaacagagtagtgctttttaaaaagataacactgattattgagccgaattcagcacctaccctgtggataggagttaaaagaaaattagaaatttctttgtatctgtatgcttttttaaagtatggaatgtatctcaagtttataatcctcagaatctgttgcctttaagtttgtggtttagctgaagtctaaactgag

SEQ ID NO: 539 - DNA, 6000 bp, Homo sapiens
tctaggtgcttatcttttgccttcaactgtgctttttcaagtactttacccaaattaattaattagtgctcctaaacccacaccagccatcactttgcctttgggatggagggaggtgatattatctgagctttgcattaggagaaagcccctgggttgacagtccctctgtccatacccggtggaatcctctcctgccaacagtggcaaactcctttgtttgtttgttttgaggtggagtctgtctctgtcacccaggctggagtgcagtggcgggatctcagctcactgcaaccttcgcctcctaggttcaagagattctcctgcctcagtctcctgaatagctgggactacaggcatgcaccaccacgcccagctaatttttttgtatttttagtagagatggggtttcaccatgttggtcaggctggtctcaaactcctggcctcaagtgatccgcccaccttggcctcctaaagtgctgggattacaggcatgagctaccacacccggccagcaaactttcttatctcttgttctccattcccaggactcccatggtaccaactcagtaccttgctcagcatcccagggtgttagaactgaatggctgcttatggactccctgcaatgggcacctccttcttttacagcacagaaaattgaagcattcaattcactcagggagaggaagtgaaacacccaaagcaacacagctagttagggacagggtcactaccttgtcttaagaggcgaaaaataggaactatctcccaccctctcccctgacaaaaccaaacactctttgcgcccctccaagtatctcaatactgcttaagcctgaggagtacggggaagatgaagtatgtaacgtttatctactcacaaagcacagagtttctgttgccacctctgagcagctgtcttgttctgggcaactgtgatctcccttcctctcctaagctcttggaatgaatctttcttaagggaaatggaagttgcaattccattattctgtatagagtgagttaaggggaaggcctctctccttttctgtcatctaatagctaaattaacataagcccataggcacagggattcaggtaacagaaacctagtttgtgacaattacaacgtgaaatgaaaacatacattgtggcccagaagcccgggcagccctaggcttcagatattacctaccctaaagtagtataatgccttttaccaagaacacagctgaatcaactgtgcttttcatagaacaggcacacactaaaatatttgtggattgatttggtaggcaaaaattcttggcacttggatacttctccattttcagcttattcttaaaaaaattttttttgttaaatgttcagctgcaaaggcacaggtgactaagtgttcaacacagctggaaggaatgttggtgacagtggctgtcatctatatttcccaagttggtttctaaataacactgcttctggggtatcttgagaaaaaaaggttctgtgtttaaacaaggtaggaaacattactaatcttcctaccttggtctcccaagacactaaaggcacatagcttattaaaaacactgagaaggctgggcacggtggctcatgcctgtaaccccagcactttgggaggccgaggagggcagatcacttgagatcaggggttcgagaccagcctggccaacatggtgaaacctcaactctactacaaatataaatattagccaggcgtggtggcaggcgcctataatcccagttactggggaggctgaggcaggagaatcacttgaatccaggaggcacaggttgcagtgagtcaaaatagtgccattacactccaaactgggcgacaagagcaaaacttcatctcaaaaaacaaacaaacaaacaaaaaaccactgagaagagttgtgggtaaagaaacagttttatttttgtttaaacgagttatttccaagaccatttgaccatggaacaatccctcccacatttttttttgcatgatatctattaaagttccacaaaattcatgttctttggaaaataacttgggaattactgattgagcccaatttctgaattttattggtaaagaaaaaggtcctgagaggggctgaagttcttacaggaagttagtgggggaggtaggacgacaaccctatttcctgagtgtctggcccaaccttgtcaaccacacgcaaatacggcagcattctcaaaggtgggttctgggatcccagccatcatgggtactgcttgagatgatacgcaaaaaggacatgaacgttttcctccctaatgggtcctttgggggcaatttgctaaaacataacaggttgttttagatgcttcttaaaattggtaatcatatcccattctttctttatctcatagaactcgggatgcctacccaacacagcctgattatgctatatgtgcttagtaagtacattcaatgaatgactaaatgaaagacagggaggaagaaggaaacagtccagaactgaaagggatgagaagagaaaaaatgtggagaaagagaaggatgggtaacaaaggagccagcagtcactgatcagtagagtataggtgagagaggggaaaggagacagctgcagataatggaaaataacaaaacaaaactgaggtctgggaagctccgattttaaaaagtgaacatgagttatgagactaattcagatactggccacaccaggaggcccccgcccaggagatgaggatgaccaccaactgctgagaatctttgtaaactcaaatcaaggtgtatttattgcacaggcacaataaatgaacaaggcatcttaagtactacaatgacaggtgagtgggtcaggcacagtggctcacgcctgtaatcccagcactttgggaggccgaggcaggcagatcccttgagctcaggagttcaagagaagcctgggcaacatggcaaaaccccatctctactaaaaatacaaaaaactagctgggtgtggtggcacaggcctgtagtctcagctacttggaaagctgaggtgggaggatggcttgaccccaacaggttgaggctgcagtgagccaagattgcaccactgctctccagcctgggcaacagggcaagaccctgtctcaaaacaacaacaacaacaaaatcacagatgagtaagacacaggtctttccctaaacaaggttacagtctaatgggcagaagggctaggacagggactcagatgaaataatgccaggtagaatgtgatcagtgcccctggaggtgtggcaagccaacactgtgaggaatcagcggcaggaagatcatatcaaatcacgaggctccagaaaaactacgagggtccaggaatggtggctcacgcttgtaatctcaacgctttgggaggcagaggtgggctgattgcttgagcccaggagttcaagaccagcctggacaacatgatgaaaccctgtgtgtacagaaaatacaaaaattagctgggcatagtgagctgtgcctgtagtcccagttactcaggaggctgaggtgagaggatcgttgagctagggaggctgacggaggtcgaggcagcagtgagctgtgatcatgccactgcattctcctgggctaaagggcaagcccctgcctcaattaaataaaacaacaacaacaacaaaataaaaaactaccaggaagggccatgaggcacagaaggattgcatcaggcggagataggagatgagaagagagacatttcaaggtgatatataaagaactaccagggggtgaggaagcatatggggagatgtgtggagacacagcctgaaagtcttgaagtcacatcacggagccttgaatgaccgaccgaggcgctgacactcaagagaggcaatgggaagccagtgaaggtttgtgtgtgtgtgtgtgcgtgtgtgtgcagagaaatagtagcattagagatgattcccaggcagggtgactgggcagccaagggaaagcgctggcctgtgcgggatgaggcagttgggttctggagagcacaagcaatcattcggtgctgcccatcagacaactgaaaaatctgatcagaggcagtggctaagtccccgcctgggaacacaaaggaagcctaaggttctggttatcaccctcaggggaccgtgaccttgaaagagtaaggatagtaccagccaaaaccaatgcagccaagaggaaaagtcacagagaacagcgaggggaggtggaagtttcaatacagaaattgtagccatggctgagaaccccagcactggaggccggaatttgtgcgtttgaacgccagaggcttggctagtcatgattagcaaaggaacttcaaagagttttggagcctgctttatatctgtgaaatgggaattatttccatctcaaaggtttgaggggattcgctgagagaaacttcttagcatgggatctccagaaactggaagccacagagaaagcagcggccagagggaggaggaatcggacaggctgatcacttggagtgttcgcctaagcagtttctagaaatggaggcagggaccatcaggaagctcaaaacctttgcttcagccgagtttgcagaacgccctgtgaggagaatgggtgagctgggtcgaggaagcttcatcctcgtccccatcccccagcactgcccttttcccaacgctcccatcccgccacgcctcccaacatacccccaccccgacttcccgctcaactcccgctccagccagtcccaggagccacatgcgcatgcgccctcccgcgcccctccccaactttccacgtttcactcctctcccttttcctcctcagctccggctccgccgccacgattggccagccgaccacccggcctcggccaataagcgccgccctctcgcccccgtgttactgggtagaagaaaacaaaaacaaacagagcgagaagggccagagactctccgaggcggcggcagagacagaagagcggggtcggggccggctgaccaggaacctgggcgagcagcggcgggggcccgaggggtcagtaccagtaggcgcggctcacacgctcgggaagactgcgccctctcccccatccctcctcggaggcagccgcaagatgggagggggcgggggcggaggcgtgggggtcgcggtcctgtcaggtccgggcctgcggtgcgggggtccggctgccttcttgtagccccgcaggtccagccgcgccctccccaacgccccggactgcgggcatccggcctggttccctctttctgagcccagcctggagcgtgtcggcgcgggcccgccccctcccggagccatctccccactgagaggggcgcgcgaggcgctcgcccttgaaggtccccctcagccctcctccccctctggcggaggttgaattcgggggccgggattggaaggcgtgtttccggctggactgaaatcctgtgaggaagattcgcgccctccccgccccctgccctccctgggaatcctctgaagatgcggccccctgtccttcgtgaacccggagccccggcctcggccccggcccagccccttccgggggccgacccgggctgggacttcgggggtcctagcctgagcccgctgcgggagaacaggcccggccgctgtggggaggggccgcgcgctatcctcgccgggggcgctgggaggcgaacacgtgcccgccgccccatccctgcgcgaacttcgtcgcgcccgtcttccggcaaagggtctcttttttttagtttaggtaaaataaaatctcccagagaaaacaaagccgggaagggagccccctttctgtgaaacgcatgccatcttctccatttgtcagtttgatgctgtaacgtacatggggttttgcaagagcttcaaaactgtctgcagacgtcaatttcgcccccctcccccttgtgagaactcgctacgtagccagcaactgtgtagtgtctacaaatgatgaaaacgatcag

SEQ ID NO: 540 - DNA, 6000 bp, Homo sapiens
atcacttgagcccaggagtaataaccacatgtagctagtggtcaccatactggacagtgcagaaaagaagcaattacctatatgtaaaatatattctaaactgtattaccatccccatctcaattaagtaggtacatattatccatttataaccctaaagcatactcatacagctattgtatacagcagcacagaaatgatcattaattacataaatttttttcaattttttaccatactttaaaaagatctgtaaataaacaatggtaaagaagcttcaaattcaacatgtttgttcagatcaaagaaaactatgtacattgtaaacaatagtgagttaagtcactgaggaaagaaagatgtagtatttagttacgaaatacacttaaaatgacagaaaatagctttcaatattaataaaattataagacaaagaattatccaaagtataccaatatgaactgttctcactattcagatattacacaattctaattaactttttgggagattatttttaaaactataaatacattttaaattatcttgagttactcacatttggtcatctattccacaaaactgttcatttttatgataataacatgctattgaagcaccatggagaattagggaaaataccctaggtaatttagaatataaaaattatttgttaggaaagataccaaagataccagtaagtttatattacagaaatcactaactagcccatgtgaaaataagcaggctcactattcttctctattctgtactatataacagagaataggaatatgtggaatgtgaaaggataggcagaaaaataggacatgtaatgaatttccatgaaaataaaaatcacaaacttgactttaaaaataatatagcctgttttcttacagcatgaataaaagagtatttaaagatagtttttctatcatgtttttataaaatatggaatggtctgaagcttcctcacaacatagtcaagcttcaagatatttcagcctaggcaacatagtgaaatcctatctctacaaaaaataaaaaattagcctggtgtggtggcacacacctgttgtcccagctgctgaggaggctgagataggggaggatctcttaagcccaggaaagtcaaaactgcagtgagccatgatcacaccactgcactccagcctgggtgacagagcaagatcctgtctcaaaacgaagaaaaaaagaaaaaaggatatccttacttacctgcagggtttacattcagtatctgctcattttctacatccattttcccttaatttcgcttgcactgattaaacaaattacctaatggaaatcttccttcagaatctgtttttttaaaagaaaaaaagaaagcttcaagatcttttaaactgatgtaattaagctgaattaaacttacttaagcacactgtaaaaacaaacgacaacaacaaaaaacacacaattccattaaataaaacagttcactttactttcaaagacaacttaccctaattaacatttggttccaatctttttgataaatttatcaaagtcaaaaaaaaaaatcccagatttcagcatgtgccaaagcacccctttaattggaattaaaagatatgtttgtgatacatgtttacgtcaagttaaagaaatacacacatccaaatcttttaggaataccaagcctcaaaattaatctgatatacatacataggaatataaatactggatagttccctaccaatgaattatgagaactactccaaaataaaaacaacacagttttagttaataaagaatatcacatgactgtgttatttttcacattacggcatatctgaaaggcagatatatctgccactcattacctaggtctctataattactagaataagactttgggagaaacttttaaaatcagcttttttgataatattatttatatgagaaatccttttttgataatattatttatatgagaaatccattttttaaaaatctgatcatttcagaaaggagtaagtacaacgacataagcatttcagtattttaggcctcagtttcaaaatggcttaaaaattattaatactggaaggtttgatgaaatcagttaccttttagacaattaacttagtgatacagatccaataatgttatatgaaagaaatatcaaaatagttttcaaaaaatatattaccagaaagtgcaaccaaattaagatttcagaatctctctagaagtattttttaaatagtggtttagagtacttaagtgtatgtttaagtcacataggttggatataagtccttctggtcatttacaatcaggttgctagcagtgtgctcttcagagatataaaatgcacaaattagtgaaaatgcctaataaattaattacagaaaagcacattttttcctatataacttaacctactgttagatgtcattttaggataacaatgatatatacagagcctcctgggactcaaaggtgaaactgacttttaaattcctcattatgtactactatttgctaacataagtttatagcccttttcttcagaaaacggtattattttgtgaaacaaaaacaaatggaccttatgttaaaattataggcttcttactatggtataatcctcagactaatatgctatcatattgcttgggaacttaagaaaatggtgagatcattctctaattctgttaagaataaattaatatatgtgaatctttataatcacttttcactataactcccgccaactttagatatgaaaaaaaaatcttaaaaatatgtagagattcatataaatatatgaacaaaaatggtttgcaaatctaaacactcagcatccttcatggctgaaaaggctacattctgttttaattccatgcatgaaatacatataggaaaggaataatgtcatatgatacgtgtttcagttttttagagttccattacaaagtctttttcattcttgatgaaagtataacttttgagagaatactttctgcagaacctaataagcgaaatgattataattgatgttcataaagccctttacaattcaaaaagaattgtacatgtattatttaatgtaccttacagaaaaaccttcgggtaggtattccaccttacacacaactaaacagattcagagagggtaggtgatatgtccaaggacagacagctgcttagtggaacagccaggatgagaatccagaccttccaaatccagtactgtttgcacaagttcaatccaaaattttaatatcccacaggaagattcttttcaagggttaacagaagcttcttaaaacagacttctgctgttcaaacttttaaatgctgttttccaaacactaaaaataattattttaaactattatacagaaggcattccgtcagacaaaactgtcaggaaatgactatcatctcttttattaagataaaaacaaagttatcttaataaaaaaaatagtcctgtgtctttaggcaatgataacccgatcaggaactcaagtcatatttgacagcaacaaacacgttttaagagtttagataagacatgttccacgtttttacgctctttaaagtagtaggattttttccaatttatttaacaacccttaattggcccaaacaagaaaatataaagcaaaaaatccaaacgctatttccttcatactaacctacaaaaatgaattttcgatgagaaaactatacatacaagttagaagaaaatgaaggctgacattaaacactgttcttttctccagtgtgttacacgaaatatacaatcagaagtattcaactgccaagacattccctaagagacagaccctccactcccccacgaaatatatacatatgtatttcctgaaatatacctcataaattgctctggcattttggggagtcaagctttggccatttattaactaggattacttgtattcattcttcggctacgaacggctaattagcagcttaaaaccagctaaaagcattctactacagtaatgcaaaagcaagcactacagataatattcaagcggcatttatttttgcagtcctaatattttttcctttcacattagtaccacagaaaaagccagtcaattataattcaaatacacttactgagatattaacgtattcaataagcctataatgaaggaatattaagggcataaataccagtaactccttgcttaaaaagcacttggtggtttcccaaaaaagtcacgttaagaatatcaagattgtaacaattaaagtaaaaatacaagttaaaaacaggggaaacccttttttccccgacacctaatcgcatttctgatcgttttcatcatttgtagacactacacagttgctggctacgtagcgagttctcacaagggggaggggggcgaaattgacgtctgcagacagttttgaagctcttgcaaaaccccatgtacgttacagcatcaaactgacaaatggagaagatggcatgcgtttcacagaaagggggctcccttcccggctttgttttctctgggagattttattttacctaaactaaaaaaaagagaccctttgccggaagacgggcgcgacgaagttcgcgcagggatggggcggcgggcacgtgttcgcctcccagcgcccccggcgaggatagcgcgcggcccctccccacagcggccgggcctgttctcccgcagcgggctcaggctaggacccccgaagtcccagcccgggtcggcccccggaaggggctgggccggggccgaggccggggctccgggttcacgaaggacagggggccgcatcttcagaggattcccagggagggcagggggcggggagggcgcgaatcttcctcacaggatttcagtccagccggaaacacgccttccaatcccggcccccgaattcaacctccgccagagggggaggagggctgagggggaccttcaagggcgagcgcctcgcgcgcccctctcagtggggagatggctccgggagggggcgggcccgcgccgacacgctccaggctgggctcagaaagagggaaccaggccggatgcccgcagtccggggcgttggggagggcgcggctggacctgcggggctacaagaaggcagccggacccccgcaccgcaggcccggacctgacaggaccgcgacccccacgcctccgcccccgccccctcccatcttgcggctgcctccgaggagggatgggggagagggcgcagtcttcccgagcgtgtgagccgcgcctactggtactgacccctcgggcccccgccgctgctcgcccaggttcctggtcagccggccccgaccccgctcttctgtctctgccgccgcctcggagagtctctggcccttctcgctctgtttgtttttgttttcttctacccagtaacacgggggcgagagggcggcgcttattggccgaggccgggtggtcggctggccaatcgtggcggcggagccggagctgaggaggaaaagggagaggagtgaaacgtggaaagttggggaggggcgcgggagggcgcatgcgcatgtggctcctgggactggctggagcgggagttgagcgggaagtcggggtgggggtatgttgggaggcgtggcgggatgggagcgttgggaaaagggcagtgctgggggatggggacgaggatgaagcttcctcgacccagctcacccattctcctcacagggcgttctgcaaactcggctgaagcaaaggttttgagcttcctgatggtccctgcctccatttctagaaactgcttaggcgaacactccaagtgatcagcctgtccgattcctcctccctctggccgctgctttctctgtggcttccagtttctggagatcccatgctaagaagtttctctcagcgaatcccctcaaacctttgagatggaaataattcccatttcacagatataaagcaggctccaaaactctttgaagttcctttg

SEQ ID NO: 541 - DNA, 6000 bp, Homo sapiens
cctgtgcccgaacaactactgggtacataacgaaatgaaggcaaaaataaagatgttctttgaaaccaatgagaacaaagacacaacataccggaatctctgggacacattcaaagcagtgtgtagagggaaatttatagcactaaatgcccacaagagaaagcaggaaagatctaaaattgacaccctaacatcacaattaaaagaactagagaagcaagagcaaacacattcaaaagctagcagaaggcaagaaataactaagatcagagcagaactgaaggaaatagagacacaaaaaacccttcaaaaaatcaatgaatccaggagctggttttttgaaaagatcaacaaaattgatagaccgctagcaagaccaacaaagaagaaaagagagaagaatcaaatagacacaataaaaaatgataatggggatatcaccaccgatcccacagaaatacaaactaccatcagagaatactataaacacctctacgcaaataaattagaaaatctagaagaaatggataaattcctcaacacatacaccctcccaagactaaaccaggaagaagttgaatctctgaatagaccaataacaggctctgaaattgaggcaataattaacagcttaccaaccaaaaaaaagtccaggaccagatagattcacagccgaattctaccggaggtacaaggaggagctggtaccattccttctgaaactattccaatcagtagaaaaagagggaatcctccctaactcatttgatgaggtcagcatcatcctgataccaaagcctggcagagacacataaaaaaagagaattttagaccaatagctctgatgaatattgatgcaaaaatcctcaataaaatactggcaaactgaatccagcatcacatcaaaaagcttatccaccatgatcaagtgggcttcatccctgggatgcaaggctggttcaacatacgcaaatcaataaatgtaatccagcatataaacagaaccaacgacaaaaaccatgattatttcaatagatgcagaaaaggcctttgacaaaattcaacaacgcttcatgctaaaaactctcaataaattaggtattgatgggacgtatctcaaaattataagagctatctatgacaaacccacagccaatatcatactgaatgggcaaaaactggaagcattccctttgaaaactggcacaagacagggatgccctctctcaccactcctattcaaaacagtgttggaagttctggccagggcaatcaggcaggagaaggaaataaagggtattcagttaggaaaagaggaagtcaaattgtccctgtttgcagatgacatgattgtatatctaggaaaccccatcgtctcagcccaaaatctccttaagctgataggcaatgtcagcaaagtctcaggatacaaaatcaatgtgcaaaaatcacaagcattcttatacaccaataatagacaaacacagagccaaatcatgagtgaactcccattcacaattgcttcaaagagaataaaatacttaggaatccaacttacaagggacgcgaaggacctcttcaaggagaactgccaaccactgctcaatcaaataaaagaggatacaaacaaatggaagaacattccatgctcatgggtaggaagaatcaatattgtgaaaatggccatactgcccaaggtaatttatagattcaatgccatccccagcaagctaccaatgactttcttcacagaattggaaaaaactactttaaagttcatatggaaccaaaaaagagcccgcattgccaagtcaatcctaagccaaaagaacaaagctgaaggcatcacgctacctgacttcaaactatactacaaggctacagtaaccaaaacagcatggtactggtaccaaaacagagatatagaccaatggaacagaacagagacctcagaaataatgccgcatatctacaaccatctgatctttgacaaacctgacaaaaacaagaaatggggaaaggattccctgtttaataaatggtgctgggaaaactggctagccatatgtagaaagctgaaactggatcccttccttacaccttatataaaaattaattcaaggtagattaaagacttaaatgttagacctgaaaccataaaaaccctagaagaaaacccaggcaataccattcaggacataggcatgggctaggacttcgtgtctaaaacaccaaaagaaatggcaacaaaagccaaaattgacaaatgggatctaattaaactaaagaacttctgcagagcaaaagaaactaccatcagagttaacaggcaacctacagaatgggagaaaatgtttgcaatctactcatctgacaaagggctaatatccagaatctacaaagaactcaaacaaatttacaagaaaaaaacaaccccatcaaaaagtggctaaaggatatgaacagacacttctcaaaagaagacatttatgcagccaaaagacacatgaaaaaatgctcaccatcactggccatcagagaaatgcaaatcaaaaccacagtgagataccatctcacaccagttagaatggcgatcattaaaaagtcaggaaacaacaggtgctggagaggatgtggagaaataggaacacttttacactgttggtgggactgtaaactagttcaaccattgtggaagtcagtgtggcgattcctcagggatctagaactagaaataccatttgactcagccatcccattactgggtatatacccaaaggattataaatcatgctgctataaagacacatgcacacgtatgtttattgcggcactattcacaatagcaaagacttggaaccaagccaaatgtccaacaatgatagactggattaagaaaatgtggcacatatacaccatggaatactatgcagccataaaaaatgatgagttcgtgtcctttgtagggacatggatgaagctggaaaccatcattgtcagcaaactatcgcaagggcaaaaaaccaaacaccgcatgttctcactcataggtgggaattgaacaatgagaacacatggacacaggaaggggaacatcacacaccggggcctgttgcgggtggggggaggggagagggatagcattaggagatatatctaatgttaaataacgagttaatgggtgcagcacaccaacatggcacatgtatacatttgtaactaacctgcacgttgtgctcatgtaccctaaaacttaaagtataataaaaattaaaataaaataaaggcaatttgattctacttctgccactagcaaatctgtgacgggggcaacttcgctgagcctcagattctttataaaatgaacagagattagttgtaaaagcctcttttagttctaacactgattcactatatttcaggaataacctgcaagatcctagatttacaaattagataaatcaaagagtaatttaattgctttactaatagtattctttgtttctcagatgactcacaatcgaatttattttattttattttattttgtttttgagacagagtctcgctctgtcgcccaggctggagtgcagtggcgcgatctcggctcactgcaagctcctcctcctgggttcccgccattctcctgcctcagcctcccgagtagctgggactgcaggcgcccgccaccatgcctggctaatttttttgtattttcagtagggacagggtttcaccgtgttagccaggatggtcttgattttctgacctcgtgatacgcccgcctcggccttccaaagtgctgagattacagacgtaagccaccgcgcctggccttgaatttctttacaaagcaaattatcttagcgtctaaatggcttactttacctccaacattttgggaacatgggtattaaaaaaagactagggcagccacattagaaattgtgtcactgctggttaaaaatattcagggattcaggattttcccgtaagttaatcaattataattattcccttacacttgccaggggtcagtctttttttttcaaaccaaggaagcatcctcacctggagagatttgagcgacaaatactgaagtctcaggcccacgggaaagcaagcaaacagaaagagaagatggcgttcttgcctggtatccgaccactaagcatgtactccattcacgcaaggatttggtggttcctaaaagtaaatactgtgtctctgatatgaataaaactacaatttcttctcagatattttacacctcagtgtgattgagtttagttgcttccctgagccagggtgaagaaagacgtgtgtgtgtgtgtgtgtgtgtgtgtgtgtgtgtgtgtgttgtggggtcagggtgaactaggtgcgtgtgtgtgtatgaatccgtgtgtgtggtgggtttcatgaactagaatctgtgtgtttgtgtgtgggtgtgttgggtcggggtgaacttgaatccgtgtgtgtgtgtgttgtggggtcagggtaaactggaatgcgtgtgtgtgtgtgttgtggggtcagggtgaactggaatgcctgtgtatgtcttttgtggggtcagggtgaactggaatgcctgtgtatgtcttttgtggggtcagggtgaacgggaatccgtgtgtgtgtgtgtttggtcagggtgaactggataactggaatccgtgtgtgtgtgtgtgtgttttgtggggtcagggtgaactggaatccgtgtgtccgtgtgtgtgtgtgtgtgtgtgtgtgtgtgtgcgtatgctgtggggttggggtgaactagaatccgtggaagtgctcagtctctcccgtgtttgactgactcccggccgcatacccagtccctgacacacgggggcgcacaacaaatatttcccgaaagatccaggagcagcatctccaccagcaagctgggctgctgggtgggtacttccttcaaagctgagggagcgtcctacgcccacgcgcgcaggagggcgccccccgcaaagcaacgtctaggagaccacagtggatgccacagcgggcccgaagcggatcagccttgtggggtacgcatgctaatgtaggcgtggagtcccccagggggacgccagcagttccagctgggatccaggtttcgctaggggagagcctctggctatgggaaaggggtctccgagttgatgtgaaggcccaggtcgaggtgtacactgggggcggggaagtggaggtgaccacacgagcgccccatcactgagcgccgccgcgaaatctgcgctctttgggtcacttggagcgcggccagtttggcagatttgtttttttcccggaacaacccgcggcggctcggctgtcccgggaaactgcaaactttgctgtgcgcgttctcccgcgcgcgggctcaactttgtagagcgaggggccaacttggcagagcgcgcggccagctttgcagagagcgccctccagggactatgcgtgcggggacacgggtcgctttgggctcttccacccctgcggagcgcactaccccgagccaggggcggtgcaagccccgcccggccctacccagggcggctcctccctccgcagcgccgagacttttagtttcgctttcgctaaaggggccccagacccttgctgcggagcgacggagagagactgtgccagtcccagccgccctaccgccgtgggaacggtaactgcagcccccacctcggccggcgcctctccagcccgccggccgtgcgcgccttgcctccctccttcctgccggcttcctagttcccccctgcgcccccagcgtggtctaggggagcctggttgagtgggactgagtggccccgacggcctgcgctgaaactttgggaagagggcccgttccgctctctccatcgcttgccttgctcagcttgtcctcccttccctcctagccggggggctaggggacacctcgtactattcgagatttaggagaggagggctcgtgatctggcacagcgg

SEQ ID NO: 542 - DNA, 6000 bp, Homo sapiens
ccattccttctgaaactattccaatcagtagaaaaagagggaatcctccctaactcatttgatgaggtcagcatcatcctgataccaaagcctggcagagacacataaaaaaagagaattttagaccaatagctctgatgaatattgatgcaaaaatcctcaataaaatactggcaaactgaatccagcatcacatcaaaaagcttatccaccatgatcaagtgggcttcatccctgggatgcaaggctggttcaacatacgcaaatcaataaatgtaatccagcatataaacagaaccaacgacaaaaaccatgattatttcaatagatgcagaaaaggcctttgacaaaattcaacaacgcttcatgctaaaaactctcaataaattaggtattgatgggacgtatctcaaaattataagagctatctatgacaaacccacagccaatatcatactgaatgggcaaaaactggaagcattccctttgaaaactggcacaagacagggatgccctctctcaccactcctattcaaaacagtgttggaagttctggccagggcaatcaggcaggagaaggaaataaagggtattcagttaggaaaagaggaagtcaaattgtccctgtttgcagatgacatgattgtatatctaggaaaccccatcgtctcagcccaaaatctccttaagctgataggcaatgtcagcaaagtctcaggatacaaaatcaatgtgcaaaaatcacaagcattcttatacaccaataatagacaaacacagagccaaatcatgagtgaactcccattcacaattgcttcaaagagaataaaatacttaggaatccaacttacaagggacgcgaaggacctcttcaaggagaactgccaaccactgctcaatcaaataaaagaggatacaaacaaatggaagaacattccatgctcatgggtaggaagaatcaatattgtgaaaatggccatactgcccaaggtaatttatagattcaatgccatccccagcaagctaccaatgactttcttcacagaattggaaaaaactactttaaagttcatatggaaccaaaaaagagcccgcattgccaagtcaatcctaagccaaaagaacaaagctgaaggcatcacgctacctgacttcaaactatactacaaggctacagtaaccaaaacagcatggtactggtaccaaaacagagatatagaccaatggaacagaacagagacctcagaaataatgccgcatatctacaaccatctgatctttgacaaacctgacaaaaacaagaaatggggaaaggattccctgtttaataaatggtgctgggaaaactggctagccatatgtagaaagctgaaactggatcccttccttacaccttatataaaaattaattcaaggtagattaaagacttaaatgttagacctgaaaccataaaaaccctagaagaaaacccaggcaataccattcaggacataggcatgggctaggacttcgtgtctaaaacaccaaaagaaatggcaacaaaagccaaaattgacaaatgggatctaattaaactaaagaacttctgcagagcaaaagaaactaccatcagagttaacaggcaacctacagaatgggagaaaatgtttgcaatctactcatctgacaaagggctaatatccagaatctacaaagaactcaaacaaatttacaagaaaaaaacaaccccatcaaaaagtggctaaaggatatgaacagacacttctcaaaagaagacatttatgcagccaaaagacacatgaaaaaatgctcaccatcactggccatcagagaaatgcaaatcaaaaccacagtgagataccatctcacaccagttagaatggcgatcattaaaaagtcaggaaacaacaggtgctggagaggatgtggagaaataggaacacttttacactgttggtgggactgtaaactagttcaaccattgtggaagtcagtgtggcgattcctcagggatctagaactagaaataccatttgactcagccatcccattactgggtatatacccaaaggattataaatcatgctgctataaagacacatgcacacgtatgtttattgcggcactattcacaatagcaaagacttggaaccaagccaaatgtccaacaatgatagactggattaagaaaatgtggcacatatacaccatggaatactatgcagccataaaaaatgatgagttcgtgtcctttgtagggacatggatgaagctggaaaccatcattgtcagcaaactatcgcaagggcaaaaaaccaaacaccgcatgttctcactcataggtgggaattgaacaatgagaacacatggacacaggaaggggaacatcacacaccggggcctgttgcgggtggggggaggggagagggatagcattaggagatatatctaatgttaaataacgagttaatgggtgcagcacaccaacatggcacatgtatacatttgtaactaacctgcacgttgtgctcatgtaccctaaaacttaaagtataataaaaattaaaataaaataaaggcaatttgattctacttctgccactagcaaatctgtgacgggggcaacttcgctgagcctcagattctttataaaatgaacagagattagttgtaaaagcctcttttagttctaacactgattcactatatttcaggaataacctgcaagatcctagatttacaaattagataaatcaaagagtaatttaattgctttactaatagtattctttgtttctcagatgactcacaatcgaatttattttattttattttattttgtttttgagacagagtctcgctctgtcgcccaggctggagtgcagtggcgcgatctcggctcactgcaagctcctcctcctgggttcccgccattctcctgcctcagcctcccgagtagctgggactgcaggcgcccgccaccatgcctggctaatttttttgtattttcagtagggacagggtttcaccgtgttagccaggatggtcttgattttctgacctcgtgatacgcccgcctcggccttccaaagtgctgagattacagacgtaagccaccgcgcctggccttgaatttctttacaaagcaaattatcttagcgtctaaatggcttactttacctccaacattttgggaacatgggtattaaaaaaagactagggcagccacattagaaattgtgtcactgctggttaaaaatattcagggattcaggattttcccgtaagttaatcaattataattattcccttacacttgccaggggtcagtctttttttttcaaaccaaggaagcatcctcacctggagagatttgagcgacaaatactgaagtctcaggcccacgggaaagcaagcaaacagaaagagaagatggcgttcttgcctggtatccgaccactaagcatgtactccattcacgcaaggatttggtggttcctaaaagtaaatactgtgtctctgatatgaataaaactacaatttcttctcagatattttacacctcagtgtgattgagtttagttgcttccctgagccagggtgaagaaagacgtgtgtgtgtgtgtgtgtgtgtgtgtgtgtgtgtgtgtgttgtggggtcagggtgaactaggtgcgtgtgtgtgtatgaatccgtgtgtgtggtgggtttcatgaactagaatctgtgtgtttgtgtgtgggtgtgttgggtcggggtgaacttgaatccgtgtgtgtgtgtgttgtggggtcagggtaaactggaatgcgtgtgtgtgtgtgttgtggggtcagggtgaactggaatgcctgtgtatgtcttttgtggggtcagggtgaactggaatgcctgtgtatgtcttttgtggggtcagggtgaacgggaatccgtgtgtgtgtgtgtttggtcagggtgaactggataactggaatccgtgtgtgtgtgtgtgtgttttgtggggtcagggtgaactggaatccgtgtgtccgtgtgtgtgtgtgtgtgtgtgtgtgtgtgtgcgtatgctgtggggttggggtgaactagaatccgtggaagtgctcagtctctcccgtgtttgactgactcccggccgcatacccagtccctgacacacgggggcgcacaacaaatatttcccgaaagatccaggagcagcatctccaccagcaagctgggctgctgggtgggtacttccttcaaagctgagggagcgtcctacgcccacgcgcgcaggagggcgccccccgcaaagcaacgtctaggagaccacagtggatgccacagcgggcccgaagcggatcagccttgtggggtacgcatgctaatgtaggcgtggagtcccccagggggacgccagcagttccagctgggatccaggtttcgctaggggagagcctctggctatgggaaaggggtctccgagttgatgtgaaggcccaggtcgaggtgtacactgggggcggggaagtggaggtgaccacacgagcgccccatcactgagcgccgccgcgaaatctgcgctctttgggtcacttggagcgcggccagtttggcagatttgtttttttcccggaacaacccgcggcggctcggctgtcccgggaaactgcaaactttgctgtgcgcgttctcccgcgcgcgggctcaactttgtagagcgaggggccaacttggcagagcgcgcggccagctttgcagagagcgccctccagggactatgcgtgcggggacacgggtcgctttgggctcttccacccctgcggagcgcactaccccgagccaggggcggtgcaagccccgcccggccctacccagggcggctcctccctccgcagcgccgagacttttagtttcgctttcgctaaaggggccccagacccttgctgcggagcgacggagagagactgtgccagtcccagccgccctaccgccgtgggaacggtaactgcagcccccacctcggccggcgcctctccagcccgccggccgtgcgcgccttgcctccctccttcctgccggcttcctagttcccccctgcgcccccagcgtggtctaggggagcctggttgagtgggactgagtggccccgacggcctgcgctgaaactttgggaagagggcccgttccgctctctccatcgcttgccttgctcagcttgtcctcccttccctcctagccggggggctaggggacacctcgtactattcgagatttaggagaggagggctcgtgatctggcacagcggctaacagcgagggctcctttgcctgcgttccggtccccaccccttgcctgccggcggtgggacctcaaccctctctctgttaaatgggaaccacggtgatccccgcagactgttggcggggatggacagagttgattatggtacgcgtttcgcggcagtggctctgtcaagtctgagtacactggagctgagcgtccttgctgcagggctcttagagggaccttgaggaggtggaaaccaggcaggagacatttagacgtgtggagtgttaggctccaggtgacagctttgcggtttatggagcagtaaaattacttgtgggtgattgtgggtgtatcatttccagatctttattcttgaacttctgggctcctgggctagttgacgtggccctccctgttgtctcaacttacaggctatttcctccttttgggtctcgccggcctgaccttcacccttggtaccgccattgcctagattcacagtccaccttctgccacctgtaaactgtgtggctttggacaggttacttaacgtctctgaagaagctaaagtttctgcaatagcaaagtaaaggccctggtctagcagtgccatgagccttgggtgacgcagcggagcgcttgagtgcccagcagagcctccctttccccctcccagctgctagaggcaagagggggaggttttcaggtcttctctgtgtgccc

SEQ ID NO: 543 - DNA, 6000 bp, Homo sapiens
gacttctgacttccagaattgtaagaaaataaattcgtgttgttttaagtatctaaatttgcagtaatttgttacagcatcaacaggaaactatcacagcgggccaggcatgggttaatgaattggattataattaaatccagttctacacctaggtccaattaaaaacatagacaaaacctttgagtggctcctcactgcctggaagagaaagctcaaattcctcagcatgaaatagattcttgacaacacggttctacaaggtcctctctagctttagttcccttccccccgctcccgcccgcatccccagcccatacattttagccatgggtcctggcgtctgagccttttgttgttcctacggactcttatggggctcaactcctttgccgtgtctctatgaagtctttcaggttgaaatttcctcccctgaaaatggacaacataagggcttgctgcatggttgattctgctttcaagattaatgttcagtggcacgcatacgcaccgccacttgcagaggtcgacatgcacttagtacatgtcggcagaagcaactcttaagccattactaaccggggcagttaagttctggcaatgggctgaaagatctttcttcatcgccactcttcactaagctacaagaccaagtactttctcctgaaggtacttagaggaggaaaaaagcacaccaggaactgttgtggggggtgagaagacaaattctacagggatgcagagctagtatgaacatggcttcccctatcttcatgcaaaactgcgtttctagcccacatgactgatgtctgtaaacgcaactttatgtttgtgcacgtctctgcccaaggatttttttttcttttaactccaagaatacggggggagttgggcaagtcattataatagggctcctcttcttaccccactatccgatgagacatttgatagggaaacctctgaaacttgtaaagcaatttacaagcaggccacctacttgtatttaacaaataggctagaaatacctatttgtgggaaatcgagtccccaaaacaccccaacccctccgggtccccgccagcacagcctctcttctgactgtcgcgcgaagcggcggttgactaacgcgagccagccgttctgatgaacacaggagggccggacggccctgctggctcggacaccacgcggagggagagtgctgcctgagccacagttgaagaaaccgctctcgggctggacgaaggcggagcagcagctcagactgggccaacagaagagccttacaatgcctggagcagtccgaggacagcccccggcgcgaggaactctgggacttgtagttcgctttcccagacagcgcttttccccacttggtctccccgcctttcaatgtcgcttttattcttccctttacctcccagcccgccgacttcctggtcgtcgcacgtcctcacgtatgactacactacccagaagtctcctcttcacgtcccagcgcgggtgggcgccggcggctcctcttaaccacaggttccagaagtcctctgcagaagtgcttccctctctcatttccaggaccacaattcccagagacttcggcttcacgacgtttctctttttgcccgatctctcccggagctggctgggcttcggccggccagaggcccacagcgacgacgtgatccgtcgtgagcgggtcccagggtttcctcggcggcccttttttctctcccctcggtcgtcccccttgcaggctgtcgcggctggcctgagcggtgacctggcgggtcgcgcctgcgctctgccctgtttcctgcctggctggtggcggcggccattttgttcatcctcctcctcctcctgctcctcctggttggagcgcagtgtccggagcgggctggggggagagagcccgagagcagggttcggtgccttttcctctgtccccagccggtgcccagagcccccctccccttcctccccaccccctcccctccccaaccctgccctcccccttgtcccgggatcgctccgtcgcacccaccatgatggaagacgacgggcagccccggactctgtgagtacccgagacgaggggtgccaggcgccaagaggcccgggcaccgcgggacgctaagggagggagcaggagagactgggccgaagccgggactctaggcggctccctgaccagggcggcgtggacgcgaagtgcattcctcatctgtccccttttccttgggaaggaaatcctcccttcccccaaacagtcacttcctggggtctggggcttgtctcgacctttttctctggcgtccttctttgcatgccctccctaggccgggtttctgcacggctgaggctgtcaggcccaggagaactcctgcaccccctccgcgttggacgccctgggctgggcctggagctgccggcgcccacgggggaagggcctggcgggggtaggattgggggtgggcccgggggtgggccccgcgggccctgaggaattagcactcaccccttccacgtcctcagctcgagtcgctcccagctcttctccccagctaagctctcggaggaagcaggacactctttcaccactcaagccccttctctctttatgccccacgtgcccccgcccacgctgtcagaaacacccgcctagcgcccgctacttttgaagtacataagggataccttttgctgcccgagcatctttcccttcttggataaagaagtttactttgagcgctccctacgctaaactgacaaccagttgttaaactccttttgctctctaggtgttgcctcttcctaatctgtttgtgcgtcgaaagcttcagagttggctaaaattatgtcttcatccgctatttgatgtgtgtcttctgaacgctttttctcctgtcttgctgttgctttttacctgaagctcaatctaatgaatgaattccatcttccaaccacttaattctggtttccttcctttccaatgaagagtgatgactcagcatttgcattcctttctgaatagtgtggcactccttttctctgcatctttttttttttttttaagtctgaatactttttaattaaatgtttaaattgggcaccctaatttcccggcctctccaggtctagcactcctaccttgagtaccaaggagtcagatcgctgctttgtttctcttgcctctcctggtattgataggatcatagtccacttggctctgctctctgatggggaaattgctttttagggaatagatgaaggtggaggggcactcgagaagtttgactagcttcacatctcttcactcctaccaaagaaaggatgctcagtaaagaagatagatgttcagtattgatagagatttttttggtgtggccttgtacaggaataaatgtgttctctaacgtctcactgaagtatccgtcccgttttgagaatctgaggcctactgaagcacatccaatgcttcaatgaaacgcctgcttaatagaacgtctttgtgttttgtgttgtcttccatttctgccttctctccctagaagaaagaattgggacacacttgaaatttgtccttcaggccgggcgcagtggctcacgcctgtaatcccagcactttgggaggccgaggtgggcggatcacgaggtcaagagatcgagaccttcctggccaacacggtgaaactccgtctctacaaaaaacacaaaaattagctgggcgtggtggcgcgcgcctgtagtccctgctacttgggaggctgaggcaggagaatcacttgaacccaggaggcagaggttgcagtgagccgagattgcaccactgcactccagactggtgacagagcgagagttcgtctaaacaattaaaaaaaaaattttatccttcaacatctgttgaagccaagacttggtgttgagttacaatgtgtactttgatataagcatctgggaaagctaggcttaaagactagctaacatgtatttaacaaagataaaagttacattgtatctaaaaatctgaagtatcatcacacactgaatgattgataaatactcatggcaggggtctcatttactgtatctgttccttaccaagaggaatctctggttttgtagtgctaaagaatgtgcttttttgatgtcttttatttatctttgcatctgccttgccttcatccctatcagagtttctccaggggaataataagctaacttctttgtcacttatttccttcctctaccttctctaatctcttgttctttctttgaaacagttaagttgtctatgtttacagttctctaaaactgtgacatgttcatatgaataaataaacatcttaactctgttgttttgtatgtcagtacgtgtttactattctgtcttcctttttccttctcccacccttttccatagggcctttttttttttttaagagaaggactactacatcttcctaggtcttacccccacagcacttagttcactgcctggaacataagaggtactcagaatttctacagtgattatacttctttcattaaattagtattaagttcttttttaaaagtcctggttgaactaagattgtaggcagacattactgtcacatgtggtgcagtctgttgacttttatatattttttaaaaccttcaaatgtaaaatcttgagataaaagcaaatgtttaacaattgggatttttattagagtttaatacaaataatgcatagtttttctaagtgtacgttttacatattctcaaagggttctattagatataagtaacatgatgaaaactgaacatgattttagacgttgatatctagtagggttttttgtttatggagatcttatattttacattgtgagctatggattaggtttttcaagtggccagtatgttttaaaagaatgtgttcttaacaaagcttatcttaaattgtttccttaagatgcctgtgtgttactagtgaggtttttttcctgcagacacacacaagctaagacatatggttctatcttcagaaaacaatatggtgtttagagcctaggtaggtctttaaatattcattacctacagtattactaatttatttgatggtatttaaagtggcaagaattgctttgatgttgagcctaaatttctatttgtcatatagttgctttaaaggtctgttttctgatgttcttcattctcatttgacatttattttggggtattatgcattgagtaacttgtgatctaaaaaaacaaacaagatcatgctgtgtaatactggtgttggaactggactgtctgacacctgccttgtgggacacacatttcaggcttgggttgtgtgtatctttgtagtgcagtgatttgatccatggtatatctgaatctacaatatgacactaaattgtaatagtgttttattgtagcttattttattttcttcatctatcggatgcaccaaaattgctaggaattcgtgtaataccatgttacacaatcccttcctttaaggctattctttcttcctggaaataagctaatgatttagagtataatctgaacatctaagaacaaagcagaagaaaattctataaactattacaaaattgactggctataccatggatttggctatactgtggctataatcaagcccctcattcaaattcaacttaatcatattctttgtttctttaaagtaagagagagagagtgagtgtgtgtgtgtgtgtgtgtgtgtgagaatatctcatatatatagttggtcaatttagttgtacctcctgcagctatcttccatcatgcctccttcctaaaatgaaatactgtaccgacaaattgaacaattaattagagatctattgaaggatattattgcaaaatctcttcttgtataggacttgtcaagaacaaaagcaaaactattatggaaatttagctatagttttttgtgtgaaagtgctgataatttcagccttggtagggctactc

SEQ ID NO: 544 - DNA, 6000 bp, Homo sapiens
aaaaaagccgtcactgcttaataagatctttattccaccaggtgtggtggctcacacctgtaatcctaacactctgggaagccgaggcaggtggatcacttgaggtcaggagttcaagaccagcctggccaacatggtgaaaccccgtctctactaaaaacacaaaaaattagccaggcatggtggcgggcacctgtaatcccagctacttgggggaggctgaggcaggagaatcacttgaacccgggaggtggaggttgcagtgggctgagatcgcgccatggcactccagcctgggcaacaagagcgaaactccatctgaaaaaaaaaaaaaaatctttattctaagtcaacctatttcccgccagttacagatcttgaagaatttctagaggcatatttagatatattaatttacatttctagcactgaaagcaaagatgaaaacgttaatatctaagtttagaatgtcatgaaatatttatttaaaaatccagtattaaggtttcctatttttcaaattatctccactaaaagttaaatgttaagcagcaaactaaatttcaaaaactaacatgaaaggccttccataacaacacatacaatatcttaatttaccaggattaaaaggccatgattcactatataatttcacctaaactttacccaaatttcagactgccttttcttttactgagttcttgtacccaaatttcagattgcctcttcatttacatttgccttcgtgcatcataacacttgagagacgtattgtatagcttttaaaatactgtactattctattttaagtacttttacagtatcataaaataatctgtcccaaagtaaatactaacaaaaatatttaagacaaagttcaatgcctgacctagtaagatcatctcttggtagttcattgaaatgacatctttattcgttccaaattatagcttctacacttcactttctttctgctctggttatgaaatagtcaagctaaagatccaagtctttaaatatataattgctacctaaagaacatacacaaaataacagaaaaaagataaatggctctaatttttgtattgagaggtcaattcaaagagtaaacacttaggaaattccaaaatgatttttaactcaacgaaaaaattcagaagaggcataccttagagtctattttgtcttctaagaacaggaactgtaggaactgaagcattaaaaactgaaaatgacacctttatctctaatatcagggttaaaatccaatttggggctaaaaacttagcagtttcacagtaggcagaaattcacattgccaaactacttcctgtgtccgactgggcagaattttaagttaagaatatcatgcctttcagaagactaatgacactttttcaacactgaatgtgctctcactctgaaaagagtagccctaccaaggctgaaattatcagcactttcacacaaaaaactatagctaaatttccataatagttttgcttttgttcttgacaagtcctatacaagaagagattttgcaataatatccttcaatagatctctaattaattgttcaatttgtcggtacagtatttcattttaggaaggaggcatgatggaagatagctgcaggaggtacaactaaattgaccaactatatatatgagatattctcacacacacacacacacacacacactcactctctctctcttactttaaagaaacaaagaatatgattaagttgaatttgaatgaggggcttgattatagccacagtatagccaaatccatggtatagccagtcaattttgtaatagtttatagaattttcttctgctttgttcttagatgttcagattatactctaaatcattagcttatttccaggaagaaagaatagccttaaaggaagggattgtgtaacatggtattacacgaattcctagcaattttggtgcatccgatagatgaagaaaataaaataagctacaataaaacactattacaatttagtgtcatattgtagattcagatataccatggatcaaatcactgcactacaaagatacacacaacccaagcctgaaatgtgtgtcccacaaggcaggtgtcagacagtccagttccaacaccagtattacacagcatgatcttgtttgtttttttagatcacaagttactcaatgcataataccccaaaataaatgtcaaatgagaatgaagaacatcagaaaacagacctttaaagcaactatatgacaaatagaaatttaggctcaacatcaaagcaattcttgccactttaaataccatcaaataaattagtaatactgtaggtaatgaatatttaaagacctacctaggctctaaacaccatattgttttctgaagatagaaccatatgtcttagcttgtgtgtgtctgcaggaaaaaaacctcactagtaacacacaggcatcttaaggaaacaatttaagataagctttgttaagaacacattcttttaaaacatactggccacttgaaaaacctaatccatagctcacaatgtaaaatataagatctccataaacaaaaaaccctactagatatcaacgtctaaaatcatgttcagttttcatcatgttacttatatctaatagaaccctttgagaatatgtaaaacgtacacttagaaaaactatgcattatttgtattaaactctaataaaaatcccaattgttaaacatttgcttttatctcaagattttacatttgaaggttttaaaaaatatataaaagtcaacagactgcaccacatgtgacagtaatgtctgcctacaatcttagttcaaccaggacttttaaaaaagaacttaatactaatttaatgaaagaagtataatcactgtagaaattctgagtacctcttatgttccaggcagtgaactaagtgctgtgggggtaagacctaggaagatgtagtagtccttctcttaaaaaaaaaaaaaggccctatggaaaagggtgggagaaggaaaaaggaagacagaatagtaaacacgtactgacatacaaaacaacagagttaagatgtttatttattcatatgaacatgtcacagttttagagaactgtaaacatagacaacttaactgtttcaaagaaagaacaagagattagagaaggtagaggaaggaaataagtgacaaagaagttagcttattattcccctggagaaactctgatagggatgaaggcaaggcagatgcaaagataaataaaagacatcaaaaaagcacattctttagcactacaaaaccagagattcctcttggtaaggaacagatacagtaaatgagacccctgccatgagtatttatcaatcattcagtgtgtgatgatacttcagatttttagatacaatgtaacttttatctttgttaaatacatgttagctagtctttaagcctagctttcccagatgcttatatcaaagtacacattgtaactcaacaccaagtcttggcttcaacagatgttgaaggataaaattttttttttaattgtttagacgaactctcgctctgtcaccagtctggagtgcagtggtgcaatctcggctcactgcaacctctgcctcctgggttcaagtgattctcctgcctcagcctcccaagtagcagggactacaggcgcgcgccaccacgcccagctaatttttgtgttttttgtagagacggagtttcaccgtgttggccaggaaggtctcgatctcttgacctcgtgatccgcccacctcggcctcccaaagtgctgggattacaggcgtgagccactgcgcccggcctgaaggacaaatttcaagtgtgtcccaattctttcttctagggagagaaggcagaaatggaagacaacacaaaacacaaagacgttctattaagcaggcgtttcattgaagcattggatgtgcttcagtaggcctcagattctcaaaacgggacggatacttcagtgagacgttagagaacacatttattcctgtacaaggccacaccaaaaaaatctctatcaatactgaacatctatcttctttactgagcatcctttctttggtaggagtgaagagatgtgaagctagtcaaacttctcgagtgcccctccaccttcatctattccctaaaaagcaatttccccatcagagagcagagccaagtggactatgatcctatcaataccaggagaggcaagagaaacaaagcagcgatctgactccttggtactcaaggtaggagtgctagacctggagaggccgggaaattagggtgcccaatttaaacatttaattaaaaagtattcagacttaaaaaaaaaaaaaaagatgcagagaaaaggagtgccacactattcagaaaggaatgcaaatgctgagtcatcactcttcattggaaaggaaggaaaccagaattaagtggttggaagatggaattcattcattagattgagcttcaggtaaaaagcaacagcaagacaggagaaaaagcgttcagaagacacacatcaaatagcggatgaagacataattttagccaactctgaagctttcgacgcacaaacagattaggaagaggcaacacctagagagcaaaaggagtttaacaactggttgtcagtttagcgtagggagcgctcaaagtaaacttctttatccaagaagggaaagatgctcgggcagcaaaaggtatcccttatgtacttcaaaagtagcgggcgctaggcgggtgtttctgacagcgtgggcgggggcacgtggggcataaagagagaaggggcttgagtggtgaaagagtgtcctgcttcctccgagagcttagctggggagaagagctgggagcgactcgagctgaggacgtggaaggggtgagtgctaattcctcagggcccgcggggcccacccccgggcccacccccaatcctacccccgccaggcccttcccccgtgggcgccggcagctccaggcccagcccagggcgtccaacgcggagggggtgcaggagttctcctgggcctgacagcctcagccgtgcagaaacccggcctagggagggcatgcaaagaaggacgccagagaaaaaggtcgagacaagccccagaccccaggaagtgactgtttgggggaagggaggatttccttcccaaggaaaaggggacagatgaggaatgcacttcgcgtccacgccgccctggtcagggagccgcctagagtcccggcttcggcccagtctctcctgctccctcccttagcgtcccgcggtgcccgggcctcttggcgcctggcacccctcgtctcgggtactcacagagtccggggctgcccgtcgtcttccatcatggtgggtgcgacggagcgatcccgggacaagggggagggcagggttggggaggggagggggtggggaggaaggggaggggggctctgggcaccggctggggacagaggaaaaggcaccgaaccctgctctcgggctctctccccccagcccgctccggacactgcgctccaaccaggaggagcaggaggaggaggaggatgaacaaaatggccgccgccaccagccaggcaggaaacagggcagagcgcaggcgcgacccgccaggtcaccgctcaggccagccgcgacagcctgcaagggggacgaccgaggggagagaaaaaagggccgccgaggaaaccctgggacccgctcacgacggatcacgtcgtcgctgtgggcctctggccggccgaagcccagccagctccgggagagatcgggcaaaaagagaaacgtcgtgaagccgaagtctctgggaattgtggtcctggaaatgagagagggaagcacttctgcagaggacttctggaacctgtggttaagaggagccgccggcgcccacccgcgctgggacgtgaagaggagacttctgggtagtgtagtcatacgtgaggacgtgcgacgaccaggaagtcggc

SEQ ID NO: 545 - DNA, 6000 bp, Homo sapiens
ccactcctggctcatttttgtagagacgaggtttcaccatattggccaggctggtctcgaactcctgacctcaggtgatccacctgcctcagcctcccaaactgctgggattacaggtgtgagccaccatgcctggcatcaaaagcattttaaaaagagagggacaagttacaaactaggagaagatatttgtaatatacatatataacaaagaattagcatcaaaaattcctaaaaaattgagaaaagcacatataacataatagaaaaataggcaaaagatatcaatgggcatgcttcagaagaggaaacttatggttaacagaatatgaggagatgttcaactttattgattaagtaaaaattaagaccacattgagctaatactttgattgtcagactacaaaactaagtactgaagaaaatgtggatccgctcacagagtctcttaaacgatgctgatgggagtacaaatttgtgtattcactttgggaaaaaggtttgatgttacccaccaaaatggagtgttcatataccctgttacctgacaatttcacttttaggtatagatccaaatagatcaaagaaaagctcttgcactccctggtggtctaatggctgaggggtgaaaggctcttccacatctatcacaggagacacaagaatgttcatagctggctgggcgtggtggctcacacctgtaatcccagcactttgggaggccaaggcgggtggatcacctgaggtcaggagttcaagaccaccctgggcaacatggtgaaacctcgtctttactaaaaatacaaaaattagccaggagtggtggcgggcacctgtagtctcagctactcaggaggctgaggcaggagaatcgcttgaatgcgggaggcggaggttgcagtgagccgagattgcaccactgcactctagatggatgacagagcaagactccatctcaaaaacaaaaaaaaaaataaaaataaagaaaggttaaaaaaaaaaaaaagaatgttcatagcagcattattcacagtataaaaacctggaagcaacccaaatatccattaatgagaaatcagacaaatgtagtatatttatacactggaatatcatataatagtctgaatgaatgatagccataaaatatggctgaatcttatgtgtgttaattaagtgaaaagcagtctcaaaagattacaaggacataattttttcctttgtaatagacttttgagagcagtattaggtttatagaaaaattgtgcatgaagtacagagttcccatgtgccctctctcccattacaaacatagtttcccctgttattactgttttatattagtgttaacaagtatatcaattcataattgatatataaacttcagttaatcacaatgtatcaatattggttcatcaattccaacaaatgtacaactgaggaacaactattgatacattatgattaactgaagtccatagtttacattaggactcactttgtgtggcacagttctatgggttttgacaaatgcataaggtcatgtatccactatgagagtatcatactgaataatttcactaccagtaaaaatgacctgtgttccacctattcatccctctctccttccctgatgcccagggaaccactgagttttgccctttccagagtgtcatatagttaaagttgtagcgtttacagccttttccactgggcttctcttggtgctgtacatttaacattcctccatgtctttttgtagcttgagagctgtattagtctgttttcacactgctgataaagacataccccagactgggaagaaaaagaggtttaattggacttagagttccacatggctgggaaggcctcagaatcatggtggcagcaagagaaaatgaggatgatgcaaaagcggaaacccctgataaaaccatcagatctcgtgagacttattcactaccacaagaacagtctgggggaaactgcccccaggattcaaattatctcccaccaggtccctcccacaacacgtgggaattatgggagtacaattcaagatcagattgggtggggatacagagccaaaccatatcaatagctctttttaaaaaaatcactgaacaatatttctttgcatggatgtaccaccttgtacgacagtttatccattcacttatatcaaggacatcttagttgcttccaatttgggatgattatgaacaaagctgctgtaaacatttgtgtgcaggtttttatgtaaacatgttttcagctcatttgggtaagtacctaggcattatgtttagttttgtaaggaactgacaagctgtcctccaaaggggctataacattttgcagtcctaccagcaaagaatgatagttcctgttgcttttcatactcaccagcacttggtggtgttagtgttttggattttaaccttaataatttcactgccagtaaacatgcccattttaaccattctagtttgtagtgggcatattctttttactaagttaaaaaaaaactcaaatatacatgtatatacatatgatttttaggactatgtacatgtggaataaaaccttgtagaaggaaagcaataaatagtaaagacaggattcagaaagatggttaccccaagcgaaggcaggggtgtgtgttattgtgtgtaggaggtatagcatagatacagatataaactcgtgtcattataactttttagtgtggtgggtttgtggctataatcaaaactaaagtaataaaggtgggtgcggtaaactgaataatggtccaccaaagatttctatgtcctaattcccagaatttgggaatgttatgctaaaagggactttgcagatgtgattaagaatcttgagataatcttcgcccaaagtaatcacaaaaggttctcgtaaatgaaaaggggtggcaggagaatcacgatgtacgtacagaggcagagaagaaagaagatactatgcttcttttcttgaagatggaggatggggccaagagccaaggaatgcaggcagcctctagaagctggaaaaggcaaggaaccagccctgccgacaccttgattttagcccagtgtaactgattttggacttctgacttccagaattgtaagaaaataaattcgtgttgttttaagtatctaaatttgcagtaatttgttacagcatcaacaggaaactatcacagcgggccaggcatgggttaatgaattggattataattaaatccagttctacacctaggtccaattaaaaacatagacaaaacctttgagtggctcctcactgcctggaagagaaagctcaaattcctcagcatgaaatagattcttgacaacacggttctacaaggtcctctctagctttagttcccttccccccgctcccgcccgcatccccagcccatacattttagccatgggtcctggcgtctgagccttttgttgttcctacggactcttatggggctcaactcctttgccgtgtctctatgaagtctttcaggttgaaatttcctcccctgaaaatggacaacataagggcttgctgcatggttgattctgctttcaagattaatgttcagtggcacgcatacgcaccgccacttgcagaggtcgacatgcacttagtacatgtcggcagaagcaactcttaagccattactaaccggggcagttaagttctggcaatgggctgaaagatctttcttcatcgccactcttcactaagctacaagaccaagtactttctcctgaaggtacttagaggaggaaaaaagcacaccaggaactgttgtggggggtgagaagacaaattctacagggatgcagagctagtatgaacatggcttcccctatcttcatgcaaaactgcgtttctagcccacatgactgatgtctgtaaacgcaactttatgtttgtgcacgtctctgcccaaggatttttttttcttttaactccaagaatacggggggagttgggcaagtcattataatagggctcctcttcttaccccactatccgatgagacatttgatagggaaacctctgaaacttgtaaagcaatttacaagcaggccacctacttgtatttaacaaataggctagaaatacctatttgtgggaaatcgagtccccaaaacaccccaacccctccgggtccccgccagcacagcctctcttctgactgtcgcgcgaagcggcggttgactaacgcgagccagccgttctgatgaacacaggagggccggacggccctgctggctcggacaccacgcggagggagagtgctgcctgagccacagttgaagaaaccgctctcgggctggacgaaggcggagcagcagctcagactgggccaacagaagagccttacaatgcctggagcagtccgaggacagcccccggcgcgaggaactctgggacttgtagttcgctttcccagacagcgcttttccccacttggtctccccgcctttcaatgtcgcttttattcttccctttacctcccagcccgccgacttcctggtcgtcgcacgtcctcacgtatgactacactacccagaagtctcctcttcacgtcccagcgcgggtgggcgccggcggctcctcttaaccacaggttccagaagtcctctgcagaagtgcttccctctctcatttccaggaccacaattcccagagacttcggcttcacgacgtttctctttttgcccgatctctcccggagctggctgggcttcggccggccagaggcccacagcgacgacgtgatccgtcgtgagcgggtcccagggtttcctcggcggcccttttttctctcccctcggtcgtcccccttgcaggctgtcgcggctggcctgagcggtgacctggcgggtcgcgcctgcgctctgccctgtttcctgcctggctggtggcggcggccattttgttcatcctcctcctcctcctgctcctcctggttggagcgcagtgtccggagcgggctggggggagagagcccgagagcagggttcggtgccttttcctctgtccccagccggtgcccagagcccccctccccttcctccccaccccctcccctccccaaccctgccctcccccttgtcccgggatcgctccgtcgcacccaccatgatggaagacgacgggcagccccggactctgtgagtacccgagacgaggggtgccaggcgccaagaggcccgggcaccgcgggacgctaagggagggagcaggagagactgggccgaagccgggactctaggcggctccctgaccagggcggcgtggacgcgaagtgcattcctcatctgtccccttttccttgggaaggaaatcctcccttcccccaaacagtcacttcctggggtctggggcttgtctcgacctttttctctggcgtccttctttgcatgccctccctaggccgggtttctgcacggctgaggctgtcaggcccaggagaactcctgcaccccctccgcgttggacgccctgggctgggcctggagctgccggcgcccacgggggaagggcctggcgggggtaggattgggggtgggcccgggggtgggccccgcgggccctgaggaattagcactcaccccttccacgtcctcagctcgagtcgctcccagctcttctccccagctaagctctcggaggaagcaggacactctttcaccactcaagccccttctctctttatgccccacgtgcccccgcccacgctgtcagaaacacccgcctagcgcccgctacttttgaagtacataagggataccttttgctgcccgagcatctttcccttcttggataaagaagtttactttgagcgctccctacgctaaactgacaaccagttgttaaactccttttgctctctaggtgttgcctcttcctaatctgtttgtgcgtcgaaagcttcagagttggctaaaattatgtcttcatccgctatttgatgtgtgtcttctg

SEQ ID NO: 546 - DNA, 6000 bp, Homo sapiens
ttacaggcgtgagccaccatgcctggcctaaattttaaatacattttcaaacaagcgtatgtgttatatatcatttatgtacttaaaaattattaacatttaaaaaatcaaaatataaggccggatgtggtggctcatgcctgtaatcccaacactttgggaggctgagacaggagcattccttgaggccaggagtttgagaccagcttgagcaacatagtgcttgagcaacctcacctctatgaaaaataagaaaatcaactggatgtggtggtgcacgcctgtagtccaagctactcaggaggctgaggcaggaggattacttgagcacaggaggtcaaggtatagtgagctatggttgcaccactgaactccaggatggacaacagatcaagatcctgtctctagaaaacaaacaaacaaacaaaccaaacataaataaggaaaatggtgttaaatattctttctacttactaagaacaatgtttcttttcattagtgaaaagtaataaagttaaaccagtttggtctgtcagggtaaacagctgctccctggtagaagaatgtgatctttagacacaaacaacaacaaccaagaaaatcattaaactgaagccaagtttccagagggacccaggggaagtaatgaaaagaatccttcaaaatgtaacaacacattttctataaaatggaaatggctttggggaaatgttctgaggggtttgttcaccacagcttgggaaaagaaaaacgtgttttcaagcacagcaaaaagaacctgtgtccagcagccaagagatgatgcagaaacactggagtctgtaaaagctttgattctagaaaactttctttccttttttttttttttttgaaacagggacttgctctgtcacccaggctggagtgcagtgatgcaatcttggctgactgcaacctccaccctccatttctcaggctcaagcaaccctcccacctcaggctcctgagtagctgggactactggtatgtaccaccacagtacacactcagctaattttttaacttttttttttttttttgagacagcctcctgagtggctgggactacaggcacgtgccaccatggctggctaattttttgtatttttagtagagacggggtttcaccatgttagccaggatggtctcgatctcctgacctcgtgatccacctgccttggcctcccaaagtgctgggattacaggcatgagccaccatgcccggccttttttttgttttgttttttttaagacggagacttgctctgttgcccaggctgcagtgcaatggcacaatctcggctcactgcaacttccacctcccaggttcaagcgattctcctgcctcagcctcccaagtagctgggattacaggcgcccgccaccatgcctggctaatttttgtatttcttagtagagatggggtttcaccacattgatcaggctggtctcgaactcctgacctcaggtcatccacccgccttggcctcccaaagtgctgggattatgggcatgagccactgcgcccggcccaaaagattttttatagagatgaggtcttactatattgcccaagatggtcttgaactcctggattcaagcaattctcctgcctcagccttccagagcacctggattataggcatgagccaccatgcccacctggcctagagaactaactagacacttccagaagccaggaataccctatgcttgccttatttacctttgtatttcagatcctacacactggctaacacacaacaagcactcaataaatatgagggtcttagttcaagagcaaggaaagatctgataatgtggcaataacaatacactacattttacagtcagtggcaatttaatgttatttcatttctcaactcatctctgggcaatgagattacagatgttcttttttgtatttttatgcattatctgaattgtttacaaggatgtattttgaaatagaaaataataaacttgactccccattaggaaaaagcaattctcataaccatcattgccagttttttgacaccttttggaaaagggtagggaattaattctgccattgactataattcagcaggagggccaagtgaattccttcatttcataatatttaatcaacaccaacttgtgttaagaatggaactaggtaggcatgaggaatgtatatgtgctccaaataccagcttatggcctaaggagagagacagacattgaacacatactgccactaacaagtgtccaggtgcaactgtggcagctgctatgggaaaggtaatagagcacctgtgaccctgagattggtctcctgcttgggcctaactccatatgtttgctcttacaaatgtgtttccctacccagaaggcccttccttcttcctccatatagtcaaacttgactttgctttggaatcttgcttaaatctctagttcctgttcaaggtctgtctgattggaggcttccttcgggtaatgtcagatagcaccaccaagataatgcaattcgttaggagttatattagccagggtttcccagagaaaaagaaccaacaggatgtgtaaatatagagagagatctattgtaaggacttgactcacaagattatggaggtgcaaatccaaagtctgcaggttaggtgggcaaactagtgatttagggaaggggcaggggcagtctgctgacagaacttcttacctggggaggtttgtctttgttctgttgaagaccttcaactgattggatgaggcacacccatactatggaggtcaatctgctttacttaaagtccacagacctttttcccgcttcataaatctttcattggaatcaaagaccacggatttaaatgtcaatcttgggctgggcacggtggctcatgtctgtaattccagcattttgggaggccaaggcaggtggatggcttgagcccaggagtttgagaccagcctgggccaacatagtaaaactctgtcactacaaaaaaaaaaaaaaaaaaattagccaggcatggtggcgcatgcctgcagtctcagctacttcagaggctgaggtgggaggatcgctcgaacccaggaggcagaggttgcagtgagccaagatcatgccactgcactccagtctggatgacagagcaagaccctgtttcaaaaaaaaaaaaagtcaattaatgccatccagaaaacgtcttcacagaaatatccagtataatgtttgactaaacatctaggtactggggccaactggacacataaaattaactatcacagaagccttaactccccaactagagtctaccattttagaaggcatggatcagctcttccatgtctttgaaagcttccatggagcctagctgagggattattgtcaggaggtgttcaagaaatccctgaagagggctgggcacagtggctcacgcctgtaatcccagcactctgggaggccgaggtaggcggatcatgaggtcagaccagcctgacgaacatggcgaaaccccgtctctactaaaaatacaaaaattagccaggcgtggtggtgcatgcctgtactcccagctacttgggaggctgaggcagaagaattgcttgaactcaggaagcggaggttgcaatgagctgagatcatgccactgcactccagcctgggcaacagagcaagactccttctcgaaaaaaaaaaaaaaaaagaaatctcgaagcatataagaatagaagaatgagatttaacaggctctctggaagcaactttgtgcaccttctggaaacaatagaagacatgtaccggtacctacttaaacctcagagtgcaattcacatggtggcagagatccccaaagcacaaccctgattctttctccatcctgaaaacactgccccacaccttctaagacagtaacggatttagatagaaatgactgtccatttgggttttaacttagcacagccctagccagtgaagaaaagacaaaagaacaaggcagaagaatattgtggccttggaagaaattcctgacactggtctctgaccatcattttatgacatgtgtacctgtttcaatcttcatcttcctctcagcctattaagtcatgcagcgagctcctacctctcacttccttctatccccgaccaagcttaaatcagcctcagaggctggagataaaccaggctcagaggaggggcctggtggtttctcagtcaatttgcattccaagctcaaattttcatttctaaacctacaatttcatttccaggctttcccttggttccagagctggctgctgcttaggcgagagtgggaggggggggcctcagtcagaaatctcaagcaactggaccagaggtagaatgcctcaggccatttttcaatgccagtccccattgttatgggtcccacatcgacctggtgctcttgtttaaccccttttgcatctgtaaaaatcattttcattatcccttagtcccagtggagaaacaggcaaaggataggttcagactgttcgcagaagagaattccaaatgtctctgaacacatgaaaagatgctcaacaggggcgaagtgcagtggctcacgcctgtaatcccagcactttgggaggccgaggtgggcggatcacgaggtcaggagttcaagaccagtctggccaacatggtgaaaccccgtctctggtaaaaatacaaaaatgagccaggagtggtggtgggtgcctgtaatcccagctacttgggaggccgaggcaggagaatcgcttgaaaccacaaggcggaggttacagtgagccgagatcgcactgtactccagcctgggcaacaagagtaaaactctgtctcaaaaaaaaaaaaaagaaaaaaaagaaaagatgctcaattacactcatcataatagaaattcaaattaaaagcataaggggaatatatcagattggcaaagatcagaacattagctaacacggtccggtaagatcatggggcctctttccagccagcgccgagtgatgggcatctctcaggacaactggcacaagcgccgcaagactggcagcaagagaaagccctacgacaagaagcggaagtatgagttggggcacctggctgccaacaccaagattggcccccaccacatccacacagtccgtgtgcggggaggtaacaataaatacggtgccctgaggcgggacatggggaatttctcctggggttcagagtgttgtactcgcaaaacaaggatcactgatgttgtctacgatgcgcccaatagcaagctggtccgtaccaagaccctggtggagaactgcttcgtgctcactgacagcacaccgtaccaccagtggtatgagtcccactatgcgctgcccctgggctgcaagaagggagccaaactgactcctgaggaagaaaagactttaaacaaaaaacgatctaaaaaaattcagaagaaatacgatgaaagggaaaagaatgccaaaatcagccgtctcctgggggagcagttccagcagggcaagcttcttgcatgcgtcgcttcaaggctgggacagtgtggccaagcccatgtctatgtgccagggggcaaggagatggagttctatcttaggaaaatcaaggcccggaaaggcaaataaatcctcatcctttctgtctttgcccatggaataaaggtgtctattgttctgtggcaaaaaaaaaaaaaaaaaaaaaaaaagtcatggggaacgtgcactctgaacgctactggtgcgaggctgaccttccctgacctccttggagacaaatttggcaaaataacttaaattttaaaacgcattggcctgatgatggagcacttccacttccaggtattgatagacctactcgtactttcttgcaaaatgacctgtgcacaagaaaatacactgaaggccaggcacggtggctcatgcctgtagtcccagcactttgggaggctgaggcaggtggatcatttgaggtcagga

SEQ ID NO: 547 - DNA, 6000 bp, Homo sapiens
tttctgcagagcacctattgggttggtgcaaaagtaatcacagtttttgccataatagaagggacacatgactcagaccaggaggatgaagaagagagatgccacaggtaatacctgatgatgaaggggggtcagccaggcaaagagagcgggaggccattgggtgttggagagaagggctctccaggtggaggaagcagggtgggcagaggcaagggcaggctgtgtcagtgcctgcatgatatggtgcagcaaggccagccagagtgcacaccaggctgaggggaggaaggtcttgtgtacaccaagccaaggagtgtggagtcaacagagaggcattaaagaattctaggcagagaaggggcaaggcctgttttgtgcttgaaagattgctctggctaccatgtgggcaacgaattggagatgaacaagattagaggctggtttacgtgaccaactgcttacgcacacacacagacacacacacatacacacatacacacacacacacacaaagattagagtctgggagatccatcaggaggccgtgccaagatccagatgacaggcaaaggtaacctggacgggttggtggcactaaagacagacaggagttcacaatcaaggaatatctaggaagtggaatccacagatttaaggataattaaatgggccaggcacggtggctcacatctgtaatctcagcattttgggaggccaaggcaggaggatcacctgaggtcaagagttcaagaccagcctggccaacatggtgaaaccctgtctctactaaaaatacaaaaattagctgggcatggtggcgggtgcctataatcccagctactcggtaggctgaggcaggagaatcgcctgagccagggaggcggaagttgcagtgagccgagatcacgccactgcactccagcctgggtgacagagcaagtctcaaaaaaaaaggataattaaatggtgaggggcaaaagaaatttagggttatgcttaagcttctgatctgggcagatgaactccaggaggcctaaagagggagtgtctgagggcctggagaaaagaaaaagccaccgaggacagacatgatgctcagtattcaacgtggctcaaagcagcttcttccagccagctctccaagacttgtgtctctgttttagacaaaccctgcggaagtccctagcggaggataactcttctgcggtgagcaggtctatgcacacctaccctcaaaggctgaggaaactgagaagctgaagaaagaggtggacaaatccagtttctcagagagaaacacttaatagggacttacaaacacaagccatgtcctggatggctgcaagacaagatggcgggtccctgcactgttaccctgaagtcccagggcttgtataccacagggaattcgccacaggcaggatttatagtaagtatgtgtttacagtaacaccaacgttattttgaccgaagggtaagtatgtgaaaatagaaatcttagaggcattcctggaacgggttcatcagaaacgaacatggcagatgagcatccaggatggagctgctttagcctccagagcaactgtcagaagcagctatgttaatcccagagtaacctgcttcctccctgctgcttctttcaggggaaaaatggccaacaccactttcagtatttgtttgtttattgagacagagtcttcctctgttgcgcaggctgaagtgcagtggcgtgatctcagctcactgcaaactccgctccccgggttccagcgattctcctgcctcagcctcccaagtacctgggattacaggcacccaccatcatgcccgactaatttttgtatttttagtagagacggggtttcactatgttggccaggctggtctcaaactcctgacctcaagtgatcccccccacctctgcctcccaaagtgctgggattacaggcatgaaccaccacacccagcctctgtgtttatttaaactgtagttacttaaactgtagtggaaagcaaattgagcaaggaagaagatagaaataaaatttcactctggattcaatcttcgataaacatcaacatttattgaatatggactctgggttcagggctgcagacataaggaagcataaggcagacactgactagtgaatttgggggtctagttccttcaacagtaatatttcctatgggaaactagtgcactgacattcgggtttatacacctgtctctaacatgtttggtgacctgcatcagtccctggggcctgatcatcactggagttactggactccaaagcggataagcatacttttacaagtgagaatcattccattggaaatgataggcaggcctctctggcattttctccagaaggagtaagctgagggcaggaaggggcagaggtattgactggggttcgaggatattctctgattccgaattgaaaactaggcccaatattagttcaaagcgtttctggggaagggaatgagtcagtatgtctaaagatctaaaatgtcacctcccaaacattctctctttctggaacacagtctctctttcccaggggaattggggtgctcattgacgtttgttaaataaaagttataagaggtcactgttttggactaagctcctgcatttggccttaacaaacccgacgaaaaatcagaaaggagtcactcatgctaaagttccacatcaccaaaccaaaaccaagttgttatctgactttctgagaaatcaggagaggtgatagtctaatttcccaaacaggctactttcgaatgaggggtgagggttggggagtgacaggaggtggctgggggcaccaactccgtgcagtcgaaaatccctgcaaagctgggcgaggtggctcatgcttgtaatcccagcactttgggagacggagacgagtggatcacttgagaccaggagtttgagaccagcctggccaacatggcaaaaccctgtctctactaaaaatacaaaaattagccaggcatggtggtgcacacctgtaatcccagctactcaagaggctgaggcaggacaatcgcttgaacccaggaggcagaggttacagtgagctgagattgccccactgcactccagtctgggagagagagcaagaacctgtctcaaaaaaataaataaataaaataaataaaataagaaaagaaaggaaaaaagaaaatccctgcatacttttttgtttgtttgtttttgaactggagtctggctctgtcgcccaggctggagtgcagtggcatgatcttggctcactgcaacctccgcctcctgggttcaagcagttctgcctcggcctcccgagtagctggattacaggcatgtgccacacgtccagctaatttttgtatttttagtagagttggggtttcaccatgttggccaggctggtctcaaatttctgatctcaagtgatccgccgcttggcctcccaaagtgctgggattacaggcgtgagccaccatgccccgcccctgcatactttgaatctcccaaaactaccaatagcctactcttgacggaaagccttgccaataacatgaacagtcaattaacacatatgttgtatatgtattatatgtattcgtgcaataaagtaagctagagaaaagaacatgttaagaaaatcataaggaagagattttacatttacataaggaagagtagtacacttactactcatttagtggacgtgatcatcataaacgtcatcatcctcattatcttcacgtggaggctgaggaggggaaggaagaggaagggttgattctcctgtcaaggggtggcagagacagaagaggtggaggaggtggaaggggagactggagaggcaagcacatcggtgtaacttttattgaaaaaaaatccatgtacaagtggacctgctcaattcaaacccatgttaagggtcaactgtacagtaatctgaagtatgtaacctgatgttacatttctctcaatcatttctctctttctttctctctctttcttttaaagagatagggtcttgctctgtcgcttaggttggcatgaagagcaaaatcatagctcatggcagcttcaaactcctgggctcaaatgagcctcccacctcagcctcctgagtagctgggactacaggcataagccactgcacctggcttattttttgtttatgcagagatgggggtcttactgtgttgtccaggctggtctcaaactcctggactcaagaggtcctccagtcttgactttccaaagtgctggcattataggcatgagccatggtggcaagccctcatcagttatttttctatgattctgtctctctgtcccctccttacaaggaaagtaattttgaaacaaccaatccagtcttggttctttgtttctgctttcttcagcccttctctgtctataaaaccaacctcttctgctcagctcatgggagcacttattctaatttaatggagatgttgcccaatttctagaatcacaaataagatctttaacaataaaagttaaaaaatgaaaatcaacaacaacaacaacaaaaaagatctttaaatgtgttgtaattttctcctttgacaggttacaagtgcaattgaataaaccaaacaaaaaatgtcatggttattcggtctttacttcccaaatcagggtcaagatataagatagcaagaaccaatctctaccataaaaaagatccagacccaagaaaatgtgatttatctttaaagctgcaacgaaactttctttttagtctaggagactaaaagccatcagttgatacaatctctttttttcttgaagtttccaaaggaaggcaggtgagtttgcactgacttccattttctccctggcttccttccggtgtcagatgagagtccccgcgctcctcccggacagccctcagggtcctcggctatcatatatgggggagggggtggaggtgggcgagatggttttgtttgtacaggaaggacgggcggcaggcacggggagcacgggctccggccccgggaacactcactcggcgcaaaggagagggagagagcgactatgaaagccgaaacccgcccggggcgcacggaggacggccccagtccagctcgtccggcttcccacccgcaggcggaccccgaagccgcgcccgcgcccgcccgcggcgactccggcccgggcacgcgcacgagtcggaagggggaggggcgggaggaggtgggggaggggcgagcgggccgaggccccgcccccgctcctctgccccgcccgccgcgattatagccgatgactcagggcggagctccgcatccaaccccgggccgcggccaacttctctggactggaccagaagtttctagccggccagttgctacctccctttatctcctccttcccctctggcagcgaggaggctatttccagacacttccacccctctctggccacgtcacccccgcctttaattcataaaggtgcccggcgccggcttcccggacacgtcggcggcggagaggggcccacggcggcggcccggccagagactcggcgcccggagccagcgccccgcacccgcgccccagcgggcagaccccaacccagcatgagcgccgccacccactcgcccatgatgcaggtggcgtccggcaacggtgaccgcgaccctttgccccccggatgggagatcaagatcgacccgcagaccggctggcccttcttcgtggaccacaacagccgcaccactacgtggaacgacccgcgcgtgccctctgagggccccaaggtgagccgggcccgcggcccgccctggtcggtggcgccacctcgacggcaggcggcggggagtgggctgggccggggggacgcgaggcggcggggcccgggggtcggcgaaggcccctcgcgggcggacaccggctccgcgccccgccacacactcccgctgcgcccggacgagtccccgctccggacccgccctt

SEQ ID NO: 548 - DNA, 6000 bp, Homo sapiens
caggcaaaggtaacctggacgggttggtggcactaaagacagacaggagttcacaatcaaggaatatctaggaagtggaatccacagatttaaggataattaaatgggccaggcacggtggctcacatctgtaatctcagcattttgggaggccaaggcaggaggatcacctgaggtcaagagttcaagaccagcctggccaacatggtgaaaccctgtctctactaaaaatacaaaaattagctgggcatggtggcgggtgcctataatcccagctactcggtaggctgaggcaggagaatcgcctgagccagggaggcggaagttgcagtgagccgagatcacgccactgcactccagcctgggtgacagagcaagtctcaaaaaaaaaggataattaaatggtgaggggcaaaagaaatttagggttatgcttaagcttctgatctgggcagatgaactccaggaggcctaaagagggagtgtctgagggcctggagaaaagaaaaagccaccgaggacagacatgatgctcagtattcaacgtggctcaaagcagcttcttccagccagctctccaagacttgtgtctctgttttagacaaaccctgcggaagtccctagcggaggataactcttctgcggtgagcaggtctatgcacacctaccctcaaaggctgaggaaactgagaagctgaagaaagaggtggacaaatccagtttctcagagagaaacacttaatagggacttacaaacacaagccatgtcctggatggctgcaagacaagatggcgggtccctgcactgttaccctgaagtcccagggcttgtataccacagggaattcgccacaggcaggatttatagtaagtatgtgtttacagtaacaccaacgttattttgaccgaagggtaagtatgtgaaaatagaaatcttagaggcattcctggaacgggttcatcagaaacgaacatggcagatgagcatccaggatggagctgctttagcctccagagcaactgtcagaagcagctatgttaatcccagagtaacctgcttcctccctgctgcttctttcaggggaaaaatggccaacaccactttcagtatttgtttgtttattgagacagagtcttcctctgttgcgcaggctgaagtgcagtggcgtgatctcagctcactgcaaactccgctccccgggttccagcgattctcctgcctcagcctcccaagtacctgggattacaggcacccaccatcatgcccgactaatttttgtatttttagtagagacggggtttcactatgttggccaggctggtctcaaactcctgacctcaagtgatcccccccacctctgcctcccaaagtgctgggattacaggcatgaaccaccacacccagcctctgtgtttatttaaactgtagttacttaaactgtagtggaaagcaaattgagcaaggaagaagatagaaataaaatttcactctggattcaatcttcgataaacatcaacatttattgaatatggactctgggttcagggctgcagacataaggaagcataaggcagacactgactagtgaatttgggggtctagttccttcaacagtaatatttcctatgggaaactagtgcactgacattcgggtttatacacctgtctctaacatgtttggtgacctgcatcagtccctggggcctgatcatcactggagttactggactccaaagcggataagcatacttttacaagtgagaatcattccattggaaatgataggcaggcctctctggcattttctccagaaggagtaagctgagggcaggaaggggcagaggtattgactggggttcgaggatattctctgattccgaattgaaaactaggcccaatattagttcaaagcgtttctggggaagggaatgagtcagtatgtctaaagatctaaaatgtcacctcccaaacattctctctttctggaacacagtctctctttcccaggggaattggggtgctcattgacgtttgttaaataaaagttataagaggtcactgttttggactaagctcctgcatttggccttaacaaacccgacgaaaaatcagaaaggagtcactcatgctaaagttccacatcaccaaaccaaaaccaagttgttatctgactttctgagaaatcaggagaggtgatagtctaatttcccaaacaggctactttcgaatgaggggtgagggttggggagtgacaggaggtggctgggggcaccaactccgtgcagtcgaaaatccctgcaaagctgggcgaggtggctcatgcttgtaatcccagcactttgggagacggagacgagtggatcacttgagaccaggagtttgagaccagcctggccaacatggcaaaaccctgtctctactaaaaatacaaaaattagccaggcatggtggtgcacacctgtaatcccagctactcaagaggctgaggcaggacaatcgcttgaacccaggaggcagaggttacagtgagctgagattgccccactgcactccagtctgggagagagagcaagaacctgtctcaaaaaaataaataaataaaataaataaaataagaaaagaaaggaaaaaagaaaatccctgcatacttttttgtttgtttgtttttgaactggagtctggctctgtcgcccaggctggagtgcagtggcatgatcttggctcactgcaacctccgcctcctgggttcaagcagttctgcctcggcctcccgagtagctggattacaggcatgtgccacacgtccagctaatttttgtatttttagtagagttggggtttcaccatgttggccaggctggtctcaaatttctgatctcaagtgatccgccgcttggcctcccaaagtgctgggattacaggcgtgagccaccatgccccgcccctgcatactttgaatctcccaaaactaccaatagcctactcttgacggaaagccttgccaataacatgaacagtcaattaacacatatgttgtatatgtattatatgtattcgtgcaataaagtaagctagagaaaagaacatgttaagaaaatcataaggaagagattttacatttacataaggaagagtagtacacttactactcatttagtggacgtgatcatcataaacgtcatcatcctcattatcttcacgtggaggctgaggaggggaaggaagaggaagggttgattctcctgtcaaggggtggcagagacagaagaggtggaggaggtggaaggggagactggagaggcaagcacatcggtgtaacttttattgaaaaaaaatccatgtacaagtggacctgctcaattcaaacccatgttaagggtcaactgtacagtaatctgaagtatgtaacctgatgttacatttctctcaatcatttctctctttctttctctctctttcttttaaagagatagggtcttgctctgtcgcttaggttggcatgaagagcaaaatcatagctcatggcagcttcaaactcctgggctcaaatgagcctcccacctcagcctcctgagtagctgggactacaggcataagccactgcacctggcttattttttgtttatgcagagatgggggtcttactgtgttgtccaggctggtctcaaactcctggactcaagaggtcctccagtcttgactttccaaagtgctggcattataggcatgagccatggtggcaagccctcatcagttatttttctatgattctgtctctctgtcccctccttacaaggaaagtaattttgaaacaaccaatccagtcttggttctttgtttctgctttcttcagcccttctctgtctataaaaccaacctcttctgctcagctcatgggagcacttattctaatttaatggagatgttgcccaatttctagaatcacaaataagatctttaacaataaaagttaaaaaatgaaaatcaacaacaacaacaacaaaaaagatctttaaatgtgttgtaattttctcctttgacaggttacaagtgcaattgaataaaccaaacaaaaaatgtcatggttattcggtctttacttcccaaatcagggtcaagatataagatagcaagaaccaatctctaccataaaaaagatccagacccaagaaaatgtgatttatctttaaagctgcaacgaaactttctttttagtctaggagactaaaagccatcagttgatacaatctctttttttcttgaagtttccaaaggaaggcaggtgagtttgcactgacttccattttctccctggcttccttccggtgtcagatgagagtccccgcgctcctcccggacagccctcagggtcctcggctatcatatatgggggagggggtggaggtgggcgagatggttttgtttgtacaggaaggacgggcggcaggcacggggagcacgggctccggccccgggaacactcactcggcgcaaaggagagggagagagcgactatgaaagccgaaacccgcccggggcgcacggaggacggccccagtccagctcgtccggcttcccacccgcaggcggaccccgaagccgcgcccgcgcccgcccgcggcgactccggcccgggcacgcgcacgagtcggaagggggaggggcgggaggaggtgggggaggggcgagcgggccgaggccccgcccccgctcctctgccccgcccgccgcgattatagccgatgactcagggcggagctccgcatccaaccccgggccgcggccaacttctctggactggaccagaagtttctagccggccagttgctacctccctttatctcctccttcccctctggcagcgaggaggctatttccagacacttccacccctctctggccacgtcacccccgcctttaattcataaaggtgcccggcgccggcttcccggacacgtcggcggcggagaggggcccacggcggcggcccggccagagactcggcgcccggagccagcgccccgcacccgcgccccagcgggcagaccccaacccagcatgagcgccgccacccactcgcccatgatgcaggtggcgtccggcaacggtgaccgcgaccctttgccccccggatgggagatcaagatcgacccgcagaccggctggcccttcttcgtggaccacaacagccgcaccactacgtggaacgacccgcgcgtgccctctgagggccccaaggtgagccgggcccgcggcccgccctggtcggtggcgccacctcgacggcaggcggcggggagtgggctgggccggggggacgcgaggcggcggggcccgggggtcggcgaaggcccctcgcgggcggacaccggctccgcgccccgccacacactcccgctgcgcccggacgagtccccgctccggacccgcccttgacaggcgtcggggcgaaaggaggccccgggattcggtggcccgggaagcgaccccgcagtggctccggtgccgtccacggctcgactccagggcggaaggccgggtgtccagcgctggcctcgcgctctagggctgggagaggggcggccggcctggtcagctccggaggccccggcccaccgtggcccctgctgcccgctcggcctccgggcccgggacccgcggcgcaccctgctgaccgcggactcgagggggacactcgcaagcttggatggtggttttggggggaattttaccgctcaagttctccaacttggttgaggggtatcttggctactgtcccatgttaggcacccaatgactctggaggctggtgtcaaaacattcatatatatatgtgtgtgtgtgtattttaaattaaaattgtattattgtttgaaagtgctttcaatatgaacgtatcctagtatgatttgtaaaataaaaaacagggtgtgcttctccccagcagtttctagagatctagactagagatctgagactgtcttacagttggccattgc

SEQ ID NO: 549 - DNA, 6000 bp, Homo sapiens
tcttggagaatgctgagcagtgcacctggagtgtggaggcagcgtccaggctattagagtgaagccagtcaaggtggctgcttctcaaactgatttttcaatctcaagctcctccttcctccactttgactttattttaccaaggatttcaaacatggagaaaaaagtagaaagatgaaacactcatagacccatatctagactgagcaattttgcttcatcttgtttattcctgtagtattttaaataacaaatacaatgacggttcacttctaaatactccagcatgcagctctaaaatttaaggatcttttcccacctaaccataacaactattattatacttaacaaaataaaaaaaatacatcatctaacaccagtccatagttcaaaccacctcttgcccttgacatttttttagtgttggataattaaagcagtttccaattaaggataacacagtgcatttaaatgttgtatttcttttcttttctttttttgagatggagtcttgctctgtcacccaggctggagtgcagtggcgcgatctcggctcactgcaagctccgcctcccgggttcacgccattctcctgcctcaacctcctgagtagctgggactacaggtgcatgccaccatgcccggctaattttttctatttttagtagagacggggtttcaccatgttagccaggatggtctcgatctcctgacctcatgatccgcccacctcggcctacctaagtgctgggatgacaggcgtgagccaccgcgcccggccaaatgttgtatttcttacatcttttaaaatctagaacagctcttctccactggccccttcttgctctataatattgactattgaagagaccagactactacctgaaagaatattctaccttctggctttgtttcagtgtcttttttttttttttttgagatggagtttcactcttgttcccccaggctggagtgcaatggcacgatctctgttcactgcaacctcggcctcccgggttccagtgcttctcatgcctcagcctcttgagtagctgggattacaggtgcctgccaccatgcccagatatttttttttagtagagatggggtttcaccacgttggccagactagtcttgaactcctgacctcaggtgatctgcccatctcggcctcccaaagtgctcagagttacaggcatgagccacggtgcctggcctgtttcactgtatttcttatggtgtcacttgttcctcaacctcctctatttcctgtaagcacgaagttgggtctaaagtcttgaatatacacttttgggctgggtggcattgtgcattgtgactacatgcctggtcatccagtatgatgcccagatctcccactgaatccaagaggcagtgggcataggccttgttcctctcctttcaaagggcaaaaaatctgtggtcaggccccttttcctgcataaaatctccacatccctgttccattctcatctctccccaccgactgagaaacatgccccattgactcactgtgccttctggtacctccaccaggcaagattttgctgaatttacctcctgaatttgcagtgcacatgtgtgaaattttttggaattaaaaaaattaaaactgtacttttcaagatttaaaactgtaatattgattgtgttcttcatggccccaaagcaagattctgttgtatcttggaggaggggggtcactactctgaaatcccagtgatgggcagcactgagcaactgagagcctcagcattcttgggcttgttcacacccacaagcttggcacagatccaagtcctgcaagatgcctgggagggcaactgagacctgtggcccagccacattgactcaggaggtaaaaatgtcaacaggccacaacctccagggctcctggaattggagacgaagccagttctgagcttatgcaaccataggacagtgagagagggccatggactcgatttagagccacaagatgagagcactgctggagcaccgtggggatgctgacaaatcttctcagggcttcaaggaccgtggctacaggtacatctcagccaaacttgggcacatgttgcaatcaagggactgaagctacaaccacctggcccgtggtccacctggagttttgttttgtttgtttttgagatggagtctcactctgtcacccaggcaggagtgcagcggtgcgatcttgcttcactgcaatctccacctcctgggttcaaacaattctcctgcctcagcctcctgagtagctgggactacaggtatgcgcacccacgcccagctaatttttgtatttttagtacagacagggtttctactaaaaccctggttggccaggctgacctcgagctcctgacctcaagtgatctgcctgcctcagcctcccaaaatgctggctgggattacaagcatgggccactgtgcccggccccacctggagttttaaaattctgatttataaatttattatatgacagtctaccaaaagtatgcaaatccggcactacacttatttatgcattcagtgagtcacctttatctgagtgcaagtggcaactgttctagaaaatgggaaccatgaggttatcaaagaacctggaggtagggtcagatgaggaagcacatcattatgatgtcttacacatgcagtcatgtctcctcttataatcctaagactcacctgtgagattcctattacagcccctagtttacatgtaggaatatcagaaccccaaggtttagaaacagaacggccagaaacaggaggaggatggccatgcagctgggcgtggcaaggccaggcctcccaagtctgcatgactcttaagctcctggccattcgttacagcacgccatctccaatgcagaatcacaccaacagaactgaaactgcacattaaagagaaggcgagtgtcaccaaaatctgtttcccaggcttctttgcagaattccaaattcctagcacgaccaataaggcccttcttctacctctgcagcctcaatttatgtcactttcctgttgttccctatgcttcggccatcctggcctttctgtgctctgaaggagtggtgctccttcctaaaccagggccttttcacgtgctgttcccactccagttcacctagctggtttctgcttatccttaaagtctgggtttatcttatttcctcaagggaggcctccctgctctggagcaggtcaggccaccatgtcctttaccgtagagcaccctacttgtcctggacagcaccttcacagatgcttctccttcaaggggtcagagtcaccaggccaccactacagcgcctgagccccggaggtttctgatttccacagaaagcttcaagtgcatgctgtgtgtgagtgagcctggccacttcctctgtgggacttcagttccttatcagtaaaacagagcccgtggctttccatgaatgtggggttgacttaccagaatgctcaggtcccacgttatcctcttgaacgcagcagctttcctctaacccacgaaaatggaaaagctcctgtgccattcccaaatacttatttaatctgcattctgggtggcccctagggcaggtgacgggcattctctaccgcaggatggtgccccacctggtcctccccaggccctgtggccatcctggccacctccctgtgggctctcccagccctgctgttcagcactgtccctacctcacagaggtagggacctctttttcttaccttcttccttttcttaccttcgttcctccaatccctgacggcccccagacctactgtagttgtctctgtgtcttcggagagaagacaccccattaatgtgccatgaaaccaaatttattccatttaaagggctgccttcattcggaggctttgtccatgtcttggttttaacctctcttttctgaaattacagtaaaaataaataggtgtgtgttgctttaacttttcccttggagaaatctgaagcccccaccttttactgtcatgggaaacaccagggcctgagaagaactcccacctcgggcgaggatgccgttcctgagccccacgcgtggcctgggctttcctttccctacttctctcttcccccgacttcagcagatcctgagtcccacaactattctagcattagcttctgcaagcccagctgggctgaggtttctgcggctgcttcctcttggtctctctggaaaactccactcattcagcacccaagcaagaggtcacctgtctggaacgcactccctcggcagcgctgtgccacctctttccaccccatttgagtggccggcacttacctgtgctgtttgttacctgacgtgtcccttctcccacctaccaggcagttggtgcggcgctcccagcacactcgggcaatgagtgggcaggcgctcaggtaacgtttgtcgaatgaatgaatgagccacgtgctcaggaggaccctttccagagcctctgctggtttgttctgctccgggactctccaccagggagaaatccgagctggggacctcgcaccaccaggctccggcctaagcccgcgccttgcaagccgcccgtttcctacctcccgtagaaaccccccgtccgtcccgcccccctaagggcgcacccctctcacggcgtgagcgccagccccgggagctccaggaactcaggagaaccccgcgggggtgcccgggtgcggagcgcggggctgggcgcactgggacagaggaaggggagccccggcgaccgcggggtcggggcccagggtccgcgccgagggcgggcgcagagcccgcggccgtcccgcctcccgccggcgctcccggcctttcccatccggcccgcgacgctccgcccgccccgtcccacatgacgccgcctccgccgcaaactttttcctccccatcctgtcgcggctcgaaaggaatggaaaatggcggcctagacgcggagtttcctgcccgacccgcggcggctccggcggcgccatgacgcgctgggtgcccaccaagcgcgaggagaagtacggcgtgggtgagcagcgccgccgccgccgcgcctctcgccccaagcccaggctccggcggggcgggtgtgccgggcgcctgttgccgccgccccgagcggccgccgggccggggagaggcgcttccgcccgcgcccgcgccgccgccccgctcgcaatgcccggcgaccccggccgccccgcgcccccggcggcgtcagctccagccccggggatgcgggtcgggaacacgagggggtggggtgggaatgggggcgggcgcgtccctccctagggtgtcccctccgacgcccgctcctctggacctctgccgtggagccccccgggctacccccaactccccggccccggccgctgctatctgcgcggctgggcccgtcagggaagcccaggggtcactgtctcgcggcggcttctgcttcttggatgaacttgcgtcccgcgtccgggctctgggtgggcgggctcaggtcggcgcggtcccagcggataattccgccctttcccggcggggaggagggggcgcgacctgggtggccagcgccccttgcccctcggcggtctcgctggggaccgtgtgggaccttggagagaaggcgagcggccgagcgccccagtggccccaggcctggagacccttccgggagagcgggggcctgtttttgctccgcggctctttgtcgcttccgaggggggatggaaggagtcgggttgcaagtttacatttcggacccgagtgcgcattcctgagagggaggctttcccttgcggctgaatagacgggcccgtccgcgtgggacccgcatccttgcgccccggggacccgcagccggtcgccgaggcctgcggacgcccacctcttcgtgatctgcgcgcctggtgtcgggactgggccgtggctactctcctgctctcccgggtccgggatcttcccagttggttttc

SEQ ID NO: 550 - DNA, 6000 bp, Homo sapiens
aacatgatctgtgtgaaagcaatgacagtgtctggaacttagggggtgctcaccaaatgcctagcagcaaagcagcagaaactagaggtggtcgtgtgggagaggatggaggaaccggtggctgggaactgcctactttcaggatttcttacctttggcccacgacaattccttggccaggaatgctgttttggtggaaactgggatggtatgcatccagcacgtcactctgtttattaggcatcagactggtagacaagggcccagtaatctcggctcatggagacccaagtggggatgacacggcctcaggctagagcagacgcaccctgggaatcctctgtattcttgttggcatcacagcccaagcctgtgtccagcagggctgaccagaagaaaggtctggggcattttaggttttagttaagagtttgatggaggcttaagcttttattgatttgaaaaagaaaagaaagggaatcttggaaaaaagtaactcgctgtagtgcagacaggaaataatagcaatgaaatcttttggcttccctgctcctgaccccagaggtcccttcctcgctttaaaatcctcaggcaccccctccacccctgttgcccacaagcaaatatgcagactccagagccccacatccccgtctctcacggtctggcccagttgatctctctcacctcattccgaaaactttctagtgacattggtcttcccaccgtttcccaaatcccaaagacacgaggcagatcccacccagtcccccagctttgcattactttgcccttgtgatactgggggacgttcttagaagtcacttctttccacatatatggtttttgtttcccagtcaaggtcccaaggtaggaagtttctggccatgtgagtcaccacctggatgaaggagccaccctgccaagtgtggggaggtgccaggagacggagcggctgagatgaagcattcattatctctccttcccatggaactgaagtgacattctctgcatctctattatcacttcacctcaacttgcctcttcccagcatccctgaattatgcagaaatcatttgaaggcaaattcccagctactgttgctagactcatttttctgcagggatggaggaatgtgttgctagactcatttttctgcagggatggaggaatgtgtcacttttaatttgtttccttttttcccacccattttgggtaaaacattgtgttaaaagatacatcgtctccacccccaaagcagcctgtcttcatgcccaagggatttaaatgccctcatattgaagtgtacaagctaattatgtaacttaaagtaagtttagggaaggaatttaaatacccccacagcttcacaatgtgagaaatggggctgtgcaagcccctggaagttccctgcctttctccacattctccctctgtagtaatgaggctcctcatctttctgttttattggcagcaaacactgggtaacaggggtgctagaagggcctgagggtctgtcataagcaagggcctataattgtgccaggagcctggaatagttaaattggttcctgattacttttcactcgctaagttcccctcagctcaattaacatataattatttaggactatgctacttttgttactggcacatggctttccaaataggcagctttgggggatgatctccctctggagcccacgcactgcatccatccacccgccctttttgttcaagaacaaaagcaaggctggcgggacctcctccagaaccttcatgctgcagagaggcttggaccttggcaggtgcctcctgcaggcagagcctcgccggccacaccagcctgtctcccaaagacgcgcagaactgcagaattcacagggcttgtctttctcttttaccaaatgcgactttacattttgtaaggtgtcagtggagatcatatcagtgttcagataactttgtatcatgtggtgatgcctcttccttacctttaatctcaaaaataaaaaaacaaaacctgtaggttcaaagttccagggagcttagaggcactggggttgagtgctttcatttgtcagtggagaagatgagggtctcgaaaacttgagcaacattttttttgttttaacatttttaaaattctattgtaaattgacaaataataattgtgtatgtgtatggtatgcagtcgatgttgtgatacatgcattcattgtggaatgattaaatcaaatgaattaacatgtctgttccctcacatacttctcatttcttggtggtgttgaacaacgttccgaaggtcaggtagctccacgtttaaatggacatgaagccattgatagatagatagacatacttgaattaagactttaattgtacaaatgtgtgtatgtgtaggctacaattaaactcatatttgacactgtcaagaattagtagtttttgttgctaatggggttaaatgtccaggataggaaagcttactggtttgttgttgctttaattgcattggcttgggagtgaacccatctccctttcttattgacctcacatttttttaagtggataatgttatgacaagtttgataaaaatgatgcttctgactttctggagacaggaatcaattaccaagaagagataacatttctctccattgagccattaaaaataaaattcacaggcttctagaccttacggctttttgaatctttttaggttgacataatttgcctgtgattctttctggattatttatttgtatgtttggttttatctcctgaattttagattacaaataatccttccttagattttgaccatttttaggacagcattcctgaaagcatttaattctcacagcatttgttattgttttttagaaattaattaattaattctcctggctcagaataagacataatttgtgtggttcacaaggtggttgatcccttccccctgagtttctggcatttctggtggaatccctaatgagaagtttgcataagaagaacctgaagagagctgaatcccaccgcagaaaacctacacggttttctgcaaggactcagggagagccaggggcaaccaaatactctagcctccctgaggcctctcatttgggccagagcctgaccttctgagccagctctttcatccattcattcattcacttactcttccatccacttattcattcattcctgtgtcagttacctagtgagcatatactgtgtaccaaatgctgacttggcactgaggacacttaggtgaacaagcaggtgttgccactgccttcgagatacctatgctttactcacaatctggagggcttctcttacctaaacccaactccagcagtgtccagcacagatagagttgtcaggatgcagagtcaggcgcattcataccccacacgccctcgaattgcctgctgggcaaaggactatgatcctgcactgtgtggagcccctcatttcatttggcaaggcatcctcccatccaaacacttggcttagcttgcaatccttctcatattcctctgtaacagaaagcggattggtatgcaaaagcttctaatatgattttcttattttccctactttcacatttattagaaataacttatgaattacagtaactaatagattttttttttttttgagatggagtcttgctctgtcacccaggctggagtgcagtggtgcagtctcggctcactgcaacctctgcctcccgggttccagtgattctcctgcctcagcctcctgagtagctgggattacaggtgcacaccaccaggcccagctaatttttttttttttttcttgagatggagtctcactctgtcgcctaggctggagtgcagtggtgcaatctcggctcattgcaagctccacctcccaggttcatgccattctcctgcctcagcctcccgagtagctgggactacgggcacctaccaccatgcccggctaatttttttgtattttttagtagagacggggtttcaccatgttagccaggatggtttcgatctcctgaccttgtgatccgcctgccttggcctcccaaagtgctgggattacaggtgtgagccaccatgcccagcctgtaattttttttttttagtacagacggggtttcaccatgttggccaggctggtcttgaactcctgacctcaggtgatctgcccgcctcagcctcccacaccacactcggccgactaatagattttcttacctaaaagttagtctctggttatgtttctccttgcctcattgggtgattggcccggggcatagctgtgtttccgtcccgtcaggtgtgggctgtaggatatcatttatgcatgtcctggaagtttctgtgcaagtgacgcagcccttgatgcattgagcccaagcatcatctgatctttgtttactgcactgattatggttttatttgatctttccttcagctttcctcatgctacttgaatttccacgttgtttttgtcccggcatttaaaaaaatttatagggaatctgaattacagaatctacctctcagccctgcactttctcagtcgtcagtttcttaaaaggtttttgttcagccttcacattattttagcatgacatacatagttttttttttttttttttaatttgagacaagtctcactctgtcacccaggctggagtgcagtggcgcaatcctggctcactgcaagctccgcctcccaggttcgcaccattctcctgcctcagcctcccaagtagctgggactgcaggtgcccgccaccacacccagctaattttttgtatttttagtagaaacggggtttcactgtgttagccaggatggtctcaatctcctgacctcgtgattcacccaccttggcctcccaaagtgctgggattacaggcgtgagccaccgcgcccagctgacatatttctttaagtcattttgagaactgtctttatttaactagctgcagttgtcccagagcttaattcgaagcagcatattgcaactgtttgggtgctatcttgaggcacaataattaccctataataataatgtgtgttttagtaaactggtcattattgtcatagagggctggaaagagtgtcttcttaaagctcataaggaccctagggtactctgcaaatagcagagttctaaacctgaaggaaaaaattaaggggaaaaaaaattgtgttagtggtcagaagccccgtgtccttatgcatcacggcacagcccaccctgtaatgacaagaaggtgttgtattccactgacacttgggggcttttctgtgatctctggggttgctgcatgtacatcctcagaggctctctcaacacagttaccaagggtcaggtgggttacttagaccatctctctagctcatactttgtacttctgggggctgaaggtgacaggacagaccccatcccaagactggggggctgattagagttgccaggcatcccgtatatgcaaagcatgtcctgaattttgcaacttttgtcctggatcctttattaatttgtcaggatgctctaaatgtcctgtattccgctttttttttctaatcaattacagaattcagcaataagagctttattcaaatttaactgggcatcctatatttgcaaaatctggcaaccctgcggctgaggaatgttgctgcccagcctgtgttcttggttaatggacaaggcagcaatgcctgcgtccctccattaatagtcacttagaaacactaattcctcctttctggttatattttaatgtccccggggaagaagtcaaataactccacctgcagttttctttagtgaccaaaattgcaaactctgtcacaggccctttgtcacagctgttttggtcccagagctagccgataggtttcttgatgaaataatgtctgcgaatccctttctcagagcggcacgcagtgtgagcgtgagagaatctgcagtgacagcgggtgatgggc

SEQ ID NO: 551 - DNA, 6000 bp, Homo sapiens
caaactcccgacctcaggtgattggcccacctcggcctcccaaagtgctgggattacaggcgtgagccactgcgcccagcccgtttctttaaatatcatcagcaggccacattttctggtgtacgagccttcactggttaaccctgcagaaagtaacttctttaaatatcatcagcagggcacattttctggtgtacgaaccttcattggttaaccctgcagaaagtaacttctgtaaatatcatcagcagggcacatcttctggtgaacgaggcttcattggttaaccctgcagaaagtaacttctgtaaatatcatcagcagggcacatcttctggtgaacgaggcttcattggttaaccctgcagaaagtaacttctgtaaatatcatcagcagggcacatcttctggtgaatgagccttcattggttaaccctgcagaaagtaacttctgtaaatatcatcagcagggcacattttctggtgaacgagccttcgttggttaaccctgcagaaagtaacttctgcttctggctgcacccacctctccactgtttccaaacagatattctccaaattagctccttttgggattcctacatctgctttatctacccagagctgtaccaagaagaaatctcaacccccaaaactctggggactccctgtctgcaaacctagtccaataattctgaacacacttggcagcttttacagggactaggcacagaatcctcccaaatcctggaccactgagggcctctcccactccattcctgcctgtagaagctgagttctcaccaactgcctgctccctgctgtcctgccacacatgacagcttcattgtccactgttgctgccggaaaataaccgttttccttaaatatctgcatcagagacagcagaggcgatgacaatgggtgagtgaatccaaaatttaaggacagagaggtttatttcactgaaacaaagattccctaaaacgaagcaggtggattattcagtgcttgctggagagcattgaagagaggctccaaggccgggcacagtggctcatgcctgcaatcccaacactttgggaggttgatgtgggtggatcacttgaggtcaggagttaagagaccagcctggccaacaaggcaaaaccctgtgtctactaaaaatacaaaaattagccaggtgtggtggtgggcacctgtaatcccagctacttgggaggctgaggctgtagtgagccgagatcacaccaccgcactccagcctgggtgacagagtgagactccgtctctaaaaaaaaaaaaaaaaggctgcaggtgggagatggccttgggtgcggggaaaacaagtacataattcccagaggacagtgagattcacccaacaagccaaagtgtgagagctgatgggtagggctttggtgctccaccttcccggtcaattccaaagccccccttttttgaataaggactttagccaaggctcttcctgatgccttgccccagttctttcctaaaaatgtagattggaggagaactcaacaatgtactcaaaggtcagacaaatctctgcttagatgttttgaagggtttgtaaaaacctttaaataatattctggaatgcctgttagcctccaagatcattagaatgactcctcataaattctactttcctcagtggcttaagtgagggtttggttacctaagttaaaaagataccagcttaaccgggtgaatatacaaacccacaaattagtaagctatgcagatcaacttcctaagacaattcagaaggaagaaaaaaactaaggtctcaaagattatgaatttgcaactacaagaactgactaaccaaatgaggccttttaagaaaagacagggcctccttctaatgacaaaagggctgtttgcttctactgtaaaaagcctggccatttcaaaaaagattgtagaaaatttaacagcaggaccagtgaaaaaccaggatcccacatgatgaacaggattgctctgatgatcgaagggaggtgttcctatttctactaatgccttaggagaaatggacattgccataaatgaagaacagacacatgccctcaaagacactggtgccactcttttcgtccactttaagttgtctccttccttggagtaatggaactgtacaaacggtagggttatctcatcagcctatcactggatacaagtccaagcccttagaatcccagggccctcattcttttcttcattcccccacctctcagacatctcttaggcagacattttgtgttggaacgtcacaatgcatgctttccttctcccaaaaggaagaaatggatttaggtttagaatggaaggagcaaatggaaaaactacagaatgagaaattactgaaattataaaaatacagatcaaacaacttttttttcaactggcactaatgacacggatggcttagggcaagctttgtcagaccacttatggtcagagtcttccaccgacattagtaaaatatattcagccactttcattaaagtggaagtaaacctgattaatcctttacccaatatcagacaatatcctctaaggcctgaagcaaatgaaggaataagatccgtaacaaaagactatattaaaaggggtctaattattccttgcgccagcatgtaatactccaatccttcttgtaaggaagccgaatgggaagagctggtattctgtacaagatttgagaaccgtcatcaacactgtgatccccagacatctggtagtaccaaagccccatcctctttcggcagctggaagtgagacactgtgactcatttatgtagtgccttctttagtattccagtggacctagagtcagtatttgtttgcttttacttgggatgactgcgagcatatctggcctatcaggaaatattgctgatgaaactgctgcctccatcacagcccaacaaaaagctactgactcactggctaaggctgcactggacgactgcattgctttcgattattagctgagcaagcaagtctatgtatggtggcaaatacctcttgatgtgcataaaccctttccacgaagtagaaactcatatgggaaaaagtacaagccactaggctacactattctgaacaattctccatttgattttcttcgtaatacttttagttgactccctcgaataggttccgtttttcattctggcatacacattctctttttcattgtaatccttatgtgcaccgtacttggtaacatttttgttttaatagagatggagtctttctgtgttgccaggttggtcttgaactatcaggctcaagtgaccctcctgccttgggctccccaaatgctgggattacacacaagaaccactgcctggccagcactacagttctactatcgaaattattaatgctatgctatgtatctctggcggtttttttttttttttttttgagacagggtctcacactgttgcccaggctggagggtagtggcctgatcatggctcactgtagcccctacctcctgggctcaaggaatcctcccacagcaggtgccaccatacccagctaagttttttgtatttttttaggggagagaaagcgtttcgccatattgcccagactggtctccaactcctgggctccagcgatcctcctgcctcggcctcccaaagtgctgagatgaaagacatgcgccccacactggcctctggatgtttgttactcctgagaaaactaaaatcatggcactccaaagactagagacgattcaacaggcaagagcagggatgaaatgcacgcagcgactgaggtctggcttcgcggctctgtgaccccggttcagcttctgagcgcctggttccttggcgggacgcctcctcctttcccgcaagaccagacacgactgtctgggaagcagcgtttctggggcgcaccttgacacttggatttggatcaacaatgctttcaagaagaaagacttttgatcaaaagcgggaaatgagaaagcgactttcctctgaaaagtgcctcccagtcccgaggctgcgaggcccccacgccaggctggctcccacggaagccgggcacccacccggcccgaccaagcgccactccgccccgtggacggggcgtcccaccccggggacgcccgccccacaccgcgtttgcaccccggaggccccttgccgcagaggcggacggcgcgcctctcccgggcccctggggtccgcgcctccctcgggcagactctttcgactctgctcgagcctccgcttcttcctgcgggcggacgccccggacacaacgggccccgctgttcacgcaggggcgccccggcggggcgggcaaagacccggggacgcggtcccgtcccgagacgctcagctccggcccaccgctcgcagctcccgccccgggcgcaggtcccgaccccacgggccgtctcggagccgcagcggccgcttccctgcacgtcctcacgccccccgcacggacgccgccagccccgcgcctcagtttccccactagcaggatggaaagacgggccccgccccgaagcgtagcggcgtctccgtggtagccagtgcccagagagtccgccggtcccaccgccccttcaaaggagaacccggcccaccgcccgccgcggcggcgaccgcgcagcccactcgtcacgcggcccgcggcgtccagcccgggccggctcacctcaggcggtcgctgccgccctcgcgcctgcgcgcccctcgccccgcccctctccccgcccgcgtcccgcgcaccgcaggcctctgcccctcgcccaccgcaggacccgccccgcgcacgcgccgcacgtgccacacgcaccccacgcccctgcgcacgcgcaggccccaagtcgcggccaatgggcgacgcggccgcagatccgcccggccccgccctgccctgtgagttcctccggccgggctgcggggctccgctcagtccgggagcgcagctgggccgcggcgctccgacctccgctttcccaccgcccgcagctgaagcacatcccgcagcccggcgcggactccgatcgccgcagttgccctctggcgccatgtcgcagaacggagcgcccgggatgcaggaggagagcctgcagggtgaggcggaggaggcggcgcgggagccgagggggcgcgggggggaagcctggggaaggccaagagggcgccaaggggaggttgccggggaggcctagggggcatcgcgggccgggcgaggctgcgccatcctccccttccgtacccacccctcctgcgggcatgcggagcccggggcgtggggaccccgcgtactgcccggggttcgcggcctcgccactcgggcgggggttggcttggacccgggtcggaccgcacgggaaagccccgattctccagctccgcgcgagctagaattccacctggaggtgaatctgcgtctcgcagttggaccgaacagcctcaaagtccacgttgccctccgcggtctgtagttcagaccagtattggttttaatgaccaaacaccaaggcgtggcaagtggcctgttatgagctttaattttgttattaatgtttatatccatggtgactgttaggatttcctcaagggtgaacgcggagatgggagggggttacagcgtttttaaaatatggcattaaatgggcatgttccaatttcactagagggtcgttccaaaacaaagctttaaatgacttacgggttaagaaaacacaagcaaaaggacgctgcccgtgcagcactcagtcgttacagcctgcctaatgcccgagtagaggctcgctgtgtgcccttggctagattcgcaagaccatccgttcacgcagcgggaaacgcaggcccggggtgcaggacttgccccacgcacagccgggtggcgtggagacccaccccacccggtgggtccgcgtcagagtccagacgagcctttgctcagggaagcgggcactgaagccgc

SEQ ID NO: 552 - DNA, 6000 bp, Homo sapiens
ggcaacaatagcgaaactctgtgtctcaaacaaaaaaaaaagacactgctcaggaagccccaggggtttaggtgctctgcaccaggaagtaggtagggtcaagaccaaacacatactgtaatctatcacacaaggggcaggctgaagacaacagggagaggaagatgaaggagagacaagtgtatctctgtcatcctctgcgctactgcaacagaatcccacagacttagtgatttacgaacagaaactgatctctgttctggaggctgggaagtccaagatccacgcaccaacatctggtgtcggctgagggccttcctgcctcatcccttcaatgaggctacagagggacccacctccctccatccagccccttagagcactaatcccattcactagagaggagcccctatggccgagccacctcttaaaggcccaccttttactaccatcccactggcaacatggaggaacacattcgaaccaaagcagtgctttttaaacatcaccccagaaaggacctaaaaatccaggaaacaaggaaaaaaaactcactccagattgtccatggctaatgactttgggcccaaaagctgtattcccaggaatgatttactaagggacaggagttttattattaacccacagcaaccgcgtaggaaaggaaggcacttcctggagaatggagcgtgctgtgtatctactcacgtgttacagttctccactcggatcgttcaccttttcaaagaaagatgggcttacagtaaggttgcttaataaccttagaaaacttgctcataatcacaagcagtttacacttcaaatcactgtagtataattaggccccagacggaaaggtgctgctgttgctgctgcaagaaaagccctccttcctaatctcatttcgcgtccctctcatgttcctccccctcctcactcacttataatttacattgctaacaagacacacagccagtaaatcttacctccctcctatatcaaggtagatgagattttgaaaagcctagactataaatatttatatcacagtacaaaaagaaaactgataggtctgcctcagagacaaaatacagtccaacaagagttcttaatccatttcttattctcactttgtgtaaaaaaaaaaaaaaaaaatcatctgacatccagcttttctaggtgcccaaagcagttctccctccagtgacagactccagggaatcccttcgattcactgccctctgtatgtcccagggcaactccctgggtcccattcctcaacatggattcatgggccacagccacgagccccacgtggagtaaacacagggccaagttctcaaggccaccctatgccctaacctggggtgacaacctcaactctggctatgaagggagaatcacctgtggtgttttttcattgttctccaaaagcctagcctcagcccactctgaaagtgactatttgggatgctggggtggaatccaggcaaatagattgaaaaagctctgggataaatgtcagaacagagggaggcagcatcccagaaaaaaaacctgaagcagaggagctgtgaacccccgagggaactagcaccccaaaaccatacaaagggcttcttccccaggggaggtgggctctaagaaattgctgttttacctttaaagcttctcaggttagtggggagagaacaaaagagacccgcctgacaaaagatttcaagtatcaagtcagctgggtaggtaaatcaggtccctggcttccaacggggctcgtttccctccaccttcctgttgcctccaggacctctggcctcctctcctccaggaccctccagggcctattgcacgcagcctcaggcatctgggctccaggtatcccactgctgcctcatgcagagaccttggcttctccttaagtgttgttgccagccttatctttcactccacctctagaacctcattgtgaccatctatgaaatgcaagtcttggacgagaatctcgatgtctgcaaccccttcaggtctcaaagcacacaatgctacaactccactccaaaataagtagaaaacatcttttcccctcatacaactttgcccatggtgagttgcctctgacaagagagagaaccatctgccagttgcagacacagcagtgggtgaagaggtgagggcttggattattaaacacggccctccagagtaaatgggcatgcactttactgaactgatgccctcctggtgaagacagtgggtccttcaaggaagtgatgcccccgccaccgtgacacggtctcgtcacagaatcctacctctcctgcatgttagcagtgacatgtctaggagaaaagggccaagttcatggctacagtgagctataatgattgtgctactgcactccagcctgggggagtaagactgggcttgtaaaaaaaaggaaaaggacaaatacgagcatcctgcgagtcaacaactttagctagaatgatcaagagatagaaaggaacagaatcagcccattttgccattaactctttaggaaaagcagttggccccagagggtacactcagaggagagagtgcttgctgcttccatccgtgggtctggctgcaaggctcccattgttctctgttccgaggtcaacaaggggcagtgaaatcggacaggcagaggtgagcgctgcctgagccaccgctccgtcccggatttgcaggcagctggagcccgcgggaccggccaaccccgcccacgccgagcccacagtggccccgtcctgccgcgcggacactcagggcggcccaaggaatcgcctacatgggatccaccccgcgggtaactatctttttatagaataaacaaaacagaaaaacaaaaatctcgtaactccggcgctggccgccttgcactgccaatgactcagcagcctgtgtaagttacatattggagagaggaccgagccccccggagccccctccacctcccagcgcccagatcccagccggacagtgaaacgcacaatgtcaggagtaacgcggcttcacaaccggaaaatgggtgattttatggcaaagagtttataaaaacatcccttggactttattttatgacaaaagataggaaaacacctcttaatctatttcaaaatagtaattagccaatgtttaaatttcaagaggaaaaatccgaattacaggattttaaagaatatggttttaggccaggcgcgcctggtggctcaggcctataatcccagcactttgggaggccgaggcgggaggatcgcttgagcccagttcagaccagcctgggcaacacagtgagaccccgtctcttaaaaaaaaaaaaaggtaaaaaaaaaaagcttgtagtgttcatatgtatatatatatattattcaatatattacggtaactaagtcctgcctagtaaaatctttttttttgtaataaaattagcaactcactaaatttatgtgaatatatggttttaaaaactctcaatgaagattaaaagttcactgtcagaggtttcagcagtcctttcccaagcttatttacatgctaattttgcttagtaaactctggcttcaaagaacacaaaggtcagctgccaccaggtccctcctccgaggctttggccctagggaccctgggaaggcggcttcagtgcccgcttccctgagcaaaggctcgtctggactctgacgcggacccaccgggtggggtgggtctccacgccacccggctgtgcgtggggcaagtcctgcaccccgggcctgcgtttcccgctgcgtgaacggatggtcttgcgaatctagccaagggcacacagcgagcctctactcgggcattaggcaggctgtaacgactgagtgctgcacgggcagcgtccttttgcttgtgttttcttaacccgtaagtcatttaaagctttgttttggaacgaccctctagtgaaattggaacatgcccatttaatgccatattttaaaaacgctgtaaccccctcccatctccgcgttcacccttgaggaaatcctaacagtcaccatggatataaacattaataacaaaattaaagctcataacaggccacttgccacgccttggtgtttggtcattaaaaccaatactggtctgaactacagaccgcggagggcaacgtggactttgaggctgttcggtccaactgcgagacgcagattcacctccaggtggaattctagctcgcgcggagctggagaatcggggctttcccgtgcggtccgacccgggtccaagccaacccccgcccgagtggcgaggccgcgaaccccgggcagtacgcggggtccccacgccccgggctccgcatgcccgcaggaggggtgggtacggaaggggaggatggcgcagcctcgcccggcccgcgatgccccctaggcctccccggcaacctccccttggcgccctcttggccttccccaggcttcccccccgcgccccctcggctcccgcgccgcctcctccgcctcaccctgcaggctctcctcctgcatcccgggcgctccgttctgcgacatggcgccagagggcaactgcggcgatcggagtccgcgccgggctgcgggatgtgcttcagctgcgggcggtgggaaagcggaggtcggagcgccgcggcccagctgcgctcccggactgagcggagccccgcagcccggccggaggaactcacagggcagggcggggccgggcggatctgcggccgcgtcgcccattggccgcgacttggggcctgcgcgtgcgcaggggcgtggggtgcgtgtggcacgtgcggcgcgtgcgcggggcgggtcctgcggtgggcgaggggcagaggcctgcggtgcgcgggacgcgggcggggagaggggcggggcgaggggcgcgcaggcgcgagggcggcagcgaccgcctgaggtgagccggcccgggctggacgccgcgggccgcgtgacgagtgggctgcgcggtcgccgccgcggcgggcggtgggccgggttctcctttgaaggggcggtgggaccggcggactctctgggcactggctaccacggagacgccgctacgcttcggggcggggcccgtctttccatcctgctagtggggaaactgaggcgcggggctggcggcgtccgtgcggggggcgtgaggacgtgcagggaagcggccgctgcggctccgagacggcccgtggggtcgggacctgcgcccggggcgggagctgcgagcggtgggccggagctgagcgtctcgggacgggaccgcgtccccgggtctttgcccgccccgccggggcgcccctgcgtgaacagcggggcccgttgtgtccggggcgtccgcccgcaggaagaagcggaggctcgagcagagtcgaaagagtctgcccgagggaggcgcggaccccaggggcccgggagaggcgcgccgtccgcctctgcggcaaggggcctccggggtgcaaacgcggtgtggggcgggcgtccccggggtgggacgccccgtccacggggcggagtggcgcttggtcgggccgggtgggtgcccggcttccgtgggagccagcctggcgtgggggcctcgcagcctcgggactgggaggcacttttcagaggaaagtcgctttctcatttcccgcttttgatcaaaagtctttcttcttgaaagcattgttgatccaaatccaagtgtcaaggtgcgccccagaaacgctgcttcccagacagtcgtgtctggtcttgcgggaaaggaggaggcgtcccgccaaggaaccaggcgctcagaagctgaaccggggtcacagagccgcgaagccagacctcagtcgctgcgtgcatttcatccctgctcttgcctgttgaatcgtctctagtctttggagtgccatgattttagttttctcaggagtaacaaacatccagaggccagtgtggggcgcatgtctttcatctcagcactttgggaggccgaggcaggaggatc

SEQ ID NO: 553 - DNA, 6000 bp, Homo sapiens
agacgtaaaaacgagcacaaaagcctgcagcggcttactattccccaagaagtggcaccaggcgctcaaaaacagttgcccctggaagtgccacgcacgccccacagctgctgctcagacctcgctgagggcaaagcccgtgttggtgaaagtgtggtagtgccacaggtcatatttatatcttctgatttaccactggattgaggagccccagcctgaggtgggaggcgaacgctgcctcatggcctcctgtgcagcctcagagatcctgctctcctccaccctgtcttccacccacgcagaggaggctgggagcggacggagctggactttggttccacccaaacactacagaccagtgatggtgccaggaggcggaggcagacagcgcccccacaggcatggtccccaccccaggaggctgcctcccactgaggggagaccaacggcagcaaaaacacacgtgcacagatcatcacagtcggtgacgaatgcgcagagcacagtgagggcgccatggcagggccatgagagaggggctgggagaaggacctctggggccagggtggctgatacaggggcaaggcagacatggcgagcgttccagccaggaagcagcctggccttggggcaggaaagggcttgagctgccatcagcagacctgggaggaggccgagggatggaaccttctggtggggtggtggtgccagaggcaagtcggtgcccagagcttggcaggggcaggatatgtaggcctggggactccatggctgccccctgactgggggccttaagcaggtttcaatcctggtttgatgttttaaagagatcacctttggctgctgtgttagaaagtagcttgtgacaggtaacagtgggagccggatcattgctggggtgatttctgagtgagatgaggggctctgggacaggactatgggaagggacgggaggagagtggattccagagaggctgggagtcaggagggcaggacttgctgaccaagaggccatgggggtgatggggaagagatggggtgacctcggttccagtgcagctcggacgcactcccagtgggacacagagcgtcaggctggtgaggcccgctctttgtaggtcagccctggcagcacagagctgtggcgttagacagggattgactccagtgcttggcagtcataaatccacttctaagaatcctaccagatggccgggaagcagaagattaggcagaaagtagggtgtcactgatgggactctgcatgaccgtcagaggtgaagatctgacctcattggagaatgggggagagaaacacaaaaaaggagtgaaaggaggtggagaaggacgcgcccacgggctggactcggcaacgcttttccctccaccgtctggcgtgcgcctcagcacgccctgcaactgacccggcaggactgaccgtctgcatttaacagggaggtccggccgcctgctctgggtttccagggcccacccataggtggccagggccctagcctggggctagagccttcacgcaccgtcagtctgaagccaagagcattaaactgaagtgcacaattggtaaaactctcagaatgagaaggagttcattatctaggaactccattacaggattcactgctgacatctaactgtggggctgtattttcaggatcccagtgacttgtcaacctctaccccatagtctacaaacggttggcagactatgccacaggccagacccaaccctctacctctcttcatacagccctaggctaagaatcgttcttgtatattcactgaaaacaataacaagagtatgtcatgactcaaaaattctatgaagttcacactgcagcatccacagatgaagttttgttggaacacagtggtgcccatcgacttcctaaatgtccaggactgctttcctggcagggccaagcagctgagacaggaacagcgtggtccgcaaagctgacaacatttactctcgggctggttgtggaagaagttttagacccttggtctacagagctgtctgttcccagccgctgcacctctcctcctcctgcccagtcccagctgagcgccaggctcagccctgacccggcaccaccatgcatttgcagagcctctgtggccgcatcaggccctggctgccttcccggtgctgtccctcttcttcactttccacccctcccaggggacccacgcattttcaaggaagccctagaaaacgcaaccgggcagaaggaggcttgaggagacgtgtggtctgggctctctgctcataggcgcccaagtgttcaggcacccgcactgagactgggtttggaacccagaggagacgcagctggggtgtggggctgtgctcttcttactgcactcatccggatggaggtgaaagttcccgggaagcagctgcccctccgcactgacatggttgcctgacctcccctgggaaggggtcctcctgccacccccaaactcgacccccacatgccagctgactggcaagacctcctgcatcaagaccagacccagccgggcagaaccctctggaggcagcagcccctcccatctggagaggggagggctccttcctcgctcagagtctgggggagtggagcccacagcccacggctcgagctaatgccagaggtcagaccccacggccctcccgccgaggccaagtccagagtcgggtctgggaccccatggactcccccgcccaggtcctgccgggtcccgaagcctccttcctcccacccccatctccccccgcccgagcggggaggctttgtttctggcagagcgggacctcccgcgccggtgcgtgtgggtgttggggaggggtctctgctctcgaaggttcaggggctgccagggttcccggccagtggcccttgaccgctcgctttccttggagtcgctgaacccaggttactggaagggttcggggccaccagggactccggccagagcggccggggctaaatcgctttgtctcggacaaagagctcccgacgcagcgccagtgcgtccaaggggcgggcgacccacgggctgcgccgggaacggcatctccccgcgccccggaccagcccgggccaacaaagggccgcgtccgcccgcctcgccacccgaccgccgtgggagaaaggagccgctagcgctccgagggacaggccgcccggccccgggttctccccgggcgcagccgaggctcccggaagccggcaaggccgggcaaggccgggcagggcccggcagggcccggcagggccgggcagggccgggccgggccgggcctgggcgccccgctccttaagggggtctgcgcggcgctagcggggactctcggaccctggggcgcgaaggagccgagcagggaagggcgggcgccaggacagggaccagacgcaaaggcagggaccccccacccacgcacaagaccaggagggtccgcccggcgtccaggccccactccgggcggcgggcagggggcgccgggcgaagcgggaccgggctcaccgtgatccgggggatgcttttcttgccctggaaggacatcctgctcctgggggtctctggtaggggcggcacaagcgggggcgggcgggcgggcgggcgggcggggggacgcgtgagccgggacgcgtgcgtggggacggcgggagacagactgcgagcgcgcggggccgcacggctccgttccggtcccgcccccgctgggccccgcccccaccccggctccgcccccggcaggccccgcccccgatagggcccgccccagcccgagccccgcctcaccccgcccatcagccccgcccccgccctcagccactccttcgctttaaagcccccccagcgctggaaccgctgcagggtctgatctctgcaccccgggcccccgcgcagacccgcggacgagcgctgggtggggatttcaacctgctccagctgatgtgcgcggggtttgcaccccggggaggcgagggagagagtccggccacgtcctgccaggccccgcccgcgcccccgctgccctccagcgcggaacccaggtcccaggagacgcgaggcgcccaaggccccgggattccgagccagtcaaccccgggccgcgacgctctgggaaccacacccgtccaggaaggcaccttggccaaagccggctccttcgcagatgacccgggccagggtccgagcgccaggctgtgaccccgcgaggctgttccacgctggccgcgagagacggagggcaggaggggcccgaataggacagagagagagagagagagagacagaaggaggcgcacgcgctccccagggaccgggacgcggtggtgggcgggacctcgcgggggtggggggtggtcgcaggacccagaaggctcaggacctttacggatagggaggaccccgcaggggggagcgggggagccccacgcccggcgtcctccgggtgcgagggtctcggggagtccgagcccgggcccacggcctctgtcccgcggccactacctgctgggggtcccgggcctgggccacgccgggctgccctcggggacttgctgcggccgttgaggggtctccgcgcgccgcgcagactcgcctcccaacccgagggcccgggcggccgccgcccagagcgtccagcggcagcgtcttgctctcgaaggcgtcctccacgcagcggaacacgcagccaagcttgggccgggccagaggcctcgcgggctcctgaggctgccgcgcggtcacggcaggagcgggcgacagaatccggtctcggagcctcctgtagcgaggtctgcgcggcaggtgcactgggcggacctggaggccgcgccctccccccccgcctcctgccgcccggcagcgctgcgcggagctggctctgtccacgtagcgggtgctgaacgccccattctggcccctgggtgctcgcttagtcccggccacgcgtggctgctcgccctcgggacacactgggcgctgggaaggccgggcggggagcgcgcaccggagaaaccgctgtgggaatcccggccacatttccaggccccttgggccgtcccacgccagacaagaaagccctgactccgaaaccctgggcgagtgtggagggcgcgcgggggtggggtgtacccgcccacgcaaactgctgctgatctcccttaaagccgagttagaggcttggggcgagacaggagtgacgggcgatgctgtcactccatctgtcattctacccagcctgcagcagctgaattcgaacccagagacttcaggcctttgcgttgttaccgcagtccgcatttcaaagccagagtttggccactgagtcaccatgacctcgagtactggcggggcccgagccagcagagctaggtccagcagcttcccaccccttcgtcctcctctgggctccccctcccctaaatgattaatgcaatgtctgttactcacctgtgtgggaccgtccacggcaaatatcaccaactgttcttatgcacgtgcagaagttccgtccctttcctaactgtctgatctcttccatggttcacatttgaccaacagccacaggagggagcctcccaggtggtcgaccggagccaggtgctgccaggcacccgactgcagagcttgccctccaggtgatctcgcaggtgagaactggggctttcctccacagtgggcggaaggcgcggactccgtttctggtgtgcagaggcactgttcagagaatgaactcagaagtgcagaaatggctcatacggctttcagttcaaactttaatacctttgaggggactttaatcgtctaagatttaaaacattttttattaaaactgtacaataatttacaaacgagtaaaaaattctctggtatatatcataggaatcacaatacaaaaatatttgtaaaatcttgtagatcaccatacaaacctattttaggcctgtgaatactgcttagcatggaacggaatgtcac

SEQ ID NO: 554 - DNA, 6000 bp, Homo sapiens
gtgatggtatcacagggataacatgtatgtccaaactcatcacattgtacacattaaatatgaacagttctttgtatatcaattgaacctcagtaaatttgttttttttttttaaaaaaagggagtagaaattatccaatctgttcacaaaacatggaattagagagatgtagctggatttttcagccctggaagcttgttgatgtcaaattcccaaagctgtactaattcctattgagcaaacagaaggaaaaagtatccgtcttaacttaaaccttccataagggaacagggcacaacacatggtattttgtccttcccaaatgtgaggaatacattagattgtttgaccctagcttcagtactttagaatgctaagaaaagctgacgttttcaaagcaaaaagctgtgctcagctcttctctgtcacggtgtcatcagtctcttgtgcccacatatcccctaaccctgtcctcctaagtgatttccttctatctaatacctgcaggtccagaacgtgatggttcagataaactatatatcaagtcttggcagctatattactgctttgtgggaaggtcaagtagtcctttgaaaaatttgaaggacacaacaatattactcatgcacacatttagagtttagagaggactgcaagacaaaactccttggcattcacacaataatcttccaaaattgtacccaaatcttacttctttggagtcatcatccatttccccattttccctctccatccacaagcatatactcaatattcagtctttttttttttttttttttgagacagggtctcactctgtcgcccaggctggagtacagtggcatgatcagagttcactgcagcctccatcttccaggtttgggtgatcctcccatctcagcctcctgagtatctgagactacaggtgtgcaccaccacatcctgctgattttttttttaacttttaggagagatgaggtcttgctatgttgcccaggctggtctcaaactcctaaactcaagcaatccccttgccttggcctcccaaagtgctgagattacaagtgtgagccactgcgtctattcagtcttcattgcctgcatgcctgtgcgcatgcagttccctctgtcctttcttaccttctctgatggaaaacacaatcacctgtcaggacagttcagcttttcagtaaaacagcttccaacaactttagggaaattgtcacttcctcttctgtgcttttataagtctttgttcatacccctattataatacctatcacattatattataattatgtgttaaatttcaaggcattgattatgtctcaattatccagtgattaatacagcccctggcagatagtattcaacgcatttttttgagtgaacaaatgagtgaccactgtctgaactatttgctttatttttctgtaaaactagtttaataatgtggttgccttggtatgacaatttattctataaataagtgtaagagaaagaagaacaagaaagtgataattgcatcactcctagaaggctgtcaattacattaaacttacccaaagcgggaaaaatctccaaatcagaatattaagcatggctttataataacaatgcaaaaaatgtgtttataaaaccatttgtgtatgcagaagattgaaactggacctgttccttacactatatacaaaaattaactcaagatggattaaagatccgaaactataaaaaccctggaagacaacattggcaatactgttatagacataggaatgagcaaagatttcatgaagaagatgccaaaagcaatggcaatgaaagcaaaaattaacaaatgagatataattaaactaaagagcttctgcacagcaaaagaaactatcaacagagtaaagagacaacctacagaatgggagaaaatttttgcaaactatgcatctgacaaaggcctaatatccaacatctataaattaaacaaatttacaagaaacaaacaaccccattaaaaagtgggtaaaggacatgaacagacatttttcaaaataagacatacatgtggccaacaagcgtatggaaaaaagctcaacatcactgatcatcagagaaatgcaaatcaaaaccataacgagccaccatctcacaccagtcagaatggctgttatcaaaaagccaaaaaataacaggtatgggtgaggttgtggagaaaaaggaacatttatacactgttagtgggagtgtaaattagttcaacaattgtggaaaacagtgtggcgatccctcaaagactaaaagcaaaactacaatttgatccagcaatcccattactgggtatatactcaaaggaatataaatcattctataataaagacatatgcatgcgtatgttcattatagcactattcacaatagcaaagacatgcaatcaacctaaatgcccaacagtggtagactggataaagaatacgtggtgcctacataccatggaatactaggcagccataaaaaagaacaagatggagctagaggccactatccttagcaaactaacataggaacagaaaaccaaatatctcatggtctcacttataattgggagctaaaagatgagaacacatggacacaaagaagggaaccacacacactggggcttactgaaggatggagagtggaaggaggcggaggatcaggaaaaataactaatgggcactaggcttaatacctgggtcatgatataattagtacaataaacctccacgacatgagtttacctatataacaggcctgtacatgtacccctgaacttaaaagttaaaaaataaaaatccattagtggctgggtgtggtggctcatgcctgtaatcccagcactttgggagcgagaggtgggaggactgcttgagccaaggacagcctgggcaatttagctacactctgcctccacaaaaatttaaaaattagctggttgtggtgctgtgtgcctatagcccccactactcagaaggctgaggtggaaggactgcttgagccccgaaagttgaggctgccatgtccataccactgcaccactccagtctgagtgacagagtgagatcctatctcaaagaaaaaagaaaaaccatctgtatttccaattcttcttctcaacagagtatagcagaaaaatgacacacaaacatcacatgtagagtttgcatcagaagaggtctttaaaaagatcaagacaacagatttttacagttaaaagagacctcttggttatctagttcaactttcttctatgtatgaatctctatagtatgcctgataaatgctcatctaccttctacttgaatattctcagtgatggagaaatcactatttgagaaggtacttgattccttattttgacaattataatgtccaagttaaacccaatgaacccagcccttccttcttaaaccacagagaatactccttcttccttatggtaaccctataaataattaaacacagctataaagtcatcccgtctttttttcctcagacttttctagtttcattcaactacttctcatgttatagttttcaacattttcaccaaactgattgatatcctcagtgtatgttcccatttgtttctactgcttctaaaatggagcctggagcaacactctaagtgaggttaacccagagtggagaatctcctaggacaggactagtatatatctctcattataaactccatacggttactattcaaatttgtactggctcttacctaaggtagagtcaaaccttgacaatggctagtaggaaaaaggatgacatgaagccaggatgggaccagagctgagagaactgatcccactctggcaccggatctttggtgggaaggcaaagctgtctaaaggagtcctagatatatcaaagacattcagggtgttttgacaggtggaccaggaaaatattgctggaggaatatttgaagtcagacatgtggcagcatcatgcctccaataggttttggagcaggctctcatcatcccttagggaacatgagaataaagacctaacccctaggggaaaatgttgcaaagagcttttgctgtgttttcagatgactttgcaaattaaagtcaagaagactggagttcaaagaagggctgtatttctaggcagaaactgaggtagtaagaatctggtgtcataaagacctttgttgaattccatcttttctgctttccaagcctaagtttcctcatgtaaaaatggggataagcacttaactttagtactttaagtactaactttaaaggactgctgtgaagatctagtgggataatatatgtagttaggcatgcagttagtgcttatcaaatgttattattatagattaagatgcacaaataaaatataagttaaataaattttaaaataatttcacttttgaagcttttaaagtaattatgtactaagagcattttctcaaattattcttaacacttcctttaagaaaagggctatatctgttttttgaaagatgaccagaagtgacatggattggttgaaaatggcttgtaaagtaagcctaacatttatgatttattaccataaaaactgtaccaacagtacggttataacaaatacacttatttttgggttttattttcaagtaagataatgactttatcataaacctttgaaatcagtctttttacagtataaattcagattcattaatccacatagaatttttctcgatggtataattctgtatttgttaaaagtctttgcataagccccttgtcaagccaaatgctgttttccttttagtatccaattatctgaaacttaagaagagtgtgcaccgcccaatgggtgtgtgtatgtgctgctttgaacctatagttgagatccagagaattgggagtgacatcatctgtaacaataaaagagcctctcttggtaagcagaagacctatatataaaagtcaccatttaaggggtctgcagtccaattcatcagttgtctttagtttactcagcatcagctactaacatacctgaacgaagatcttgttctaagacattgtatggtaagtaaacttaaaaattcacttctgaatctcatgagattttgataatcaagttattatttaatgtgtaccatttctacaaataccatgttgtttcttcaaggtaaaatgctaagaagtttgagttatgtttaatataaaatgccacatacaaaataaattaatgctactcaaatcacaaaatcctttttgattaaagtcttctgagataccttgccttttaaaacctcatctgaaattacaacaaaaaatcattaaaatttggcatgctatgctttaatataatagtatcggtgtcaaaattttgaaataaaacaggttgatggtgaatgaatagttctgatttaaataatctttataaatttattaagtggagttaatattctgtttttcctgcagagtattcttatctagattatttattttatggctcataaagagcccaatctgtatactaaagttggataagcccagtttgactagtaaatatttatttcctttacataaatgacagctgtattctgaaaacagtatttcctatgctatttctaaatgatgcagtttccctgtaaaataggagtacataactactctatgtgtatgttaaaaggtagtacactgagcattaaggaaaagcacttctataataacagcctttgcaagtactgaaatgcagattaaggcaagaatatcctatactgatgtgaaacgaggaaagagacaaaagttatattaaaagataattgttaataaaataagttgaagaaataagctacaaacaagcattccattcagagataaagctcgaaatccatatcacaagtaattaatcagatgatttttaaatgctttgacacattatttttaatgctaggagaaatgtgaattaatttagtgaaaatctctagattagcacctatt

SEQ ID NO: 555 - DNA, 6000 bp, Homo sapiens
gggaggagacagaagtccccttggtgaacctctcctccttgatattagtaactagggggctatttttggttgacagggtacctcctattctcccaaggtgtaatggtaagaaaggatacccaaggactagagaaaaaaacaaaaacaaaacaacaaccaacttccctgaggaaggggagtgtggattggtgactcaggctctgaaaaagttcccagctttttcttgaaactgcatggctttggacagaagcgtcggcatcatttgtggagactgcggagggccatctcttcacaggaacacctatatgtggtttaacgaggagcaatggcagcgaagaacacaaggtgagtgcgaggaggactggcctcctttgggaagagtaatgttatttttatttatttatttttttaggcagagtctcattctgtcacccaggctggagtgcagtggtgtgatctcggctcactgcaacctctgcctcccagattcaagctattctcatgcctcggcctcccgagtagctgggattacaggtgtgtgccaccacatccagctaatttttgtatttttagtagagacggggtttcaccatgttggctaggttgatctcgaactcctgacctcaggtggtccactcgctttggccttacaaagtgctgcgattacaggcatgagccaccacgcctggcctgggcagagtaatttttggaggtagaggtgggaggaatagctgagagagagggcttggatttcatggctaggtgatctcaaacaattgtgactgctcgcagtctgagtttatggagggtttcttactgattccatagaaaatttattttttcactttacaaatatttgagttccctttacatgcaaggccctgttctaggctctggggatcaaagcatcaagaaaacagacaaaaattcttgccctgtgaaagcttaccttgagggacaagggaacagaaaatatatatcatagtatctaagatgatggcaagccctaaagagaaagataaagacagggaatgtaaatataggtggtcatcgctgaagaggaggcttcaccatgaaggcaatatttgagtaaggacaggaaagaaaggtggatggctatacttgaggaatgtttcaggcagaaggtgatccaggcacctacggagctccagagagtggctggagtaaggagacaaaaagttgattgagttccttgtgggctagttctgtgaaggattttatttgtttatttacttacttacttactcagagacagggtcttactctgtcgcccaggctggagtgcagtggtgtgatcacaactcactgcagcctcagggcccatctcagcctcccgagtagctgggactacaggcgtgcaccaccaggccaggctagtttttgtattttttgtagagagagaggggtttttgaagaggctaggtcttgctcagtgatagaattacaggtgtgagccaccaagtctggcccttaagtaatttttttgaatgaaaacattaaggttttctttagtatcttcctgttttattttttagaggcaagatcttgctctgtcacttagcctggagtgcagtggcgaaatcacagctcactgcagcctggaactcatgggctcaagcaatcccccaacctcagcttcccaaagtgctgggattacagatgtgagctaccatgccctcccccagcctgcatttttgagagatcttagcactatgagaaattttccttaaaaaaaaaaaacaaccctcaaactttgtaaaatagctacattaggggctttgggagattatctagatgtttgtgttcagaatagatttgaaagccaggcgcagtggctcacacctgaaatcccagcacttttgggaggctgaggtgggcggatcacttgaggccaggagttccagaccagtctggccaacataatgaaaccgcatctccatactaaaaataaaaaaaaaatagctggctgtggtggtgcgtgtctgtaatcccagttaggtgggaggctgaggtggatggatcccttgagcccagggagttgaggctgtggtgaatggagatcacaccactgtgctccagcctgggtgacaaaattagactctgtcaggtcaggagatcaagaccatcctggctaacatggtgaaaccccatctctactacaaatacaaaaaattagctgggcgtggtggcacgggcctgtagtcccagctacttgggaggctgaggcaggagaatcgcctgaacctgggaggcggaagttgcagtcccagctacttgggaggctgaggcaggagaatcgcctgaacctgggaggcagaggagctgatatcgtgcctcaaaaaaagaaagatttgaaggggaagagattagaggtaaagaaattaggttaggagacaataggtataaagtgaaggggggctggaatatatcatttacttattttgcaacatttactaaggtcttaccacaagtcaggcactgtattaggcacttgcaatataatggttaaaaaaaaagatgaggccgggcgtggtggctcatgcctgtaatcccaacactttgggaggctgaggtggacagagcacgaggtcaagggatcgagaccatcctggccaacatggtaaaaccccgtctctgctaaaagtacaaaaattagctgggtatggtggggcatgcctgtagtctcagctattcgggaggctgaagcaggagaattgcttgaaccctggcaatagagcgagacttcatctaaaaaaaaaaaaagatgaatgaatcccctcctggaatatatagtgtagtgagtagcaacatgcaggagatagaaaggaaaataaatccttgtctctcatttccatctcttcatggatgtagcaaatacagggaatggaagccttccattagagatggcctccttaaatgtctgcaaaaattctgaaatttgaagttctagtggaatagtttctctgttcctcctgacagatttttctactattgtagctttctccgttgagtaaatgattttatcctctttgattcttttgactattgttcttaagaaaaataaaaagtaacgaaatactaagtgaaaaggaatggttcataggctatctctctgaaaggcagccattgttttgttcttctatattggaagccttttcagctggttatcctctctaacctgaaaacaactgtcattcgaaagtgttatttccagtggcctcagggcatactatcctttctcttttattttattttttgagacagagtctctccctgtcgcccaggttggagtgcagtggctcaagcgattcaagcgattctcttacctcagctctcgagtagctgggattacaggcgcccgccaccacgcccagctaatttttgcatttttagtagagaccaggtttcactatgttggccaggctggtcttgaactcctgaccacaggtgatccacccgcctcagcctcccaaagtgctgggattacatgtgcgagccaccgcgcccggcctcctttgtctcttaaaggcattatccaaaatactcatcttccggtttgaagagcagcagggattaaatgtgtattatgtatgcagcaatttgccactccctttgccctgccccagttactgcaatagaaaatttctgggaataaatacatctctggtaaattcaatcttgctagtgaagattatgaaggaaacaaagaaaggacacttccattccagaaaggtgtttgtttcccaaaaggttagacattgattcagaacaaagggaacctgaggaaacgggtataaaagaaaatcaactctgaatgtgaggtattagaaagccatttgtttcctagggaaaaggaggaaagatggggtgggagacatgggctttactgtataaccttggtcatgtcacctaaacttcttggaactcctgagtgtaagagttgggaccaaggatcgcaaagcttctttcattcctaaaattctatggttccacgattatgtaagctgaaacaggccattctgttgatttcctaatctccaggaggaaagaaactagtctttgggagttaaaccgactaatttaacggagaattaccaatgtggaggtgggcgaacttcacaattatggggttttggacagtagagatgctcttaaaatttccaagaggacccttcccccgtccttgaacctggctttacaattctcttcactctttgggataggggagcgggtagaacctagtttagattgaggtcgttcatttgagcatttcccctttacttattttgggacctttaacgaccaaatgccgagaaacagatccttaattacggttccgggatctcgaaaggcctgtaaaatcctgcttccgcatcttcatcctttcttcgggtattgggatcttttttaaaaatgtgtatttctggcggagggggcatggagtgaggttcagaacagcagagccgggctgacggatgcttctttcgcgggaggcttggcttgcgggactccgggttggggccgcacgggctggcaggcgggctccgggcaacaagggcgcggctgcggactggcgggcggaccccggggaggggcttcacggaggcgccgcggccggagcggagcggagccgcccgggctgggcgcgcagcgctgccgggcgggcggtggcgctgcggaggcggtggccgaggccgacgagcgcggaggaggggcccgaggctggggcggctggtggcagctgcctcagtgacgactgccggcatcgcggcgacctgaggagatcaagccgcaggccccgccgtcgccaccactcccgccagtcttccttctccgctcccggccggggcgtcaggaatgggccccaatcgccgtgggccccgcaccctgcgtcgcccgtaggccccagtagccggaggccgaccggcctcccactacccctcgccctagccaagccgtccccaccccaaatccccgggaaggaagatgagggagacgggcccggcgcttagcagccagagcagcagcagcagcagcagcggtcgggggagggtgtttcgccgtttcctctcagccgccaggacaagatggcagcggccgcggagaggggctgagcccgggctgggtggtgccgcctgctgaagcgcctggctcccggtccccggcacggccctgcgccccaccccggacatgctcagggctgcggccgcccgaagaggagagagcgcgggcctctaggaaggtaagggagtcgagcgaggggcgccgccaccccggggtggggggatcggctccgtctgcgggctccgcggccagcggaccccaagcctgacccgggcctggcccgacacctccggcgcagcccgcactcattgcgcgtcccgtgccccatccgcatccccagcgctctcgtgctcccagtttccgccctagcccctgcagtgtggcccggtatgagccgctccctcgaagccggcgccacgccaggccctgggccgccggacgcgggggccgtagcctccgggaagccgcgcctggccggggcccgggggcctcggccccccctccccctgccaaggttgcgcaacggctcttcccagcaaccgaagttttgtttagtcccacggggagcctctcttccccctccgcagtcctaggccgtaactacggagatccctttcctttcattaaggggaacaaacaaacgcgcaggcacgcagcttgagcaccccagccgatggccgcgtcccgggctttgtggccccgtccccagcgtcgcggagcagcgggtttgcagggtgtcaactctggggacgtgcgtgcgtgtgtgtgattgttggggaggagaaatgtgatccgcggctccgcgtccccagcggcggcgggaggaaggcgtggcggccgcgcggcggggctgttgccggcttctctcgttacggtggctgccgcccgcttcccttcgccgcactgggagaactg

SEQ ID NO: 556 - DNA, 6000 bp, Homo sapiens
aaaatttattttttcactttacaaatatttgagttccctttacatgcaaggccctgttctaggctctggggatcaaagcatcaagaaaacagacaaaaattcttgccctgtgaaagcttaccttgagggacaagggaacagaaaatatatatcatagtatctaagatgatggcaagccctaaagagaaagataaagacagggaatgtaaatataggtggtcatcgctgaagaggaggcttcaccatgaaggcaatatttgagtaaggacaggaaagaaaggtggatggctatacttgaggaatgtttcaggcagaaggtgatccaggcacctacggagctccagagagtggctggagtaaggagacaaaaagttgattgagttccttgtgggctagttctgtgaaggattttatttgtttatttacttacttacttactcagagacagggtcttactctgtcgcccaggctggagtgcagtggtgtgatcacaactcactgcagcctcagggcccatctcagcctcccgagtagctgggactacaggcgtgcaccaccaggccaggctagtttttgtattttttgtagagagagaggggtttttgaagaggctaggtcttgctcagtgatagaattacaggtgtgagccaccaagtctggcccttaagtaatttttttgaatgaaaacattaaggttttctttagtatcttcctgttttattttttagaggcaagatcttgctctgtcacttagcctggagtgcagtggcgaaatcacagctcactgcagcctggaactcatgggctcaagcaatcccccaacctcagcttcccaaagtgctgggattacagatgtgagctaccatgccctcccccagcctgcatttttgagagatcttagcactatgagaaattttccttaaaaaaaaaaaacaaccctcaaactttgtaaaatagctacattaggggctttgggagattatctagatgtttgtgttcagaatagatttgaaagccaggcgcagtggctcacacctgaaatcccagcacttttgggaggctgaggtgggcggatcacttgaggccaggagttccagaccagtctggccaacataatgaaaccgcatctccatactaaaaataaaaaaaaaatagctggctgtggtggtgcgtgtctgtaatcccagttaggtgggaggctgaggtggatggatcccttgagcccagggagttgaggctgtggtgaatggagatcacaccactgtgctccagcctgggtgacaaaattagactctgtcaggtcaggagatcaagaccatcctggctaacatggtgaaaccccatctctactacaaatacaaaaaattagctgggcgtggtggcacgggcctgtagtcccagctacttgggaggctgaggcaggagaatcgcctgaacctgggaggcggaagttgcagtcccagctacttgggaggctgaggcaggagaatcgcctgaacctgggaggcagaggagctgatatcgtgcctcaaaaaaagaaagatttgaaggggaagagattagaggtaaagaaattaggttaggagacaataggtataaagtgaaggggggctggaatatatcatttacttattttgcaacatttactaaggtcttaccacaagtcaggcactgtattaggcacttgcaatataatggttaaaaaaaaagatgaggccgggcgtggtggctcatgcctgtaatcccaacactttgggaggctgaggtggacagagcacgaggtcaagggatcgagaccatcctggccaacatggtaaaaccccgtctctgctaaaagtacaaaaattagctgggtatggtggggcatgcctgtagtctcagctattcgggaggctgaagcaggagaattgcttgaaccctggcaatagagcgagacttcatctaaaaaaaaaaaaagatgaatgaatcccctcctggaatatatagtgtagtgagtagcaacatgcaggagatagaaaggaaaataaatccttgtctctcatttccatctcttcatggatgtagcaaatacagggaatggaagccttccattagagatggcctccttaaatgtctgcaaaaattctgaaatttgaagttctagtggaatagtttctctgttcctcctgacagatttttctactattgtagctttctccgttgagtaaatgattttatcctctttgattcttttgactattgttcttaagaaaaataaaaagtaacgaaatactaagtgaaaaggaatggttcataggctatctctctgaaaggcagccattgttttgttcttctatattggaagccttttcagctggttatcctctctaacctgaaaacaactgtcattcgaaagtgttatttccagtggcctcagggcatactatcctttctcttttattttattttttgagacagagtctctccctgtcgcccaggttggagtgcagtggctcaagcgattcaagcgattctcttacctcagctctcgagtagctgggattacaggcgcccgccaccacgcccagctaatttttgcatttttagtagagaccaggtttcactatgttggccaggctggtcttgaactcctgaccacaggtgatccacccgcctcagcctcccaaagtgctgggattacatgtgcgagccaccgcgcccggcctcctttgtctcttaaaggcattatccaaaatactcatcttccggtttgaagagcagcagggattaaatgtgtattatgtatgcagcaatttgccactccctttgccctgccccagttactgcaatagaaaatttctgggaataaatacatctctggtaaattcaatcttgctagtgaagattatgaaggaaacaaagaaaggacacttccattccagaaaggtgtttgtttcccaaaaggttagacattgattcagaacaaagggaacctgaggaaacgggtataaaagaaaatcaactctgaatgtgaggtattagaaagccatttgtttcctagggaaaaggaggaaagatggggtgggagacatgggctttactgtataaccttggtcatgtcacctaaacttcttggaactcctgagtgtaagagttgggaccaaggatcgcaaagcttctttcattcctaaaattctatggttccacgattatgtaagctgaaacaggccattctgttgatttcctaatctccaggaggaaagaaactagtctttgggagttaaaccgactaatttaacggagaattaccaatgtggaggtgggcgaacttcacaattatggggttttggacagtagagatgctcttaaaatttccaagaggacccttcccccgtccttgaacctggctttacaattctcttcactctttgggataggggagcgggtagaacctagtttagattgaggtcgttcatttgagcatttcccctttacttattttgggacctttaacgaccaaatgccgagaaacagatccttaattacggttccgggatctcgaaaggcctgtaaaatcctgcttccgcatcttcatcctttcttcgggtattgggatcttttttaaaaatgtgtatttctggcggagggggcatggagtgaggttcagaacagcagagccgggctgacggatgcttctttcgcgggaggcttggcttgcgggactccgggttggggccgcacgggctggcaggcgggctccgggcaacaagggcgcggctgcggactggcgggcggaccccggggaggggcttcacggaggcgccgcggccggagcggagcggagccgcccgggctgggcgcgcagcgctgccgggcgggcggtggcgctgcggaggcggtggccgaggccgacgagcgcggaggaggggcccgaggctggggcggctggtggcagctgcctcagtgacgactgccggcatcgcggcgacctgaggagatcaagccgcaggccccgccgtcgccaccactcccgccagtcttccttctccgctcccggccggggcgtcaggaatgggccccaatcgccgtgggccccgcaccctgcgtcgcccgtaggccccagtagccggaggccgaccggcctcccactacccctcgccctagccaagccgtccccaccccaaatccccgggaaggaagatgagggagacgggcccggcgcttagcagccagagcagcagcagcagcagcagcggtcgggggagggtgtttcgccgtttcctctcagccgccaggacaagatggcagcggccgcggagaggggctgagcccgggctgggtggtgccgcctgctgaagcgcctggctcccggtccccggcacggccctgcgccccaccccggacatgctcagggctgcggccgcccgaagaggagagagcgcgggcctctaggaaggtaagggagtcgagcgaggggcgccgccaccccggggtggggggatcggctccgtctgcgggctccgcggccagcggaccccaagcctgacccgggcctggcccgacacctccggcgcagcccgcactcattgcgcgtcccgtgccccatccgcatccccagcgctctcgtgctcccagtttccgccctagcccctgcagtgtggcccggtatgagccgctccctcgaagccggcgccacgccaggccctgggccgccggacgcgggggccgtagcctccgggaagccgcgcctggccggggcccgggggcctcggccccccctccccctgccaaggttgcgcaacggctcttcccagcaaccgaagttttgtttagtcccacggggagcctctcttccccctccgcagtcctaggccgtaactacggagatccctttcctttcattaaggggaacaaacaaacgcgcaggcacgcagcttgagcaccccagccgatggccgcgtcccgggctttgtggccccgtccccagcgtcgcggagcagcgggtttgcagggtgtcaactctggggacgtgcgtgcgtgtgtgtgattgttggggaggagaaatgtgatccgcggctccgcgtccccagcggcggcgggaggaaggcgtggcggccgcgcggcggggctgttgccggcttctctcgttacggtggctgccgcccgcttcccttcgccgcactgggagaactggcggaaagactttggatgaaaatgtctgtttctctgtcgggagggagacggctgttgtaaaatggtatgtggctctcggggaatcctgttgttcccgtctcatctctgcttgaggaattgcgctgaagagtgtgtgcgtaaattaccttggacttgttacagagtagtcgtaacacgttcaggccttgaaccgtgttttcacaacctcttactgccctgttagggaatttgtttttccacctgtcagttggctgcttctaattataataaggggcttctattagcaacagcaaaaaatttcagtttatcgtccagtttagagggaaagcgcatggttggctctattgtaaactttgttttgatgtctgtctggtacagggccggaaaagttagctggcaaaccagtctgcgtgtgcttttgcgtactttctagtagtttggagatctgctgacactttttccctttttgctattttaggtatttgcttttagctgtagcttctgaagtgggagtacttatattcattcaaaccatctcagttaatttcaaagttttagttgctgggctctttaaaatttttaaagaggtttcctttctgatcaaatttttgatgaaaagtcttgagccgtaacggtggttactgcttacccaactaagacattttaatcctatattatttaatttttcagaagctggtgaagtctcaccatatgtttgataagtctagattctgcttatgtttgcaagtgcagtgctaattttatacaatgagcaatgataaggtttagataggtcatgattaaacttagtattttaagtaaacaaaa

SEQ ID NO: 557 - DNA, 6000 bp, Homo sapiens
ctttgggaggccaagtcaggaggaggattgcttgaacccaggagttcgagaccagcctgggcaatatggcaagaccccatctctacaaaatttaaaaattagctgggcatggtggcacatatctgtggtctcagctacttgggaggctgaggtgggaggatcgtttgagctcaggaggtcgaagctgcagcaagccatgtttgtgccattgcactttagtctgggcaacaaagactgtctcaaaaaaaaagaaaaaaaattgggccgggtgccatggctcatgcctgtaatctcagcactttgggaggccaaggtgggtggattacttgaggccaggagttcgagaccagcttggccaacatgacaaaaccctgtctctactaaaaatacaaaacattagctgggtgtggtggcaggtgcctgtaatcccagccactcgggaagctgaggcaggagaattacttgaacttggaaggtggagattgcagtgagctgaaatcacgccactgcactccagcctgggcaatagagcgagactgtatcaaaaaaaaaaaattatctgtgaatttaatcatctctttttctgagtctatgggtatgggttacagaagtggtttgtaaattaggagaatcatggcaatgttaaattatcgagtagggtgtagtggttcgaacctatagtctatttgagattacttgggaggctgaggtatgaggatcatttgagaacaggaattcaagaccagcgtgggcaatacagtgagacctagtctcttagaaaaactattgcagataagattggaagcctcacaaaagtgccttaatggatgagtttgatacatatagccggagttttcagtgtgttttttcttcattaaaagaacaatcagttgatggagtttcaaaatcttttctgagtaaaggtatggaatagatgtcagtagatgccaatgagatgtttggaactccagaatttcttttttttttttttgagacggagtctccctctgccgcccaggaaggagtgcagtggcgcgatctctgctcactgcaacctctacctcccgggttcacgccattctcctgcctcagcctcccgagtagctgggactataagcacttgccaccactcccggctaattttttgtatttttagtggagacggggtttcaccgtgttagccaggatggtctggatctcctgacctcgtgatccgcccacctcggcctgccaaagtgctgggattacaggcgtgacccaccgcgcccagcggaactccggaatttcaatttataattttctcttacagagtgaacatcaagtcttaatttgtctagtaaggttttgtagcagatttattaaggtcaagtcaacttaggaatgtggtagactgtgcacaagaaaacttgtaggaagctataggaggtataaatttgcaccttttatctgaaaggtggtacgtttacttgttccttgtaccataccttagctattgactatgggccagttacctagtcttggtaaacttcagttttctttttttttttttcttttggagacggagcctcgctctgttgcccaggctgaagtacagtggcgcgatctcggctcactgcaacctctgcctcctgggttcaagcgattcttgtgcctcagcctctccagtggctaggattataggtgtgcaccaccacacctggctgatttttgtatttttagtagagaaggggtttcaccatgttggccaggctggtctcgagttcctgacctcaagtgatctgcccgcctcggcctcccaaagtgctgggaatacaggcatgagccaccgtgcctggccaactttagttttcttaaaagcaaattggaaagatattgctatgattagataaaatattgtaaataaagtgttaaactgttgcatagtaagtgctcagtaggtagttgctctcatttttaatatcgatattacagattgatggtaatctgtggattctgagttaaagaactgatgtttgtgatttgttataagagtaggagaccacatagttaatataatacagatttttaaattgtagaaaatgaagatatttcaaccaaccaacaagccaacatttattgaacaccaactctatatccttggcactttgctttagatctagtgtgaaagacagatatatacactgacaattacaatataatgaaatgttgtaatcgcaaaatgagaagaatttaggaactactgtgagagcactgaatgctaacccctgcctagagggtgagtttatatgtttcaggaaaggcttcagcaagaagatattattttactttgattgaaatctgaaagagtttttaaagtgttcaatagtagatgtgagtctgggtgcagtggctcatgcctataatcccagcattttgggagcctgagatgagaggatcactcaggccaggagttggaggctgcagtgagctatgattgtgccactgcactgcagactaggcgagaccttgttaaaagaagaaagggtagatgtgcagaaaaacattaagagaacataatgcaaagttcctgtatctggcttctcagcttatttttacacttgatcatttgtattaggattttaccattagggaaattccaagataattttgtgcaagtagaaaacatggagtattacttaaagtgatgattctgtcaaatggtggttttgacgtacacgtttatatattgttgtggcagaccaagtagatggaaggcagatctaacacctgtgtaattatcagtttttctagctatggtactgaggattcattcttatgtgtgtatatgttttgagttcctatagataggtcagcagttgctaggttgatttcatattttataaattctaatttggtaaaataaggtcataggggagaatattaaatatgccagaataaaactggatcctctttcatatctatgttatatctgaatcaaataatgtttataaaatcattatacatttaatggttgtgtggtaagaatgttggctatttcagcctcaataaactcacatcctttttggatgcaggcataaaataaatagaatgtcatttagtccttgagaaccttagaatgattttaaatctgtttttcaaatatgatttgaaatttgatttgaaaatatgatttgaaaatttcaaatattttccaatatatttggaggaagtttaaaggaatatccatataataaagtacacattgagaagaatgggaacatgaatataactgggtagaaagtcattaacttgtctttgtaatataatgctttttaagatcaaaggataatatttttagtaaatagaatgtagcatcagctattcatgaaattggcaccctaattttatttaaaatccctgccataggtggggcatagcgaaactctgtctcaaaaaaaaaaaatatatatatatatatatagttaaagcagacatagattttttttcctcctgaggcaattcttgggctttaggtttaagaaatatggctataaactatgtttatataatgtatattttcttttcttgtcattggttcatacatttgaatttggtaatagaatgttttacttttgtcaaatgtgtacagttaaaggatctgtactttttttttgagacagagtcttgctctgtctcacaggctgaagtgcagtggtgcaatctcggctcactgcaacctccacctcccaggttcaagcgattctcctccctcagcctcccgagtagctgggaccacaggcatgcaccaccatccccagctaatttttgcattattagtagagttgggatttcttcaccgtgttggccaggctggtcttggactcctgacctcaagtgatccaactgcctcagcctctcaaagtgctaggattacagggatctatacttttcttttgagggaaaatgttggcaccgtttctagggcatattggccatttcagcttctcagtaaatatttgttaagtaattaaatgcacttgattctttattcttagccttttaacgcaatactcagaatagctgaagcaccaattaactgaaatggagatattataaagatagttatcttctccaagggaaaaaatcatcttcatggaaattaattacttttttacaaattgtgaatttgacccttaagagttttcttcctgatatttaaaattgaaaaaaaaattgttgacattaatatttcttctttccttttttttcttttcctttttttttttttttttgcaggtatggcctcacaagtcttggtctacccaccatatgtttatcaaactcagtcaagtgccttttgtagtgtgaagaaactcaaagtagagccaagcagttgtgtattccaggaaagaaactatccacggacctatgtgaatggtagaaactttggaaattctcatcctcccactaagggtagtgcttttcagacaaagataccatttaatagacctcgaggacacaacttttcattgcagacaagtgctgttgttttgaaaaacactgcaggtgctacaaaggtcatagcagctcaggcacagcaagctcacgtgcaggcacctcagattggggcgtggcgaaacagattgcatttcctagaaggcccccagcgatgtggattgaagcgcaagagtgaggagttggataatcatagcagcgcaatgcagattgtcgatgaattgtccatacttcctgcaatgttgcaaaccaacatgggaaatccagtgacagttgtgacagctaccacaggatcaaaacagaattgtaccactggagaaggtgactatcagttagtacagcatgaagtcttatgctccatgaaaaatacttacgaagtccttgattttcttggtcgaggcacgtttggccaggtagttaaatgctggaaaagagggacaaatgaaattgtagcaatcaaaattttgaagaatcatccttcttatgcccgtcaaggtcaaatagaagtgagcatattagcaaggctcagtactgaaaatgctgatgaatataactttgtacgagcttatgaatgctttcagcaccgtaaccatacttgtttagtctttgagatgctggaacaaaacttgtatgactttctgaaacaaaataaatttagtcccctgccactaaaagtgattcggcccattcttcaacaagtggccactgcactgaaaaaattgaaaagtcttggtttaattcatgctgatctcaagccagagaatattatgttggtggatcctgttcggcagccttacagggttaaagtaatagactttgggtcggccagtcatgtatcaaagactgtttgttcaacatatctacaatctcggtactacaggtaggtaacaactccatactttttggttgtttattaatgtgaaatttctgctaaatgaaatacttttgtgtgtgtttgtggtagaagagaccacttcagttaaataaggaaatcaagagaggatcaatttaggttcgttttaaagagattaaaaaaaatcaagacataaaatctacccaagcaggatagaaatctccactgcaaagttccatgccaaagacatctggttatttttatttttaatggaagacttgaaggaatgataggtgattaataatgatcaaacagaagtctttaaatgttggaaagtatttacattaatctttgtatatatcattgggcattttagcacttgagagaaatagtttattaaagatataatcaatcatatgtaactgaacatttagaaaaattatatacaggtttgagtagcccttatctgaaacttttggggccagaagtgttttggattccagatttttccggattttggaatatttgcactgccaactagttaagcacccccaaatttgaaaattcgtttcctttgagtgtcatgtcaatgcccaaaaagtttcagatatttggatttgagatgctcaacctgtataaggattcagaaagtt

SEQ ID NO: 558 - DNA, 6000 bp, Homo sapiens
tactttcataaaaggttagcgtatctacattcttattcttgcttctggcacaagaaagattctgactctcaggtgtttttgtccagatcgcatgtaccaggttgcgtttcttctctgaacacacagtctccccaggttgtgtcacctccttaaaacagctgggcacagacaccttctggaaagttttgtgtcccctcaggagtatgcccactctgatctgaagcctgctgctttagttccttctccctgcctcaaccacactgactttaaggctctggattataaatgtagcttatttcagctttagggcctttgcaataggtgttccctctgcatggaccactctgctgaaagatctttgcatgcagaaaccatcactcaggtatttagtttaaatctctccttcacagatgagtggtgagtgagggaatgaagctgcatctgtatttacagccactccccatcctcacattactgcctgagctccaccttctgccacatcagctgtggcattagattctcacaagagcacaaaccctttcgtgaactgcacatgtgagggatctaggttgcacactccttatgagaatttaatgcctgatgatctgccactgtctctcatcacccccagatgggactgtctagttgcagcaaaacaagctcagaaatcccactgattctacattatggtgagttgtataattatttcattatatagtgcaatgtaatgataatagaaataaagtgcgcaataaatgtaatgcacttgaatcaacccaaaaccatccctctgccccactctgctctgtagaaaaactgtcttccaaaaatccactccctggttccaaaatgtttggggactgctgcactgctgtatctcctgggctaagaacagtgcctaacacattctattaattatctattgctgtgtaccaaattacccaaactttagagcttaagacaacatttattatatcacagtttttgtaggttccagcttagggtctcttgtgagattgcagtcaagatgtcatctgatggcttgactggggctggaagatccacttccaggatgactcactcacaaggctttggcagaaagcctcagcaatcgtctggctattggcaagagggctcagttgctcagcagcctttctaaagggctacttgggtgtcctcaggacagggcagggcttttccctcatagcaaataagagagagcaagacagaagctacaatgtcttctatagcccagtctagggaggcacattccgtcatttccacaatatcctgtttgatatggtttggctctgtccccacccaaatctcatcttgaattgtagctcccctaatttccacgtgttgtgggagggacccagtgggagataactgaatcacaggggcagtttcccccatactgttcttgtagtagtgaataagtctcacaagatctgatggttttataaagggaaacccccttcacttagatctcattctctctcttgtctgctgccatgtaagacatgccttttgccttccaccatgattgtgaggcttccccagtcatgtggaactgtgagtccattaaacctcttttactttataaactacccagtctcaggtatgtctttatcagctgtgtgagaacagactaatatactgttacatgaggcagccctatgtattgtggaagcaaactacacgtgggcataaataccatcttcaaggcaggctgccacacacacttataatggttgttcaataagtgtattttgagctaatgaattgtgtcataattttataattcaacttgtagagagccatcttatttccaaatgtttggggaagttttaccttcccaactctaccttcagctgtgtaaaactatttcctatttcatttttcaaataggatgtgagaaacagcaacccaggaatgatattgtcttagttcaatctgtgctgctataacagcataacactgactgggtaatttataatgaacagaaatttactggcttagttctggaggctgggaagtccaaactcaaggggctggtatcttgcaagagccttcttgctgtgtcatcctatgttggagggcaaagtgaaggcaagagagaaagagatggagagaaagacggggctgaaccaaacttgtccctttataaggaacctactcccagaataacgaattcactcgcatgataatggcattgatccattcatgaagagtgtccttccacgacccaaatgcctctcattaggtcccacctcccaaaaccaccacattggggatcaagtttccaacgcatgaaatttaggggacgcattgaaactatagaagatatggagactatatctttattcatgtttgatttacttataaggacaactggacaaaatattttaaattattaggttggtacaaaagtaattggcattttttccattaaaagtaaaggcaaagaccacaattatttttgcaccaatctaatagcagcttttcaggaaacctgatcattgtggttgctatatataggtaactttactaataggaatattcaattatttccatctgcgtaggacttcctagtttgcaaggtatctttccatatgacctcatttgaactcataacagctctgaaaagaagacaggatagatttcattacaactctatagataaggacatctgaccaggtcccaatttcaatgagagtcagaagcaggagtagaactttggctttcttatttcgagtatcaggaaagaattcaagaaagaactgtgcataaagtaggcttagctatgcagcagaaaagacaatcccaatatctcaatggcttaaaataacaggcgtttgtttcctgctctcgtaagtccaatgcaggtggattgactttccaaggcaactgcccttcatacatcaactgagtgatacatctcttccctcttgtagttgccctttgctccttggttgcacacaggggaaacagtcttgcaatgaaaataaaacgctttgacctaggaatgatatgcatccttctcgtcatagctcacaggccagaactagtcacgtggccctgcctgattgcaaagggaaatggtatttgtaagtttcctgtgtgcccaaggcatggatgagcactaaaactctctcctatattgaataaattggatttgaaggagtaggaaaaggccccttgagggcacttatgaaaacaatgtaaagaaacatacacagaacacctaatctttttgaaagcctggtgctggagtctctcacaatagatttttattattttatactgacaaaagcctggtaaggtagacattatccccttttttatagtttttggtcattgtagttcatggaggttatgtaacctgccccagagctcacactaagaagtggagggaactctgattctcttgctcttccttttctccagctctcaatttcatataatgatcttttcttccatcccataagagatttaatttttaagaggagcttctagggagggatacacaaaggctggcaatgttttattttttaaagctgggtggtgagcacacagatgtttgtgctctttttatgtcttaagtgtttcaaaatacaatcttttaaaagggggttgacagaacctgagaaccagtgataaattcttcttaaaaagagaagcatttttaatgaatattggcagccagaaagtaggacatatagtattggtaacatttattgagcccatactatgtcctagttttgggtttatttgtttgttcgtttgttccttgagacagggtctcactctgtcacccaggctggaatgcagtggtgcaatcatggcttactgtagccttgactgccagggctcaagccatcctcccacctcagcctccagagtagccgagactacagatatgcaccaccacacccaggtaatttttaaattttgtgtaaagatggggtctcactatgttgcccaggctggtctcaaattcctggcctcaagtgatcctcctgccttagcctcccaaagtactgggattataggcatgagcctatttgtgcctggccagatagttttaaataatttctttacatattttatctcatccttccaacaaccctgtgaggtagatactattattatccccatgttaatacgagatgagaaaactgaaacaagtacagattaagtattttacctgaatcacacatttattgtaggaaaaaccggattggaaccaagcattctggcttcaggatacatacgcatgactactatcctggaaaacctcccctaagaggtggacgatgaaccaaatatgcagaggtggatgaaactcttttgtgcttctccagcaaaacgcgtggtacattctctagacgtttatgaccagttaaacagggaatttaaaatagttttcccatgacagagaaagacaaagcgctggtgttcttggcaggaaattcaaagaaatatttaaggcaagggctgactcccttggaccggatgaaggggaagagcaggtaataatagagggttctatggatcgcagaaacttcctgggcaaggagggtggagctggggaggggtttaagaattcctgaaggtcaagcgatctagcccagctggggttttctcctgcttggagaggggtgctataaaagcgcagtttgggattactactgtcgccactgctcaccaaattaagttattccgggagggatcttctcgtcgccatcctcattccaacacacacccattgacacactcgggttcggctgtgcggtgcaacgaattcccaggtgggacacccgagcaggaagaaagccaggctgcggggctgggggcgccgcccggcccgcgccacagtccgcctggaggatcaccgccagggggcactctctccgaactcggccgctctgtctcctccccggcgcgctccctgcccctcgctccccgcagccagcagagaaggcggaagcagtggcgtccgcagctggggcttggcctgcgggcggccagcgaaggtggcgaaggctcccactggatccagagtttgccgtccaagcagcctcgtctcggcgcgcagtgtctgtgtccgtcctctaccagcgccttggctgagcggagtcgtgcggttggtgggggagccctgccctcctggttcggcctccccgcgcactagaacggtgagtctccttcaggcgcctcctcctggcggccgccgcctcgcttcccagcggtcagggacgccgccccccgccccttcgctctcggcaggtcggggacgcagtccctgtcccctcgcttcccaccagtcggggacgcctcccctgtcccttcgcttttcacaggtcagggacgccgcccctacccgcttgcttcccacgggtcggggacgccgcccctgtcctctcgcttcccgctggtcgaggacaccgttccctgcccctcgcttcctgcaggtcgggacgcagcctctgtccccacgcttcccacaggtcggggacaccgttccctgtcccctgacctctgctccccaggcctcctcttcctcgctcattccaccccctaaaaaaccccgcgtcgccttactcaacctcgctcccctcaactccgctttttccccttcccagataaggaaattgcctcctgcagttgtccgctccttggagcaaacacctgcttaaatttttaaaaaatcctttacgttcctggcgactccggctgtcactgtcatgggaaagctatttttggattccctgttgaactctatagaagtctcaggcagcgagtttaaaaaaaaaaaaaggctcagatgacacgaatgttttctcccccgcccctaaactcggtagttcgagcgattgttccagacgccgggttgataaagctgttcctagtatttggcttaaggggaactccagctgagttaggactgtcttgaatgtgaacagaaagcacctaaataaagtattagcagcttcg

SEQ ID NO: 559 - DNA, 6000 bp, Homo sapiens
atgggttttggaattaggctgccaggactcaaaactcatctcagttaaggaacatgggaccagttagttcacgtctctgtgtctgtttcctcatttgtaaagtggaaatgataatattatctcctggctcatagagtttttgagaattgattcacatgaagtgctcagaactctgccatcacttaatatacgctggttattattgggatgactcccaatatcattaccatcagcatcgtcatcgattttgtcatcattatgatcattaggaccaattgtaggcctttagcttaaatgaccagctagaaatacataaaaataggaaacgatttaaagcaaaccccaggactcttagagaagaaaaaggagaccaagaagtgttcacaagcctgactaacgtggctaagtaatagactgcatcaggaagagtagtgttgaatgaaaccgcgtggcaacttagacaagcatgagtttttttccatttgtttggttgttattgggttttttggttgttttgttttctttcattttgttttgttttgagacagagtctcaccctgttgcccagactggagtgcagtggcactatctcagctcactgcaacctccacctcccaggttcaagcgattctcctgcagctgggactacaggcgcctgccaccatgcccggctaatttttgtatttttagtagagacggagtttcaccatgttgaccaggctggtttcaaactcctgacctcaagtgatcctcccacctcggcctcccaaagtgttgggattacaggcgtgagccacagtgcatggccctcaagggtcagttttaaaggagtttgtatgaatagctatattttagaatatagaaacactagttgagtctttttcctcttcttaaatttgttttcaaaaatggatacataaaatatattatgtatatatatatatatattggcatacttattgtaatgaattaaaacattaagccaaagcaaaggtcccccgagcaaacgcagctttatttcctgccccggattgctttttctacgtttaaacatatatgtatcacacatcaaatacctaacttgaaggatgtgatcaaaacacagttttattggctgggcacagtggctcacgcctgtaatcctagcactttgggaggccgaggcaggcagaccacttgagctcgggagtttgagaccagcctgggcaacatggtgaaaccctgtctctactaaaaagacaaaaattagccaggtgtggtggtgtgtgtctatagtctcagctacttgggaggctgaggtgggaggatggtttgaactcaggaggttgaggctgaagtgagctgagatcacaccactgcattcccgcctgggcaatagagccagaccatgtctaaaaaatatatatattaagctataatatatataaaaatatataagataataaaagtatatatgtagctatatatgtctatatatataaatatacatgtgtatatatatagctttcttactgtcttccaccacgtctttaaaatttattcaggtggtgtcttagtccatttatgctactacaacaaaataccttagaatgggtaatctataaacaacagaaacctattgcctcagttctggaaactgggaagtccaagatcaaggcaccagcaggatcttgctctctcaagcctcttgtataagggcactaatctcattggtgggagcagagccttcaggacataatcatctctcaaaggccccaccttttaatagtatcttgcggggtaggtttcaatacatgaatctgggaagacccactcattcagaccatagcaggcagggtcatctcattccagccctagagagaaattctggcagacccaggccttttctgcttcagaaattaaaacgtccattccaacatgtgaatccaaacttaatttccaatcagatcttcttctattctccagctgaggccgctccctatcttgcctttcttctctgtatcctccactcagtttggtgggcagcttctgacccctcctgcgcaaatgcattgagaggggaacatgagaagaaaggaagaggagaacctcggaaaggtctggacagtgcaataccacaggctctctctggtctgatagagaccaggtctgtcctgtgggccactccaaggggcctttagaggccactcccaacggtgactcccgtgaggtgttgatgtgctgctcgcagtcaccactctctgcgccattgactctcgccatgggggctttcttactctcaggcagaaggactcaaaatgaatccagaatctctttctcttttatatggctcatctctgctataagggaatcactcccatcccctcgctccagcaaaatctgggaacacggtagatcccaacatggccacctccactctgcagtcacgggtaacctgagcttatcaggcgtgtccagtcctttgtgtttctcaaccacctgggaccatatttcaggctcctcaaaatggccccacgcttgagggaagggggtagaaattgccctcaacctactcacaagacatctttctcaaaaacataaaaataaaaaaatcaccaattctcattttattctctaattctttttctttttctccacaagagtccaaattgcaattttttttttttttttttttttgagacagagtcttgctctgtcacccagactggagtgcagtggcacaatctcggctcactacaagctccacctcccgggttcacgccattctcctgcctcagcctcccaagtagctgggactacaggcgcccaccaccacacccagctaattttttgtatttttagtagagacagggtttcaccgtgttagccaggatggtcttgatctcctgacctcgtgatccgcccgcctcagcctcccaaagtgctgggattacaggcgtgagccaccgcgcctggcctgcaattttttttaacattgaattttacacttgatttcttattttcagacaggggtcgtgctgtgttgcccaggctggacttgaactcctgggcccaagtggttctccccgcttagcttcccaaatagctgggactgttggctatcacgctcagctctaatcctttttaggatgtgagatttatcctcaatctaactgagaagtacaagagccggggagttcttttgtaatcatttcccgtgtatgttctgtacaagtggatgtggctttgaaatttacagtctattatagtttgatatttcaatcctgaaatgttaacatcctttaacatccttttacacatacacacataactttgttttgtatgctttgtatgttttacataatgggatcatcttatacctgccttttaacttttctttttctttttctttttctttttcttttaatttttttgagatagagttttgctctgtggcccaggctggattgcagtggcatgatctgggctcactgcaacctctgcctcctatgtgcatataattcttctgcctcagcctctcatgcagctgggactacaggtgcatgccaccacgcctggctaatttttgtatttttagtagagacagggtttcaccatgttgaccaggctgatcttgaactcctgacctcaagtgatccacccaactcagccttccaaagtgctgagattacaggcgttagccaccgcacacggctatatatatatataatattattatataaatataattatcttaatatataaatatatattattatcttaatatatataatatatattattatcttaatatatataatatattattatcttaatatatattattatcttaatatataattatataataatatacaatatataatatatattatatatataattgtatatataatataatatataatatatattataatattaatatcataatattatatatgatatataaatataataatatattaatatatattaagataataatattaatatattaattatataattaatatattatatataatataagataattataatatataattgataatattgatatattaattaatattatatctcaatatatagatatattataattatattatataattaatgtattaattaatattattatcttaatatatattaatataatattattatatttatattatatattatatatttatatattaatataatattattatatttatattatatattatatatttatatattaatatataatgttatatattatataatatataatattatatattaatatataatattatatattatataatatataaaattattatatattaatatataatgttatatattatataatatataaaatattatatattatatcatattatatatataatttcatttaaacttgtatcttagaaattcttatcagtaagcgtacgtgatttcatttatttattattcttttggatactggacataatcaggtggccccaattctttacactggcagcaaagataagcaaattcttccagcaggccaaatttgaccccgcacttgatgagcgtggtggacacagagggttttttaatagcataggaatgttttttgcttcccaccggacccactagcctctagtgccaccgattaatattaccttccttgaatcaggaggaaaccatttgtgacttctcatatgtaagatcttctaagggcagaaacgcaattgtctttgtattcacttccccgcccacccacaccccttccatggagagcctgcagccaagctcaagctttcaaaaaggcgtgagctaattcaatcatccttgccgcttttttgctcctccaggctgtagagggcgacaaaaaccgcggaggcgcattggggtggggggtgtctactgaaggccgctcccgacgtgcgcgtctttacgtagacgtcgggggcgcagccgcgctgtgcgcggtgactggcggctgcactggcggcagctggaggtgtaatagtgcgggtagtgggtttggagaagttccgaggcggcggtggcgccggtcaggacaaggatagcggaaccgggccctgggcttgtcgctcaccatgccgacagtagaggagctttaccgcaattatggcatcctggccgatgccacggagcaagtgggccaggtgagttgagtccccgggcggcctgcagggcctggcgctccgcggcctttcgaaagcgcttcccgccgcactccccgggccgagcgggggctgcggcttcatcctcccggggcctcctagcctcctcaggccgtctcgtcggggtgggcctctctgggagtgtagactctggtttcaccagggagaccgcggtccccagggttccaggcttccttgcctcccttgcccagccttttctcaccgtggcgtaacctaactcagcccgttcaggctcacgttaattcttctcacggagcttttctctacaggattctcttaagcctttctccttttcggtggagctcagtgcttccaagattagatcgggagttttcttcatgaggtcaagatgtgttttttttgggggggaggcaaaattctgctactaattgaagaagagtgtttaggagacagaagtttgtgagaaacagaagagggactctttggtccagactttgatgagagctcacggtttcatttattcagtgcatttttttgagtgccgagcgctggagatacagatggaaaggtccgcgctctcccagaatgtacagttaggagggagtgtagtaagaaagataggcattgtgaggcccggcttggtggctcacgcctgtaatccgagcactttgggaggccgaggcgggcggatcacgaggtcaggagttcgagaccagcctgacccacatggtgaaaccctgtctctactaaaaatacaaaaattagccgggcgtggtgacacgcgcttgtaatcctagctactcaggaggctgaggtggga

SEQ ID NO: 560 - DNA, 6000 bp, Homo sapiens
tgatttaatgtgtctaacagtaccattcttaaaatcaaaagttatctcagatactgggagaatggctttaatgaaagtaatcaatagctatggcaatacaagaattgtactcctttttattggacaagtcaatttgattttacatgaagattctattgtgtaaaactcattgcctgctcaatagtgagaatcaggtgatataatgcatgtggaaaaagaatgtgaaaaatctaacactttagattgtatacagtgttttttaaaaagacacaaaaaaactgtcaacatgagaaacataagcaaagttttactcaagacaaacatccacgagtcacaacttcagttattcccagtcttcaaaataacagaagggcaaagcaaagtaaacatgcaaaagcaaactaaaatctgattcttcttattagaaagaagagtgaatttctgcaattattttacatttgagaatttaatgtgatcaggtcataggtattctcacaacaaaatttgaagcatttgcttgactttatttcacctgttgaaacaaaagcagttctcagtatccaagtttattgctttactaaccaatgtctctgttttttgctttacaaacatggtattggttctcacaaattagttcaacttcccggtgcattcataaacatatacccacgtttagttttccttccagtgcacaaagtttccccagtaacctaaaagtactaaatgttctacattttgtgacttgtgttctttactttttggaatataaaaataatccttaaagtttaatttaaactgggagcagtgaattaaaaaaaaaatgtaagcttgaaactattgaaaagatcatgaaaatgcagagtattttttaggatgaagctcttcaaaaagaagaaaatttggtgaatctctgtactatagaaatggctgtatcaattggaggtaaaaaaaaaaaaaaaaaaaaagcatttgccaatatagaaaagataactacgtcaaatagtaccttcatacagtgtatttaatttcctcattaggtacagctgaatagagtgtaacctgaattcatattaaaattgaaagagtggattgtaatagtcttttagcttaaagctaataatagtatctatgacagtgttaagtgtgttggtgtgaataatgagtatgatagggtgaaatgtgcaggcatctgcatagatggctctaagtctaaacagtcaaaaatgcagaagtcatggcccacaaaaggctactgcactaccttaatgctcccatagttactgcatctgtctctgggagcatcttgccctcagagaaaccacctctgattttctgaatgtgttcactaggataataaacacaatgatttcattttcaaatggtttgcatactaatcagcttgtaaaaaaatgtgtcatggcataagaaggtgactttgaatcagacccattctattatacagataaatattagccaaactggggaaaggtccagtgagtttcctgtctcagaattgaattacttttctttctgcagaaaggggggtcaaaaaagacatcaagacatcaccctagtaagacataatggcaaaaaaattgattgcaaaattgactgaaaaggtatttttcaagcctccaagattgtggatcaaaaacagcaaaaccaagctctctctattgttgctaacaagattgctataatgaggaagtttagaagttaatgaagagatttgatctcatttacatatgattaaaagtccagccttgtgataacttcgatcagttttcttcatgggacgacacctttgaggaccatttctctgtggctataaaagtgactgaccaatggatgagagactcttgttctgtacatcacaagtgacttgatttttcagcaaaagatatgcttagtttatatcagtagctgaaacacactcagacgcacatacacacatagcacctatttggcagtattctgagaagcttatgtagctgataaagcagtgaaaaaaactcagcctttagatctacatttgtgtgagtccagttgcgtgaaatactgtgatcaaaacaaaaattgcatatttattgcattcaaagggacattttgtagtctaacctgattttcgaaattgattattgataatttaagatatttttcatagttatatgagttacctttagtaatgatagacaataaataaagaactaagaagttgtcatgaaagtcatagccagagcaggtagataagagaaagaaataaagggcatccaaactagaatggagaagtcaaattgttctctatgcagatgacatgatgttatatatataaaaacaaaactaaagactctaccaaaaaactcatagaactgataaatttagaaaagttagaagatacaaaattagtatacaaaaatcagtagcatttctatgcatgaacagtgaactagctgaaaaagaaatcaaggtaaccccatttataatagctgtgaaaaaaatctaggaataaattaaccaagaaggtaaaatatttctatacaaggaaaactacaaaacactgatgaaagaaattgaaggagatacaaacaaattgaaagacactccgtactcatggattagaggaattaatatattttaaatgaccatgctacccaaagtgatctccagattcaatacaacttctatcaaaataactgacattcttcacagaaattgccaccaaaaaaaattcttaaaatttatatggaaccacaagaccccaaatagccaaagcaatactgagcaaaaagaacaaagctggagttatcacactaccagatctcaaaatataaatcaaaaatgtagtaaccaaaacagcctgatactggcataaaaatagatacagagcaatggaacagaacagagaaccagaaattaatccacgtatctacagccaactgattttttacaaaggtggcaagaatactcattggagggacaaaaaaaaaagggacagtctcttcaataaatggtgctgagaaaactgggtatccatatgcagaagaatgaaactagatccgcacctcccaccctgtacaaaaaccaactcaaaatggatgaaagacctaaatgtaagacctaaaacaataaaactaccataagagaaaacaagaagcacttcaggacattggtctgggaaaagattttatgactgagacctaaaagcacaggcaacaaaaacatgggatcatatcaaattaaaaagcttctgtgcagcagaggaaaccatcaacagtgaaaagacagcttacagaatgggagaaaatatttgtaaactactcatgcaacagaggattaatattcagaatatagaagatattcaaacatcttaatagcaaaacaaatctagattaaaaatgggcaaatcatctgaacagacatttctcaaaagaagacgtacaaatggccaataaatgtatgaaaaaattctaaacactaagcatcagggtaatgcacatcaaaaccacaatgagtaagttggaagttcagggaagagattttatctcatttacatatgattaaaagtcagacattggcacccccatgtttattgtagcactattcattagccaagacatggaatcaacccagaatcaacaggtgcatcaacaggtgaatggctaaacaagatgtggtattatacacaatgggatactattcagccataaaaaaagaatgtcctttcatttgcagcaacatggaaggaactggaggactttatagtaggtgaaataagccagcaatggaaaattaaacaatgcatgttctcactcatgtggaagttttaaaaagttaatcttatagaagtaaaaattaggacagcgcatactagaggctgagaagatagggggaaggaagggatagggagagatttgtgggaggatgcaaaataacataggaataagccctagtgttgtgtaccactatagcatgactatagttaatatatactttaaaatagaagaatattgaatgttcccaacacaaagaaattataggtgtttgagatgatggatatgcttgttaccctgagctgataactgtacattctttgtatcaaagtattctaccccacgaatatgtagaattattattcgtgaatttgaagaattaagttttttaaaaagtgtacgggctgggcacagtggctcacacctgtagtcccagcactgaggcaggacgatcccttgaggcctgcagtttgagatcagcctggcaacaaaatgaggacctgtctctacaaaaaaaaaaaatagccaaacatggtggtgtgcatctgtagccctagctactggggagtctgaggcagaaagatcactctagtccagaagttcaatgttatggtgaactgtgaacgcaccactgcactccagcctgagcaacacagcaagaccctccaaaaaaagtgtagttatcgtaacatcaccttgaaacaactttgttactgggatacatttaattaagcaactaccatgaatgtagtcggtaccttgccttacgtgcttcagtatatatgttgttcttgttttatgtacaggctaaatttgtagattgaatagcagaatattagttctgttcttatagggcctactgctgtattcagagttatgagctacgtttcttctgcgtttgctgcaccatgaaatcctaagcaagacctaaacccttgttcgctttttcgtagagcagagaggagccttcaggggaagtagaggtggccgaggttggggcacacgaggaaatcgtagtcggggaagactctactgaataagacatcagcattcttcagcattgtcatgagcttaatatacttaaattctactactcattggattgccggggatgtccctttaaacagactgctgccttcagctaaaaacttaatgttctttatacctttgtatgtatgacctacttttgtaacagaccatggttgtgtccaaggtaaaaccacagtgatatttttggatgctttgtctgcaatcttgacttgtttttgcagtatcattattcagacttcaaattgtgaatcttttaaacatcttgataatttgttgttgagagctgttcattctaaaatgtaatgaaattcagtctagttctgctgataaagatcatcagttttgaaaggttactgattttcctcttccctcttagttttttacccaatatatggagaagagtaatggtcaatcttaacattttgttttaattgtttaataaagctgctgggcagtggtgcagcattcctacctagtgtcataaaagcaaaatacttacatagctttcttaaaatataggaatgacattacatttttaggagaaagtaagttgctttgcaccgcctacttaattcttttccatatattgtgatacaaacttttgaatatggaatcttactatttgaatagaaatgtgtatgtataatatacatacatacataagcatatatgtgtgtgtgtgtgtgtatatatatatatatgcatgctgtgaaacttgactacacaacataaatcactttttaaattccaggaacgggtagtctgacacggtgattatccttttgaggctgaatccgttattaacttgttatttaggtttttactcccagtagcaagggattctaagttagttgcacttacatgattattgttatttaaaactaagaataaaggctgcattttcaaagataaattggaattgctgttggtgaaataacaaccaaaatactgaatctgatgtacatacaggtttctacaggaagagatggtataatttacaatttggagatttaataaccagggctacccagaaaaagtgacttgataacatggtaccaataagtaagggatgctctctcggtttgcttttgccactttcaagattttaacttctcaggttattaatcaaaattattgtataagttagccaatagaatttttaggttaaaacaacagatgg

SEQ ID NO: 561 - DNA, 6000 bp, Homo sapiens
gggagtcatgccctacaaatcataaattctcatcagatgggttttatttaaccctatatattgtgactgactttccaacctagctctggcataacattaggagacaaggaaaaaaatcaaaatattttaccccaaaacatgtttctttgccatattttgaaatgaccctgcaaagttgttctttgtgggggaaaatgtgcaactgtaaagaatctctgttaacatagctaggtttttttcttccagaccctcctaatctcctaaagagattaactgagacctgaataggaaacatttgtcatccattgtctctaagggcagccacgatcagacttcaaaagaactttggtctccacaatctttatcttaatctgaactttccctttctatgaattccaggtctttagacaaactcaaccaattgtcaaccagaaaatgtttaaattcacctacagcctggaagccccctgcccccctccttcctgctttgagttgtcccacctttctggaccaaacaacctatgtatatctttttttcttttcgttttttttttttttttttttgagatggatggagttttgctctgtcacctaggctgaagtgcagttgtgtgatctcagtttactgcaacttctgcctcctgggttcaagtgattcttgtgcctcagcctcctgagtggctgggatcacaggtgtgcaccactatgcctggctaatttttttgtatttttagtagagatgggggttacaccatgttggccaggctggtctcaaactcctgacctcaagtgatccacccacctcggcctcccaaagtgctgggattacaggcgtgagccactatgcccaaccccaaacctatgtatttcttcaatgtatttgattgaggtctcttgcctctctaaaatgtataaaaccaggctgcaccccaaccaccttgcacatgtgttctcaggacctcctgagggctgtcatgggccgtggtcactcatatttggctcagaataaatctcttcaaatattttagagttcgactcttttcgtcaacaggtgggaatagatgatgccctgccagtgtcagggtcaccctaggccgttggccccctgaggtcaccagcactttcctggatttctctcacaagttctccctcattctggctcaggaagagagactgcttctctcacccctaaacactcacagacactgaggccctttcttatcctggagcaagcagaagctcttgacaagcccaataaagtcaaaaagcagttacctaaaaagagaaaggaaatgcaccatcctcttcctgcagctgcctccccggaacaggcctcatcagccctacctctggctgtggcaatagccttggggtttcaggaagataacagttacagctactccactcttaggggctgaattgggtcctttcaaaaagcctgtgttgaagccccagacccttagaatgtgactgtatctgtaggcaaggcattttaagaggtgattaaggtaaaatgaagtcatgtggttgggccctcatccaatatgactggagtcctcataagatgagaagattaagacacaaacgcagagacctggggaaggtggctatctgcaagccaaagagagaggcctcagaagaaaccaaaccctctgacatattgatcttggacttctggcctccagaacagtaagaaaataagtttctgttgttcaagccacctggtctgtgggttttgttatggcagtgaggactaaactctgacgtttttcttctcttgcctaaattcctatttaaggggcctggggagtcacaacctacaaaccataaaatctcaacagaggggttttgtttaaccttacataatgtggctcactttccatactgactctgacataacatcacatgacggataagaaggaaatcaaatattttaccaccaaatatgtttctttgccatattttaaaatggcctgcagagccattctcgtgggggggaaattgcatttgtaaaaaatctctgctaacataactagatctttcccccttccaggccctcccaagcctgaagaaattaattgagtctagcacctttttggggtctgaatagaaaacatttgccatctattgtctctaagggtggccacccttgaggcttcatctacataatgagaaccctggtctccacaacctcttatcttgacccggacactcccttctattgattccaggcctttagataataacttaactctttcaaccaatagccaatcagaaagtcttggagtccccctatgacctgtaacccccaccccgactccctctttgagttatgccacctttcgaacctgaaccaatcataaaacctggctgcagcccaaccaccttaggcacatgttctcaggacctcttggaactgtgccttaggccttggtcactcatatttgcttcagaataaacgtctttaaatattttacagagtttgactttttttatccacagcagcccaagcaagctaacgtatcctccttcctcatttcacccaggaaggaagtgaggctggatggggaaagcacaccattgacctcaagccgcaagatctgcactggttccggggctgggactaggacccagatctgattccagtgcagcgtcccatgtccagacccattcaacttggaaaccaaaagtaaaattctaggccccacaaccaactgaacggacccctcctctcagccaaaggcattccaaagttaacctgagaaacagttcagactgtgatgggaagtgggggttggatatgccttattatgccctctccccctttgaaattcaggcacaactgaccagcattaacattaaaacaaaaatctgaagactgactaaacagactcattgtagcaataagacaccaagttctatcctggctctagtatagcatcacatgacagagggccctgaaagaaattaaaccattttaccccaaaatattaatatacatatttgacatattttgaaatggccctgcaaacctcactcttgtggggaaaatctgctctgcaaagcatccccttccctttccaagtcttttccctgatccaggcatctttttaggtctgataagagctctgatgcctgcttcctggaggcttcatctgcatgataaaaccttggtctccacaccccttaacttaacccagacactcccttctactgagtccaggtctgtaggtacttacttaactctttcaaccaataaccaatcaggaagtctttgaatccacctatgacctggaagcccacctcttcgagttgtgccacctttctggaccaaaccaatgtacatatcacatgtattgcttgatgtctcatgtctccctaaaatgtataaaaccaaaatctagctcaataaccttgagcacacgttctcaggatctcctggggctgtgtcacaggccattggtcactcatatttgggtcagaataaatctcttcaactatttcagaatttgactcttttcttcaagaaactggcccctccacccttagcttcctctcactgtgtatacagagcacccttcctgagcacgtctgattgaatttctccaaataagcaccttcagtaacccagctccacctactcggcaacatctgaacaaactcagctccgcacccaaagcccttctagttccatcctaagtcaatgcttctcaaactttaaagtgcatcagaatcacctggaggggctgttaaaatgcagattcctggccccagcttccagagagtgctcctcagttggtctggggtggggaccccaaacttgcatttttaacaagtttccaggtgaggctgatgctggtggcttgtggaccacagcttaggtagcactggctaagataccttatcccaggacccttcatgcactctccctccatccagggagctgcttactctgccctcagcaccccatgcgcttgagcctttgcccagcctggtcctggtccaggaattccctgctgccaagtctgatgcaatgggtcagatcctggaacctcctaactcaggataaagttgagaggttgtgctgctttttaaagggaaagccttattgggatttgaaccagaactggaaggactgtagtaaaatgcagatatttgggcccacccccagatacaggcctcgctgtgggacatgctgctatggtcactttctccatgtacagatgaacaaagggtggcccagagataggaagtgactttcccaagggcacacagcacattagacgagaggctgaagaggaagtcaagtttcaagtctccctcctgcgcagttctgtgcttcttgtgctgccttttccaagcttaaggggctctgctttttccccttccctcattctactttcttgtgaccccagctgggccccagcatttccagctgatgctgaaatggagcctcagggggctgtaaaacttggaaaaggaagaagagtagaggaaggggcaagaaaatgagaggaagagagccaggcgtggtggctcatgcctgtaatcccagcactttgggaggccaaggcgggcggatcacgaggtcaggatatcgagaccatcctggccaacatggtgaaactcagtctttactaacaatacaaaaattagccgggcgtggtggcacatgcctgtagtcccagagaggatgaggcaggagaattgcttgaacccaggaggcggaggctgcagtgagctgagatcgcgccactgcgctgcagcctggcaagagagcaagactccatctcaaaaaaaaaaaaaaaaaaagaaaatgaggggaagagataaaaccctttgtggtgaagggaggaaggaatgggaagtcacccaaggctgtccagggagctgggggtggggctgtttctggaacctaagcacacgtaccacctccccttcctctgacctaatgagggctcgagttggaaaccacaaaccctcgttggccccacaggagccagcctctggcttctctctgcaatggccatgtgctgcagacccggagtgggtagttagttggttaatgccagtcttcctcccctggacactgagttctgctgacagcccccgcccagccagagctctgctgtataccaccgggagtggggctggtgtggagcctggaggtcgcccgctgccctcctagggctgctccagacagcattaaaacgctgcaggtcgcaggtgagactaacagctgggagagctgctccaggcatttaggaccctgactggggcagatgagtcagcccagtgggggcagggctcctggaacgaggatctacagttggagttgccccactgtcatgtcacctggagaaaaactggacccaattcctgacagcttcattctgcaaccaccagtcttccacccggtgagttgtcactctaatgtggaacctcctcggtctctgggctcttcccttccaactgggcccacactcctgggtggtggggtggaaaggacctcagtctttctgcttctcccagcacctgccctgggttctggaaggccctcctgagcttagtaaagtggctgactgctaattcccacttgggtgtaaatgactgctaggcttccagggtcactgcattttgaaagtggcgaagcctggagccacagtgctctgcccctactgtaatggatgctaggaggatgagggtgtgggggtaggattgttgggggaatgctgattacttagtaaggacagtctcatccccagcctggaaggaagggtcaggtgggaatttccactcagggataggggttgggggtgtttctctctttctcctccagctcagtcagtgcccaagaggttttctgaagccaggcaatgatttacagaaggctgaattcccagcagacaccccctactaatgagcattaattatcactttcccttacttggccctcccctcccatgagagctgcatccactcagttaattacaggcctgg

SEQ ID NO: 562 - DNA, 6000 bp, Homo sapiens
gaggtagctggctccggtgtggaagcagaggtggcaggtcatgccagggtgctgtgggcatctggcagccagggccatgccccccatcctagggggacggcacaagctcactatgacaggagcagcaaggagccggccagaggagggggtagccacgacccccaggatcctgggcaagaagcggcagacaaacttggcacaggggcctagggtgagggggactggggcctgggtattctgtgggggagggagggggatcacgtctgtggggtggagtagagactgtggtggtggccgcctggtcctggcacctgggagaagagcagaggagtggtcttcgtctggctgcccccataccagcccggctcacgcccgatggcaccataccagctcccagagcctagactgcccgacatactgcagcagagaaacagggtcagtctcaggacagtgaccagggccacagtcacaagagctgcaggaggaagacaggcttagaacagaacccctgtgacctagaccttcggggcccaggacaaagtacatctctaggcaagaggtggaggctttagcaataggaacccaggggacctcacctagtacagatggggaagcaaaggccatggcaggggtggaaggcaagacccggctatctcggtcccccatagcttgatggagccagcggggtgggcgggtagggcaggggtactgaggcagtgccacggctcctacctggtgctctcaccccggctgtgctcccaggagcagccctcatcttcacagtgcccagcccggtcaaagaagtaggaccgagaggcaaagacctgcccattgaggatgtggctggtgctctgggggaggaagccatcatcgatacttactcctgtcctgcactggcctcccaggcccaaccccagactccaacccaggatttgcaacatccgccccctccactggccccacagaagagggagcagacccttaccaggtcctgtgggggccggtgcacccggaagaagcccaccagcagggtggtgggcagtagctcccacacgaagaggatgaggccaaataccaggtagcctttgttccccaggtcattcaccaggtccgcctgtgggaaggcaggggctggtgccagtctgcagtcacgccaaaggggtagtgggacagggcccaggccagctggggccaaggtgccacggctactaaggaggtggcagacatgcgtatgcccacctggtcagacacattgtaccagtcgtaatcgaaggtgtccagccggctctggggggccaaggccagtgctgtcaggttgtagcaggcccggctggcatagagcaggaccatggcgccacccatcgcggccgcctggcacacactggtcccctggcacaggtaacaacagaggaccctcagggagagaaggctcccagcttcctctacaccctgagaaccgctgccgagagacccaaaagacacctgggcatcagtgctgcagccctaccttggcctccaggtagatgctagtggagggcgcccgcctggcgacgaggcagaggcaggcagcaagagacagcgcgcagatgacgaacagggagtcgctcaccaggacgcggacaagcagcagggcccagggctgtgcccggcgccgatgggagagcacagcacacagcacgttcaccagcagaaagagcagcgaggcccccacaaaggcccctcggacagcgagcctgcagccacagcacagtcagcgcgggccctcaacagccctcagcactcaccacctgccccacctcctgcaggaaaccccaatgtcgacaaaactcagggcatccagtctgagccctgttcctccactcttacagatggagaaactgaggcccaaaaaggtcagaaggtgactgacagccatggtacttcggaaggtgcaccaactggagtcagaagtctctgtctgagccccagctctgcgaccttgatcctgctgtcttacctggctgggcctcagtttcttcatctctcaagggaggatagtagcctctcagggaaattgtacaaataaaagatggctgggaaagctctttataaaccgtaagacactgtacaaatgacgagggcattgcggccccaggtcacccaggagtgcatatggctttggtgcttccatgggctggagcctccagctcgccctccatggtggatgacactggggccctctccctcacactaccacaagcattcctattcctgtgccttgcagatctgcaaggcctctgctgagccatctgcgccaggtgctttaacttttccaagatcttccacagacattccctgggttgcctttgtctcagccctgagaggtgggaagggatctacatgggactgtcacctgcccctgacctggaggctgagcccaccagtgtcccgagtacttacaagcctcggctcatctccggccgacgcttcaccttggccttgaacaccacctaggagcagagatgcccttcactcctgtgggtccttgaggcttgccacctcccgccccccacccgggaccacagttggttacctgggcaaagtagaggttcataagcgtcaaggtgaagaactgcaggcagacggggcagcagtagagaagccagaagggcaagggccccaggcggttggcgcggggagtatctcggaagtagaaggagaagagggtggtacgcaaggcggcccagagcagacagagggccaggaacaccgtctgatagctgagacgcttgtgcccatacagaagcaccagccagagctgggcatagacggagaagaagagcagggcatacagggtggtgtaggcagctgtcagccccagggtcacagcaggtggcagcgcaggcaccagcccggcagcaggcaccaggccagacaggttactctccatgtcagggagggaggcctgaatcccggagacagacaaggagggactgtcggcgggaccagggaaataaatacggaggggtgggaattgcagggtgcagagagggagatggggcgctcaggaggaaagaagttgtggctgacaggcccctcctcctcaacagagagacccttgcccttggggaacacaggcagcctgggccccaggcccctcactcaggggcatggaagggcagtctcttttctccaggacagaccggataggggttgggggtgtctcctccctgggcctaccccagagccaaggatggggggatgcagaggcccaaggagaggactccctggcctcggtcgttcatgtcgtcctgggtggagggggagagccggctgatacccgtcgggtcagggcagcggccgctgcgaggggcgcccaatgccccgctctccccctccccaagctgggggaggctctctctcctccaataatgcggatggggagggcctctgcctcctgtcctcgtaattctcgaaagctgcccccgccccaccctcccccaccgcgtccacgctccagcctcaaggggagggaggaggcggacgccaggtcctcaggccgctgatgggagagccggctcaggtcgtggggacccggggctccggctccccggctcccgctgctccgcccccctccccctccgcgcctgcgcgggcgccgttcgctacgcaaattgcgcagcggcccggctggctccgcagtccagcgccgcacccggcgtgaaaccgtacgagaattggcgcgagctgcgccgctggcgggcgcccggggttacgggaggcggcaggagggcggccgagttgcgggggccgtgccgcatccagggggtccccgggtgggccgtgccccgtgccgcccgcctttacttgtatgggggtccgccagttcccacgctcctctctcctatacccaaatcggggtcgtgccgcccggccgggggcggcaacggattcccgtccctcggtctctgaagaaaacttccgcccatagccaagatggcccccgggccccgcccccgggcctgaacccgcggagccccgaatcccccgcgcgggcccgcccctcgccccggcgcgcccgcggccctgctcacctggccggccgcctgccaggcgtgaagcccccacgggccctacggtcctccctcaccgggtccccggccctcctcccgcgcccgggcagccatcccagccagggaggaggttcctttccttatctccagtgcccccgagatggcgcgggaggtgtcccccgaggcgggcggcgcgaagcttccgcgcctgggaggaggagcggggagcgggactttccgaccgggcacccagtccaggcggagcggtaacaatagcaacaataatcacatccgacggctgagcttcagttgtggctgtgccaagcgccttcgcccgcagtaatcactcccttcacaaagttttcactggctcccgggggagctgtcactatccccacttcactggggggaaactaaggcccagaggggctgaaggacttgttggcagaagtgggtctccaggttccaaatggggaccccagagaatccctctcctgctcccacacacgcccaaggtgtgaggcagcgaggatgtgagccccggggccgaaggagggaggaaaaaggatgcggacgaggagccttggatccggcgggggggcggggccgggccgggttgaccccgcctctggacctacccgagtgacgttccgagaggtgattgggccaggtcgctgacagttcccgttgcccaagcaactagggcccggagcccggggtgctggagggaggcggcaggcccgggtcaggggcctcgagatcgggcttggggtgagacctgtgcgccgtcaccacgggcggggcggggcctgggtccaccggggttctgaggggagactgaggtcctgagccgacagcctcagctccctgccaggccagacccggcagacagatgagggcccaggaggcctggcgggcctgggggcgctacggtgggagaggaagccaggggtacctgcctctgccttccagggccaccgttggccccagctgtgccttgactacgtaacatcttgtcctcacagcccagagcatgttccagatcccagagtttgagccgagtgagcaggaagactccagctctgcagagaggggcctgggccccagccccgcaggggacgggccctcaggctccggcaagcatcatcgccaggccccaggcctcctgtgggacgccagtcaccagcaggagcagccaaccagcagcagccatcatggaggtaagtaccccaccacctccacctgccgggacacctcacccccagcccactggctccctgcatcccagttgcatccacaggcactgaatgctttgggtcggtccccaaactctcagagccccagtttcctctttcgtaaaacagcaattaataaccaccattgtaggactgttgagttaattagcaggaacatataggatgcacttgattacagagctggtgcacattaaagctaaaaaatggttgctgccgggcgtggtggctcacacctgtaatctcagcactttgggaggccaaggcaggaggatcgcttgagcccagaagttcaaggccagcctgagtgacttagggagactccagctcttaaaatacatatatatatatatagcagctattagtgtggggttaggacagaaatcagtgacaggcaggcagtgatccgaaaaggaaaaggggcctgcctaaggccacaccttcctggtgtttctttccttagaatgtgggggctggaagcctccttggtgccctgccccaggctacatgctttccctgggattaggccttccagctcccagatgtgttctttcttgccctgtggctcgtacccacagcaggactgtcctggcacagtggccaggggcagatgacctcaaggggcagacagtcctcccagacagcagggctgtgtggggtgagaagcacaggctccaagatggaaggatggacac

SEQ ID NO: 563 - DNA, 6000 bp, Homo sapiens
ccgtgttagccaggatggtcttgatctcctgacctcgtgatccgcccgcctcggcctcccaaagtgctgggattacaggcgtgagccaccgcgcctggcctaatttattttatttttatttattttttgttttttgagacggactcttgctctgtcacccaggctggagtgcagtggcaggatttcagctcactgcgacctccacctcctgggttcaagtgattctcctgcctcagcctctcaggtagctgggattacaggcgcccaccaccacatccagctaatttgtgtatttgtagtagagacaggatttcaccaagttggccaggctgttcttgaactcctgacctcaagtgatctgcctgcctcagcctcccgatgtgctgggattacaggtgtgagccaccacgcccggccaataataattttttttttgagacggaatcttgctctgtcacccaggctggagtgcagtggtgcaatctctgctcactgcaagctccgcctcccgggctcacgccattctcctgcctcagcctccagagtagctgggactacaggcgcccaccaccacgcccagagaattttttgtatttttagtggagacggggttcaccgtgttagccagaatggtctctatctcctgacctcatgatctgcccacctcgaactaccaaagtgctgggattataggcgtgagccaccgcgcccagcctaatagtttttttaaaattccttggcatcatcctgactcctctctttccctcgcaccccacatccagtccatcagcagatcctgccagttctgctttaaaaataaatccagggatcagctacttctcaccacctccctggtgactctctgaatgtctaaatctgaccatgctgcctctgctcaaatcctttccaggtttttactcaaaggcaatgccagagtccttagaatgaccttcaactttaggtctccaaataccctttcctaaaccccctcccctaggcccaccctagccaggagcaggtgttgccctcgaggccttaccatctgcccttctctctgcctggaactctcttcccatcatccctgtggccttggctccagtggtgcttctcaccaaggtgagtgctgaccacctctgctaccatcactccccccgcccctgtgactccggattctcttaactcttttttttgagatgagtctcactctgtcgccaggctggagtgcagtggcacgatcttggctcactgcaacctccgcctcccgggttcaagcgattctcctgcctcagcctcccgagtagctgggactataggtgcgcgccaccatgcccagctaatttttgtatttttggtagagatggggtttcaccatgttggccaggatggtctccatctcttcaccttgtgatacgcccacctaggcctcccaaagtgttggaattacaggcgtgagccaccgcgcccggcctctcttaactcttttacatgctgcccccatacaaatcttctcacgcatgataggatgcttttgtgcttgtttgctcatggccccaccagctcactagaaggtaagctccacaagggcaaggattcctgacgcttgggttcaccgaggccccctagcaactggaacagcctgtgtcacacggtgagcactcactgtgtggcgcgagtgaatgctgagtgtgtgtggggggcagagagcaggggaagtttgtgagcagaaaaatggccaagtgcaagctcaggaagttaaagaaagctgtggaggctgagcatggtggctcacgccagtaatctcaacagtctgggaggccaaggtgagaggattgcttgggcccaggaattcgagacaagactgggcaacaaagcaagaccccacctctacaaaaaataaaaaatgagctggtgtggtggcatgcacctgtggtcccagctgttctggaggctgaggcaggaggatcgtttgagcccaggagtttgaggcctgcctgggcaacaaaaggagaccccgcccctgccctcatctcatgaaaatgtgaaaaatgctgggcatggtggctcacgcctgtaatcccaacactgttgggaggctgaggcgggtggattacgaggtcaggaaatggagaccaccctggctaacacggtgaaaccccatctctaataaaaatacaagaaattagcccggcatggtgacacgcgcctgtagtcccagctactctggaggctgaggcaggagaactgcttgaacccaggaggcagaggttgcagtgagccgagattgcaccactgcaccccagcctgggcagcagagtgagactccgtctcaggaaaaaaaaaaaaaaaaaaagaaaaagtaaaaaataaattaactgggtgtggtccacacacctgtattcccagttacgtgggaggatcacttaagcccagaagttccgggctgcagtgagctgagatcgcacctctgtactccctcctgggtgatagagcgagaccctgtctcaaaacaaaacaaaacaaacagaaaaaaagaaagcaagctatggggtccaatctgagagaatcgagtgtgggtgtttatccgtaagagagcgaggggaaagaggcctcttaagccttcttaatcctgaaaatggggaggaggtcttttaagctgcagtgccagagtgacatgacctagttttctatttttagagatggggtctggctatgttgcccaggctggtcttgaattcctgggctcaagccagcctcctgagttgctgggactacagacatgtgccaccccacccagcttgacctggtttttgtgttcagaagatatctgttgttgttccaggtgccaaggccagtgctgggcacaggggtgctagagcctactgagaaatggacatagaaccccagtgtccatccttccatcttggagcctgtgcttctcaccccacacagccctgctgtctgggaggactgtctgccccttgaggtcatctgcccctggccactgtgccaggacagtcctgctgtgggtacgagccacagggcaagaaagaacacatctgggagctggaaggcctaatcccagggaaagcatgtagcctggggcagggcaccaaggaggcttccagcccccacattctaaggaaagaaacaccaggaaggtgtggccttaggcaggccccttttccttttcggatcactgcctgcctgtcactgatttctgtcctaaccccacactaatagctgctatatatatatatatgtattttaagagctggagtctccctaagtcactcaggctggccttgaacttctgggctcaagcgatcctcctgccttggcctcccaaagtgctgagattacaggtgtgagccaccacgcccggcagcaaccattttttagctttaatgtgcaccagctctgtaatcaagtgcatcctatatgttcctgctaattaactcaacagtcctacaatggtggttattaattgctgttttacgaaagaggaaactggggctctgagagtttggggaccgacccaaagcattcagtgcctgtggatgcaactgggatgcagggagccagtgggctgggggtgaggtgtcccggcaggtggaggtggtggggtacttacctccatgatggctgctgctggttggctgctcctgctggtgactggcgtcccacaggaggcctggggcctggcgatgatgcttgccggagcctgagggcccgtcccctgcggggctggggcccaggcccctctctgcagagctggagtcttcctgctcactcggctcaaactctgggatctggaacatgctctgggctgtgaggacaagatgttacgtagtcaaggcacagctggggccaacggtggccctggaaggcagaggcaggtacccctggcttcctctcccaccgtagcgcccccaggcccgccaggcctcctgggccctcatctgtctgccgggtctggcctggcagggagctgaggctgtcggctcaggacctcagtctcccctcagaaccccggtggacccaggccccgccccgcccgtggtgacggcgcacaggtctcaccccaagcccgatctcgaggcccctgacccgggcctgccgcctccctccagcaccccgggctccgggccctagttgcttgggcaacgggaactgtcagcgacctggcccaatcacctctcggaacgtcactcgggtaggtccagaggcggggtcaacccggcccggccccgcccccccgccggatccaaggctcctcgtccgcatcctttttcctccctccttcggccccggggctcacatcctcgctgcctcacaccttgggcgtgtgtgggagcaggagagggattctctggggtccccatttggaacctggagacccacttctgccaacaagtccttcagcccctctgggccttagtttccccccagtgaagtggggatagtgacagctcccccgggagccagtgaaaactttgtgaagggagtgattactgcgggcgaaggcgcttggcacagccacaactgaagctcagccgtcggatgtgattattgttgctattgttaccgctccgcctggactgggtgcccggtcggaaagtcccgctccccgctcctcctcccaggcgcggaagcttcgcgccgcccgcctcgggggacacctcccgcgccatctcgggggcactggagataaggaaaggaacctcctccctggctgggatggctgcccgggcgcgggaggagggccggggacccggtgagggaggaccgtagggcccgtgggggcttcacgcctggcaggcggccggccaggtgagcagggccgcgggcgcgccggggcgaggggcgggcccgcgcgggggattcggggctccgcgggttcaggcccgggggcggggcccgggggccatcttggctatgggcggaagttttcttcagagaccgagggacgggaatccgttgccgcccccggccgggcggcacgaccccgatttgggtataggagagaggagcgtgggaactggcggacccccatacaagtaaaggcgggcggcacggggcacggcccacccggggaccccctggatgcggcacggcccccgcaactcggccgccctcctgccgcctcccgtaaccccgggcgcccgccagcggcgcagctcgcgccaattctcgtacggtttcacgccgggtgcggcgctggactgcggagccagccgggccgctgcgcaatttgcgtagcgaacggcgcccgcgcaggcgcggagggggaggggggcggagcagcgggagccggggagccggagccccgggtccccacgacctgagccggctctcccatcagcggcctgaggacctggcgtccgcctcctccctccccttgaggctggagcgtggacgcggtgggggagggtggggcgggggcagctttcgagaattacgaggacaggaggcagaggccctccccatccgcattattggaggagagagagcctcccccagcttggggagggggagagcggggcattgggcgcccctcgcagcggccgctgccctgacccgacgggtatcagccggctctccccctccacccaggacgacatgaacgaccgaggccagggagtcctctccttgggcctctgcatccccccatccttggctctggggtaggcccagggaggagacacccccaacccctatccggtctgtcctggagaaaagagactgcccttccatgcccctgagtgaggggcctggggcccaggctgcctgtgttccccaagggcaagggtctctctgttgaggaggaggggcctgtcagccacaacttctttcctcctgagcgccccatctccctctctgcaccctgcaattcccacccctccgtatttatttccctggtcccgccgacagtccctccttgtctgtctccgggattcaggcctccctccctgacatggagagtaacctgtctggcctggt

SEQ ID NO: 564 - DNA, 6000 bp, Homo sapiens
aggctgaggcaggagaatggcgagaactcgggaggcggagcttgcagtgagcggagatggttccactgcactccagcctaggcgacagagcgagattccgtctcaaaaaaaaaaaagaaaatgaatataaatgttattctatttccggactgcattctgtttcactaacctacatgtgtatctttacaccaaaaaccacactgtcttaatcactgtagctttatagtagtcttttttattttttttttttgagacagagtctcattttatcacccaggctagagtgcaatggtgggatcttggctcactgcaacctctgcccccagggttcaagtgattcttctgcctcaccctcccgcgtagctaggattagaggtgcgtagctggcattacaggcgcgcaccaacacgcccagcgaatttttgtatttttagtagagacagggttttaccatgttggccaggctggtctcaaactcttgacctcaggtgatccgcccacatcagcctcccaaaatgctgggattataggcatgagccactacgcccagcctataataagtcttaaaatcaggtagtataagttctccaactttgtttatactttgcaaggttgtcttggatattataggtcttttgaattttcacatattttagaatcagcatcaattttttaaaaatgcctactgagattttgattggaatggcattaaccctataaatcaatttgggggaaattgacatcataggagtatggagtgctctgatccatggatatagtatatctctccatttattggatctttactttcagcaatgttttatacttttcagtgtacaggtcttgcacatctttgattatattttattattaaacatttgcttttttttttgagatggagtttcattctttcacccaggctggagtgcagtggcgcaatctcagctcgctgcaacctctgtcttctggtttcaagtgattctcctgcctcagcctcctgagtagctgggattacaggcgcatgccaccacgcccggctagttttgtgttttgttttgttttgttttgttttgttttgttttttgagatggagtcttgctctgtcactgaggctggagtatagtggtgcggtctcggctcactgccagctctgcctcctggattcacgccattctcctgcctcagcctcccaagtagctgggactacaggcgcctgccaccatgcccggctaatttttttggtatttttagtagagacggggtttcaccgtgttagcaaggatggtctcgatctcttgacctcatgatccgcccgcctcagcctcccaaagtgctgggattataggcatgagccaccacgcccggccacgcctggctagttttgtatttttagtagagaaggggtttcaccgtgttggccaggctggtctcaaactcctgacctcaagtgatctgcccgcctcagcctcccaaagtgctgggattacaggcgtgagccaccgtgactggccaaacatttgattttttgaagctatgtaaatagtattttgaaattttcaatttctgattgcttattgttagtacttagaagtacaactgctttttgtcgaggcatggtggctcatgcctgtaatcccaatactttgggaggccaagtcaggaggatcgcttgagcccaggagttcaaaagcagcctgggcctgatagcaagaccttgtagctacaaaaaaaattctttttaattagcctgccatgatggcatgcactccaccccagcctgaggaagtaggcaatgctttttgtgatatttgaggagaaagacgttcctgggagaaggaaagacatatgcaaaaggtgatgggcctgcctggggcatggtagggatggtacacctgagaccccacaactgggcattatgcctgaagggcagagtgtgggagggaaggcaagacgtgagctcaggtgtcaggagatctctctggccgttctatggaaaacggatgaggaggaaagcacaggaaaggggactgttgcattttcccaggcatgagatgatgatggtctggactaggacactggcagtgaaaatggcaaggaaagaatgaattctagagacactcaggaggtagaacccacaggatgtcctctcttgcctattgcaccgcaagagcctcctaactggtttccctgctcccacacttgccttcctccccactacagattattccaacacaggagctggagtgacttttttttttttttttttagttttttttgagactgagtctcgctctgttgcccaggctggagtgcagtggcacgatctcagctcactgcaagctccgcctcccaggttcacgccattctcctgcatcagcctccggagtagctgggactacagacgcccgccaccaagctcggccaatttttgtgtttttttatcagagacggggtttcaccgtgttagccacgatggtctcgatctcctcacctcgtgatccaaccgccttggcatcccaaagtgctgggattacagggtcagccaccacacccagcctggagtgactttattacacctaagtcagagcatgtcacacctctgctcagcaccctccaatgacttctcacgtcactcagaggaaaagccaaggtccctgtgatggccaatgcgatcttgccctggcctctttcctacgcacccttcactagttccactatagccacactcatctccttcaacaaagcagcactgctccacctttattgagctgtaactctttacccagacatccacttggctcataacctcacttcctttaagtctttgctcaaatgtcaccttctcaaggaagcttacccgattatcctcgctgatactgcaaccagcttcaagtaccccaccacatcctgatcccctttattctgttctacttttttcctatagcactgatcatcttccagcgtattagatttttcacttatgtctgtggtttgctgtcacatctactaggataagctccacaaaggtagagatctttattttgttcactgacatcctaagtccctagaacaggagacacttgatccatatttgtagactaactgaataaatgacttaattaccagtttggatgtgggggcagatagtgagcatgatgcccgtttccggagctggggtgcagacagtgtctagggacactgaactgttttaaaagcaggatagatcccggctggagaccacacaaggaaatcatcagcacctgggtcaggggctggactggagcagaggaaatcatgcaggaaaagtaaagagaaggacatcaggtaaagagaagaggacacatgcatagccagagagaaaagaggagcagaggcatgtggatcacagaagcttagggaggagactttcaagaaggggagagaggttgagtcaagcaagggctgaaagccaaccattggatgcagtcactagaaagttacagataggcaaggtgttgtggctcacgcctgtaatcccaacaccttgtggggctgaggtgggaggatcgcttgagcccgggaggtcgaggctgcaatgagccctgatggcgccaatgcactccagcctgggcgacagagcaagaccctgtcgcaaaaattaataaataaataaataaaaagaaaagggggaaaaaaagttatacgtggccttacggggaagccaactctgactggttataagctgaaactgtcaagtcaacaggtggcagggaagatggctgagaccaacagcacagagatttagaggcagacagacctggcgccaatcctaggacaggttttggtaagcctttgaatttcaattgccccacgtttcgggggagggggtagcaccccctagctcataaaccttagtgattgatgattaaatgagatgacggaggaaaacgcaaggcacaaagtggatgcattagctccattttgttaatcagcaggcttagttggctgcgacccagacacgaactaaaatacagtgcagcccaggaccagtgggggtcttgcttatggctcagagctgaacaacacatgggcagcaaaatcagacactgagatgcgggcaggcctgcgacgctgaagtcaattcctttgaacaaacagaacacttccgtcccaagattagcaggaattaatctcccagtctcgggtacacctggttgtccctccctgtcctggcgcggcaaacgttcccggaggccagccagggatcactcgcccaaggactgagctttccctactctcagccaactggagcgggaccagggcctaggcaacgcagctgtccgcccctaacaaccactcacctgctttcccctttctataggccagcaaaggtacattctttttcttattgggccgcgtaacttatcgcaaccaatcagtggcagccacgggacccaactcactcccacacaacttgtgggggtgatcatggagaagacaaatttttgttttccgcatccagttctctcagagagcaccgtatttgtcaaactgttgtgactctccctaaatgtttaagaaaacatttcattcccctcaggcttgtatagtctgtccctggcctactccccgctccaggtggtacagcccgcaagcggctccccttcccagctgctcgcggggccgagtcccccagtccgaggaggccactcagcgcaggagccataccatctgtgactaataaataatagggggacctccgactcccccctgttgccttattaccttccgaccacctctcggacctcttgcccagcccttccccgtagacatcaccccagatacggtggtgacaccattgctatgggcccacgtagggcgcagtgcgagccagggcaggacgcacttggtacgacccacgccgcgccccgcgccgccggaagtgaggtgtctgacccccgaagttccggttcgcagggggtggggagtgttgttaaccggaggggcagccgcagtcgcgcggattgagcgggctcgcggcgctgggttcctggtgagtggggcgaagtctggcccgagttgtggttggggtcgggacccgaaccttccccttgaggtctccggagtcggcacgcccctcagccccgccgcacgctttcggcctgtcagctggccggagacctcagacgccggtgcggccgctttgctcaagcctgggccctgcctgcgacgcccgcaactcctggtgctcacaggtgcgcggccgcgagggcgacccggctcctcccgtcccgctgctgctctctcccgtcccgctgtttttgtggtgctctgagttgacactactccgggggtcgggggaccccaggattccaggctgacgttccccgcccgctcccgcagggcgggcgtccgaactgcccaccctaacacagctgtcaccggcgctgtcgcctgcccagcctgctatcctctgtgccttggctgctctcagccctggctgcgcattcccgcccctggagcagatttctgctgttgcctcccaccccatcttctccaccggagggtcagcggtgcagctccccctcctccaacattgcagcttttcctcatcacctccctagaggaggcggcttggcaggcagcgtggaaagagccctagatttgaagcaagactgacccaggttccaggccttgcgtcagtgtgatcacttaaccccttcgagtctaatttgtaaaatggggtagcgtaagctattctttgtctgatgatttcgagggcgaaatgtgatttcccccccactttctcctatgaattgaggctgtgccaggcaccgggctattttgcacagcacgagcatcacataagttattttcttgccccatgcaggtctccgggccagggcaatgttccgcacggcagtgatgatggcggccagcctggcgctgaccggggctgtggtggctcacgcctactacctcaaacaccagttctaccccactgtggtgtacctgaccaag

SEQ ID NO: 565 - DNA, 6000 bp, Homo sapiens
gaagcaggagaatcgcttgaacctgggaggcagaggtttcagtgagccgagatcacgccactgcactccagcctgggcgacagagcgagactccatctcaaaaaacaaacaacaacaacaacaaaaagaaataatttgaggcctaggattacagtacattccttcaggaaggatgttacttggtaccaaatatgcttgcttttgtcaggtaactgggaacatttcaaaaatgggtccatcttgggccaggaggggtggctcacgcctgtaatcccagcattttgggaggccaaggctggtggatcatgaggtcaggagttcgagaccatcctggctaacatggtgaaaccccgtctctactaaaaatataaaaaattagctgggcatggttgctcgtgcctgtagtcccagctactcaggaggctgaggcaggagaattgcttgaacctgggaggcagaggcttcagtgagccgagatcgtgccactgcactcagcctgtgcgacagagactccgtctcagaaaaaaaaaaaaagaaaaaaaaaatgggtccaccttaatccaagttcaaggctgagctttcctctccccctttcctggaccaaacagataataggattctgaactataagtccatggaaattgatttgtatcttacagcacatacgtgtcagtagtggggtatctgacttcctactttgagcaagctctgggtttttattttcgtccctccccacaaagactgccaaacaacagtttaacttcatggttatatcttccagatcagtaaatgcctccaggacaaaaactgcttcaaaagctgaacttacctctctgggttttagcttcctcaatgttggcacaataattcttcactgtactattagcttttcaatgcttttaagatttttttttcacttcctcttctttttttaatttgtcttcagagggaaggttggaatcaagtatctaatcaggagcctatctccccttacctacccgaataaaatattaagagccatcccaggggagttcctcggatttttctccctgcccccactgggtaatagcaatcttaagctttacaattggaattgatcgccccagccaacagtgggacccgctttttattttcttgcccagtggcatgtggagcgaaatatggcctactgacggacgatctgatcgtgatttagagaaacttactgcgccccctggtggaagcattattcccttgggtcttaaaagctctaaatcagccagagcgcagagttgagattccaagaatgtgcatgtaaaattcctactccgtgattcctgtctgtcagagaaacactatatatactgttttctatatagagagagtacctgttgttcggcgacgtaacatgtctttctttctttctttttttttttttgagacagggtcttgctctgtcacccaggctggagtacagtggagccatcttggctcactgcaaactccacctcctgggttcaagcgattctcatgccttagcctcccaagtagatgggattacaggcaccaccaccacgcccggctaacttttgtattttttgtagagactgggtttcaccatgttggcctggcttgtctcgaactcctggcctcaagtgatctgccagcctcagcctcccaaagtgctgggattacaggcgtgaaacaccacgcccagcccgtaacagcattatgtgtaatagctccaaactggaaataacccaaatgcccatcagcagtaatatggattaaacagcaatgtaagaactattaccacaaaaggacatgaatgaatctcagccaggcatggtggttcgcgcctgtaatcccaacacttcaggaggccagaacgcaaggaatgctcaaggccagcctgggcaacatagtgagaccctgtctctataaaaaaaaaaatcaaaaattagctgggcatggtggcgtgtgcctatagtcccagagaggctgaggtgggaggattgcttgagtcagggatgtagaggttgcagtgagccaagattgtgccactgagattttttttttttttttttgagacactgtctttttttttttgagacggagttttgctctattgtccaggctggagtgcaacggcacaatctcagctcaccacaacctccgcctcctgggttcaagcaatgcttctgcctcagcctcccaagtagctgagattacaggcgcacaccaccacgcccagctaatttttttgtatttttagtagagacggggtttcaccatgttggtcaggctggtctcgaactcctgacctcatgatccacccgcctcggcctaccaaagtgctaggattacaggcatgagccaccatgcctggctgacgctgtcttaaaaaaaaaaaaaaaaagattagtcagggtgtagtggtgtgcctgtagtctcagctactcgagaagctgaggtgggagaattacttaagcctgggaggtcgaagctgcaatgagccatgattacacgactgcactcagcctggatgacaaagtaagaccctgtcttaaaaaaaaaaaaaatctcaaaaatgtaatactgtagacaaagcattgtgggggctgaaaaaaaaaaggaaaaaattaatattgaacaaaagaagccaaattcaaaataggacatattgtatgattccattgacatacagttacacagacacactaatctttagggctagaagcatgagatggctactgaggtgctagtgatgtctttttcttcatctgggtagtggttacacaggtttgtctattttgtaaagatcaatcaagctacaattattttgcatggtatacctgcatcaaaccatctcgtgtacccataaatatatacacctacgatgtacccacaaaaattaaaaaattgaaaaaaattagtcaagctatgaacccggaaggcggaggttgcagtgagccgagatcacgccattgcactccagcctgggcaacaagagggaaactccgtctcaaaaaaaaaaaaaaaaaaattagtcaagctacataagatctatgtgcttctctttatgtatatttcaattaaaagtttgaatttaaaaatagtactaataataaataggctagctgcatataattggaaaggcagcttatgaacccagcatcaatagctttcagttcttttaggattgtttaagaaaaggttacatcagctggccaggcgtggtagctcatgcctgtaatcccagcacttgaaagcctaggcgggcggaacacatgaggtcaggagttcgagaccaacctggccaacgtggtaaaactctgtctctacaaaaaatacaaaaattagctgggggcacctgtaatcccagctactcggaaagctgaggcaggagaatcacttgaacccaggaggtggaggttgcagtgagctgagatagtgccactgcactctagcctgggctggaaggaagaatttgttaaggagcgacaagagcaaaactccgtctcaaaataaataaataaataaatataaacaaataatgttgttacgaacattcttgtacagctttatttttttttttttgagacggagtctcgctctgtcacccaggctggagtgcagtggcgcgatcttggctcactgcaaactccgcctcccaggttcacgccattctcccacctcagcctctccagtagctgggattacaggcgtccgccaccatgcccggctaattttgtttttgtatttttagtagagatggggtttcaccatgttagccaggacggtctcgatctcctgacctcgtgatccgcccaccgtggcctcccaaagtgctggtattacaagcgtgaaccaatgctcctggcctgtttttttttgttttttttttttaagagacaggatcttgctatgttgcccaggctggtcttgaacccctgggctcaagtgattctcccacctcaccctctcaagtagctgggattacaggcatgaggcattgcactcagcttcttgtacagctttcttgtgtgtatatccaggagtggactttgctgggtcatagggtatgtgtattttcagctttagtgattatatttatatatatatatatatatatacatatgtatatatatacatatgtatatatatgtgtatatatatatatgtatatatgtgtatatatatatgtgtatatatatatgtatatatattttttttcctttttttttttttttttcttgagatggagcctcgctctgttgcccaggctggagtgcagtgatgtggctccagtggctcactggagcctcaaactcctgggctcaagtgatcctcccacctcagcctccctagtagctgggattacaggcatgcaccaccatgcccagctaatcttttttctttttctttttttcctttatttatttatttatttattgagaaggagtctcgctctgtcgcccaggctggagtgcagtggcgcgatctcggctcactgcaaactccgcctcccgggttcacgccattctcctgcctcagcctcccgagtagctgggactacaggcgctcgccaccacacccggctaattttttgtatttttagtagagacggggtttcaccgtgttagccaggatggtctccatgtcctgacctcgtgatccgcccgcctcggcctcccaaagtgctgggattacaggcgtgagccaccgcgcccggccccggctcctgctcctctaaatattagaggcaagcctcgaaccggagctccgggatgcatgccaatctccggttgcgcctgcgcgtcgggctcccgtggggtccacgcatttcctacccggcccccgcgaacaggcgtaaagctctttcttcagtgctcgctctagtgcgcgcgcccggacggcgcctgcgcagagggcaaggaacctggtaccccggtgcggtcccggcgcctgcgcgctgcggactgtggggcttctcggcccgaggcagaggaacagggaagatggcggctgtggtggagaatgtagtgaagctgtgagtggtcgtttctttctctcctagggcggcaggttttgtaaagggcctgggagtagggggcggtgggggaagggactaggcggagagagggacatccccgggaaagccatgttgcgactcctggtggggagggcaacaggagactccggagaagacgttgcgcttctttggaaacttgtggaggccctggtgggggcacactggagccccgacgggcggcatccctgcggggctgtgtggcctcagcgttcctcggggctgacggtttccagagcatggcgccctgcctgcacgcgagactcaccgtcccggtcctctcccgagacgcctcagtccggaggagcggggccgaggcccgggcggccctacggctggcccgccgcccaccccgccccgtcccgtcccgttcgctgcagcaacaggctcggcggcccctgcggagtgcactgcggggctggctgtttcagttccaggcagccccgtgatgtttgggaggatcttgggtggcaggtacctaagactacaaatattcttgggaagaatttatcgaggagcggatccagaagggaaggaacttcaggggagtgggccttggccccgtccagtagcagccatcaaaaacctgcaactggaccgaagccgttcaggacagcttagcctaaaggggcatctaggtgggcattcttcctattatacgataccattgtgctggtcagatttcaagcaaagttaaagttaatagctgttggggccatggacgctggcctatgaactgcttcctgtgagttaaagatgctttgggacttgatttattcctacagaagaatcagaatgagttttagattgggttaatgcatggtgggcgaatagagcttcttttaatgggtatgttgggcttggtgcaagggtgggaaaattgagtggtgtctagctgtccagtcagggtttttgcattttgactggat

SEQ ID NO: 566 - DNA, 6000 bp, Homo sapiens
tagggtacctggtcagggcaggcctgacctggccagcagcttttcccatcgggccacgccaggacccaccttctgaaatacgaagcgcgtgcggcgcctgctgcgggtcgcctcgtcccgccactcggtcagccagcgaacgaagagcgggttgggacaggcaggcagcgggcgcttccggcccaggcggaccggggccgccatgagcccgagggcgggtcctccggcgctccacgcccgcgggactgggacgccgccagttctggagtcgggattcgaacacctggcccagggcggggcgggggaagagggagaccgagggcaggaccgttgagatcacggggccccaaacacagggggcactaacgagaggagagcctgcggccgccctcccacccctgcgctgctctaagtggttggtcaggggcgctgtctctaacgatcttttcccttggctccactccagccagcctttgagacgcgccctttcccagcccccggagcctggaccggctccttcctgtcaccccagattcgagagcggggtctttgtgtaggcgagaggaaggcggacagcgccccctgtgacggggaggactggctgggcggcgcttaacggactaacctgagcttggcggctctaaggtctcttaagattgtcagcttcagcctcaagcttgaaggaggctggagatggagactggtcttgaaaagagtccaggagaggcgggggctaggagacaaacgggtgcaaacgtattggtgggagggacacccagaaatgggtgccggggatgaggacacaaaggtaaggcaggaggagctgcaggacccttggaggaaatggtgatcctcatccccgggatacagggcaaagagtgtgtggtggagaggaagtcggggacgtgccgagaaggcccaaaatagaactcggaatgtcgggggtcagaggcctagaggaaggaggactgtaagtaagaggtgcttgggcatcctggcagttggggaggcctgagatgggcacgcggttgggtttgggagcggaggagcaggctgcgggttaagaagcccagacacaggtagaggggagaacacttcgtcatttttgtggctaatcggaagtgggagaccctcagggaggttgaagatggaaaccctacaaagggcttcaacctgagaagcctgaaagacacgtatagctgagttggacacaggcgacccgccagggtttgaagcagcacccggcctctagctgctatgccggaagtcgcaacacgcaggtctccagcctgcgaggaagggagaggtgggcgccagagctccagtcccgcccctcaggactgtgcctagcccacggcgcagtagccccagccaagctaaattggaccaatgggctccggctcccgcctcccgcccgccgcggccttataaggagcctcaagccggctgtcgggctggccccgccccctcgagtctcttgtcctaataaggacatctagggcatcccgcggctgggggcgggcgagagcgcgtctccagggtaactgcgaagcccccctctctctccccgttgctcttggaaactctaaggctcagaaaagggggcgctagcctcatattcatgtagggtcgctcgcgggaggcggggtcaagctgctgtctccacctggagcgccgggagtccgggcgggggcggtgctgtggaatgtccccgactacaacccccggtatgctctgcaaggtaccccactcccaggcatcgctctccgtttacacccttaattccgtttataggattagggcccccagttccctttctgggtttgcctctgacttgtttgcgacccagtcttttcctgcagagtgtgaggctgtggtcactgttctagaacaacaaaatcatcccggagtcccccgctcgtttctttttttttttaaggcatatactaccacagaacttgtctcagttttgcggatgttagaataaccatgtacctggctatcaactcgagagctgggttcaagtctggtttaatatctatttcttctcattggcacgtaaaggcatgtaaagaagccttgaattgaatgcacaaaccctcgtctttaccctttaacgcctcatgactttgccaaacatctttaaacaagaacaaagctctcagagatttccttgtacctttcccctgtgccttttcctcctattcttgttttactgacgttggacatggccttttttcaggagacgagagtggctttacacatgcagagtactagtgtttatccgactgacgacgccttcatacttgtgatttcctttgctttaggtcgggattccaggctaatcaatagttgcttcgattcagaaatgcaaaaccctaacctcactcaaaaatttcaggccaagggatccagataataccagatgggtcttaagaaagccgttttgctgtgggataaagagccgcttagtcggggatcgttttcgggtcattttactgagcgccgcctcgccgggctcagagcggttcctgggaaattggaccaatgggctcgcgctgcgcgctgcggtgccgcccaggacctgggcctacatttccctacatgcactgcagctcggagccggccggcgggaagactccgttacccagcgagcgaggcggcggcgcagggccagcggactccatttcccgtcggctcgcggtgggagcgccggaagcccgccccacccctcattgtgcggctcctactaaacggaaggggccgggagaggccgcgttcagtcgggtcccggcagcggctgcagcgctctcgtcttctgcggctctcggtgccctctccttttcgtttccggaaacatggtgagcggcaggccacggcgcctgagggaggcggctgcgggtcggtcgcctgcgcgcgggaagcgactggggagcgacgtccgcaccccctcccccagcgccccgggcgggatgagggtctcgcacgaaggggcgggcggtgccggaatgcgcgtgcgcgcccgtgggcgccggggagggccggtctggacgtcgctcgcgctccgcctgggctcccctcccccacccgctggtgcgcccgcgcggacaccggccgcggggggaggggttcggggcgcgcgctggggcgcccctcgcggaacggccggcgtcgcgcctttcttcttaggggcgcgctctcgactggagcatgcggcgtccaaacccggcccgggggcggcgaggaaaaagcgcgcgagaggtctcggcgcgcgcgccccacccaaggctgttcctgtctgcgcgtcaccctccctcggcagccgggtccgtctcgggagcaggtggcagggatgcctgcgcccgggaggggcgggtgctggcgcggcgaggggtgatgctgggaagacggggtcccggttggggcgtgggtgcctgcgattaaggccttgcaccgcaaggcttggagggggcatcgcagagaccgcggcccgttcgggagcgcatctaacgagctgcgttctcacccgtgcatcgggcgagggctggaacggcgctgtctgtcggcgcgtgcgcgcacgctcaggcccggccgccggtgccgaagccctgggccagcgaggccttcccggatgggcctgagtgagggtggagccgagtttagggaagtgacccaggcgggcaccgcccggaaaccaccccgccccctgtatacggcccgagggctgagaaaaccgaaggttatgtagcttgcccaggctcctgcctgcaggagatgggtctgatacacccgttgttttagggcgattccacagggttagggacctggagatgctgctgcctctcggatacgcgtttctgcattggtgagggggccgggcccagccgatctcctgtccccgcccactccggatgcggccgagtcacgtggccggcttcttctgcagttccggggagtttgggggaccagatttaccttggattgcccctccctctcctggctcgggcaccccgaagcacgacgcagagtaggaagagtttaaagacctcgaggcctctgggcacttgagtttggcatgttaatttttatcagcgacttctggggcctagcaccattcccggaagaagggagttgtcgggcagggtccttaatgggggttgcaattcttgtcttggttgggaaagagcctagctgggaacaggggtcgtttgtgtagtaactgtattaagcagttctggtgggtttgttgtaactgttcggtgtccttggggtcccatctagcattgtggggtcttggctctttctgaagaggagtcttggctcaggtgtttgggtcctccatatccgaagttctaaatcaccagttttatccaaaggctgagagcaagtactgtgagtagcaaatgagtcagtagccggtggatcttttaattctgggttcacattttggtcaaggttctgcttttcacgagttttgcatttctatcctgtaaaatgagggaaggggttgttgaactaggtgatcagaggccatggctgccattctgaggttgtgtcccatctggttctttgacagtgacttgggtgggaaaactagtgacttgccttgggaagggcactagtgaccactcgggacgtggactgagatcttctgaaaaaacaaggggcagttccctagaatccttttcttgacgtatacgtggcatgtctcctaggcctccggtgtggctgtctctgatggtgtcatcaaggtgttcaacgacatgaaggtgcgtaagtcttcaacgccagaggaggtgaagaagcgcaagaaggcggtgctcttctgcctgagtgaggacaagaagaacatcatcctggaggagggcaaggagatcctggtgggcgatgtgggccagactgtcgacgacccctacgccacctttgtcaagatgctgccagataaggactgccgctatgccctctatgatgcaacctatgagaccaaggagagcaagaaggaggatctggtgtttatcttctggtgagctcattctggcacttcttcctgtcacctgccccctttctcatgatgggaacttctgtggctcctggtcaacccagatgtgtgggtttggagggggagggggttgtaacaaaagactcctcactgccagcccaagggtttctcaaagtcacctgtggctttgctgttgctgggagttgcctgacgcgtgtttctgtccagggcccccgagtctgcgccccttaagagcaaaatgatttatgccagctccaaggacgccatcaagaagaagctgacaggtaagggccagcattggtgctgagtgcccttctgctctggccttggctgcagggcagggtgaatggcacgcagagggggtctgcccccttgtcttcgctgcctgcttgttccttccatctgctttgattggctccttcccagccacagaaactacccccaccccagtgcttcctgctcacagatgctcccctttcttctttatagggatcaagcatgaattgcaagcaaactgctacgaggaggtcaaggaccgctgcaccctggcagagaagctggggggcagtgccgtcatctccctggagggcaagcctttgtgagccccttctggccccctgcctggagcatctggcagccccacacctgcccttgggggttgcaggctgcccccttcctgccagaccggaggggctggggggatcccagcagggggagggcaatcccttcaccccagttgccaaacagaccccccaccccctggattttccttctccctccatcccttgacggttctggccttcccaaactgcttttgatcttttgattcctcttgggctgaagcagaccaagttccccccaggcaccccagttgtgggggagcctgtattttttttaacaacatccccattccccacctggtcctcccccttcccatgctgccaacttctaaccgcaatagtgactctgtgcttgtctgt

SEQ ID NO: 567 - DNA, 6000 bp, Homo sapiens
aaagggggagccttagagtagccagagctcagccagaccctaatctgggatctccagtgaccagggtatcccagacccctctctccggcaagatgtctccttccctagcagtgccactagccacaccctcactctgccccacatcctctcagggaaagcccaaaccccctatcaccaccaccacaggtgccaggccctgcaagacacagggcagcatgggcatcataactggccacagtcagcagagccccagggaccctgacacctctccccaggaagctgaggaacagcctctaccctcacccatagccctgaaggaatcatagctcacttgatcccggcctgttctccttcgcaaataaaaaccctggttttgtagcaaggaggcctgttgtccttacttcccttcccacagctcaaaggtccaccaggcacactttctgccaaggcagtatgatcagatcctggagacaccaaggagggcacccctgcagcatcctcagccctctctccagtgacagcaggctccctgtgggaaggcgcgacacccagaagctgggacctaggaaccccagaagtcttccaggtttgcccctacccccataaaccctagcacaaaaatgaatcccaagttctccacacctatttcctaaccagaaaagggatctagcccttcctcccagaaccgctcacaagttcccaggagttatggagccaactgtaacaccaggaggactcttcctcagttcagttgataagggaaatatagatgccacattaccactcccagttcacctcaccctagggccagatttcttgtatgtctttgcctgctgggcaggaaaaagcccaaagtacaggctggaaacagcccttgacaatgctggcaaaaggctcagggtaccggcaacacccttttggttaaacacagggaggcagtgctcaagacaccggggtctgaagtcccgggctccacctggctggccccaccctgaatgcactccagccacatctagaggaggtcaaaggctcaacttggcctgactcacagcagccactgaacctgaccctcataaacttgagtcagccatccagggaagacagcagaccaaacagaacctttgagctacctctgacttgcctatcagcccacacctagaaagggacagaacagaatatcagatggacctcactgtccatccaggcaaggctacagagcacccagttcaggcataaatcacttccgctggaagacccctgtagccagcacccactccttaaacagccagtccagtgtcaatcacagcaccaacagaataatggtgaccatcagaaaggcgtctcagccagtcattggagccagataagggtgtgcaggggctggttgggtgtggagtacagaggagagagatagcaccattatcccagtgcacccccaatcctgaagtctcctgtgtcccaaccttgaaaaacacatcccattaatgagcctttttattattgtcttttttttttttaatcgaaggtcccttactggtcctgcttccatgagtagccgtgaccaggggaaaagggagaggaaccagccggcacagggaggggtcatctccacaacattccatttatacacagaactaaacagacaagcacagagtcactattgcggttagaagttggcagcatgggaagggggaggaccaggtggggaatggggatgttgttaaaaaaaatacaggctcccccacaactggggtgcctggggggaacttggtctgcttcagcccaagaggaatcaaaagatcaaaagcagtttgggaaggccagaaccgtcaagggatggagggagaaggaaaatccagggggtggggggtctgtttggcaactggggtgaagggattgccctccccctgctgggatccccccagcccctccggtctggcaggaagggggcagcctgcaacccccaagggcaggtgtggggctgccagatgctccaggcagggggccagaaggggctcacaaaggcttgccctccagggagatgacggcactgccccccagcttctctgccagggtgcagcggtccttgacctcctcgtagcagtttgcttgcaattcatgcttgatccctataaagaagaaaggggagcatctgtgagcaggaagcactggggtgggggtagtttctgtggctgggaaggagccaatcaaagcagatggaaggaacaagcaggcagcgaagacaagggggcagaccccctctgcgtgccattcaccctgccctgcagccaaggccagagcagaagggcactcagcaccaatgctggcccttacctgtcagcttcttcttgatggcgtccttggagctggcataaatcattttgctcttaaggggcgcagactcgggggccctggacagaaacacgcgtcaggcaactcccagcaacagcaaagccacaggtgactttgagaaacccttgggctggcagtgaggagtcttttgttacaaccccctccccctccaaacccacacatctgggttgaccaggagccacagaagttcccatcatgagaaagggggcaggtgacaggaagaagtgccagaatgagctcaccagaagataaacaccagatcctccttcttgctctccttggtctcataggttgcatcatagagggcatagcggcagtccttatctggcagcatcttgacaaaggtggcgtaggggtcgtcgacagtctggcccacatcgcccaccaggatctccttgccctcctccaggatgatgttcttcttgtcctcactcaggcagaagagcaccgccttcttgcgcttcttcacctcctctggcgttgaagacttacgcaccttcatgtcgttgaacaccttgatgacaccatcagagacagccacaccggaggcctaggagacatgccacgtatacgtcaagaaaaggattctagggaactgccccttgttttttcagaagatctcagtccacgtcccgagtggtcactagtgcccttcccaaggcaagtcactagttttcccacccaagtcactgtcaaagaaccagatgggacacaacctcagaatggcagccatggcctctgatcacctagttcaacaaccccttccctcattttacaggatagaaatgcaaaactcgtgaaaagcagaaccttgaccaaaatgtgaacccagaattaaaagatccaccggctactgactcatttgctactcacagtacttgctctcagcctttggataaaactggtgatttagaacttcggatatggaggacccaaacacctgagccaagactcctcttcagaaagagccaagaccccacaatgctagatgggaccccaaggacaccgaacagttacaacaaacccaccagaactgcttaatacagttactacacaaacgacccctgttcccagctaggctctttcccaaccaagacaagaattgcaacccccattaaggaccctgcccgacaactcccttcttccgggaatggtgctaggccccagaagtcgctgataaaaattaacatgccaaactcaagtgcccagaggcctcgaggtctttaaactcttcctactctgcgtcgtgcttcggggtgcccgagccaggagagggaggggcaatccaaggtaaatctggtcccccaaactccccggaactgcagaagaagccggccacgtgactcggccgcatccggagtgggcggggacaggagatcggctgggcccggccccctcaccaatgcagaaacgcgtatccgagaggcagcagcatctccaggtccctaaccctgtggaatcgccctaaaacaacgggtgtatcagacccatctcctgcaggcaggagcctgggcaagctacataaccttcggttttctcagccctcgggccgtatacagggggcggggtggtttccgggcggtgcccgcctgggtcacttccctaaactcggctccaccctcactcaggcccatccgggaaggcctcgctggcccagggcttcggcaccggcggccgggcctgagcgtgcgcgcacgcgccgacagacagcgccgttccagccctcgcccgatgcacgggtgagaacgcagctcgttagatgcgctcccgaacgggccgcggtctctgcgatgccccctccaagccttgcggtgcaaggccttaatcgcaggcacccacgccccaaccgggaccccgtcttcccagcatcacccctcgccgcgccagcacccgcccctcccgggcgcaggcatccctgccacctgctcccgagacggacccggctgccgagggagggtgacgcgcagacaggaacagccttgggtggggcgcgcgcgccgagacctctcgcgcgctttttcctcgccgcccccgggccgggtttggacgccgcatgctccagtcgagagcgcgcccctaagaagaaaggcgcgacgccggccgttccgcgaggggcgccccagcgcgcgccccgaacccctccccccgcggccggtgtccgcgcgggcgcaccagcgggtgggggaggggagcccaggcggagcgcgagcgacgtccagaccggccctccccggcgcccacgggcgcgcacgcgcattccggcaccgcccgccccttcgtgcgagaccctcatcccgcccggggcgctgggggagggggtgcggacgtcgctccccagtcgcttcccgcgcgcaggcgaccgacccgcagccgcctccctcaggcgccgtggcctgccgctcaccatgtttccggaaacgaaaaggagagggcaccgagagccgcagaagacgagagcgctgcagccgctgccgggacccgactgaacgcggcctctcccggccccttccgtttagtaggagccgcacaatgaggggtggggcgggcttccggcgctcccaccgcgagccgacgggaaatggagtccgctggccctgcgccgccgcctcgctcgctgggtaacggagtcttcccgccggccggctccgagctgcagtgcatgtagggaaatgtaggcccaggtcctgggcggcaccgcagcgcgcagcgcgagcccattggtccaatttcccaggaaccgctctgagcccggcgaggcggcgctcagtaaaatgacccgaaaacgatccccgactaagcggctctttatcccacagcaaaacggctttcttaagacccatctggtattatctggatcccttggcctgaaatttttgagtgaggttagggttttgcatttctgaatcgaagcaactattgattagcctggaatcccgacctaaagcaaaggaaatcacaagtatgaaggcgtcgtcagtcggataaacactagtactctgcatgtgtaaagccactctcgtctcctgaaaaaaggccatgtccaacgtcagtaaaacaagaataggaggaaaaggcacaggggaaaggtacaaggaaatctctgagagctttgttcttgtttaaagatgtttggcaaagtcatgaggcgttaaagggtaaagacgagggtttgtgcattcaattcaaggcttctttacatgcctttacgtgccaatgagaagaaatagatattaaaccagacttgaacccagctctcgagttgatagccaggtacatggttattctaacatccgcaaaactgagacaagttctgtggtagtatatgccttaaaaaaaaaaagaaacgagcgggggactccgggatgattttgttgttctagaacagtgaccacagcctcacactctgcaggaaaagactgggtcgcaaacaagtcagaggcaaacccagaaagggaactgggggccctaatcctataaacggaattaagggtgtaaacggagagcgatgcctgggagtggggtaccttgcagagcataccgggggttgtagtcggggacattccacagcaccgcccccgcccggactcccggcgctccaggtggagacagcagcttgaccccgcctcc

SEQ ID NO: 568 - DNA, 6000 bp, Homo sapiens
ggtgccgggaccctgttcccaccagttagcctctgcatcctccctagcctctccacctgcctcacaggggcctccgcagctttgctcatgctgacactcttgtctagaaagccttttctccatctctcaacactgcccatccttcaagcctcccctgggccggcacatggcctctgtgactaggggtccacccagcagcaagtaccaaggtacagcctctgtatttccactcctggaggtttatgccttgtttatccaagactgcaggggctgggtacccaagaggtctttaaaatgctcctgacctcagcccaagaatgcaggtacctggcttcctactgtgcgcctggatgggcctgtgggggtctgatcctggagcagccacagggtgggtgtggctggattccaaagggctctgcctcaaggaggctgccagaagtgcccctggattgctctgggctgaaaacggggcttcggagcaggcagggaagcctggcaaagccagcaaaattaccttctgctcccggaagcggccgtcgatgatgctgctgcaaaggtcatccagtcgcttgcgctccacaatgtgatccagtaccaactccccagggtttgctgctgacaagccagccgttagcttgcgatcccctacccaccaggccctgcccctggtgccagcctgtccacggcccttcacctgggtctctaggattggtctcctgggccacccacacaaaatctccaacgtgcagcttgcgcaccgtgtgggtcacgtgcagccgctgtagctctcggagcagctccggcctgtgcccgcccctggagtggcaaggagggaagcctagatcagagcagggcagtgcctaccccccagcctcctctgatcatctccctcgtttctccccacctcactcacccccgggtctcgccaatgtccacacacaacagcaccctgtactctccaggcctcagctccagtggctgctgctggacccctgcttcactggcactaagtggggggtgttggtatgtgaggccagaaccccttgtgccagggcagttgccccacacccatgccacccgacacccaccacccacccacagtagggaggcagccacagttcagctgcaggtgatgggttggggcggggctttggcctcatttcccatcccctcctccctgttttccccactcctctgccctcctcctcacagctctgctgaagctgctcctggcactgctgtctcctccccagggggctccttgggcccgatgcccacattcagcaagctcaggccttctgactcggccaacttctgggccagctccaggccctctggggtcaatgagtacctgggaggcagaggggacaacacagctctaccttcttcactcattcctggcaggctttcctgcctgcccccagctgggctggcctcaccacccccttggcgccctgcacaaatgaccccagtggctcctgctcctcctggtcttcttggctcttagagcagttccttgggcctgctcagcgccattctcaggtctgcaagaagtgtgtctcagacaatttccttcctcctgtcttcactaatgctgtttcctcctcctcggaatacttatcctgcatctctacccgccaaatcctaaaacgtgtcaaatgctatctcctctgaaaaggctttctcctcctccaataaccaccgcaccctcccacccccgctgctgcggtttcacaccctccaggtattccaacagtgggggctcctgaggaaaggcccaccccccccaatctcaacagcatcagctctgggagttgttgggtgactctaaggccctactaagaagttcactcatgctctcctgtatctcctgcagttggccccacctggctggctggtgtgtcctgaggaccaggttcctgtgaaggagggagcggagggctggccagggtcgagcactcccaggggctacctgtggatcagaaaagagaccctcagagagcacctggtaccaccacaagtccatgttccctgtgtccccagccatgggccacacatgggcccactgcaagaaaaggcagtctttggtgggccccagagccacttgggcctgtcctccctgatccctgtgctcaccctgggggacttctgagcacacctctgcagcagctcctccttggttaagaagtggtgaccattaggattctgaaaccaaggtagaaaagacagggtaggctcagtgccagggcccctcctcatcccgctcaggtggctgggataatctttgcctgccctgcctgggccaggcccctcggggaacctcccaccccactgccatggttccgcctcccggtgtagcccagtgctcaccaggtgctcccggtagagcaccagcagtatcactcgggctcctgagtgccgagctggccagtagctgccagagcctcccgctttgggctgggcaggaacctgaaaggtacagaggagttctgaacatgaaagccagccagtcatctttgaataagtccccagcaggctttgtggccctgggtaagtcactcagttgtctctcagtttccttctctgtaaaatgggccaggtgatgggatgatccgctgcaaatctgggataaaacagcaggcagtttcggggcagtgggtgggggtgtctgcccagcctggcctcacttctaccatgcgctgcaggacaggtgtaattagacaggaaaactcaataatggtgaccccgtaactaactgagctgggatccttaagtagcttgatcatggaattctctcattggctgttaccaatatttctattcacaggttaaaatactaagtcgaaaagaggataagtcatttgctcaaggccaggcatcactggtgagatttggactcaggcttgccaaatcccccaagccagaaaatcatactcccgcactcccactttgccttccactccccttgccccttcctcactggcatggaagagtcctggacttccgcaagtcgcccctgcggggctggactgttctctccagatggtgagtccggggcatggtcacctgcgggagagaaaagagttaactccacactccacgaatccggcagctgcgaggatctgggatgcaacctactcagatggttacgtgagaccggtgagggaggctcagggagcgccagccactagccctaggccgaacggcaactgggacaggagtggggagcttaaaagccaagggctcccaggagagtacggaggctccacctgggggaggtgggggatcaccgacccctttccgaggcgctcaccgcccgatgttcggtgccgctgcagccgctcgtccagcatccggcagagcccgtctccgaagtgctgtaggatcttagcttccttcccgctgcgcagcggcagtgggtaccgtcggagggaacgcagcgcctggccgggcaggggtagggtacctggtcagggcaggcctgacctggccagcagcttttcccatcgggccacgccaggacccaccttctgaaatacgaagcgcgtgcggcgcctgctgcgggtcgcctcgtcccgccactcggtcagccagcgaacgaagagcgggttgggacaggcaggcagcgggcgcttccggcccaggcggaccggggccgccatgagcccgagggcgggtcctccggcgctccacgcccgcgggactgggacgccgccagttctggagtcgggattcgaacacctggcccagggcggggcgggggaagagggagaccgagggcaggaccgttgagatcacggggccccaaacacagggggcactaacgagaggagagcctgcggccgccctcccacccctgcgctgctctaagtggttggtcaggggcgctgtctctaacgatcttttcccttggctccactccagccagcctttgagacgcgccctttcccagcccccggagcctggaccggctccttcctgtcaccccagattcgagagcggggtctttgtgtaggcgagaggaaggcggacagcgccccctgtgacggggaggactggctgggcggcgcttaacggactaacctgagcttggcggctctaaggtctcttaagattgtcagcttcagcctcaagcttgaaggaggctggagatggagactggtcttgaaaagagtccaggagaggcgggggctaggagacaaacgggtgcaaacgtattggtgggagggacacccagaaatgggtgccggggatgaggacacaaaggtaaggcaggaggagctgcaggacccttggaggaaatggtgatcctcatccccgggatacagggcaaagagtgtgtggtggagaggaagtcggggacgtgccgagaaggcccaaaatagaactcggaatgtcgggggtcagaggcctagaggaaggaggactgtaagtaagaggtgcttgggcatcctggcagttggggaggcctgagatgggcacgcggttgggtttgggagcggaggagcaggctgcgggttaagaagcccagacacaggtagaggggagaacacttcgtcatttttgtggctaatcggaagtgggagaccctcagggaggttgaagatggaaaccctacaaagggcttcaacctgagaagcctgaaagacacgtatagctgagttggacacaggcgacccgccagggtttgaagcagcacccggcctctagctgctatgccggaagtcgcaacacgcaggtctccagcctgcgaggaagggagaggtgggcgccagagctccagtcccgcccctcaggactgtgcctagcccacggcgcagtagccccagccaagctaaattggaccaatgggctccggctcccgcctcccgcccgccgcggccttataaggagcctcaagccggctgtcgggctggccccgccccctcgagtctcttgtcctaataaggacatctagggcatcccgcggctgggggcgggcgagagcgcgtctccagggtaactgcgaagcccccctctctctccccgttgctcttggaaactctaaggctcagaaaagggggcgctagcctcatattcatgtagggtcgctcgcgggaggcggggtcaagctgctgtctccacctggagcgccgggagtccgggcgggggcggtgctgtggaatgtccccgactacaacccccggtatgctctgcaaggtaccccactcccaggcatcgctctccgtttacacccttaattccgtttataggattagggcccccagttccctttctgggtttgcctctgacttgtttgcgacccagtcttttcctgcagagtgtgaggctgtggtcactgttctagaacaacaaaatcatcccggagtcccccgctcgtttctttttttttttaaggcatatactaccacagaacttgtctcagttttgcggatgttagaataaccatgtacctggctatcaactcgagagctgggttcaagtctggtttaatatctatttcttctcattggcacgtaaaggcatgtaaagaagccttgaattgaatgcacaaaccctcgtctttaccctttaacgcctcatgactttgccaaacatctttaaacaagaacaaagctctcagagatttccttgtacctttcccctgtgccttttcctcctattcttgttttactgacgttggacatggccttttttcaggagacgagagtggctttacacatgcagagtactagtgtttatccgactgacgacgccttcatacttgtgatttcctttgctttaggtcgggattccaggctaatcaatagttgcttcgattcagaaatgcaaaaccctaacctcactcaaaaatttcaggccaagggatccagataataccagatgggtcttaagaaagccgttttgctgtgggataaagagccgcttagtcggggatcgttttcgggtcattttactgagcgccgcctcgccgggctcagagcggttcctgggaaattg

SEQ ID NO: 569 - DNA, 6000 bp, Homo sapiens
actctgtcttatgaagcctcaggttcctcatgtataagtagggaaatgatagctcctgtctcggagttactgtaaagatgaaataaactaggccgggtgtggtggctcacgcctgtaatcccagcactttgggaggccgaggcgggcagatcatgaggtcaggagatcgagaccatcctggccaacacagtgaaaccccgtctctaataaaaatacaaaaaaaaaaaaattacccgggcatggtggcgggcgcctgtagttccagctactcgggaggctgaggcaggagaatggcatgaacccgggaggcggagcttgcagtgagctgagatggtgccactgcactccagcctgggcgacagagcgagactccgtctcaaaaaaaaaaaaaaaaaacaaacatgaaataaaatagcccgcgaaagccttagcactgtgcctgatgtggggaacagctgcgtgcgcgtaaactattgttagtatttcagcaaaataaatgtcagtgagaaataccagcatcacagcaggctggaggagtcactgtagcaggcatctgcctcttctcccaacacgcaggtcagcctccgcccctccaccccaccccctagggctcctctctgtgtccccagcaccaaaacttagggaatgtttggtgaacaaatgaatgaatgagtgagtgtccctactcacctctgtgggtttctccaacacacctgtcaggagggggccagctagaggctcccctagttcaggaacccagacactccctgggccagggtcccatcagtgctaattgtgcagctgtgtgcgacatggtgttttgggtgcctggagagccttccttggggatgtcaccatgtggggaggaagggtgggacactagccggtccctgagccaacactgactcaccctccccccttggagggcagctcagtcatcacctggtgccagctctggcccccagccagccacacttcttgaggacctgacctgccacccccctgtggatggtgaagcctggagtctaaaaggccagagaaggcagcaagccagtggcccctcgtcagctcacggactactcccaccatcccatggagaggagggcagaggtggtcagaccccatcatacagagaggggacaggcttgtcccaaggtcacactggccaactggaatggaggttttctgactcccagagtagctctgtgcctgctgcagggaacactgagctgtacctggtgctaccttggcactttgcctgtggttgccactgctcttctagctcaatccatccacatttctaccccaaagctctacctcctccaggaagttctcctcccaccatcctccttggccctaaatgtacccactgccacctatggctgatgtcagacagtttaatgagtgtccctagactgtggaattcttttcttttgagagagggtcttgctctgttgccccaggaaacaaagaccatgtgtagtggtcatagctcactgcggcctcaaactcctgggctcaagcaatccttcagcctcagccacctgattagctgggactataggcatgcgccaccatgctgggctaatttttaaatttttggtagagatggggtctctatgttgcccaggttggtctcaaattcctcaaggaatcttcctgcctgggcttcccaaagcgctgggattacagatgtaagccccaactgtgacattcctaaaagcagggatgggttttccttgccttctctctgtccttaacaggacctggcagagactgagaaagtgcctgcacaatgtacccctggagcagacggagcgcttctctttcccatgcttgtctggagctggggggactggcgtctcctctaagctgtgccctcccaccagcaaccccagattgttagcactggaagggcccctaacaagattctttttgagagccacaggggagcaggaactttcccaaggtcctgatttccagctggaaatcagagggcagccacctgtcctgccccatcccacggaaatcttggaggggctactcctgctccgtctttcctctcttccttcttccccaaaccccagcagctacccccatttagggacttggcaggataaaggcacagtctttattccagcccccgacccaacccaactggcaactcccagcctgctgcctttgcccaggcatggcagaggggcactggcagcttggagatggagctgcttttccctttggcagtgtggaaggtgggggaggggaggggagaggcttggcccccactaggtgaggggagagggcagggaggcaagtccaagaggcagagggagaacacaactttcccagctttcggggtcactacattaagattcaaagacaaactggggactggggggctgtgtgtaaagccaattgtccctgtacccacctggcctgggtccctgtttcagagctgcagccctcagttcctgcaaaccagtgctttctggctgccccaggtggatgtgtgctggggatggcgttgtccactcccaccttctgcttcagtgtcttcctctccccgcatccgctgcttccccctcttcctcccagctccctcctcccctctttctcactcccacccatttgcctctttgtgtctcctctttccttcccagtcttgccccttctctggtctcacccctcttctctcgcccccgcccctttcttcagcgccccctcccctccgctcccccgacactggggctgctttctccctgactcagcaaggtgctttataaggtgctgaggggctcagccaaatccaaaccacattgtgcagactccacaaggagcggcttcgaggcggagggagaggctgaagcggctccccttctccctctcccctccttcttggccccctccctctgaaagggtagcagctagggggacctcctggctggcctccgtgccatgcacccatgggcatctgccttcttgaccttggcatgggcatcaagaaatcactgggttcatccatcaggaatgtcactgaaactccagagtcctggctggtgggggcagggaggaggtgcgggggcggtggggggggcagaggtaggccctgagcacttttcacaagggtccctccaggcagttttcatcagagctgctactgaggtccctcaaagtcccctgccccccaccccaagccagctctcctttcccagccctttttctccttgtttaggaaaaaaaaaaggaagaaaggacagagagagagagaaaaaaaaaaaccaacccaacaacaaagtctgtcccactccagtgaggtaattgaaaacaaacttcttccccaccccccccacccccccacctcagtgctcgcggtacagagaagggaagagctgccctgggacccagcactggccatgatcaggatgcctgcccaggccacaggttggaggcgctggggctggactggcagagtgccctcccattccaggggcaccaggaaggagtgggagacaaatctctgatgccactccagggagaggcatcaccttccaggtctggcccaccactggcctctcccactttgaaacaataaataaacaacaacaaaagcaacttattacccagtgatttaattggtggtgtggctatagggcacccaagccttggggaccacatgactctcccccaggaaaatcatgaagcagggcagtccccagccctgggttagagctgcctcctctgagcgtgttctccccggcagcccttggagagggaggaggggaccccctctgggagggtccaggcatacccccaggtatcctgcccagcaaatcccaacccaggcctgcgggaaggagggggagccctcaccgctaagccacccccacctcaccaccggaaaaaccaacaacccgaaaccccaaaggaaggagaatgccagggtcttcatggggaaacatttcacaaatggggacgctcgggcggtccatcgccttgaatcggagcattcccgctgagtcacccaagaagcctgtggtgttgaaactggtccgttgcctcgtgctgattaatgaattacaaatcccccacccatgtacattctccctggtcactggaggaagaatgaagaaccttgtgaacttgagggaaaaagtcccgccaagtggcctcttctcgcctctgggccgggcagtgggcctgcagtgccctcttcctcccccgcagggggcattgtgagctggttagtcacctgccccagccccagcgcctcgcttagctctagcttttggaaatgggacaagcggcgggacaataggcagggggggcggtcagcccagacaaagggcagcaggaaaaacaccatcacttgctcccaggccagctcgctggcatttgggagaatgtgtcattgcatttactcaagggggaggaggagggaaggttagagatgaggaggcagaggtagggtgggagcagggacctcgcacaggcagaggtaggttggatcagggaccccgcatcggcaggggacagggggcagggggcggtgtcccaggccaacgcctggggagaagcccacccgaagccggcgctgtcccccggctcctgggagtcctcagacggactgatggcctccccgccccctcccccaggaggcccagggtggtaccgccacagcctcgcctcacctcaccccccctcggtgctgtgggagggagagggagccccagaagccctcccttccctcctcccccctcctacccccaccccggggagggccgctacaatttgtggttacagctttacacgtcagaaaaaaaaaaaaaaagtttgcagaatgtcccacaccgaaaaaaaaaaaaaatccgaaaccgagcgaaaaaaacctgcgagtgggcctggcggatgggattattaaagcttcgccggagccgcggctcgccctcccactccgccagcctccgggagaggagccgcacccggccggcccggccccagccccatggacctccgagcaggtaggagccaggcggccgaggccccgacccccgccccgccaagcagccacgagatccggttcccgtcctgccctgacccccgggagccccgcgccggggccgggccagggagctgggctcgggccgggggaggcacggctgggcgccctcgagaggggccgggcggggacgcggcattcctggagtccgcacggcggggccaggaggtggccgggagcggcggggagcccggacgatcgcagacctggggaggcggcaacctggagccccagcgaggcgggccgtaggagccgcagccccagagccccgcgcaccagtcggggccagagagtccgaggcggggagcgaggctgcgggtgggaggaggggctgggagaggaagagggagggaggccgggggagcccgaggccgggcggcgggaggcgaggggaggccgacacctcgggccgcgccgctctccctccccggcccgccgggaggggtaggagggcgggcgggaggaagggcgggcggcggagaggagggcggagggcagcgccgagcctggctgggccgggccggacgggccgagccgcgccgcgggactcgcggcttcctagctacgcgccgcgcggccggaaccctccatggtgcccacggccggggagccggcggcaggtaggggcggcgggcggcggccgcgagtcccccgggccaccgtggcctgggagtgattattgtttggcggggggctggcgcagccgggccggacccggcaggaaaaagtctgtcactggccagggagcggcgggagcagccgctcagcccgggcaggaggggagttgacgcgcgggaaagggcagcgccgggcagagcccggagcccggtgccccggaccccgcccccgcccccgcccccgcccccgccgcggggaaggagcgaccgggcgggagcgggagggggcggggccgggggcgccgaggccacacagggggaaggcgc

SEQ ID NO: 570 - DNA, 6000 bp, Homo sapiens
cactgggccactccgcgcagagacactcggggaacaaagctctaggtggacgtccgagagtgggggacttgggaccccgccgactccgggaaggggatgcaaggggcgggtccccgaggggccggtcgcggaaggcgggcccggaaggaggggccccggggcttcgggggcgcgcccagagggatgccgtttcccggggttaggacgcggtcgcagcgggagaggtgaggtggccctcccgcccgccggccggagcctggcgctccggggggcccgcgtcagcgcgcggttgccatggcgacgggcgggcggggggcgggggctgcgcggaaaagaggtcagcgctcagcctcgctgcggctcccggccccggcggcgcgggcggcggtgctaggctcgcctctgcctccctcgtggcgggcccggacatggggtcccgtggcctgagtccctcggccggcgcgcagggctcggggccgcgcgcagcctccccgcactgactgtcgcgccgtgccctgcgccaggaggagcggaggccgcgcgcggcccgccgagcgccttcaggatgctcatcaaggaataccacattctgctgcccatgagcctggacgagtaccaggtggcccagctctacatgatccaggtgagggcggcggggagagggcacccgggcaaggggtggagccctgccgaccccgccagccctgccccggggctgggaccggctgggagcccggaggaggcaagagaggccccccttcagatgtgggaatggggaaggactgtgggaagaggggcaggagggccgagtggtgcttcccatccgctaagtgcccagccctcctctgatctcctgtaatcctcctcaggatctgtaatcccatcggggaaggaaaaagcgcccaggaggcggcaagaatgaggaggggggcctccgcggcagaggaaggcgggagggggtctggagaagtggagggtcctggccatccctggaggtcagggagatgtggtgaggaccaggtgtcaaacctggagcagggacagggcagcaaggatgggagggcgaggaggctctggtgtagggcagtgagaagagtgggccagggcaggccctcagcagtggccgggttggtgcggggcctgggggagtctgctccagatctgtccccagcacagcaggaccagaatctcataaagcaagagggcccggaccccgcctcgggcttgaaagggccatctgagccccggagcaatagaaggcaggatctgggggctctcaagctctgaggggtgtggcggagctgggattgggaggcggccagggcctcccagagagggagggggccagggtcagggcctctgagagctggaggccccttttcctctcctagtcccttcttccttgccagccaccccggcctccttgccacctgccagcacatccagtatgctcccaccttggggctgcactggcttcccccggccttgagcacctcctcctacctcacctccttaaagtcatgttcaagccatggtcacattgtgttattagcaaggccttccctgactatcagatcaaaactgcagcccccaaccctcatcacctataccctactctaggctttcttttcctatagcacctagcgccttctaacacaccacataatttgctttttccttttgtctgtctccttccactagaatgtaagttccacgagggcagggatctttgttctattcatcaatatatctcaattgatataatcccaaacactgcctggagtggagcagacactcaatgaatacttgaatgactcaactgagtgctgggttgcagaccccatgcggggctgggctgcatctgtgattctgatcccagggagctttggtggggcggggtctggtttcagggagttgaaaaggctgggaccagggccccagagctgtgtagaacaccaggctgagctggggatcccagatgctaagctggggctgagctccctgtcctgctctcccttgggccacagaaaaagagccgggaggagtctagtggtgagggcagcggcgtggagatcctggccaaccggccctacacggatgggcccgggggcagcgggcaatacacacacaaggtgtaccacgtgggctcccacatcccaggctggttccgggcactgctgcccaaggctgccctgcaggtagaagaggaatcctggaatgcctacccctacacccgaacccggtgagtgggtgagctgggcatggtccgaggccaggaggggagcggccctggtgggtacagcagtgagcctcacccgtgccttctgcccaggtacacctgccctttcgtggagaaattctccattgaaattgagacctattacctgcctgatggggggcagcagccaaacgtcttcaacctgagcggggccgagaggagacagcgcatcctgggtgaggcctggagctatggggggaccctggcgcccctctcaggctcctggctgcctcagtgggcagcctctgagaagtcccagccctctccaggcctcatgtcctgtctgcaaaaggacgggaactgtcatccagtcccaagagggtgccaggagcgggggctcaaaggggctggcgctgctcaatgcttgccgaactccctcagacaccatcgacatcgtgcgggatgcagtggccccaggcgagtacaaagcagaagaggacccccggctttatcactcggtcaagacgggccgagggccactgtctgatgactgggcacggacggcggcacagacggggccccttatgtgtgcctataagctgtgcaaggttgagttccgctactggggcatgcaagccaagatcgagcagttcatccatgatgtaggtgagcacccagctgcgggaggtcccacttacccagcatgccccagaccccatgtttagggccagggatgctcccatccactggggacacagaagcagaaagccatcgtttccatttgaggtggggagcactagggcagaagcggccgcacagcctagccaggcatccacagagcaggaagctggtaacatgatctacaaggtccatactggctctgacattcagaaatgctgctgcttccattaagattctaagattctccatcatcctatgagttagatgagacttagagacactcaggaaggtcaccggctctaactggcagcatgctaaggagtgcaggctgaggctgtgactctgatgtcattctctctgggattccccacctccactcccagtttctagtgttccagcctttggccctggtgttcaggagccccagtcccacacctcccctcaacctgaccccaccacgcctacaattcagccctgcctcagtgcccaggtcatctgcacacagagggatggtccctagttggagagaccagcggcctggcttctgtcccactactgacccccaccccatggtacctccagcaaggcactggccatctctgcactttaaatttctcttcagtaaatgaggaagaggttgagtcagatatgaagagctaatactgacagtgattgcgacacacagacccatggctaattactttttgtgcaagatctcccttaacacccacaacaccccaccaggtaatgacgatgattattcccattttacaggtgaggaaattcagcttagagaataatgaggacgccttgtcttgcatttggaaaaatgccaaaaagcacaaataagaaaaatatagccactactaagattccaatatatctcctcgcagaagtttataattatcattcaaccatcattactttatttcctagacatttaagagtttctaactttttcttctgcttaagataaaaatatcccagaatgggtatcatctttcgctacaaccttcattgagtgccaacacttccattaactgttaacaccttcattaaccatcaacaatttcattaactgttaaacccttaattaactgttaattcctcagaagtcagcaggaagccagccaaaagcaagaacaagcattggtccctgcttctggagtgatggggtggggacagtgctgagagttagggtgtgcagagagacaggaaaggcagtgggcgggggggagtcaggcaggaagacaaatgccccactttccactcccattcctggactgcactggccctgccctactttgtggctctgggtgggtggtgtccccaggggagccattatccaacctcaaggctgggcatgtagctgcggtggcagggaagcagggggagggggcagttctgacgcctgggcacctgcaggtctgcgtcgggtgatgctgcgggcccaccgccaggcctggtgctggcaggatgagtggacagagctgagcatggctgacatccgggcactggaagaggagactgctcgcatgctggcccagcgcatggccaagtgcaacacaggcagtgaggggtccgaggcccagccccccgggaaaccgagcaccgaggcccggtctgcggccagcaacactggcacccccgatgggcctgaggcccccccaggcccagatgcctcccccgatgccagctttgggaagcagtggtcctcatcctcccgttcctcctactcatcccaacatggaggtgaggctggggcacagggatgggaggaacggccctccccaggctgggctcctgggctgaggctgaggctgagctggcccggcaggggctgtgtctccccagagcttgtctgagtggcgcatgcagaacattgcccgagactctgagaacagctccgaggaagagttctttgatgcccacggtcagcactgaggccctttttgggagtggggatgtccccgagcagctcctcccaccccatgacacagccccctgtcccctcagaaggcttctcggacagtgaggaggtcttccccaaggagatgaccaagtggaactccaatgacttcattgatgcctttgcctccccagtggaggcagagggaacgccaggtaaagataccgcctaggacaccggcccccagcacccgtgtacagcaggtcatgagtttaatggcatcttaagatgagaggcaatctgaagaggtgctcattaaatacatagacgaataatgaatggtggatggatggatggatggatggatggatggatgggtggatggatggatgattagaatgtagtcatgattcagacatagcactaagaatgaaggaattaatttggactccctgaatgcttcacttgagaggtgatgtctatgctggctttggaggacttgggccagcactgtccagcagaacttctaggtccatgctgcccaaggcaataaccaccagccacactggctcccaggcactgaaaatggggttagtgtgactgaggaactgaggtttttatgtattatattttaattcatttaaatttaaatggccacttgtagctaatggccaccacattggacagggcagggttagagaagtttgccaggcaaacaggcattgtgtggagaggcagccctgactgcaataagaccagtaggagcaaaggcctggaaatacaaactgacctgggagagttggtgggaggagaagtttggaggaaggtagggactgggggcctcaggcagatgccagaactggggtgcctgaagtgccagatgaggggatcccagtggtcctctccgtccctctcactggcttcgttgccctgcagagcctggagccgaggcagctaaaggcattgaggatggggcccaagcacccagggactcagaggcgagtatggtcagccaccccatgtcaaagctccccctactcactggcccggccactgctgtgacacccactgcaccccattgttccccccagggcctggatggagccggggagctgggggctgaggcatgcgcagtccacgccctcttccttatcctgcacagcggcaacatcctggactcaggccctggaga

SEQ ID NO: 571 - DNA, 6000 bp, Homo sapiens
caccgctagtagaggtgggtgttgagggcaccagcatctccagctcctccagaaagaggctggagtgcgtctgcagagtgtcggctgggggaaggagggcaaggtcagcaggggccggccaggtggctctcctgtcttctcacccagggctccccgcacctctgccatcttcctgtggcccctctggtcaggtcctggctgaggctgcactgtggcattctctcctctcagcccagtggccagctgcactcctgccagaatgcctgttgccaccgccccaaacgctgcacacctgtgcccaacacaggcccgcttggcccatacatacctgggcatgccccgcaataaatgtctgcagcacaccccacacagatgcagcagcgcacacatgctggctgcttgtatggcagcacaccagcatcatgctgccagggggcaccctctctagcttggctaaccacccccacccaacttctaggcccaggaggtcagagggtcctggggatccagacccccccagggggaaggagcgcctggtcctgggagtggtggcctgagaggttttccatcgtctgggagcctcctcatgtcttctgctacctcctcccttcctgtgtgtgccctcctccttctcccctttatcttgtttgggggcgtacccagcagcagggatgagccatctcccagggggaacttctggtagcggggcacggtcagtggggcgatggcctggaacttcggggccagcaggggctcgaggcgtgaggcgcaggggtcagccgcgtggaagaggttgtagatctgttcacaggctgggcgcatctgggctgctggtacccagaagacagagaaagattgtggggtcagggtttcagctgggcactctgggaggtagggggtgtgggagcagcaccctgatgtctggtgtgaccccgagccagcacttcccaaactgcactccctgggaagtcagtagggccctgcttaaagtgagacaggggctgggcaccgtggctcatgcctggaatcccagtactgcgggaggcagaagcagatggatcacttgaggtcaggagttcgagaccagtctggccaacatggtgaaaccccgtctccattaaaaatacaaaaattagctgggttcagtggctcattcctggaatcccagcactgtgggaggcagaggtgggtggattacctgaggtcaggagttcgagaccagcctggccaacatggcaaaaccctgtctctactaaaaaaaatacaaaaattagctgggcatggtggcaggtgcctgtaatcccagttacttgggatgctgaggtaggagaatcacttgaacccaggaggttgcagtgagcaagatcaggccactgacactctagtctgggtgacagagcgagactctgtctcaaaaaaaaaaaaaaaggctgagaagagggcagcggcttcgatttgctgctgtggtgtctgattgaccccttctagtgcagaacatcccacgggtgtgaagctcctcccagtggctttgggagactcacccttggcgagtcccttctttctgggcctcaggttccccttctgtagccaggcctttgaattagtacagtggggaagttgctcatgcctcggatgagagggaaggccagaggaggtggggaaggaaggggcagacagagactagaggcgcccccgcagcccctaggactcaccctccagggcgggcatcacagttttgcgcagagccagcaccaggcccagtggggagccgaagaggaagaagccagagaccttgaagtcaaggcgggcagtgctgctggggccgtcaggtgcctcggaactggcagcgggtgggcagaaggccgtgcttgcccgccggggctcccaggaggaggtggttgcgggggctgcctgaaggctgtgggggaggaggggtgctcagtgctgctgcctctgtagtccatcatgtgcccagggtaggggtgatggggcagggacgtcacctgttctgagagccctcgggctcaggactggccatgtcgctggggatgcgctggggaggcaaggccgagggttctgggctgccccgacccaggccttccacaccatctgccagggggtcccgcactgggccaaactccggagagagcagctcattgttctggatggaacaggagacagaaacattcttaggcctggggaccattcgaattctacttacttagaagtgaggagcgaggcttgggggttgggcagagcagaattccagagaagacatgaactggcagggcagcagggggcctgcctgctggcagaggggtggcattccagggggcagagacctagagccagagagggcctttccgctcctgaggaggccgggtttggctatactgaccatgctcccacggcggctgctgccccgactcccggtgcccgcgttagcactgtggcagagtgcatcaaagcccaggatgccaccaacaccatctccaatcagtgcgacctgggtgggagcaggggcaccatcaggagaggccttgtcctcacccaggccagactacagtgggggctgcagtggagggcagcagatggactgtccctaaccgctgacctgcccacagaagccggcaccctcaggtgagcgcaggaaggctgagtaggcctggttggtgcgggcaatgacggtggccacggcgccctggtagcgggaggatgaggtggccagcagtggcagggcagccagtggaatgtggtcttgggagcgagacaggctgtccccatcgtggctgtaagggctcaggctgtaggagggggaaatgtgcgtgggtgaggggcttccagacccactcctgccatccaagtcccctgggcctgctggcaggccctggctctgtgggtcctctgtggggagcgttagccccaagaggcaactgaaatggagccattctccagaacaggtccagccatgccagtgaccgacccaggtgtctggcttcctgaccccttccccgctccctgccccgctccctggcctgatcctacgagttccctgcccttccacccgtggctagtacttggagacaagggcataggcggcggcgcagatgggtggacagggcaccagtcgcagcgccacgtggcccaaggcctcagggaagtggatgcgggtgacggcctcgaaggcggagctcagcgtctgcacatccgcctgcttggagttggcgtctccagggcctgagtccaggatgttgccgctgtgcaggataaggaagagggcgtggactgcgcatgcctcagcccccagctccccggctccatccaggccctggggggaacaatggggtgcagtgggtgtcacagcagtggccgggccagtgagtagggggagctttgacatggggtggctgaccatactcgcctctgagtccctgggtgcttgggccccatcctcaatgcctttagctgcctcggctccaggctctgcagggcaacgaagccagtgagagggacggagaggaccactgggatcccctcatctggcacttcaggcaccccagttctggcatctgcctgaggcccccagtccctaccttcctccaaacttctcctcccaccaactctcccaggtcagtttgtatttccaggcctttgctcctactggtcttattgcagtcagggctgcctctccacacaatgcctgtttgcctggcaaacttctctaaccctgccctgtccaatgtggtggccattagctacaagtggccatttaaatttaaatgaattaaaatataatacataaaaacctcagttcctcagtcacactaaccccattttcagtgcctgggagccagtgtggctggtggttattgccttgggcagcatggacctagaagttctgctggacagtgctggcccaagtcctccaaagccagcatagacatcacctctcaagtgaagcattcagggagtccaaattaattccttcattcttagtgctatgtctgaatcatgactacattctaatcatccatccatccacccatccatccatccatccatccatccatccatccaccattcattattcgtctatgtatttaatgagcacctcttcagattgcctctcatcttaagatgccattaaactcatgacctgctgtacacgggtgctgggggccggtgtcctaggcggtatctttacctggcgttccctctgcctccactggggaggcaaaggcatcaatgaagtcattggagttccacttggtcatctccttggggaagacctcctcactgtccgagaagccttctgaggggacagggggctgtgtcatggggtgggaggagctgctcggggacatccccactcccaaaaagggcctcagtgctgaccgtgggcatcaaagaactcttcctcggagctgttctcagagtctcgggcaatgttctgcatgcgccactcagacaagctctggggagacacagcccctgccgggccagctcagcctcagcctcagcccaggagcccagcctggggagggccgttcctcccatccctgtgccccagcctcacctccatgttgggatgagtaggaggaacgggaggatgaggaccactgcttcccaaagctggcatcgggggaggcatctgggcctgggggggcctcaggcccatcgggggtgccagtgttgctggccgcagaccgggcctcggtgctcggtttcccggggggctgggcctcggacccctcactgcctgtgttgcacttggccatgcgctgggccagcatgcgagcagtctcctcttccagtgcccggatgtcagccatgctcagctctgtccactcatcctgccagcaccaggcctggcggtgggcccgcagcatcacccgacgcagacctgcaggtgcccaggcgtcagaactgccccctccccctgcttccctgccaccgcagctacatgcccagccttgaggttggataatggctcccctggggacaccacccacccagagccacaaagtagggcagggccagtgcagtccaggaatgggagtggaaagtggggcatttgtcttcctgcctgactcccccccgcccactgcctttcctgtctctctgcacaccctaactctcagcactgtccccaccccatcactccagaagcagggaccaatgcttgttcttgcttttggctggcttcctgctgacttctgaggaattaacagttaattaagggtttaacagttaatgaaattgttgatggttaatgaaggtgttaacagttaatggaagtgttggcactcaatgaaggttgtagcgaaagatgatacccattctgggatatttttatcttaagcagaagaaaaagttagaaactcttaaatgtctaggaaataaagtaatgatggttgaatgataattataaacttctgcgaggagatatattggaatcttagtagtggctatatttttcttatttgtgctttttggcatttttccaaatgcaagacaaggcgtcctcattattctctaagctgaatttcctcacctgtaaaatgggaataatcatcgtcattacctggtggggtgttgtgggtgttaagggagatcttgcacaaaaagtaattagccatgggtctgtgtgtcgcaatcactgtcagtattagctcttcatatctgactcaacctcttcctcatttactgaagagaaatttaaagtgcagagatggccagtgccttgctggaggtaccatggggtgggggtcagtagtgggacagaagccaggccgctggtctctccaactagggaccatccctctgtgtgcagatgacctgggcactgaggcagggctgaattgtaggcgtggtggggtcaggttgaggggaggtgtgggactggggctcctgaacaccagggccaaaggctggaacactagaaactgggagtggaggtggggaatcccagagagaatgacatcagagtcacagcctcag

SEQ ID NO: 572 - DNA, 6000 bp, Homo sapiens
cagcactttgggaggctgaggcaggcggatcacaaggtcaggagatcgagaccatcctggctaacacagtgaaaccccgtctctactaaaaatacaaaaaattagccgggtgtggtggcgggcgcctgtagtcccagctactctggaggctgaggaaggagaatggcgtgaacccgggaggtggagcttgcagtgagccaagatcgtgccactgcactccagcctgggcgacagagccagactccatctcaaaaaaaaaaaaagaaaaaagaaaatatcttaagctttgaggaccacatagtctctgttgcaatcactcatttgggccactgtagcacaaaaacaaacatagataacacacacatgagtgagcatggctggggcccaataaaactttatttacacaagcaggtgatgaaccacggtccatagtgtcccaatccttgatttagatggtgaactatcatgagctttcgttgccctctccggtagaaatatgggagaaaccacagagagaaacagagatttcaggaaaacagtaaaattaaacaaataaagtgagacgtcgcccctcctggaggctgcaggctgtgttgaacctgtgtgtgtctgggtgtacagggatgtgagtagatgcgcgtggagatgtgtgtgtgggtggagactgagcgtggctggaggtggctgtggtaggatgccagaaggaaggagtttgcattcagttcctttattagtactctctggagttgttgaggggatgtcactgctgaacactgaccctggtgcaggctaaaccgaagttagcctctgctaccctctgctgggtgaggcactggggagaacagtgggactgaatggggcgggctttctccctcccacacttcccctggaaacacccagcaccagcacattagaacatggggagccaccttccccagcgctgcttcccaaggttcggaaggggaaactctgacctcaagctctgtttgaagagcgatagcaaaggggagaggttggctgtggtttggtggtgcttatctccttcctttgctttgaaaccacaggctggcatactacccgagagaatgaccagtgccaccaagggaagggcacaagctcactggttccaggggagacatctcaggggacaggaacatcccctgacgctgaatgagtgcagcacacagacggagaatacacacaagagaaatcatgaggacatgagagaaggcactggcaataggaagttacaaaaagcaacaaaaagaaagagtagatataaaaacaataatcgaagaaagccaacaacagatgggatgaatcatacgaggtatgcgactcatggatgaagaggtgagtgatgagatcagctggggaactctctcccaggaaagacaaaccagaagaaacacaaatgacatcgaagtggccaggcgcagtggctcacgcctgtaatcccagcactttgggagcccgaggcaggtggatcacttgaggtcaggagtttgagaccagcctggccaacatgatgaaaccctgtctctactaaaaatacaaaaattagccaggtgtggtggcaggcacctgtgatcccagctactcaggaggctgaggcaggagaatcacttgaaccaggaagcagagattgcagtgagctgagatggtgccagtgcactccagcctgggcagtagagtgacagcctgtctaaaaaaaaaaaaaggcagtaaagtgataggaggatagattagaagggccattttccagatagtgcaaggaagaaagaagaagaagaagaggaggaggaggaggaagaggaagaagacggagaagagggcatctcagaagaaacaatggagatacatttctcaaaactgaagaaagatgaccaacctcagaccgaagggccaagaggccaaaccagagagacagcttggcaagccaggaagagcaccaaagctagacaattagagtgaaattaaagaaaacccaaggtgacaaaaatttaaaaagcttccttgtgacctcagtccattggtgaaaatttaaaaaaaaaaaaaaaaaaaaaaggacagcctgggcaacatggtgaaaccccatctctacaaaaaatacaaaaattagctgggtgtggtggcacatgcctgtagtcccagctattcgagaggctaagtaaggcaggaggatcacttggggccaagagttccagaccagctgcggcaacatacatgttgtgggaagtcaggcaccccgaacggagggactggctgaagccatggcagaagaacataaattgtgaagatttcatggacatttatcacttccccaatcaatactcttgtgatttcctatgcctgtctttaatctcttaatcctgtcatcttcgtaaactgaggatgtatgtcgccttaggaccctgtgatgactgcgttaactgcacaaattgtttgtagaggacaattgttgtgtgtttgagcaatgtgaaatctgggcatcttaagaacaggataacagcaattttcagggaacaagggagataaccttaaagtctggctgcctgtgggctgggcaggacagagccatacttctcttattaccgcaaacaggtaagagaaatatcgctgaattctttccccagtaaggaatattaataattaacagccctgagaaaagaatgcattcccagggccgggccactgaaatggcctccctgagagtgcctgcctttattcagaagtagaaagggatgaaacacgccctagtctcctgcagcacccccagacttgataggattaggaaattccagcctggcaaattctagtcagaccggttctctgctcttgaaccctgacagtgcgtgcacagtgggacctggaagttcattagtgattctagtttcgccgtgaccttctgccctgtgatcttttgtcgcccttgaagtatgtgatctctgtgacccacaccctgttcgtgcactccctcctctttgaaaattgctaataaaaactcgctggttttacggctcagggggcatcacggaacctgcggacatgtgatgtctcccctggacacccggctttaaaatgtctctcttttgtactctttccctttatttctcaggccagccgacacttagggaaaataggaaaggacccacgtgaaatattgggggctgaatttcccccgataataagtctcttaaaaaagacttttaaatgaaatttctttgttttttaacttttatttctgttttgggggtacatgtgaaggtttgttacataagtaaactcgtgtcttcggtgtttgttgtacagaatatttcatcacccaggtattatgccgagtacccaatagttctcttttctgctcctctccttcctcccatcctgcaccctggagtcaaccacagtgtctgttgtttccttgtttgtgttataagttctcatcatttagctcccacttacaagtgagaacatccagtatttggatttctgttcctgcattagtttgctaaggataatagcctctagctccatccatgttcccacaaaagacatgatctagttctttttaatggctgcattaaatgaagttttaaagatacaacataaacaccaacctcttccccaccacaaaaatcccttgctgaatttgattacacttaaattaacgagttttgtttcatgaaagactccttggacaaacttgacagttgatggaataggagaagctgtctgtcatgtctaaagccaacaagagatcaatatctagaataaatggagatctgcaaatcaacagaaagtaggcagcaaagccaaagaaaatagcctaaggcacagccactaaaaggaacgtgatcatgtcctttgcagggacatgggtggagctggaagccgttagcctcagcaaactcacacaggaacagaaaaccagcgagaccgcatggtctcacttataagtgggagctgaacaatgagaacacatggtcacatggcggcgatcaacacacactggtgcctgttgagcggggtgctggggagggagagtaccaggaagaatagctaagggatactgggcttaatacctgggtgatgggatgatctgtacagcaaaccatcatggcgcacacacctatgtaacaaacctgcacatcctctacatgtaccccagaacttcaaataaaagttggacggccaggcgtggtggctcacgcctgtaatcccagcactttgggaagccgaggcgtgcagatcacctaaggtcaggagttcgagaccagcccggccaacatggtgaaaccccgtctctactaaaaatacaaaaatcagccagatgtggcacgcacctataattccacctactcgggaggctgaagcagaattgcttgaacccgagaggcggaggttgcagtgagccgccgagatcgcgccactgcactccagcctgggccacagcgtgagactacgtcataaaataaaataaaataacacaaaataaaataaaataaaataaaataaaataaaataaaataaaataaaataaaataaaaaaataaaataaaataaaataaaataaagcaatttcctttcctctaagcggcctccacccctctcccctgccctgtgaagcgggtgtgcaagctccgggatcgcagcggtcttagggaatttccccccgcgatgtcccggcgcgccagttcgctgcgcacacttcgctgcggtcctcttcctgctgtctgtttactccctaggccccgctggggacctgggaaagagggaaaggcttccccggccagctgcgcggcgactccggggactccagggcgcccctctgcggccgacgcccggggtgcagcggccgccggggctggggccggcgggagtccgcgggaccctccagaagagcggccggcgccgtgactcagcactggggcggagcggggcgggaccacccttataaggctcggaggccgcgaggccttcgctggagtttcgccgccgcagtcttcgccaccagtgagtacgcgcggcccgcgtccccggggatggggctcagagctcccagcatggggccaacccgcagcatcaggcccgggctcccggcagggctcctcgcccacctcgagacccgggacgggggcctaggggacccaggacgtccccagtgccgttagcggctttcagggggcccggagcgcctcggggagggatgggaccccgggggcggggagggggggcagactgcgctcaccgcgccttggcatcctcccccgggctccagcaaacttttctttgttcgctgcagtgccgccctacaccgtggtctatttcccagttcgaggtaggagcatgtgtctggcagggaagggaggcaggggctggggctgcagcccacagcccctcgcccacccggagagatccgaacccccttatccctccgtcgtgtggcttttaccccgggcctccttcctgttccccgcctctcccgccatgcctgctccccgccccagtgttgtgtgaaatcttcggaggaacctgtttccctgttccctccctgcactcctgacccctccccgggttgctgcgaggcggagtcggcccggtccccacatctcgtacttctccctccccgcaggccgctgcgcggccctgcgcatgctgctggcagatcagggccagagctggaaggaggaggtggtgaccgtggagacgtggcaggagggctcactcaaagcctcctgcgtaagtgaccatgcccgggcaaggggagggggtgctgggccttagggggctgtgactaggatcgggggacgcccaagctcagtgcccctccctgagccatgcctcccccaacagctatacgggcagctccccaagttccaggacggagacctcaccctgtaccagtccaataccatcctgcgtcacctgggccgcacccttggtgagtcttgaacctccaagtccagggcaggcatgggcaagcctctgcccccggagccc

SEQ ID NO: 573 - DNA, 6000 bp, Homo sapiens
ctctgttgcaatcactcatttgggccactgtagcacaaaaacaaacatagataacacacacatgagtgagcatggctggggcccaataaaactttatttacacaagcaggtgatgaaccacggtccatagtgtcccaatccttgatttagatggtgaactatcatgagctttcgttgccctctccggtagaaatatgggagaaaccacagagagaaacagagatttcaggaaaacagtaaaattaaacaaataaagtgagacgtcgcccctcctggaggctgcaggctgtgttgaacctgtgtgtgtctgggtgtacagggatgtgagtagatgcgcgtggagatgtgtgtgtgggtggagactgagcgtggctggaggtggctgtggtaggatgccagaaggaaggagtttgcattcagttcctttattagtactctctggagttgttgaggggatgtcactgctgaacactgaccctggtgcaggctaaaccgaagttagcctctgctaccctctgctgggtgaggcactggggagaacagtgggactgaatggggcgggctttctccctcccacacttcccctggaaacacccagcaccagcacattagaacatggggagccaccttccccagcgctgcttcccaaggttcggaaggggaaactctgacctcaagctctgtttgaagagcgatagcaaaggggagaggttggctgtggtttggtggtgcttatctccttcctttgctttgaaaccacaggctggcatactacccgagagaatgaccagtgccaccaagggaagggcacaagctcactggttccaggggagacatctcaggggacaggaacatcccctgacgctgaatgagtgcagcacacagacggagaatacacacaagagaaatcatgaggacatgagagaaggcactggcaataggaagttacaaaaagcaacaaaaagaaagagtagatataaaaacaataatcgaagaaagccaacaacagatgggatgaatcatacgaggtatgcgactcatggatgaagaggtgagtgatgagatcagctggggaactctctcccaggaaagacaaaccagaagaaacacaaatgacatcgaagtggccaggcgcagtggctcacgcctgtaatcccagcactttgggagcccgaggcaggtggatcacttgaggtcaggagtttgagaccagcctggccaacatgatgaaaccctgtctctactaaaaatacaaaaattagccaggtgtggtggcaggcacctgtgatcccagctactcaggaggctgaggcaggagaatcacttgaaccaggaagcagagattgcagtgagctgagatggtgccagtgcactccagcctgggcagtagagtgacagcctgtctaaaaaaaaaaaaaggcagtaaagtgataggaggatagattagaagggccattttccagatagtgcaaggaagaaagaagaagaagaagaggaggaggaggaggaagaggaagaagacggagaagagggcatctcagaagaaacaatggagatacatttctcaaaactgaagaaagatgaccaacctcagaccgaagggccaagaggccaaaccagagagacagcttggcaagccaggaagagcaccaaagctagacaattagagtgaaattaaagaaaacccaaggtgacaaaaatttaaaaagcttccttgtgacctcagtccattggtgaaaatttaaaaaaaaaaaaaaaaaaaaaaggacagcctgggcaacatggtgaaaccccatctctacaaaaaatacaaaaattagctgggtgtggtggcacatgcctgtagtcccagctattcgagaggctaagtaaggcaggaggatcacttggggccaagagttccagaccagctgcggcaacatacatgttgtgggaagtcaggcaccccgaacggagggactggctgaagccatggcagaagaacataaattgtgaagatttcatggacatttatcacttccccaatcaatactcttgtgatttcctatgcctgtctttaatctcttaatcctgtcatcttcgtaaactgaggatgtatgtcgccttaggaccctgtgatgactgcgttaactgcacaaattgtttgtagaggacaattgttgtgtgtttgagcaatgtgaaatctgggcatcttaagaacaggataacagcaattttcagggaacaagggagataaccttaaagtctggctgcctgtgggctgggcaggacagagccatacttctcttattaccgcaaacaggtaagagaaatatcgctgaattctttccccagtaaggaatattaataattaacagccctgagaaaagaatgcattcccagggccgggccactgaaatggcctccctgagagtgcctgcctttattcagaagtagaaagggatgaaacacgccctagtctcctgcagcacccccagacttgataggattaggaaattccagcctggcaaattctagtcagaccggttctctgctcttgaaccctgacagtgcgtgcacagtgggacctggaagttcattagtgattctagtttcgccgtgaccttctgccctgtgatcttttgtcgcccttgaagtatgtgatctctgtgacccacaccctgttcgtgcactccctcctctttgaaaattgctaataaaaactcgctggttttacggctcagggggcatcacggaacctgcggacatgtgatgtctcccctggacacccggctttaaaatgtctctcttttgtactctttccctttatttctcaggccagccgacacttagggaaaataggaaaggacccacgtgaaatattgggggctgaatttcccccgataataagtctcttaaaaaagacttttaaatgaaatttctttgttttttaacttttatttctgttttgggggtacatgtgaaggtttgttacataagtaaactcgtgtcttcggtgtttgttgtacagaatatttcatcacccaggtattatgccgagtacccaatagttctcttttctgctcctctccttcctcccatcctgcaccctggagtcaaccacagtgtctgttgtttccttgtttgtgttataagttctcatcatttagctcccacttacaagtgagaacatccagtatttggatttctgttcctgcattagtttgctaaggataatagcctctagctccatccatgttcccacaaaagacatgatctagttctttttaatggctgcattaaatgaagttttaaagatacaacataaacaccaacctcttccccaccacaaaaatcccttgctgaatttgattacacttaaattaacgagttttgtttcatgaaagactccttggacaaacttgacagttgatggaataggagaagctgtctgtcatgtctaaagccaacaagagatcaatatctagaataaatggagatctgcaaatcaacagaaagtaggcagcaaagccaaagaaaatagcctaaggcacagccactaaaaggaacgtgatcatgtcctttgcagggacatgggtggagctggaagccgttagcctcagcaaactcacacaggaacagaaaaccagcgagaccgcatggtctcacttataagtgggagctgaacaatgagaacacatggtcacatggcggcgatcaacacacactggtgcctgttgagcggggtgctggggagggagagtaccaggaagaatagctaagggatactgggcttaatacctgggtgatgggatgatctgtacagcaaaccatcatggcgcacacacctatgtaacaaacctgcacatcctctacatgtaccccagaacttcaaataaaagttggacggccaggcgtggtggctcacgcctgtaatcccagcactttgggaagccgaggcgtgcagatcacctaaggtcaggagttcgagaccagcccggccaacatggtgaaaccccgtctctactaaaaatacaaaaatcagccagatgtggcacgcacctataattccacctactcgggaggctgaagcagaattgcttgaacccgagaggcggaggttgcagtgagccgccgagatcgcgccactgcactccagcctgggccacagcgtgagactacgtcataaaataaaataaaataacacaaaataaaataaaataaaataaaataaaataaaataaaataaaataaaataaaataaaaaaataaaataaaataaaataaaataaagcaatttcctttcctctaagcggcctccacccctctcccctgccctgtgaagcgggtgtgcaagctccgggatcgcagcggtcttagggaatttccccccgcgatgtcccggcgcgccagttcgctgcgcacacttcgctgcggtcctcttcctgctgtctgtttactccctaggccccgctggggacctgggaaagagggaaaggcttccccggccagctgcgcggcgactccggggactccagggcgcccctctgcggccgacgcccggggtgcagcggccgccggggctggggccggcgggagtccgcgggaccctccagaagagcggccggcgccgtgactcagcactggggcggagcggggcgggaccacccttataaggctcggaggccgcgaggccttcgctggagtttcgccgccgcagtcttcgccaccagtgagtacgcgcggcccgcgtccccggggatggggctcagagctcccagcatggggccaacccgcagcatcaggcccgggctcccggcagggctcctcgcccacctcgagacccgggacgggggcctaggggacccaggacgtccccagtgccgttagcggctttcagggggcccggagcgcctcggggagggatgggaccccgggggcggggagggggggcagactgcgctcaccgcgccttggcatcctcccccgggctccagcaaacttttctttgttcgctgcagtgccgccctacaccgtggtctatttcccagttcgaggtaggagcatgtgtctggcagggaagggaggcaggggctggggctgcagcccacagcccctcgcccacccggagagatccgaacccccttatccctccgtcgtgtggcttttaccccgggcctccttcctgttccccgcctctcccgccatgcctgctccccgccccagtgttgtgtgaaatcttcggaggaacctgtttccctgttccctccctgcactcctgacccctccccgggttgctgcgaggcggagtcggcccggtccccacatctcgtacttctccctccccgcaggccgctgcgcggccctgcgcatgctgctggcagatcagggccagagctggaaggaggaggtggtgaccgtggagacgtggcaggagggctcactcaaagcctcctgcgtaagtgaccatgcccgggcaaggggagggggtgctgggccttagggggctgtgactaggatcgggggacgcccaagctcagtgcccctccctgagccatgcctcccccaacagctatacgggcagctccccaagttccaggacggagacctcaccctgtaccagtccaataccatcctgcgtcacctgggccgcacccttggtgagtcttgaacctccaagtccagggcaggcatgggcaagcctctgcccccggagcccttttgtttaaatcagctgccccgcagccctctggagtggaggaaactgagacccactgaggttacgtagtttgcccaaggtcaagcctgggtgcctgcaatccttgccctgtgccaggctgcctcccaggtgtcaggtgagctctgagcacctgctgtgtggcagtctctcatccttccacgcacatcctcttcccctcctcccaggctggggctcacagacagccccctggttggcccatccccagtgactgtgtgttgatcaggcgcccagtcacgcggcctgctcccctccacccaacc

SEQ ID NO: 574 - DNA, 6000 bp, Homo sapiens
agggcattttgagtgtagacgtgagtgcttaaacatatttgggtttctctctcaggttttaaatgtttcaaatgtaattgttgctcatcagtgcagttatcaatgcaattttatattccttgaggggagaaagaggggtcttattgtacatgtccaaggggggtgataagagtattatctgtttaatttaattggaacaaaccattgtcttaacgcagccatggtttgaatttgttatcttgggctgaccggtgcatgtaaatacagtatgctctttggatgtaaatcttagaaatgcagtgtgaatgtaggttatcattaataaaacattaaccccagtctactacaagatttgtttctgtctcttttgttatattaaggggattataagtcaaggaccaagttcagatacttgagacaaagtggaaagtctcagcatatggaaacaaggccttggaggagaccatggacatcaccaagttcatgtgctgggctggaaagaaaagcctgttgattttcacttgctgtgcatttattcatccattccattgcctcaatgctgagaacagtgcctgacacataaaagatgctcaataaatatgttaaaagtaatgcatgaattccatttttctgtttttcttgagcacctgtattaggccattctcacattgctgtaaagaaatagctgagactgggtaatttataagaggtttaattggctctcagttctgcaggctatacaggaagcatggaggcatctgcttctggggaggcctcaaacagctttttactcatggtggaaggcaaagggggagcaggcattctacatggtgaaaggagacagagagagaaagagaggaggtgctctcttacacatttgcaaacaaccagatctgagagagagagaggaggtgctctcttacacacttgcgaacaaccagatctcacaggaactcacgcactctatggtgaggacagtagcaagagggatggtgctgttcatgagaaatgcacgcccatgatccagtcacttcccatcaggccccacctccaacattagggattaccactgaacctgagatttgggtggggacacacatccaaaccatatcagcgcctgttctaggcactggggagacagcagtgaccccaccaggttctggctgtctcattagtccatttttacattgctgtaaagaacttcttgagactgggtaagtataaaggaaagacagtcaattgactcacagttcagcatggctggggaggcctcaggaaacttataatcatggcagaaggtgaaggggaagcaagaaacctgttacatggcagcagaggagagagagtgagggggaattgccgaacacttttaagccatcagatcttgtgagaactcacttcttattgcaagaacagcgtaggggaaccgcctccttgatccaatcacctcccaccaggcccctcccttgacacagagggattacaattcaagatgagatttgggtggggacacagagccaaaccatatcacagaggaaaaagagaacaagccaaccagttgaaggattttaagtgttctgaggcaactaagaggatcattgggagggggtggtagctggcagggaggttgacccacttagagtgggttgagctgagacctgagagactcgacggagccagcccggccagtgcagcagggcagcaagcatctaggagcagcaggtgcagagcctccaggcttgattgcaacccgtgggtgacccccacaggtggctgtgtatgcctggcatgatgctactcagtagacgtctgattctgattagtaaacgaatgaacggtgcaaccttgtgggttactctctcgcttgggccactcaagctatgcataattcttgggctcttcgatttattatttttattattttttctgcttctgtgagtgttttttgttgttgttgtttttgtttgtttgatttttgagatggagtttcaatctttttgcccaggctaaagtacaatggtgcaatctcagctcactgcaacctccgcctcccaggttcaagcaattctcctgcctcagcctcacaaatagctgggattgcaggtgtgcaccaccatgcctagctaattttgtatttttagtagagacagggtttcaccatgttagtcaggctggtcttgaactcctgactttaagtgatctgaccaccttggcctcccagagtgctgggattacaggcatgagccaccacgcccagccccaggcaaaattttcttgatttttgaatgttaaatgtacaactaaatagtacacggtgttgctgtgccttgggtactaccctttaaaaatttagaaaagtatttaatttttaaaagtgagattagaaagctgatgttttacattctttatttttaccaaaacagtacctgagtagacagtacctgaggctgtctccccagcacccactcccaccagtccctctacaccctttgcagttttcgccatcacttgaattaaactttcacctcctcttgattaaacagtgatatctattgactccttaaagatgaaatagctcattccccacccaaaatttgagactttcattgtatttgtgagtttttttttttttttctgagagggagcctttctctgttggtcaggctggagtacagtgacacaatctcagctcactgcaacccccatctcccaggttcaagcctcagccttctatgtagctgggactacaggcgtgcgccactacgcccagctagtttttgtattttttagtagagacggagtttcactatatgttggccaggctggtctcgaactcctgacctcaggtgatccacccgcctcggcctcccaaagtgctgggattacagacgtgagccaccacgcccagccgtatttgttacttctatttcgggaccaactccatcagttgcacctgtaagctgcgtcaccaaggaccgggagtgggtgcaaggctgggaacgtgcggtgcaagcccctgccctctgtccacccgcagcgtcccaggccgggatctgtcttgagagctcgagtgtagaaaaatgttttattttattttatttatttttttgagacggagtctagctctgtggcacaggctggagtgcagtggcgggatctcggctcactgcaacctccacctcccgggctcaagcgattctcctgcctcagccttccaagtagctgggattacaggcgcgtgccaccacggccagctaatttttgtatttttagtagagacggggtttcaccatgttgcccaggctggttttgaactcctgacctcaagtaatccgcctgcctcggcctcccaaagtgctgggactacaggcgtgagcaaccacgcctggccagaaaaatataactgaagcccaaggtcagaagccaagctaggcagtcccacttagcgctgcccgagttgatggggacctcagtttccccacctgagcctggatcggctgaacctgggagtgcctcccctgacccgctctggcaacagcggcagtccaggccccgcccctcgcgactctgtctcctcccgccccagaccacgcccaccacacctccctggccccgcctttacctccccgccccgacctcgactccgccccacgcccaggccccgcccactgcccgggcgcctcttcccctccccccaggttcctgtccctcacccttcccccttctccaaccgccaacggccgcctgcgcctgaggcccggcccacgccccatcccgctcgctccacgctgcggcagccccggcggccccaggtgcgtccctccgaggaggaatgacggggcggtccccgggctgggcctcggctctgcaggcggggatgggggctgccgggccgggtcgggcccctgcgggtgggcggagggcggcgggccgtgggcgaggccgcccctcacctggtcgcacctcacctggccccccctcccctggctgctcctcacctgaccccctcctcggccgcccctcacctggccccctcccctgggcgcccctcacctgacccccaccccggccggcccctctcctggccgccccttacctggtcgcccctcccctgactccctcccctggtcgctcctcacctggccgcccctcacctggccccctcccctggccgcccctcccctggtcgcccctcccgtgaccccctccccggccgcccctcccctggtcgccgctcacctgaccgcctcccctggtcgctcctcacctggccgcccctcacctggccgcccctcacctaatcgcccctcatctggtcgcccctcccctgaccccctcacctggtcgcccttccccgggcccctcacctggccctccctcaccaggccgccccctcccctagccgcccctcacctggtcccctcccctggccgcccctcccttggctgcccctcccttggctgtcccctttcctggccgcccctcccctcgtcctctcctctggctgcctctcacctggccgcgtgttgcaggtgcgcggcccccgccatcccgccccgccgccctgcgccatggaggagggccctctgccgggcgggctgcccagccccgaggatgcgatggtgacggagctcttaagccccgagggtccgttcgcttcggagaacatcggcctgaaggcccccgtgaagtacgaggaggacgagttccacgtcttcaaagaagcgtacctgggcccggcggaccccaaggaacccgtcctgcacgcgttcaaccccgcgctgggcgccgactgcaagggccaggtcaaggcgaagctcgcggggggcgacagcgacggcggggagctcctcggggagtaccccgggatcccagagctcagcgcgctggaggacgtcgcgctcctgcaggccccgcagccgcccgcctgcaacgtgcacttcctgtcctcgctgctacccgcgcaccgcagcccggcggtgttgcccctgggcgcctgggtcctggaaggagcctcccacccgggcgtccgcatgatcccagtaagaaccgcctggggaatgggcacagctccccctccatcccttccccaacccatctgaggctgctagtgtaccccaggatttccctctacaagcattttccctggtgacaccacacacagcccaccggagtcactgattctcggtagagcgtatactctttgtcgtcttcctaatccaacatgcatcggcccagccaagccctttcccctggagggaattctgccctgcaccagtcgtccaaagctgacctaaccatgcagacggcggacaacaaaaaaagggggaaagctaggacgtaggttcccttgggccctgttgctatccttggcttaaggagagaggcccgctgtctgctggtaactattgtctgtgaaaacaaacgcaatgtggtggagggttggcgtgtttgcatcttgcattttttttttcctttaactttaccaggcttggaatccacagcaaggactcagagttaatacttggattttccgggccttgaagtcaagatgtgagatcttccctttgctaatgagtaatagctcttcaagcatatgcaatgtaaatcagagcctaaagaaatgcttgccagctctcagccgactgccctctctagctgtagatgaccgctgataattttccgctttgttcttgccaaaactaatgagttttcaaaggaaacaaagggtcccaggaaaatgtgttctcgacccctcaaaaaggacccagctcagaaaacgagaccactcatccatgaggtcattttagtaagttgtagatgaagcgtttgtgggacacaatgcttgagtcagtattgagatggctggagcctgaccctgtatcataagccagagcagcaggagcttggatttctgctcttccggttttctgttatggtaattgccagtccttagtgtacaggaaaaggatgggcagaggctggggcctccactgacct

SEQ ID NO: 575 - DNA, 6000 bp, Homo sapiens
tcaagtgacagtgctaggtgttcacccagcctgtccttcagataggagtgccttcacgaaagcgtctcatggaccacaaagcaattatgcactgagtcatcttcagtatttaatgcaaaaatgaagcatcatggaatgaaattcccactgtctgtcatgacaagcttagctgtccattgttttaaattgtgtatttatttttttgaccacttggttctagttgggcctgactccttcagagtgctgcaccccgatagtacaacagcgatggctgaactgttggagtcgatggaaggtgcttgccggagaacacgtgcctttttttttttttttttttttgagatggagtttcactcttgttgcccaggctggagtgcagtggtgcaatctcggctcactgcagcatctgccttgcaggttcaagcgattctcctgtctcagcctcccaagtagctgggattacacgcccaacaccatgccctgctaatttttgtatttttagtagagacggggtttcatcatattggtcaggctggtctcgaactcctgacctcaggtgatccacctgcctcagcctcccaaagtgctgggattacaggcatgagccaccatgcgcggcccacatgcatgttttatgtatgtatacttcatgatgtaaaaatcccacctttatgggccaaagattttttttctcctgaaagcaagaaaaaatgaaaacaaaagacaaaaaaaaaaaaaaaagcgtccaggcgcggtggctcatgcgtgtaatcccagcactttgggaggccaaggcgggcggatcacgaggtcaggagatggagaccatcctggctaacacggtgaaaccccgtctctactaaaaattcaaaaaatgagccgggcgtggtggcgggcgcctgtagtcccagctactcaggaggctgaggcaggagaatggcgtgaacccgggaggcggagcttgcagtgagccgagatcgctccactgcactccagcctgggcgacagagcgagactccgtctaaaaaaaaaagcaaaaacaaaccaacaacaaaagcccctgactgtccgtcaagcaggcagcggggatgtagctctctctgccctgggcaagaatagcacttcccgttaaaagccagcagccggcgtcagtccctatcagagccagctagatcatgcactgttgaccactgagcaatctgtgttacactagagttcacagggcattttgagtgtagacgtgagtgcttaaacatatttgggtttctctctcaggttttaaatgtttcaaatgtaattgttgctcatcagtgcagttatcaatgcaattttatattccttgaggggagaaagaggggtcttattgtacatgtccaaggggggtgataagagtattatctgtttaatttaattggaacaaaccattgtcttaacgcagccatggtttgaatttgttatcttgggctgaccggtgcatgtaaatacagtatgctctttggatgtaaatcttagaaatgcagtgtgaatgtaggttatcattaataaaacattaaccccagtctactacaagatttgtttctgtctcttttgttatattaaggggattataagtcaaggaccaagttcagatacttgagacaaagtggaaagtctcagcatatggaaacaaggccttggaggagaccatggacatcaccaagttcatgtgctgggctggaaagaaaagcctgttgattttcacttgctgtgcatttattcatccattccattgcctcaatgctgagaacagtgcctgacacataaaagatgctcaataaatatgttaaaagtaatgcatgaattccatttttctgtttttcttgagcacctgtattaggccattctcacattgctgtaaagaaatagctgagactgggtaatttataagaggtttaattggctctcagttctgcaggctatacaggaagcatggaggcatctgcttctggggaggcctcaaacagctttttactcatggtggaaggcaaagggggagcaggcattctacatggtgaaaggagacagagagagaaagagaggaggtgctctcttacacatttgcaaacaaccagatctgagagagagagaggaggtgctctcttacacacttgcgaacaaccagatctcacaggaactcacgcactctatggtgaggacagtagcaagagggatggtgctgttcatgagaaatgcacgcccatgatccagtcacttcccatcaggccccacctccaacattagggattaccactgaacctgagatttgggtggggacacacatccaaaccatatcagcgcctgttctaggcactggggagacagcagtgaccccaccaggttctggctgtctcattagtccatttttacattgctgtaaagaacttcttgagactgggtaagtataaaggaaagacagtcaattgactcacagttcagcatggctggggaggcctcaggaaacttataatcatggcagaaggtgaaggggaagcaagaaacctgttacatggcagcagaggagagagagtgagggggaattgccgaacacttttaagccatcagatcttgtgagaactcacttcttattgcaagaacagcgtaggggaaccgcctccttgatccaatcacctcccaccaggcccctcccttgacacagagggattacaattcaagatgagatttgggtggggacacagagccaaaccatatcacagaggaaaaagagaacaagccaaccagttgaaggattttaagtgttctgaggcaactaagaggatcattgggagggggtggtagctggcagggaggttgacccacttagagtgggttgagctgagacctgagagactcgacggagccagcccggccagtgcagcagggcagcaagcatctaggagcagcaggtgcagagcctccaggcttgattgcaacccgtgggtgacccccacaggtggctgtgtatgcctggcatgatgctactcagtagacgtctgattctgattagtaaacgaatgaacggtgcaaccttgtgggttactctctcgcttgggccactcaagctatgcataattcttgggctcttcgatttattatttttattattttttctgcttctgtgagtgttttttgttgttgttgtttttgtttgtttgatttttgagatggagtttcaatctttttgcccaggctaaagtacaatggtgcaatctcagctcactgcaacctccgcctcccaggttcaagcaattctcctgcctcagcctcacaaatagctgggattgcaggtgtgcaccaccatgcctagctaattttgtatttttagtagagacagggtttcaccatgttagtcaggctggtcttgaactcctgactttaagtgatctgaccaccttggcctcccagagtgctgggattacaggcatgagccaccacgcccagccccaggcaaaattttcttgatttttgaatgttaaatgtacaactaaatagtacacggtgttgctgtgccttgggtactaccctttaaaaatttagaaaagtatttaatttttaaaagtgagattagaaagctgatgttttacattctttatttttaccaaaacagtacctgagtagacagtacctgaggctgtctccccagcacccactcccaccagtccctctacaccctttgcagttttcgccatcacttgaattaaactttcacctcctcttgattaaacagtgatatctattgactccttaaagatgaaatagctcattccccacccaaaatttgagactttcattgtatttgtgagtttttttttttttttctgagagggagcctttctctgttggtcaggctggagtacagtgacacaatctcagctcactgcaacccccatctcccaggttcaagcctcagccttctatgtagctgggactacaggcgtgcgccactacgcccagctagtttttgtattttttagtagagacggagtttcactatatgttggccaggctggtctcgaactcctgacctcaggtgatccacccgcctcggcctcccaaagtgctgggattacagacgtgagccaccacgcccagccgtatttgttacttctatttcgggaccaactccatcagttgcacctgtaagctgcgtcaccaaggaccgggagtgggtgcaaggctgggaacgtgcggtgcaagcccctgccctctgtccacccgcagcgtcccaggccgggatctgtcttgagagctcgagtgtagaaaaatgttttattttattttatttatttttttgagacggagtctagctctgtggcacaggctggagtgcagtggcgggatctcggctcactgcaacctccacctcccgggctcaagcgattctcctgcctcagccttccaagtagctgggattacaggcgcgtgccaccacggccagctaatttttgtatttttagtagagacggggtttcaccatgttgcccaggctggttttgaactcctgacctcaagtaatccgcctgcctcggcctcccaaagtgctgggactacaggcgtgagcaaccacgcctggccagaaaaatataactgaagcccaaggtcagaagccaagctaggcagtcccacttagcgctgcccgagttgatggggacctcagtttccccacctgagcctggatcggctgaacctgggagtgcctcccctgacccgctctggcaacagcggcagtccaggccccgcccctcgcgactctgtctcctcccgccccagaccacgcccaccacacctccctggccccgcctttacctccccgccccgacctcgactccgccccacgcccaggccccgcccactgcccgggcgcctcttcccctccccccaggttcctgtccctcacccttcccccttctccaaccgccaacggccgcctgcgcctgaggcccggcccacgccccatcccgctcgctccacgctgcggcagccccggcggccccaggtgcgtccctccgaggaggaatgacggggcggtccccgggctgggcctcggctctgcaggcggggatgggggctgccgggccgggtcgggcccctgcgggtgggcggagggcggcgggccgtgggcgaggccgcccctcacctggtcgcacctcacctggccccccctcccctggctgctcctcacctgaccccctcctcggccgcccctcacctggccccctcccctgggcgcccctcacctgacccccaccccggccggcccctctcctggccgccccttacctggtcgcccctcccctgactccctcccctggtcgctcctcacctggccgcccctcacctggccccctcccctggccgcccctcccctggtcgcccctcccgtgaccccctccccggccgcccctcccctggtcgccgctcacctgaccgcctcccctggtcgctcctcacctggccgcccctcacctggccgcccctcacctaatcgcccctcatctggtcgcccctcccctgaccccctcacctggtcgcccttccccgggcccctcacctggccctccctcaccaggccgccccctcccctagccgcccctcacctggtcccctcccctggccgcccctcccttggctgcccctcccttggctgtcccctttcctggccgcccctcccctcgtcctctcctctggctgcctctcacctggccgcgtgttgcaggtgcgcggcccccgccatcccgccccgccgccctgcgccatggaggagggccctctgccgggcgggctgcccagccccgaggatgcgatggtgacggagctcttaagccccgagggtccgttcgcttcggagaacatcggcctgaaggcccccgtgaagtacgaggaggacgagttccacgtcttcaaagaagcgtacctgggcccggcggaccccaaggaacccgtcctgcacgcgttcaaccccgc

SEQ ID NO: 576 - DNA, 6000 bp, Homo sapiens
attaaggtttactatatagctacactaatcaagaaaaggtcatatggtgctttttcagcctccctcactggcttccccacatctcccagccccttaaaggtggacacccctaggctcatctgttggtcatctttattctttttcttttttctgagacgtggtctcactctgtcacccaggctggagtgcagcggcatgatcacagctcactgcagcctcaacctactgggctcaagcgatcctcccacctcagcctccccagtagttgagactacaggcgtgtggcaccacgcccagctaattttttaaattttttgtagagatgaagtcttactgcattgcccaggctggtctcaaactcctgagctcaagtgatcctcccatcttggcatcccaaagtgctgagattacaggggtgagccattgagcccagttggtcatccagtcaccttttctatccctcttcataggtgactgcactcttttggttttttcaacacaatctatctgcaggcaactctcaaattcacctcttctccctgtcatctcatgcccctcactgaccagtcaacatctccaccaaaacatctaataggtatctgtattagctttctgttgcttatagcagaatacatgaaactgaataatttacaaagaaaagaaatttctttcttttttttttttttttttttttgagacaggttctcactctgtcacccagcctggagtgcagtggctcgatctcagctcactgcaacctctgcctcccagactcaaatgatcatcccacctcagcctccagagtatctgtgactacaggtgcatacgcggctaatttttttctgtatttttttgtagagatggggtttcaccatgtcgcctgagctggacttgaactccttagctcaagctatccaccctccttggcctcccaaagtgctgggattacaggtgtgagtccctgcacctggcccagaaatttctttcttatagttatggagtcagagaagtccaaggtcaagggtccactttcggggagggtcttcctgctggcgggggctctctgtggagtctgcagagttttgaggcgatgcagggtatcacgtgatgagggagcttagtgtgatcctcccccataataactcatcagtccattaacccattaatggaggagacaaacattcaaaccatagcagcatctcacacacacatcccaagccaatctcggtcctccctcaagcccaccccacccgcaccttcccggtttccatcaatggatggaccagccttcaaagtttacagggtatcctgcattctctagtttatgcgcatccccaatctaaagaaggctgccctctctcaccacctccactgctacctgccctctggtctgagtgcactgcctttcattcggattattgtagtcccctggcttctaaccagcaaccagcgtgatctttaaaaatgtaactcgaggtatgagaatcgcttgaacctgggaggcggaggttgcagtgaactgagatctcgccactgcgctccagcctgggtgacagaatgagactccatctcagaaaaaaaaaaaaaaaaagaaaaaaagaaaaaaagctgggcacgctggctcatacctgtaatcccagaactttgggagatcaaggcaggcagatcacctgaggtcaggagttccagaccagcctggccaatatggtgaaaccgtgtctctgctaaacatacacaatgcaggagattggtcaaggtggtaggagaaattataaagataaagttataggaaatagacacaaactttcttggaaggccggaaggtttgcatagcttcagtaaaagatttggctgaaggtagctgaattctcttaaaagtttagggcgtagatacataggaatgtagaggagtttatctaaatagcttgttcactcatgttgtcctaaaacagacctttgatcattcacgggcaggactactctctctgagggagggcaaccagattaattacccacaaatgtgttgactcaaagcctttgtcattaagtctgtgctgaataaatgcctgcaggaccagctagtcaggccgcggggctggaacaactctttttgtgaaaggtccagccccctagccagctctttcactgaatactggtgtctgagtacattattcatctgtagtgcagcccaggtctgtgggtcagaccctggcaagttagccggatgtggtgacacatgcctgtgatcccagctactcgggaggctgaggcacgagaatctcctgaacccaggaggcagaggttgcagtgagccaagatcgtgccactgcactccagtctggggcaacacagtgagaccccatctcaaaaaaaaaatgtaactcaagaccagacacggtggtcacacctgaaattccagcactttgagaggctgaggctagtggatcacttgagcccaggagctcaagaccagcctggggaatatggcaaaatcctgtttctacaaaaaaaaaaaaaaaaaatgaaaattagccaggggtggtggtatgtacctgtaatcccaactactcaggaggctgaaatgggaggatcgcttgagcccaggaggctgcagtgagctatgactgtgccactgcactctagcctgggtgacaaagcaagaccctgtctcaataaataaataaacaaaataaaactgtaactcagtgttcatagcagcattattcacaacagccaaaaagtggaagcaaaggcaatgtccatcctccgatgaatggatagacacactgtggcacccaaacacccagacagtggaatagtatgcatccataaaaaggaaggaggctgggcacagtggctcacgcctgtaatcccaacactttgggagggtgaggcaagaggatcacttgaggccaggagtttgagaccaggctggccaacatggcaaagccctgtctctactaaaaatacaaaaattagcctggcatagtggcacacacctacaatcccagctagtcaggaggctaaggcacaagaaacgagagtcgcttgagcccgggaggcagaggctgcaatgagccgagattgtgccactgcactccagcctggacaaaagagtgacactctgtctcaaagaaaaaaaaggaatgaagtactcatatgttctacatcatggatgaaccttgaaaatgatgctgaaaacagccagacacaaaatgccacatactgtatggttctgtacacatggaatgtccagaattggcaaatccatagattttaaaaagtagattcggcagggcacagtggctcacgcctgtaatcccagcactttgggaggctgaggctcacttgaggtcaggagttcaagaccagcctggccaacatggtgaaaccctgtctctactaaaatacaaaaattagctaggcatggtggcaggcacctgtaatcccagctactcaggagactgaagcaggagaattgtttgaacccgggaggtaaaggttgcagtgagcccagatcgcaccactgcactccagcctggccatagagcgagactctgtctcaaaacagcaaaaaaaaaaaaaaaaagaaagaaagaaaaaaaaagtagattcgtggttggtgggggaggggaggagtacatgctaatgggtttcttcttggggtgatgaaaatgtcctaaagttagacagcagtaagggttgcacaaccttgtgactacactaaaaaccactgaagtataactttaaaagggtgaattgaatggtatgtgaattatatctcaagaaaacaaactcagctggcatcagcccctgccccaccctgtggtaaagctgggtccttgttggctggtgagggctctcctaatctgcaccccctcctcacctccagacccacggcattgctgctcctggaaccccagccgtcccctgtgctctgctcttctgttctccgtgtgcccagctcttccccccacacctaggtacccggcccctcccagccttcacctgcgcctttacagaggccccatcagaccaccgggccccccaccctccacacgcccaccccgtgaagagactccctttcccctggctcttctgaatttctggcatactatacgatttccttatttttccttatttttattttttaatagagacggggtctcactatgttacccaggctggtctcgaaccccttgtctcaatcaatcctgcctcagcctcccaaagtgcgggcattgcaggctgagccaccacggccgccacgaccttctcttctggagcgtgtcgcttttgtaattatgatgtaaactccgggcacgcggggaccctcgcgcttcgctcactaatttgtccccagaccctactacctggcacagtaggcgctcaatactgttgattgaataaacgactgctactttggaaatcatgtattatttaaatcacatgtttaaacgcacataaacttctgagtagtgttttctgcacacacaagatgtctccaggggcaccaaagaatgcattttccacgtttgtccctaaacgttaatgcataagtaaccttggtcaccaacagatgtgagggcacgtgacgttcgggctgcgccctccccgccccggccctgcacacagtagggccgcaccgcgctttgcaaacaggtggactcggcagaggcgcgaccgccctcaccgcagagagctgggccacctgcaggctctcaggacacccaaggccccacctcccacccggaaaagagacgatacgccgggcgcaggcgcagaagccgcgcccgtccgcggcgccgccagccagggcggaaacggctgcggcttcgctagggacgcatgcgcgggtcccttagttttcgcgagataacggtcgaaaacgcgctcttgtcgatttcctgtagtgaatcaggcaccggagtgcaggttcgggggtggaatccttgggccgctgggcaagcggcgagacctggccagggccagcgagccgaggacagagggcgcacggagggccgggccgcagccccggccgcttgcagaccccgccatggacccgttcctggtgctgctgcactcggtgtcgtccagcctgtcgagcagcgagctgaccgagctcaagttcctatgcctcgggcgcgtgggcaagcgcaagctggagcgcgtgcagagcggcctagacctcttctccatgctgctggagcagaacgacctggagcccgggcacaccgagctcctgcgcgagctgctcgcctccctgcggcgccacgacctgctgcggcgcgtcgacgacttcgaggcgggggcggcggccggggccgcgcctggggaagaaggtgggcgcggggccgggccgggggagccagggcctggtcgcccggctgtaggtgctgcgaggctcctccggttggcctccaggcgcctcccctttgccgggtttgatttgcgtgggttttctccgtacagccctggttttgcagatgggagagccagaaacgcagaaaagttaacttattcgaggttgcagggcgtggacacgcacagtcctttttcctccacccacttctgcccgggtaaattagaaaactcactgaagaaaagatgagtcagagaaggtgtgggggaggggcagaggttgggtgagcctgcctcgcatcatttcctttctgtctcggaatatgcttttcacggctgtctgagagtaatactagcattcagtaactcctacccaggggcttacagtgtgccgcttacccttgtaactgccaaatacaattttcgcagtagccctgtggcttagatactgttagctatcactgttcccattttacagaggacaggactgtggctcacaggttaagtggctttgtcgaaatgcgcagccgataactgacggagctaggcttgagccaagcagtccggcctccggatgggtagtgttagccactacactgcctctctggtcaagttcattgtggagtggcttcctgtcct

SEQ ID NO: 577 - DNA, 6000 bp, Homo sapiens
tcctgcctcagcctccagaatagctgggactataggcgcccgccaccacgccctgctaattttttgtatttttagtagagacggggtttcactgtgttagccaggatggtcttgatctcctgacttcgtgatccgcccaccttggcctcccaaagtgctgggattacaggcgtcagccacagcacctggccaattatatgtgttatataatgcttgataatgatgataaatgactctgttactggtttatatatttattattctttttgttgttattttagagtgtactcctacttataaaaaaaagttaactgtaaaacagcctcaggcaggtccttttggaggtcttccagaagaagtcattgttattataagagatgtcagctccatgcatgttattgcccctaaagaccttccagtgggacaagatgtagaggtgaaagacactaatattgacagtgggacaagatgtagaggtggaagacactaatgttgacagtcctgaccttgtgtaggcctagactaaagtgtgtgtttatgtgttagtttttaacaaaaagattaaaaggtaaaaaaataagaataggcaggcgtggtggctcacacctgtaatgctagcactttgggaggctgagacaagtgaatagcttgagcttaggagctggagaccagcctggacaacatggtgaaactccgtctctactgaaaatacgaaaattagctgggcatggtggcacacgcctgtaattccagctactcgggaggctgaggcacaagaattgcttgaacccagaaagtggaggttgcagtgagctgagatcatgccactgcactcctgcctgggtgacggagtgagactctgtctctaataataataataataatacaaagaatacaaaaaagcatatagaataaagctataaagaaaatattgtatagctgtacaatgtgcttgtgtcttaagccaagtgttaatgcaatagagtcaaaatgtttttaaaaaattaaaaagtttataaagtaaaaacttacaggaagttaaggttaatttattgttgaagaaaaaaaaatttaagtttagtgcagcgtaaacatacactgtttataaagtctacagtagtgtacaatactatcctaggcctttccattcacttacctctcactcactgactcacccagagaaacttccagtcctgcaagttccattcatggtaaatgccctttacatatgtactgttttttttttaatcttttatggcgtatttttactgtactttttctatgtttatatatgtttagatacacaaatactattgtgttacagttgcctagtattcagtacagtaacatgctatacaagtttgtagtcttgaagcagtaggctataccatataggctaggtgtgtagtagactgtaccatctaggtttgtatgtgtacactctgtgatgttcgcataacaatgaaatcacctaatgacacttttctcagaatgtatgcctgtcattaagtgacacataactgtatttagctttgtaagaaattcctaaactgtcttccaaagtggttgtatcattttgcattctcaccagcaatgaacgagagagttcccgttgctgcatatccctgtcaccatttggtgttgtcagtgttttggattttagttattctaatagatgtgtagtgatatctcattgttttaatttgcagttctctaatgataaaagatgctgagcatcttttcatatgcttatttgtcatgcatatatcttccttggtgaagtgtctgttcagatcttttgcacagttgttttttttaaattgggtcacttcttactgagttttaagagttctatgtatattttgatacaagccttttattagatgtgttttctcccagtctgtggtttgtttctttgttctcttaacactgtattttgcagaaattttaaattttaatccagtctaacatgtcagttttttctttcatggatcttgcttttggggctgtatctaaaaagtcattgccaaacccaaggtcatctagattttcccctacattatattttagacattttatagttttgcattttgcaaatgcaatggtttgtgatccattttgagttaatttttgtgaaaagcataaagcctgtgtctaggttgatttttttggatgtggatgtccagttctagcacaatttattgaaaagactgtcctttcttcattgaatttccttttctcttttacagtcagttaaccacatttgtgtgggtctattttgggctatttacttcaattccactgatctatttatgttttcattaatatcacattgtcattatcactgtagctttatagcaagtcagtcttccaatagatatcaatatagttgtatctataaaaatatattgcctaggccacatgccagaccaaccaagtcagaatctctgctgggactctagtatatttacacatatttaaagctttccaagttattctggtggacagggagaattaaaagccaccatactaaaccataaaatcatcacctccttgaagatgtggttctgttcactgatgtgtctatccccagtgacttgcataagatgcttaaatagttgttgaatgaacaaacgactaaaagaactgggagtatttatcttggagaagagaaaaagtggaggggcataataaattagcctacatacatacatagttgcaagcctttaatgtgacttgccctggaggacgttgctcctggagcagaattagaaatttacagagagccacctggctgaatgtgaggaaacactgcctcatagtgctggtggaaagtgagctcctcattcctgcatgtatttcagaaaagcctggaagaccatctataagaggatgctgcatggggtgggaagtcgagtaagataagttgctatgattattgcttattagtttgaaaagctgtgtctaaggcagaggactgcttctggctctcattcaccctgtgtaaattgggatgaaggacatggtgtggggttaaaaaaaagtcttaaaatgactttgaagctgaatcctcagactacagcaattctccgggtgtctattattgaccaattctttctttctttcttttcttccttccttccttccttttctttcctttttttcctttttctttttttgagatggagtttcgctcttgttgcccaggctggagtccagtggtgcgatctcagctcactgcaacttccgcctcctgggttcaagggattctcctgcctcagcctcccgagtagctgggattacaggtgcctgccaccatccagctaattttttgtgtttttagtagagacggggtttcaccatgttggccaggctggccttgaactcctgagcatttaccagatgtgtggtcttggagaagtcactgacttctttcaccatcgtattctgttttccaccaagttctgctgctgcttcttccaagctgtgtctttagaaaataggcttgcttctttttacattatcttacaatatgttagtctaaatcattactattttctgttgcctgaacctctgagagaagttattaacttatttccactcctaccccctttctccactgaacagccagtgatcttttaaaaaatgtaagttagagtttgtcattctgctttcaaacctttcaaagccttcccactgctaaaacttggaacaaaagcctaactcctaattatgacccgaaagagacaccgcataatctgacttctgtcatgtctcttaagagcagggtttgggagggggaagagtgaggtaatactacctcctagggagcatttgcaaatgtgtgaaggtgtgttttattgtttcagtaattgggaggcactactagaggcactactagtctgggccgtgttggtaaatgttctataatgtgttgttcagctcaggttccatcacaatgcctgatgcacaatagttggttaaaaaatacttattgtatgagccctggacattttccctggacctccgttttgacgtatgtgaattggtatagtgcctacttcataaggttgttttgagagagacataacatttataaagtacctagtacataatagttcttaataaatggtagcagtggctaggtgtggtggctcatgcctgtaatccacagtttgggaggccaagggaagaggattgcttgagaacaggatttgagaccagcctgggcaacatggcagaccccatctgtacaaaaaatataaaaataactgggtgtggtggcaggtacctgtagtcccagctacttgggaggctgaggtgggaggattacttgagcccaggaaggtcaaggctgcagtgagtcaagatccaaccactgcactccagcctgggcacacagcaagactcttgtctcaaaataataataataataatgtagcagctgctgagctttgtttgcttagaggcagctataggggcccacctagcattcttcctggagcattagaattagaacctggcacgtttggggaggggggaggtgtatctctttctctgaggcctaatctgaatcgtaggtctgacctgaggaatcttagaagggactcctctatactcatctgtagaaactaaggcacagaggagctctggttgtctttcttgactctggagctcacacaggactctgacaagccctggaaaacctggccctggagagaaattacctcctgctggagactgggtggggagaatagctgagagggtgggaagatagctgtctccccgccctcagctctgctttgcagaaaaggagaagcgcgcggcttcctcccgcctccttccctcctttcttcccccgccccttctgtttcgccaaccccgacgcggcgccttcgctgccgccctgcgagagcgcgagcgtgctgcacctcgggagctggcggctgagctgccaggagcccagcccagctgaatcgagcggagccggtggagcaggggccttgtgggtacccggttgggcagggagaggtgcggctctgcgacggaaacaatcgccagagatgccggggctagccttccccaccaggtaatgccggccctgcctggggctcccctagctgggccgggttctgggggatctccgccggctttcggagagtggtgacacggggtccagtagattttgaggggtgtcttactttcctcttaccttaagggaccctaaatgagagaaagggctgagggtggaacctttagatgagcccacccagggctaggcctgcactggaatcagagctctgcccagggaagggtgtgaaggggaagctgcgcctttggggaaccgctcagcctcagaagctctgctcctttgcaagcgcccttctgcttggtggccaacgtggtgctttcctctgccttggcttagtcgctggcctgctgggactgtgggggcttttctgtgttaagaggttgagtgaactgggagggaggagacctggggggactggtcctattcagacatcctctgtggcttgagttgccatatctgtgcagtgaaggacttgacattgtttgttactctggcttttccagactgtcaaaccatcttttggagaggtgagctggtttaaagtgctaaaatgggctgcagagatgtccccctcaacactgtagaagagaggagaacttgggaagtagaccttggtatcctgtcttccagccagccttttgaatggcatcttggtggttcttcagggacaaagcagagactgagaatgctgatgcttattttagtgtgatgcgtaggtgtgttaggtgtagggaggtagggttgggaagtagaaggtcaaggtatgttaatgattctaaactggccagtttttctgtccttaggtataaagttgcgttaaactagactctcttctctggagccccttccttattctgctaagttaatgacagacctggctgtggtaatatcttaatcactataattct

SEQ ID NO: 578 - DNA, 6000 bp, Homo sapiens
aaagtgctaggattacaggcttgggccaccgtgccaggccagatcttcacatttaaatactattcttcattgaaaagaatcagagctctttggagtaatggctcatttgagggctgggtcaaagaaagtgtaagaagagcttagaacatcttggaccaaaaagcaaggaagagctcaaagaacgatgatgaggacgtgtcaaaaggatcctgaatggtacaaccattttgggaaacagtttggcaatttcttataaagtgaaatacaacaagtccttgaataatgttattttgttacaatgttgatgagaaaaaaaaaaataacttcttggcctgggtcaccagtgtagtttggactctgttttctctgtgtactctagcttcctcccacatcccaaagatgtgcacattaagttaactggcatgtttcaattgtcctagtctgagtgagtgttggtgtgcatgtgagtgcaccctggaatagcttacgtagcatcctatacatggttggttcctgccttgcacctttagctgctgggataggctctggccactctcaaccctgaactggaaaaattgggtaaataatgatcttacttgtttatttttgagacacggtttcacgctgtttcctgggctggagtgcagtggcatgatcacggctcactgcagcctcgacctcctaggcttaagtgatcttctgccttggtctcccaaaatgctgggattacaggcatgaatcactgtgcccagcctcttgttttttgttttgtttttgaaacaaggtctcactctgtcgcccagactgaagtgcaaaggtgtgcggtcatggctcactgtggccttgacctccggggcttaagtgatcctcccaccttagcctcctgggtagctgggactatgggactataggggtgtgctgacatgcctggctaattttttgtatttgggtttttttttttttgtagagatggtgttttgtcatgttatcttgcctggtctcaaactactgggctcaagcgatctgcccaccttggcctcccaaagtgctgggattacaggcatgagccaaggcacctggtctggcctctttttattaatctttcttaaatgtatgtataggccacattgatttcaatgtttgatattagaggtgttttggtctttatttagaagtttgatgatgtcttgtgaccagaaatatgccacaggaactcaactcttatttatatcaattagccagcctatggtaaaattggttttgttatacattgttttgcctaaagttgcagaacccattgatggcgttaagtgaggacttactgtatacacttatcctacttatttattccacttctagcccatctctgatttcagctgcagctttggtggacagtttcacttctcatcctgctagcaattcctagcatagagcagtcacctttgattagagattgtattagtttcttatggatgctgtaacaaattatcaaacacaaagtgggcttaaaacaatacacatttatttttatttttttattttattttttgagatggagtttcactcttgtctctaggcttaagtgcaatggcgcaatctcggctcacagcatctttacctcctggattcaaccgattctcctgcctcagctcccgagtagctgggattacaagcatgtgccaccacgcccagctaattttgtatttttagtagagatggggtttcaccatgttggccaggctgctcttgaactcctgacctcaggtgatacacccgcctcggcctcccaaagtgctgggattacagatgtgagccactgtgcctggccaacaatacacatttattatttcacagttctgtagttcagaagtcctaaatggatgtcagtgggctaaaattaaggtatcatcaggataccatctcttcctttccagaggctccaagggaggatccattttcttgccttttccattttccagtctgctcccaaaagctggagagtccctttccccaaatcctcaatttactcacatctgcagagtccttttgtcatggaaggtaacatattcatagttcccagggattggaatgtgaacattccattggatgagccattattctgcctagtgcagagatcacgaaaagacaatccagattagagtcaatttactgggttaggatcctgggttaagttacttaacccctctgtgcctcagttcccgcatcaataagatgggtgaggataacaacagtatctaccgtagagggtagaggtttaaagacagtgtttgtaaagtgctcagaacagtacctggcacatagaaagaacaataggaacatttattaaatacattttttttgagacagagttttgctcttgtcacccaggctggagtgtggtggtgcaatcacagcttcctacaaccaccgcctcctgggtttaagcaattctcctgcctcagcctcctgagtagctgggattacaggtgcctgccactacgcccggctaatttttgtattttagtagagatggggtttcgccatattggccaggctggtctcaaacttctgacctcaggtgatctggctgccttggcctcccaagtgctgggattacaggcgtgagccaccgcgcctggccttattaaatatattttaacaacatattgatacttaggtatatgtcaagcactgttttaggtgctgaggatatggaaaggaatatgacttggaactcaagaaattagatacacaaatgcagttacttccataaaaggcatagaaatactatagaattacagttttgttaaggcttagggaaactttagaaatattagtcaaatgaatatgaatatgaatatgaatgacatttgagctcagctttgtacaatgaataggtgttggccagtcagctaagtagggaagagcttgaagacatgaagaaatgtgtattcaaataacgttaatatttcagtgtgcttggagcaaaaaataaatgatgtgagacaaagctagaaaggctagtgtaagcagtcaggtaataaagtgccaagttcaggagtttgaactttatcctgaaagcaataaaatcctttcggtgtttaaacgggaggacatcatcagatttgtgcttttataaggctactcaggtaactagtgagaaaaatagattgagtttgaagagactaaaggttgctccagttgttcaggtggtggtagtagaagacgacacaggcaaggacttgaaaaatatttaggagaagctacaagacttggtgtccaacttgatatggatgttgagagaggaagaacggggagctattagtatgtctaggttcctggcttaggggattgttgaatgggtggcccattcattgagaacggaaaggaacgtaagaagcaattttgggggggaaataataataatagccaacattctaaagggcttgttactattaccatggtaaaactgaggcttaggaagacctagttaaggtactacttattattacagaaaaattacggcttagaaatgtcaaggtcctatcactaatatttgaatagctaggatttcaagcaaggcaacctgattccggactcttagcctttctaatgctgtctcagtttcgcacatgttgaatctgaggtacgaagagtatgcaggtaatgctgctcgggaggtattgggaaatacacaatctgagctcaggagaaagaaagctttgggtcgaaagtaccctccacggtaggggaaaaaacgtgaaaggaagcccattcttttcgtatgtcagttcacattagttcaaacatctccgttataatttctttgtcttcctcccacccctgccccctctcccacagaaagaaaacataatacatgtctggctgtgagatcacacgacatcggatagttttcaaattcagcccttgacaacgagctcatagatgcggtggtgctttgttaacctgaaaaggaccctcagcgccggaagttagccgtctttctccatcctgactactacagtagccctcccagaaatcgtcccaaaattgtctgatagaaaggctgcacggaaacaacccgccacggacagcggaccgagaacagtgacgcgacgcgatgacgtcacgcagcaagcgggtgattccccagcctctggcgtcacgcgccgatgacgtaatcccaggcgttcgccctcatgcgggccagggtttggcctcgctcccacgggtcggtcaggccctccccgccccctctcacctgcgggaggcggggcgggcacggctccaccggagccgcagccgccgccgccgcgccggggagggggagtgggggagggggagggggagaaggggaaagggcagaggggaggaggaggcgggaggaggaggagtaggggagccagtgaactaggcggtcaggcctgccgggcggcgtacaatagcgcggctgtgggcgggggaggctgccctcccgcggctgcagccggagccgaaggtggtggctgcacagtagacgccccctcacggcttcccccacacgctcccgccccctcgctcgcccatcgcgcttccctcacaggctctgcagtcctcccccacagacgccttcccccttggactctcattcccttttccacggagccccgcgctttcgtgagccccctcgaggaacctggtctccgcatccagttaccacctcctgcctcagaggccatctgagcccttcgcacctcgcccctcagtccccccttccccccccgcccgcgtcgcctcgctccctcccgcccccccatcatcccttccctcgcagttcccctgtcctgaggggagccccgccacgggcagcgcggcggcggcggcaggagggagaaagtgaagcggtagctcgcgcacactcgcgccctcactcccggctaggcggcacccaccgccgggaggaggaggaggagccgagaggagctgagcgagcgcggaaggtgagagcgggcctaccgcccagtacccctcgcgtcccgggctgccagggctggggcgcgggggtggggacgggtggagtgggggtctgggcccatttatttcgcgttgcggggccgggcgcctgggcgggaggaggcgccaggtaaggtgaggcgggcggcgccccgcgaggcccgctcccgtcgggccaacaaaggccccctgtgcgcgtaccggcggggtcgcgggtctcagacgccgggcgattcgagagacctgggagagggaaggggcggggcggggccaggccaggctggagccgggaggccacacgagtaccggtccgggaccgagtccgtcccgaacttcgcagtcctgcggcgctcaccctgtcccgctacgaggaggcacagcaaagcggcgcccagttccttctgcatggaataaatgaccccttccaggcttggacagtcacctttagggttctactccctgaaaaataagggctggtaggacttgacttacgcagcccctcccccaccccggaatattctgtaacttgggaagtgaaaaacaaccggggaaggagatttatagttattttatgttcattattacgtttgaaaagacatgattgttgtagccttcgctatcctatttcagcagtacacattactgggagtgttttggaagaatacttgagaagtagtgggtgtggcgttgtgagcaacgtccttggtttttaaaccccttggataattgttctactgttacaaaaactgtgaacagtgaagggaagggttagttccgtggttactaataaaaattcagattcattagtcttgactttaagaattgttcctgagaacaatctttaattttgcctcctacatttttgggttctctttcaactctgtcaggagaaagtaggaattatcagtacagatacctcatctctcttaccctgtggcttcatctacttcttgtgtgaccttgagcaggtcacttccagccttaaaagctccagaagtttggttttat

SEQ ID NO: 579 - DNA, 6000 bp, Homo sapiens
agagcatgaaagaattttctgaggtaatggaaggtgttcttgatcttgatctggttgatagttaactgagtacattcatttgtcaaaatcataaagctatacgcttttaatatctgtgtactttacatgatataaattatattttattagagtactatcagtataaaataaagtaagccaccatttatgaggggtaaacttcattatcttgactaaagctttacattagaggaggtttctttgtaaatttgatcttcgttagcacttattcaaggctggtgtaattgtattttatttgcaagatgttagaaagttatcaacagaccaggaaattgtcaacatttacaaggactctcagatttgctttggaattagaacagtatgttccctgtaagatttcactttcactttcagttctagattcctgggtttctttatacataaaaatctaaaaacttacagtgaaaaagcattaggctacaactaaagttgttacaacattatgcgaaattccctccagagaaaaaatatttttaataataattcccccaagggaaaaatacttttaaattgattatttgataataggatattgagagcataccgctctcaggaattgtcagagttctgagccaggaatgggatgaaaaactctgtcattcataccttgctcatacactgacagtagaaaaaaactggaaaaccaagaggccaagtgtggtggctcatgtctataatcccagcactttgggaggtcaaggcagatagatgacttgagcccaagaggccagccagggcaacatcgcaaggctctgtctctataaaaaatacaaaaattagccaagcatggtagcccgtgactgtagtcagaactactcaggaggctgagatgggaggattgattgagcccagtaggttgaggttatagtgagctgagattgtgccaccgcatttcagcctgggtgacatttcagcctgagaacaaggctctgtctcaaaaaaataaaaatgagaaaacaacaacaaaaaaaccacaaacaaacctagaaaactgaagatagtaatggctatacagtttgtgtctagctttcactttcctcaaaggtttccttgtgtatttctgtcgtgaaaagagtatttggagcttggaattcactggcttggaagaaaataagagtatttggagagaaaatatatttaggctgtgcttgctttggcagcacatatactaaaattggaaccctaccaagaagattagcatgccccctgcacaaggataacagctggatgttgaaaggaaaagaggagtttttttaataaagtatgtgagatatacaaagagttagaaagaaaatgcaaggtaggttacaccattaaagatgtggatgcaggtttagaatagagaaagcccaagtggatagtttggatagattggctctatttttgttagtcagtaaacaaaggtttactgagcacctttgagcagacactctactagtactagaataatgcagtgaacaaatatatacagtgcttgcccatacacatttatctagggaaaccattttttttttaattgtgcaaaatgttgcaaagcagacatgttaatttgcttccaacctactaggcctgaccctagctctcatgaccagtttgaaaaacgcgagactcagtcaattcagggatttcttaagccatggtctttatttatttttatttatttacttttttggcaatggattcttgctctctctcccaggctggagtgcagtagcgagatctcagctcactgtaacctctgcctccccgggttcaagcaattctcctgcctcagcctcccaagtagctgggattacaggcacctgccaccatgacccgcttatctttgtatttttagtagaaatggggttttgccatgttgaccaggctggtctcgaactcctgacctccggtgatccacacacctcagcctcccaaagtgctgggattacaggtgtgagccaatgtgcctggccagccatagtttttaaactggggtaagtgtgcccctgggtgtttacaaagacttaccaacagggaggtgggagctcaaatagttttaaggaattaatagtctcactctcaacttccatatgtagcttctcccaaaactgatctgcttgaaaacaagaactgtgaaggttgccagggttgttctgtcttctcatctcccttttcacaatggttctctgtcttcccttaaaagacaggctcacctctcacctatcatgagttttaaaatcgtatatttctctgggtgtagaaacctcctggatgatttgaaataatcgatctgtattagtgttgagaaaatgaatgactctaatatctggatatagggttgccaggtaaaatacagaacaccaaactgaatctaaatttcagataactaatgaataacttattagtatagctaggtgccaaatattgcacaatacattcttatactggaaatgcattcattgtttatattaaaccaaaatttaactaggtgttctctgttttaatttgctaactctgtcaactgtatctggataccaaaagttcagtggtttctaaaccaccaatttcaacaaaattgagttgtctactgataagtaattacatattttgattagagatcactaaatgatttttggaatataaaacatattttttaaattgtgaaaaaattgccataataatgtttcttctgggcctatctacttatctacttacttctgtgaaataaggtttacaacatttatgtctgtagaaatgaaaaaaggaacagaatctgtgctgaaccctaacatattatagctataggtaatattcatgactgcacacttgaaaaacttgcttaaaatacaagctgccacccccttaaattgtatttgtaatgcagttattaacatttacgatatttttatattgtattgaccaattatgctttaaaagtaatgaaaacaatatcaatgataatgtaatcaaagaggattttttttttttttttttgagatgcagtctcactctgttccagggctggagtgcagtggcactgtcttgactcattgcaacctctgcctcccaggttcaagtgattcttgtgcctcagcctcccaagtagctgggactacaggcgtgcaccaccacacttggctcatttttgtatttttgggagagaccggtttcaccatgttggccagactggtcttgaactcctgacctcagatgatccacccaccttcgcctcccaaagtgctggtattataggcgtgagccaccatgcctggtcaaagaggaattttttttttttttaacacttagatccttatgatcccagagaaaaaaatagatttcaagttctaatatgtatttgtttcagagatatgtgacagagagatgataaaagatgttcagtacaaacatgtattaacattctgtaggggaattggaatgttcaatgacaaaaggcaatgataaaatattttcagttattaaagatgacctgataattgcttcatggatgatcatgtatgtcaaattactatggtattaggatccatcaaatacatttaaaagagtgctctatcaattttttctgaaaatatctatgtttacattttgtagattcttgacatgtacaagagctttatgttttaatgttaagttaaaaatgggcaagggaatgcagagcttttcaaaattcttctggtgagtacataatcaaaaatgtgtaaggcctgcaaattattttcaataatctcaggagtgagttgaaaatggcttagaaagtcttgattgaagcagactcaaatgtggattaaaatctccatatgataaatacacttagtctttctgaaataattccaactggaacttcagctgctatggacagccaagtccacctaaacaagaggatgcctcagctcagtccaattgcgtgcagaatgcactggatgctgtttccacagaacgatgaagtctccaataatctttatgggctctgtctctggttggtaattgtctttgatctactggaagatagaaaatcagatgagctctccaaatccatctgttaccctggtacggatggctctcagataaagttgcttaaatttactgcttagagaacgttgagggaaatatggcagtgcaattagactcaaagatgtcaggtttccctgagaatggcactgcaactcagaaacctgccctgtgagatcaaaggctataaaggagggatttttttaagtagccaactccaccctacttattaaaaaaaaaaaaaaaacaactcaccaaaccaaacaaaagtatttccatacagaaaatttaccaagccatttcaatctttaaaatggtaaaataaactgcaaaggagaactgcatgatttttttcacatacccctacatttcctttcacctcttactttcttgatcagaacaaaaagtaaaaataaatagaaatatttcacaaagtttcgatttttttttttttaaatgctggacttctgcagctatagtagaagattgaaaaacctaacctttttacgtgtaaagtgtatggcggatggagggtggagaacagggcatattgaccttttccaggcaggctaagcaatgatcgtcctctctatatgggttgttatcaagatttcctctgacccacgagcaatgaagcaaatgtctttcagtaaatgccgcgaagatatgccacggttaagagtcatgcttttgggtcatggaaatccccgagtgggtttgccaggccactgattaagaggaagtgtgtgtggttattaccgctggagttcccctaagtcctaaaaggaaagcaccagtgcacatgcaaaccactgggaggagtgcggaacgcctggtacagataggggtggggatttgggtgacgcatttaaaagacagcgtgagactcgcgccctccggcacggaaaaggccaggcgacaggtgtcgcttgaaaagactgggcttgtccttgctggtgcatgcgtcgtcggcctctgggcagcaggtgggcaaggaaggctggtgtgtgtgtgtgtgtgtgtgcgtgtgtgtgtgtgtatgtgtgcgcgcgcgcgcgcctcccctggtgtaagagatgtgccagcggctggccgaggggcgcttagggctagagcccggggcgctgcagaggttgagagtcagtgggtggggcgcagttatcaaacaccagggcccaaaagcaggctctagataggttccaggtgctcaatttctatttcacgtttggagtgagccagtggaattgtgaagttgtggcattttgattcggttgccaagagttatcactgggcctttgcaggtgccaaataaatttcaggacagagcctaaggcagagctctggcacaggaaggaagtaaaacgtttaatgagcaaatggacgcatgtttccaagcggtggtaggaagacagcagtttttggttgtcttcctggtgatcagcatggaaacctagtagtgctcttactctgatcaatacattgtcgaaggcatgtacctgatgctaacgtaacaataatattaaatattgactttatttgctattatttattgctaacattaagtactgctacctgctatgtgctaggtttgtctctgaagactttacatgtatttttcacgtttaattatcataatcttaagaagcaggtaccataattatctccatttgacaatgaggaaactgaggctcttggagatttacttgtgcaaggtcatgcttctggttaccggactgcttggtattgggcacccccgatgtctgactccaaagcctgatactaatcaatcactgagctgactctgtggtcattaatataaaattgatagaagtactgtggtcactcaggtctcagtcatttacttcttcaacgggaagtcttcgtgtctaccccatataccaagctctgcagatgctatgagtgggagggcag

SEQ ID NO: 580 - DNA, 6000 bp, Homo sapiens
gtatgtatatatatatatatatatatatatatatatatatatatatatacttttttttttctttgagatggagtgttgctctgtatcccaggctggagtgcaatgtctcactgcaacctccacctcctgggttgaagagattctcctgcctcagcctcccaagtagctgggactacaggcatgcaccaccatgcccggataatttttgtaatttttagtagagatggggtttcaccatgttggccaggctggtctcaaactcctgacctcaggcaatctgcctgccttggcctcccaaagtgccgtgattacaggcgtaagccactgcacccggcccatcggagctacatttgagcaattacatggataaaattttgagcttagataaggtaagttttgagctaatggtcccagactgacgtgaagaagcaaacaatatgcgcccaatatactcaggccgtctttaacacctttattttcctaacttttaattcattgatttttgaaactggagttgctgaaattctaatttacattaaattattaaggtttactaattaagcctttaaataatatttctgtaaatttttaaaacctgacttttgatacagatgccaacattttaaagctgtcttggattttaagagtctcaatattatctataaaaatctttttagcaattaccttggctgagtgctcatatacaaaataaactgattaaatcaagggagctattggatcctctctagttccaaaaccctaatgaagggttttatgaaaattaaaacccaaagtcttaccacagaaatataaagtgactttttttttttaaacagatgaaaacataatgcttgggatgcctgcaagtgactaaaagttggaaagggaagttctgatgtgacccaaatttgtaagttcttaatgtcctatttgaattttttaaaaaattcaaaaattcaggaatatatgcatgtcatttgtgtacatactgacaaagactatctctttgaccaaacttctgagcctcttctgagccctcttcttgactaggccttgactttgggccctaccccacctgtaattgtcggcctacctcagtcttaataagaatcctgtcagtttagtgaggatcccgccactctgggtatctgatcaagttcctcattctccacttctgaagtataagcccttagcctgccttcagcaagaatcctaccacccctgatgtctccttttagtacttttctatccactgaccctccttactctacctgttggttataaataccccagctgtccttgctgtattcccagttgagcccaatcttgcttccctattacaatgttttgattgcacagtcctgaataaagtcttccttaccattttaacaaacgtcagaatttttttttctttaacaatacctcacaaccaatcctaacattcttttatactcacctaacttaaaaaataaataaaacattacatatacaattgatgcataggaaaagtttttcaatcccattcataatatagcaataaaaaatggtaactgaactgaaatactatttattatttaacaggttggcaacaatccaaatgtctgacaacttactccacggatgaagctgtgggaaaaacaggcactcacatacattgctgattggattgcaaaatgccaacatactcatggatgggtatgtggccatattaggcaaatttatgtatggatttaccatttgaactaacttctgggaatatatcctaaaataagatgtgttcccatgattattcattacagcactatttgtaatagcaaaaggctggaaaccacccagatgtccatccatagggaagtagctgaatatattatggtactaattttatctatggctggggagcttattcaggctggctccttagtctttgacacggccctaacagtttttggctgctttctgaattacattgttcaagttgaatatattatggcacatctacacaatggagtactatatagaaatgaggaatagctctatatgttagtattatacaatctctagaatttattataaagtgaaaaaaggtggagaaaatgtgctactactgtttatctaagaaaagggtaggtataaacatgcataattacatttttaaaatgaaaaaatgaatcataaaaagtgtttaagtcattacttatagggcaggaaggaaaaagtagaggggagaccaaggattttcaaaataaagggagttacagatgtgtaatcaaagaggttaaataaaaccttgacttcctgaatttgaatcggaagtatcaatgagttcataatatatttgatttaaaagacaaaaaccaaatcaaaacaaacccatactaaccagctctgtccattgaacaggtatagaaacaatcaaactcattaacaacacgacaaacattttttgtttgtttctttgttgttccttgcagcgccagcttaaaggagacatccagattatgctctttaaatatcatttcccactaaaggatccagggcacttaggagtaatggcttattatgggtatggagtaagaaatacacaaaatgagcctggaaagcaaagactactaggaaagtatcagaaagactcaggagccaacctgagtaaactctcaccggcctaaaataaacaacttgagcactaatagtggtaatagctacagtggattacaactcaccaaacttctttaaatccctggattcataatgatggctgtttacttttgagggtttttaaaaaaaatccggcagagatttttaaatagtatatggtagtgatctaattttattttccattagaataaccattcattcagcattacttattgagtaattaatcattttctcattaatacataatgccagtatatcaaattcccaaatacatagatatgggtctcttcttggggctctgtatctccttcctttaattgtccatcttagggcgtttaataatacaagactgtctcaattactatggctttattgtaactcattacctggtaggacaagaccttccaatcttacttttcttcttcaaaattgttttaaatactgtaaattttttttctacataaatgtgaaaaacgttagaagggcaactgcagcagacatacatagcttatttttttaagattaacagcaactttatactagcaaaatgaaaaaaaattaactgaataaacaggtaactgaattaactagctgtaacactagactacaaagttatacaagattaaaagttatgaggtactatttattatatgtaaatattacaaatattttttgttaaaaatatctaaggcttttgagtttttgaaatgcaagctttcccctatacttaagtatattcattatcttactgctttggtcaggacaagaactgaaaaagagaaataatcttgagttcagaatgaacaattcttgctatatatattttcccacatgtgttaggaatgttctgtaaaccttccgagaaatagtgacttgaactaaatactaaactactaccaagccccaggtgcatttttggaagtttttagtcattgggagccatggcatttcttttctctgtattacaaactgttacactcactttctttgactattaacattggaacagtagacctcctgttctgtgactgactggcaggcagaaatgacacagacaggaaatgggaaatggttcagggtcttggaattcccccggctccctaattaagtggcttgctatttggaagttttttaaatatttgccccttggagttccccagagagaagcaagcatcggattcaacgggcaaagagcgtcaacttcaaaagtcgttcgttggttgtcataccacaaacatttactgcacgacactgtgtctatggcactattgggggagtatggcggggggatacaaaaggtccatgactagcaaaagccaagggtttttatttacaaattttctattacctaagcattaaaaaaaattgggctcctctctggtttatgtacaattatatgtgcatgtacaccaatacacaggcagacgtatatatttcattttattgaaacattcagaaaatactgggagtgaagcctgacttgcaatacagttctctttgctggcaatgagcatctgaaataatgacacttttttctttagtgcatatgaactgtttgtctccagaacagaaaaccaaaagtttaaaaacaagatactcccgttgacatcaagtcttcagaattattcatctgatgcttcctagtttccaaagtttcgcttttttcgatttgcacaggcagctgttgaacgctgatgctacacaaacggttacaattgtttacttaagcaaaaaatgccaccagactgactccatcctcaaaatgcagtcatctggacggggggaggcatcacacttggggagccttgccaggggccagatcataaccctgaggtgacacagggtaggacgcgcaaaaccaccggcgccagggcgtttccgcagggtttcccaaaactcaaacgcagcggctcacggtttgccacgtcccccaggagaatggtagacacagagaggaaatgtggagagggcacaaaccgcaaggtgaagaaaacgaacaaacaccgagttgatacggatagtccccgttcccctgagggccgaccccgtgactcccgatgagcgtccagttgcgccgggcatcctggcctcccagcgtctttcccggaggttcatcgccgcacggcggaaagcgctctcggttccgctttccggccccagcctcccgggcgccctcgcgcggcggctaacgctggtcctcggccgggcgcgctgacgtcatcgtgcgtcagagtgagcccggatggggcggcgggcttcgggagcgcccgggctgatccgagccgagcgggccgtatctccttgtcggcgccgctgattcccggctctgcggaggcctctaggcagccgcgcagcttccgtgtttgctgcgcccgcactgcggtgagtgctgctccttccgggctcgggcggcgtggggcgggtggggacgcgagggcccgcgggggcccacttccctgatgtggcggcgaacgaggaaggacggggcctgaggcccttcggccaagggtcgagggtcgccgggggctctctgctttctactctcgccaaggttttattggattcggaagccccaacttcgagacttgcagtcaaagcgatttttaaaatgacttgttttcaagcctctggccgccgcccactcttctggcccttggactttgaccaagatgttttctcgcagtttttgcaaggttttaaacttagccctcggcgttcttttaatgtaatacattgaaacgaagatatttcggtggcggcgatatttcatatttcatagttgccactgcgctctgtcattccagtagtcgtctgttgtgtattgtgagaagcaactctgggaaattattgggtaaatcccatagtttctattcttttcccttccatcctatcccctgcccagctgcaatttgcgtaaagagaatgcagcagtgcggtgcacgtagataaaaatctttcatttaaagataggatataagaccgggtgtaattaaagcaatcatgccagtggtcgtagtgccggagccactgtttcacaggccactgtgttaggttttgttttcgagttgctttctgtggtcgttgctttgaaattgtaagggaatggcagagtttaagagtttatattaatgaactcgtggtgcattttactgcagttttcctagtcgtggagagacttgatattacaaactaacgttgctgtcttaattcctgctgtactgctgctgacagggtgtagtggagtgtctgtctgtctttttaaccaatgtgcctttgcctccagcagagtgccagagttacctttaggccagaaaaggggaggagagcaaggacaaaatgtttcct

SEQ ID NO: 581 - DNA, 6000 bp, Homo sapiens
agcattacttattgagtaattaatcattttctcattaatacataatgccagtatatcaaattcccaaatacatagatatgggtctcttcttggggctctgtatctccttcctttaattgtccatcttagggcgtttaataatacaagactgtctcaattactatggctttattgtaactcattacctggtaggacaagaccttccaatcttacttttcttcttcaaaattgttttaaatactgtaaattttttttctacataaatgtgaaaaacgttagaagggcaactgcagcagacatacatagcttatttttttaagattaacagcaactttatactagcaaaatgaaaaaaaattaactgaataaacaggtaactgaattaactagctgtaacactagactacaaagttatacaagattaaaagttatgaggtactatttattatatgtaaatattacaaatattttttgttaaaaatatctaaggcttttgagtttttgaaatgcaagctttcccctatacttaagtatattcattatcttactgctttggtcaggacaagaactgaaaaagagaaataatcttgagttcagaatgaacaattcttgctatatatattttcccacatgtgttaggaatgttctgtaaaccttccgagaaatagtgacttgaactaaatactaaactactaccaagccccaggtgcatttttggaagtttttagtcattgggagccatggcatttcttttctctgtattacaaactgttacactcactttctttgactattaacattggaacagtagacctcctgttctgtgactgactggcaggcagaaatgacacagacaggaaatgggaaatggttcagggtcttggaattcccccggctccctaattaagtggcttgctatttggaagttttttaaatatttgccccttggagttccccagagagaagcaagcatcggattcaacgggcaaagagcgtcaacttcaaaagtcgttcgttggttgtcataccacaaacatttactgcacgacactgtgtctatggcactattgggggagtatggcggggggatacaaaaggtccatgactagcaaaagccaagggtttttatttacaaattttctattacctaagcattaaaaaaaattgggctcctctctggtttatgtacaattatatgtgcatgtacaccaatacacaggcagacgtatatatttcattttattgaaacattcagaaaatactgggagtgaagcctgacttgcaatacagttctctttgctggcaatgagcatctgaaataatgacacttttttctttagtgcatatgaactgtttgtctccagaacagaaaaccaaaagtttaaaaacaagatactcccgttgacatcaagtcttcagaattattcatctgatgcttcctagtttccaaagtttcgcttttttcgatttgcacaggcagctgttgaacgctgatgctacacaaacggttacaattgtttacttaagcaaaaaatgccaccagactgactccatcctcaaaatgcagtcatctggacggggggaggcatcacacttggggagccttgccaggggccagatcataaccctgaggtgacacagggtaggacgcgcaaaaccaccggcgccagggcgtttccgcagggtttcccaaaactcaaacgcagcggctcacggtttgccacgtcccccaggagaatggtagacacagagaggaaatgtggagagggcacaaaccgcaaggtgaagaaaacgaacaaacaccgagttgatacggatagtccccgttcccctgagggccgaccccgtgactcccgatgagcgtccagttgcgccgggcatcctggcctcccagcgtctttcccggaggttcatcgccgcacggcggaaagcgctctcggttccgctttccggccccagcctcccgggcgccctcgcgcggcggctaacgctggtcctcggccgggcgcgctgacgtcatcgtgcgtcagagtgagcccggatggggcggcgggcttcgggagcgcccgggctgatccgagccgagcgggccgtatctccttgtcggcgccgctgattcccggctctgcggaggcctctaggcagccgcgcagcttccgtgtttgctgcgcccgcactgcggtgagtgctgctccttccgggctcgggcggcgtggggcgggtggggacgcgagggcccgcgggggcccacttccctgatgtggcggcgaacgaggaaggacggggcctgaggcccttcggccaagggtcgagggtcgccgggggctctctgctttctactctcgccaaggttttattggattcggaagccccaacttcgagacttgcagtcaaagcgatttttaaaatgacttgttttcaagcctctggccgccgcccactcttctggcccttggactttgaccaagatgttttctcgcagtttttgcaaggttttaaacttagccctcggcgttcttttaatgtaatacattgaaacgaagatatttcggtggcggcgatatttcatatttcatagttgccactgcgctctgtcattccagtagtcgtctgttgtgtattgtgagaagcaactctgggaaattattgggtaaatcccatagtttctattcttttcccttccatcctatcccctgcccagctgcaatttgcgtaaagagaatgcagcagtgcggtgcacgtagataaaaatctttcatttaaagataggatataagaccgggtgtaattaaagcaatcatgccagtggtcgtagtgccggagccactgtttcacaggccactgtgttaggttttgttttcgagttgctttctgtggtcgttgctttgaaattgtaagggaatggcagagtttaagagtttatattaatgaactcgtggtgcattttactgcagttttcctagtcgtggagagacttgatattacaaactaacgttgctgtcttaattcctgctgtactgctgctgacagggtgtagtggagtgtctgtctgtctttttaaccaatgtgcctttgcctccagcagagtgccagagttacctttaggccagaaaaggggaggagagcaaggacaaaatgtttcctgtgtgaaaatttccatctgtctctgaagttgtgcgttttaaagacacgtatagttagtgctatggggagtatgttgcatttacttattttaattaatagctttttcatttagaaagttgtgacaaattgctggaattaagatgtattatctaaagtgtgaattattcttagactttactgaataaattgaagagtatgtaagttctatttggcatgcacatacagttttctaaaatactttttgttttttcttttcagatttacaaccctgaagaatctccctatccctattttgtccccctgcagtaataaatcccattatggagatctcgaaactttataaagggatatagtttgaattctatggagtgtaattttgtgtatgaattatatttttaaaacattgaagagttttcagaaagaaggctagtagagttgattactgatactttatgctaagcagtacttttttggtagtacaatattttgttaggcgtttctgataacactagaaaggacaagttttatcttgtgataaattgattaatgtttacaacatgactgataattatagctgaatagtccttaaatgatgaacaggttatttagtttttaaatgcagtgtaaaaagtgtgctgtggaaattttatggctaactaagtttatggagaaaataccttcagttgatcaagaataatagtggtatacaaagttaggaagaaagtcaacatgatgctgcaggaaatggaaacaaatacaaatgatatttaacaaagatagagtttacagtttttgaactttaagccaaattcatttgacatcaagcactatagcaggcacaggttcaacaaagcttgtgggtattgacttcccccaaaagttgtcagctgaagtaatttagcccacttaagtaaatactatgatgataagctgtgtgaacttagcttttaaatagtgtgaccatatgaaggttttaattacttttgtttattggaataaaatgagattttttgggttgtcatgttaaagtgcttatagggaaagaagcctgcatataattttttaccttgtggcataatcagtaattggtctgttattcaggcttcatagcttgtaaccaaatataaataaaaggcataatttaggtattctatagttgcttagaattttgttaatataaatctctgtgaaaaatcaaggagttttaatattttcagaagtgcatccacctttcagggctttaagttagtattactcaagattatgaacaaatagcacttaggttacctgaaagagttactacaaccccaaagagttgtgttctaagtagtatcttggtaattcagagagatactcatcctacctgaatataaactgagataaatccagtaaagaaagtgtagtaaattctacataagagtctatcattgatttctttttgtggtaaaaatcttagttcatgtgaagaaatttcatgtgaatgttttagctatcaaacagtactgtcacctactcatgcacaaaactgcctcccaaagacttttcccaggtccctcgtatcaaaacattaagagtataatggaagatagcacgatcttgtcagattggacaaacagcaacaaacaaaaaatgaagtatgacttttcctgtgaactctacagaatgtctacatattcaactttccccgccggggtgcctgtctcagaaaggagtcttgctcgtgctggtttttattatactggtgtgaatgacaaggtcaaatgcttctgttgtggcctgatgctggataactggaaactaggagacagtcctattcaaaagcataaacagctatatcctagctgtagctttattcagaatctggtttcagctagtctgggatccacctctaagaatacgtctccaatgagaaacagttttgcacattcattatctcccaccttggaacatagtagcttgttcagtggttcttactccagcctttctccaaaccctcttaattctagagcagttgaagacatctcttcatcgaggactaacccctacagttatgcaatgagtactgaagaagccagatttcttacctaccatatgtggccattaacttttttgtcaccatcagaattggcaagagctggtttttattatataggacctggagatagggtagcctgctttgcctgtggtgggaagctcagtaactgggaaccaaaggatgatgctatgtcagaacaccggaggcattttcccaactgtccatttttggaaaattctctagaaactctgaggtttagcatttcaaatctgagcatgcagacacatgcagctcgaatgagaacatttatgtactggccatctagtgttccagttcagcctgagcagcttgcaagtgctggtttttattatgtgggtaagaagcaaataactatacattttatcattttattttaatttacatattagaacatacgtgttttcaatatttagtcttttttttcctgaaggtcgcaatgatgatgtcaaatgcttttgttgtgatggtggcttgaggtgttgggaatctggagatgatccatgggtagaacatgccaagtggtttccaaggtaattgttttgaaaaaggtatttgtacaaaaaactctgtgcttaaaagaagtaggcatgcctacatgattttgtttacctttaaattataacaaagcctcttttatgccattggggaattatccttctaaaagatcacattttaactttaattattttgttgaaaaatattctgcagtcttctgtgtacttttgtaagtcagttacaagtatgaccgtacattttatttatttcccatttcttttaaagag

SEQ ID NO: 582 - DNA, 6000 bp, Homo sapiens
gagtatcccttccaaactatcctcctattctctgtctgagaaatctcaaaattgtcctgattgaggacaagtctcgtgaaccaagactcttcctactagttagagccaaccaagaccccagtggagccgaacagataccccgtggtggagctacaaacagacaccctgcaatggggctacagacaccctgcaatggggctacagacaccccatcatagagctacagacaagtcgagagaaggaaggaggcattagcagtgcctagtagattcaccaatcctaacaccctgcaatggggctacagacagacaccccactatggggccacagaaccagtcaggagaaggaaggaggcattggcagcacctaggatactcaccaatccagacacccttcaatgcagctacagacggaaaccctgtgatagggccacagttagaggacatctctccaggattatttctccgttgcaattaaatgcatgcacattgggttggcagtgcctgccagtggagagagtaccagagccagcccccagtccaagagaactaggcggctacttgggctaccttctggatccatcgctggagcgggggcaccaaaccacaagcaggtagccacaaaggctttcccagtctgatttcgttcattgttgtaatttcctcagttataattttgcaaaggtggtttcatattccttaagagttgagccacacataagttttattcatttgttcctacatggacttgactactgattcagtaaataattagtaaatattcagtaaataactagtaaaaagaatgccaaaaatagtgcagatgtagttcatggcccctgtcctcacagagcataaattctaacagtggatagagataagtaggctgggaatcacaattaaatggaaaaataaaaaaaaaggctggatgtggtggctcaggcctgtaatccaatagcagcaatttgggagaccaagatgggtggatcacctgaggtcaggagttcgagatcagcctggccaacatggtgaatccccatctctactaaaaatacaaaaattagccaggcgtggttgtgtgcacctgtagtcctagctactcagaaggctgaggcaggagaatcgcttgaatccgggaggcagagattgcagtgagccaagatagcaccactgcacttcagcctgggtgacagagtgagactctgtctcacaaaaatatataaatacataaataaataaatggaaaaaaaatgctactctaaggagatacaaggtgccctaggagcatatatctctgatgctgtctcctctggaagaatcagagaggattcccttaagaaaataccatctaatctgatacttgaaggatagacagatagacagatagacagagaacagttcaaaaaccagaagaaattagaagcgggggtgctgaaactatacagatccctaagtagagacttgattccctgagaaaggtgccatctaatctgagacttgaaggttagacagacagcagtaggaaaacaagaatgaatgagaaggtaggggctggaaatacagagacccctaaatagaatctttccagaaattaaatgaaggcagaacgttttgaatgtaatgagcaaggtgggaacagtatcagaaaatgagtgaatgagaaggcctagattagaataggctgaaagttttcatggtcaaatctagatattggaacactcttcgttgcaaagagtagaatagagggacggagagtagattgataaagttcttatgaatttatttcttaagaaagaaaggatgttggcccgaatagaagtaatgaacaattagaattgagagaagtggtcagattctgaaaatgtttagcaaataaaatcgatgcaatgtgaattaagaagggaaataagacatagagaaggccaaagaggttgaatatcaccaggtattgctgctcttttgtacttggagtataggtattatttactagtatatggaaaagagaatgaaggatggaaatgaaaaaatgaacagttcatctttgtaagttgagttaaatgaggttgtgagatgtagttgagatatctcattgtctattgaatgtataggtttcaataccgacatccacatctgggctgaatccataaatttgagaatgatttatttattcttttaagcatataatggatgccatcagaatgtgtagattatacctcaggccatacttttaatttacttatttatttatttgacaaataaacattgtacatattttctatgtacaaccttctgcttttatgagtttaacctgtttagagtctatgtataagtgagataatgtgatattttgtgttttggtgcctggcctggcttattttacttaatataatgttcttcatgttcatcaatattgtcagaaacgataggatttacttccatttaaaagctgaatagtgttgcattttgtatataatccacattttcttcatctattaatctgtccacagacatttaggttgattttatatcttggctattgtgaataatgctgcaatggaaatagaagttcagatatctcctcgagacactgattttccaatttttgatatatacttaatagtgggattgcttgatcatatctttagctctatttttaactttcagaggtgtctccatataggtttccataaagaccatgctaatttactctttttttttttttttttttttttttttgagacagagtctcactctgttgcctaggctggagggcagtcatggaatctaggctcactgcaacctccgcctctagggttccagcaattctactgcctctgcctcatgagtagctaagattacaggcgcccaccaccacgctcggctaatttttgtatttttactagaagcagggttttaccatgttgtccagcctggtctagaactactgacctcaggtgatctgcccgccttaacctcacaaagtgctgggattacagtcgtgagccactgcgcagggcctaatttacgttttaccaacagtgtacaagagtttctttttttctacatcctctccaccatttgttatcttttgtctttttggtaatagccattccaacaggtgcaaagtgatatttcattgtgacttcaatttccctggtggctagagaggttgatcatttttcatatacatattctctgtatgtcttcttttgaaaagtgtttattctggtcctttgcttatttctaaatcagtttattttctttctattgaattgtttgtgttctttgtattttgcatattaattctttatcagatgtatggtttgcaaatcttctctaccatactgttgattatctctttaatcttttgattgtttctttgactgtgtaaaagctttttagtttgatgtaatttcatttgcatattttagcttttgtttcctgtccttttctgtcatatccaaaaatcactgtctagaccaatgttatgaagctgttcccctctgttttcttctagtagtttcacagttttggttcttacatttacatatttaactcattttgagtttatttttgtatatgtttagagatttttattcttctgcatgtggttttacaattttcccaatatcatttattgaagaatttgttctttcccagttgtgtgttcatgaaacctttgttgaaaagtcaaattaatgtaaataattgggtttatttctgggttttctgtcctgttcatttgctctctgtttctatttttatgcaactattgtgctattttgatgactgtagtactttgtagtctattttgaactcagatagtgcgatgcctgcagctttgttccctttactcaaaattgctttgcctattcagggtttgtttttttgtgtgtgattccatataaattttaggatttgtttctatttttgtaaaagctgccattagaattttgataggaattgcattgtatctttagatttctttgggtattagggacattttaataatagtaattttccagtccatcaactcaaaatacatttctacttatttttgtcttcttcagttttccctatcaatattttatagttttgagatttgttattattgctgttatttttgagacaggatctcattctgtagccaagactggagtatagtgtcacaattatagctcactataatctcaaattcctgggcttaagcaatcctcctacctcagacttccaagaagcaaggactatagacacatgctactatggccagccaactttttaaatttcttgtagagacatagtctcaccatgttgatcgggttgaagttttatacttttacgtgtacttgttttttacctactcggttaaattgatttctaagtatttttgcagcaattttaaatggaaatttatttattttttaaagatggtttattgttatacagaaacactacagatttttgtatgttgattttttttatcctgcaattttcttgaatctgtttatttgttctaaaagatttttggtggatcctttagggttttccgtatataagaccatttcatctttaaacaggcacaattaaacttcttcctttccaattttgatgccttttatttctttttgttggcgaattgctctggtcagaactacgttgaatggaagtggtaaatgtgaatatctttgtcttcttcctgatcttagagaaagggttttcaacttttcaccattgagtatgatgttagctgtgtgtttgtcatatgtgactttttttgttaaaaactcttcaattttattgcttattatatttcttcacatatcatttattcagtcaacactatattagtttactgagcacacaaataaataaaacagaagcccagaactcaggtagtttggatatcccacacactaatctgtgtactgtttgcaaatcacactgtgttgcaacatctgtacctgatgttgcaagactaacatttttgctacctcttctcagaagcctttgtgatctcacctgttggaatgcactaatgttttctgagccccttaaatatcttgtctacattcttttaagaagctcttcaccaactgtcaggtaatgtagtttgatgaattaagaatgggggctctggattctgaacccctagatttcaattcttgttcccagttactatatactcggtgttcttttacattatttgagtcaattacttattatcttccattttccatataagagaggttaatatatgttttatatggaatttttgtgaaatttcagtaatgcacttggcatgatgagggctcaatgaatattaactattttaactgaaccatatcatgattaactatatagactatggtgaaaaaaacaagatttgaatcctaattcatgtgatgtgacataagttattatttaaatggtgaatataaaatagggaatataataactaccccactggcttattgtgagggtccagtatattaacatttgtaaaacctttggtacagtgatatgtaaatgataatgatgattataataatgatttaaattgttttatatgcattcattttttatttataataagtacatgggagatattaccctttactaagttaatttatattatgtaacttttttcctggtttgtaatgtctaatgtttttctcataatagctgcccaataagcacgtatgaaaatattaattcaagataacccagacaatgaggctggtgcttctgtgccaaagcttttgtgcaatgtcctgacatgatttctttagatgtcattttctgtcagcactatccttacatctacatggattgtataattatctttgtagcattgattgagaattgataagatatccagcatttctgtgtacaatctgccgaaatcatatctgttgtattgaaacaaaggatgtattactttggtatctatatttccttataaatattcaaattactctaaggagtaatacattaacatggt

SEQ ID NO: 583 - DNA, 6000 bp, Homo sapiens
taaagggaaagagtacaaaagagagaaattttaaagctgggtgtccggggtagacatcacatgtcggcaggttccatgatgccccctgagccacaaaaccagcaagtttttgttagtgattttcaaaaggggagggagtgtacgaatagggtgtgggtcacagagatcacgtgcttcacaaggtagtaaaatatcacaaggcaaatggaggcagggtgagatcacagaaccagggtgaaattaaaattgctaatgaagctttgggcacgcattgtcattgataacatcttatcatgagacagggtttgagagcagacaaccagtctgaccaaaatttattaggtgggaatttcctcatcctaataagcctgggagcactataggagaccggggcttatttcattccttatgacaaccgtaaaagacagacatccctagagcagccattttagagacctccccctaggaacgcattctgttccttgctgagaaaaagaattcagcaatatttctcctatttgcttttgaaagaagagaaatacggctctgttccgcccagctctcaggcagccagacctaatggttatctcccttgttccctgaacgtcgctcttatcttgttcttttttcaaggtgcccagatttcatattgtttaaacaatttgtgcagttaacgcaattatcacagggtcctaaggcgacatacaccctcagcttacaaagatgatgggatgaagagattaaagtaaagacaggcataggaaatcacaagaatattgattggggaagtgataagtgtccatgaaatctccacaatttatgttcagagattgcagtaaagacaggcataagaaattataaaagtattaatttggggaactaataagtgtccatgaaatcttcacaatttatgttcttctgccatggctttagccggtccctctgttcagggtccctgacttcccacaacaccagagtttatgtgaaatggaagtaaatcatctttgtgcacatttacattaagaagaaagagcccaaaggttgaaccacaaactatagagttcctaggtcctattatcttttctgcctgctttaaatctaccattacttttcttctgagataaaaaccactctttgtctttgtttctgttagaccgcttttcatttctgtattgagtatcttaagtactgtagaaaagatgtcacttcttcctttaaggctgtcttgtaatatatataaggactggaattgtgtttctaaagaaaagcattcaagtatgacaatatactacctgtgttttcaccattaaaagtgctgtttagtagtttaaacttaaactatttaatgtcatttaataaagtgaccaaaatgtgttctttattgtattttcacagctttgaaaaaataaataattcaaccatatatccctaatatttcacagcctccttaagaatgtataacagtcaacaaacataaaagaaatagcagacagagtatgagatgctgaagaaacactacagtgcactgaatgcaaaattatgcacttgtgttgtgcaggggaaatagtttggggttaaatcagtcactcagtgatgtgaagattttgaagaactggaagaactacaaattcagttgcaatcatgagccttttctaatcccaaactcattaaaagtgaaggcgaatttctgacctcttgcaatccttcaatgttaagcttcatactgccattttattttaatatttttttaagttctggaatacatgtgcaggatgcgcagtttgttacataggtaaacgtgtgccatggtggtttgctgcacagatcaacccatcacctagttattaagccaagcatgcattatctcttttccttaatgctctctcgcatcccccatcctcttatctggcctccatgtgtgttgttcccttccctgagtccatgtgttcttattgttcagctcccacttataagtgagaacatgcagtgtttggttttctgttcctgcattagtctgctgcggataacatcttccagcttcattcttgtccttgcaaaggacatgatctcattcatttttatggctgcattgtattccatggtgtatatgtgtcacattttctctatccagcctaccattgatgggcattttgattgatttcatgtctttgctattgtgaatagtgctgcaatgaacatatgcatgtatgtaatgtatctttataatagaatgatttatattcttctgggtgtatacccagtaatggtatttcttggtcaaatggtatttctgttctaaatgactcaccacacactcttccacaatcattgacctaatttacattctcaccaacagtgtctcttgaatacagcacactgatgagtcctgtctttttgtccagcttgccattgtgtgtcttttaattggggaatttggcccatttattttaaggttaatattggtatgtgtgaatttgattctgtcatcatgatgttgcctggttaattttgcagacttgttaatgtagttgcttcatagtgtcatgggcctgtgtattttagtgtgtttttatagtggctgctaacagattttcctttccatgactactgtttcctacaggatgtctttcaaggcaagcctggtggtgacaaaatccctcagcatttgcttgtctgaaaaggattttatttctccttcacttatgaagcttagtttggccagacattaaattctgggttggaaattattttctttattaatgttgaatattggtctccagtcttttctggcttgtaggatttctgctgagaattccactgctagtctgatgggcttccctctgtaggtgacctggcctctctctctggctgcccttaacattttttcctttcatttcaaccttggagaatctgacgattatgtgtcttgggattgatcttcttgtggagtatcttactgggactgtctgaatttcctgaatttgaatgttgacctgtcttgctaggttggggatgttctcctggatgatatcctgaagtgtgttttttgacttggctccattctccacatctctttcaggtacttcaatcagtcataggtttggtctttttacatagtcccatagttctggaaggtattgttcattgctttttatttttttctgtaatcttttctacctgccttattttagcaagatagtcttcaagctctgatactctttcttctgcctggttgatttggctattgatacttgtgtttgaatcatgaagctctcacgctgtgtttctcagctccatcatgtcatttgtattcctctctaaactggttattctaattaacagttcctgtaatcttttatcacggttcttagcttctttgccttgggttagaatataatcctttagctcagcaaagtttgtcattacacactttctgatacctacttctgtcagttcatccatctcagcttcagccctgttttgtgcccttgctggagaagtgttgaaatcatttgaggagaaaaggcattccagcttttggaattttcagcggttttgcgttggtttttcgtcatctttgtggatttatctacctttaatctttaaagctgttgacctttggatgggatttttgtagggtcttttttgttgatgctgtgttattgttgttttatttttttttgtttttcttccaacattcaggcccttcctctgcaggtctgctgcagtgtgctgaggatctactccagacactgttcacctatgtatcaccaatggaggctgcagaacagcaaagagtgctgcctcctccttcctccggaagcttcttcccagaggatcactgacctgacgcctgttggaactctcctgtatgaggtgtctggcaacccctgttgaatggtctaacccagtcaggaggcccaggatcaggaactcacttaaggaaagagtctggctatcccttagcagagatggtgcactgggctgggggaatcccccttgtctggatcgctgatactcttcagagccagcaggcaggaaagattaagttggctgaacctgagaccgcagctgcccctctccgcaggtgctctgtaccagggaaatgagagctctgtctgtaaactctaggtggagttgctgaaattcctgcaagcatttcttgccgggagaggagggatggatcccggtcccacctaaagaagcagtctggccatgatctgccacagcggctgtgctgcactgtgaagactgctgcccagtccaatctgcccagcctccctagcactggtagggaaaaaccgctgactagagctgcagtaatggcagtcgcccctcccctggggaactcggtcatctctggcgtactccaggctgctatgctggctagtggggattctaatccagcggatctaagcttgcaggcttctgtgagaatggacctgctgcaaggccattttgctccctggcttcagccccctttccatgggagtggacgggactcctgcctcactagagttccgggagctgctggactatgtaaaaactcctgcagctcagtgcctgcccaaaaagctggaaatatgaactattgggttaattcttatcaggaaatgaaaaagagttgttagattaaacttcttcagtcattgtcgttctttgtaatcagagaaagaaaaactgagagatcaggaagagaagagacagatggatagaagaagtttgggtggccacaggaaacaagaaaagaaacaagctgaggtgtcaacccacaggataatattttgtcattttcatttttttcccccaagtcagaaactaaattccagtaattggatgccaatttgctgatgacaaggcacttcctgataatgagtctggaattctgagcagcagtttcacaatctgtaattacacgtttccgccctttgcaataaggaaatacatagtttactttcatttttgactctgaggctctttccaacgctgtaaaaaaggacagaggctgttccctatggcaggtgagtccttttctgactaggagtttgggagtaggaacttagaaaacacttgatttattgctctgaaataaacacaagaaaggaagtgagccgatagcacacatgttgaattccttttcttactgattgtgtgtagtttgaatcatgggacctggtgttagagatattgacggaggtcatatgttttccagatgtctttgagccagaaagaagttaattcctttctttcagcttctggtaatcaaagggagggtaaagaaagccagaggaagttatttgtgtgagacaattctagaagtttcgaaatgcactctgaaatctttcttttgattccaaattaattgcccagatcacaaacctttttcgcagaatcagatctgagagcctctgaattgttatcttcttcgacatctcttattgtgaattacattcttggtctgtttaaagtgattcaattttttcctctttctcgttggtcctgatactgactactttaatataatatttcatgggttaatatcacagttgttttgttttgccgttgttattgtttttaactggtatccttccctccaggacttaactctccaatccattctgcacacaacttttaggtcacctgtcttatacacagaagctgaaaaagcctaagggatagagttacttaggcagctagtattccagcaggtcataacgcttctttggcttcattctcctcacaggaaaaggaagaaattggactagatcagtgaattctaaaccttataacatatcgcagcaatctgtagtcatataaaaaaagtcagatgactacccccttcctcaccgcgaatagctcaatcttaaataccctgcaggcatttattacctttgaagatcgtcacataattcttatgaaactgacttgacataggtttgttctattaggaaagttgaccagttagttaacactctctgcttatctgctagtgatctatta

SEQ ID NO: 584 - DNA, 6000 bp, Homo sapiens
ttgacaataatttggtgatcaaacatgtggcacctcagagaagactcaggacccggaaggagttgcccaaatatggagctatggtagtagcagggcccattgaagcctacatgacttcaagcttctcatctggtggaactggtaagtcctcctgagcccccgacttctctttggttgatggtctttgatttatcttagctggtttttctcctagaaagttgtagtttcaggattttaattatagtttggagatgattttcaaggaattctctctattgctttgtctcccaaaattaatcttaattcactttgcacatttgcatgaggaactgaattgttgatttcaccggttaatgagaaactgagttttctcaactttttttgaagagaaagggcatttgctcctcctagccaaaaggcacccctgggtatgtctgggggttgacccccttgtgacatgcagtagccctgtaggaaaatccccaacaaaaattaattataaaaatggcttgtccaggaaatgaatatcaggctgattacccagtgttttgagccctctcagagtttgtagaactctggagagagaaactgagacatgtacaagggtagacctgactcaatggtgacacactgtagagtcctgcccacgagcagtacaaatcgatccaccacacaaaaaccctaggccacagctcagtttctccttttaagaaaaaaaaaaaaaagcaggaaacaaataatctaagaatgagtagaaaacaaggaggaaaagcctattttgagcactttgtaggtttttttggcacctctacttgccagagcattgggggaaacccatccctgataattctttgtgggcacttatctatttccctaagtgtcggccagtctgagaaataaagggaaagagtacaaaagagagaaattttaaagctgggtgtccggggtagacatcacatgtcggcaggttccatgatgccccctgagccacaaaaccagcaagtttttgttagtgattttcaaaaggggagggagtgtacgaatagggtgtgggtcacagagatcacgtgcttcacaaggtagtaaaatatcacaaggcaaatggaggcagggtgagatcacagaaccagggtgaaattaaaattgctaatgaagctttgggcacgcattgtcattgataacatcttatcatgagacagggtttgagagcagacaaccagtctgaccaaaatttattaggtgggaatttcctcatcctaataagcctgggagcactataggagaccggggcttatttcattccttatgacaaccgtaaaagacagacatccctagagcagccattttagagacctccccctaggaacgcattctgttccttgctgagaaaaagaattcagcaatatttctcctatttgcttttgaaagaagagaaatacggctctgttccgcccagctctcaggcagccagacctaatggttatctcccttgttccctgaacgtcgctcttatcttgttcttttttcaaggtgcccagatttcatattgtttaaacaatttgtgcagttaacgcaattatcacagggtcctaaggcgacatacaccctcagcttacaaagatgatgggatgaagagattaaagtaaagacaggcataggaaatcacaagaatattgattggggaagtgataagtgtccatgaaatctccacaatttatgttcagagattgcagtaaagacaggcataagaaattataaaagtattaatttggggaactaataagtgtccatgaaatcttcacaatttatgttcttctgccatggctttagccggtccctctgttcagggtccctgacttcccacaacaccagagtttatgtgaaatggaagtaaatcatctttgtgcacatttacattaagaagaaagagcccaaaggttgaaccacaaactatagagttcctaggtcctattatcttttctgcctgctttaaatctaccattacttttcttctgagataaaaaccactctttgtctttgtttctgttagaccgcttttcatttctgtattgagtatcttaagtactgtagaaaagatgtcacttcttcctttaaggctgtcttgtaatatatataaggactggaattgtgtttctaaagaaaagcattcaagtatgacaatatactacctgtgttttcaccattaaaagtgctgtttagtagtttaaacttaaactatttaatgtcatttaataaagtgaccaaaatgtgttctttattgtattttcacagctttgaaaaaataaataattcaaccatatatccctaatatttcacagcctccttaagaatgtataacagtcaacaaacataaaagaaatagcagacagagtatgagatgctgaagaaacactacagtgcactgaatgcaaaattatgcacttgtgttgtgcaggggaaatagtttggggttaaatcagtcactcagtgatgtgaagattttgaagaactggaagaactacaaattcagttgcaatcatgagccttttctaatcccaaactcattaaaagtgaaggcgaatttctgacctcttgcaatccttcaatgttaagcttcatactgccattttattttaatatttttttaagttctggaatacatgtgcaggatgcgcagtttgttacataggtaaacgtgtgccatggtggtttgctgcacagatcaacccatcacctagttattaagccaagcatgcattatctcttttccttaatgctctctcgcatcccccatcctcttatctggcctccatgtgtgttgttcccttccctgagtccatgtgttcttattgttcagctcccacttataagtgagaacatgcagtgtttggttttctgttcctgcattagtctgctgcggataacatcttccagcttcattcttgtccttgcaaaggacatgatctcattcatttttatggctgcattgtattccatggtgtatatgtgtcacattttctctatccagcctaccattgatgggcattttgattgatttcatgtctttgctattgtgaatagtgctgcaatgaacatatgcatgtatgtaatgtatctttataatagaatgatttatattcttctgggtgtatacccagtaatggtatttcttggtcaaatggtatttctgttctaaatgactcaccacacactcttccacaatcattgacctaatttacattctcaccaacagtgtctcttgaatacagcacactgatgagtcctgtctttttgtccagcttgccattgtgtgtcttttaattggggaatttggcccatttattttaaggttaatattggtatgtgtgaatttgattctgtcatcatgatgttgcctggttaattttgcagacttgttaatgtagttgcttcatagtgtcatgggcctgtgtattttagtgtgtttttatagtggctgctaacagattttcctttccatgactactgtttcctacaggatgtctttcaaggcaagcctggtggtgacaaaatccctcagcatttgcttgtctgaaaaggattttatttctccttcacttatgaagcttagtttggccagacattaaattctgggttggaaattattttctttattaatgttgaatattggtctccagtcttttctggcttgtaggatttctgctgagaattccactgctagtctgatgggcttccctctgtaggtgacctggcctctctctctggctgcccttaacattttttcctttcatttcaaccttggagaatctgacgattatgtgtcttgggattgatcttcttgtggagtatcttactgggactgtctgaatttcctgaatttgaatgttgacctgtcttgctaggttggggatgttctcctggatgatatcctgaagtgtgttttttgacttggctccattctccacatctctttcaggtacttcaatcagtcataggtttggtctttttacatagtcccatagttctggaaggtattgttcattgctttttatttttttctgtaatcttttctacctgccttattttagcaagatagtcttcaagctctgatactctttcttctgcctggttgatttggctattgatacttgtgtttgaatcatgaagctctcacgctgtgtttctcagctccatcatgtcatttgtattcctctctaaactggttattctaattaacagttcctgtaatcttttatcacggttcttagcttctttgccttgggttagaatataatcctttagctcagcaaagtttgtcattacacactttctgatacctacttctgtcagttcatccatctcagcttcagccctgttttgtgcccttgctggagaagtgttgaaatcatttgaggagaaaaggcattccagcttttggaattttcagcggttttgcgttggtttttcgtcatctttgtggatttatctacctttaatctttaaagctgttgacctttggatgggatttttgtagggtcttttttgttgatgctgtgttattgttgttttatttttttttgtttttcttccaacattcaggcccttcctctgcaggtctgctgcagtgtgctgaggatctactccagacactgttcacctatgtatcaccaatggaggctgcagaacagcaaagagtgctgcctcctccttcctccggaagcttcttcccagaggatcactgacctgacgcctgttggaactctcctgtatgaggtgtctggcaacccctgttgaatggtctaacccagtcaggaggcccaggatcaggaactcacttaaggaaagagtctggctatcccttagcagagatggtgcactgggctgggggaatcccccttgtctggatcgctgatactcttcagagccagcaggcaggaaagattaagttggctgaacctgagaccgcagctgcccctctccgcaggtgctctgtaccagggaaatgagagctctgtctgtaaactctaggtggagttgctgaaattcctgcaagcatttcttgccgggagaggagggatggatcccggtcccacctaaagaagcagtctggccatgatctgccacagcggctgtgctgcactgtgaagactgctgcccagtccaatctgcccagcctccctagcactggtagggaaaaaccgctgactagagctgcagtaatggcagtcgcccctcccctggggaactcggtcatctctggcgtactccaggctgctatgctggctagtggggattctaatccagcggatctaagcttgcaggcttctgtgagaatggacctgctgcaaggccattttgctccctggcttcagccccctttccatgggagtggacgggactcctgcctcactagagttccgggagctgctggactatgtaaaaactcctgcagctcagtgcctgcccaaaaagctggaaatatgaactattgggttaattcttatcaggaaatgaaaaagagttgttagattaaacttcttcagtcattgtcgttctttgtaatcagagaaagaaaaactgagagatcaggaagagaagagacagatggatagaagaagtttgggtggccacaggaaacaagaaaagaaacaagctgaggtgtcaacccacaggataatattttgtcattttcatttttttcccccaagtcagaaactaaattccagtaattggatgccaatttgctgatgacaaggcacttcctgataatgagtctggaattctgagcagcagtttcacaatctgtaattacacgtttccgccctttgcaataaggaaatacatagtttactttcatttttgactctgaggctctttccaacgctgtaaaaaaggacagaggctgttccctatggcaggtgagtccttttctgactaggagtttgggagtaggaacttagaaaacacttgatttattgctctgaaataaacacaagaaag

SEQ ID NO: 585 - DNA, 6000 bp, Homo sapiens
agtgtgaattgagttggggaataagacatacagaaggcagaagaagtttaatatcaccaggttttgctgccttcccgcacttggaagttaggtattattttttactatatggaggagcaaatgaaggatggaaatagaagaaaattagcagttcaattttaaaagttcaattgaatgaggttgtgggagtattttaagtgacgtctcatttttggacgtatgggtttccatacgggatccacatctgggctgatccataaatttgagtcatttatttattattttaaacttataattgatgctatgagaatttatagattatgaaaagaggctctcaagccaaatgtcttgaattgttttttataaatattattttatttatttaattggcaaataaatattttatgtacttatgtacaaaatgatgtttgaaatatatattgtagaatgcctaaagagctaaataacatatgcattacctcatatgctcatctttttttgtgattacagcacttaaaatttacactgtcaaacaattttcaagaattcatcattgactatagtcactatgtggtgcaatagatttcttaaacttacttctccgatctaattgaaatgttgtttcctttgatcaacatctccccaaacttcctgcctcctcctaatcaccaccattctaccctctgcttttatgtgtttaacttttgtgagtctacacatcagtgagatcatatagtatttgttttttggtgcccagcttggcttattttatttaatgtaatgttatccatgttaatcaatgttgtcacaaatgacaagatttctttcttttttctaaagctgaatactgttgcattatgatactttctccatccattcatccatctacagatacttaggttgattttatatcttgcctattgtgaataatgctgcaatcacaatggaagtgtatatgtcttttcaacacactgacttaatgtttaaaatatatactaaatatttgggctgctacatcatttttaacatttttaattcattttaatttttaactttttgaggagtttcctattgtttttcattatgactgtactaatttatattttcaccaacagtatacaagagttcctttttctctacatcctttccaacacttgttatcttttttttttataatacccattctaatcattctaacaggtgtgaggcattatctcattgtggttttaatgtccctggtgatcagagatgttgagcattttgtatagacctgttgtccatttatgcatcttcctttgaaaaatgtctattttggtccttggctcattttgtaatatttgttttcttcctattgaattgtgtttctcatatattttgaatattaatatcttatcagacatatggattcaaatatttactcctattctgttggttatctcttcacactgttgtttccttggctttgcaaaagctttttagtttgatgtaatctcatatcttaattttgctttcttttcccatatttttagtgttatatccaaaaatcattgtctataccagtgtcattaagcttttccacgtttttgtgtagtagtttcaaagtttcagttattaggcttatgtttttaatccattttgagttgatttttgtatatggtggcagataagggcccgttttcattcttctgctcttggatatttaattttcccaacatcatttatcgaagaaagtgtccttagcctattgtctgttcttgaaactttgtcaaaaataaatttactgtaaataactgggtttatttctggcctttttgttttattccattgatctctgtgtttgcttttatgccagtactatgtttgattattataactttgcagtatgttttaaagtcaggttgtgtgctgcctccagttttgttctttactcaaggatgctttggctatttgaatttttaaataattccatatgaattttaaggttgattttcctatttctgtaaaaaatgccattggaggcttaataggaattgtattgaattcatagatttcttgggtagtatagacataataatgtaatattttccaattcatgaacacgggatatcttttgatttttgtgaatctcaggcattttcttctgtcaatgttttatagttatgagtatatacatctttaactttttggttacatttattccttattatttcatgaaatttttttatagccattataaatgagatttttatcatccaattttttagtttgttgttataaaaatgatactaatttttgcatgttgtttttgtatccttcaactttactgcatttgtgtattagttccaacagatttttcatggagcatttagggttttcttaatatatgtaagatcatgtcattcataaacaggacacattaacttcttcctctcctattttgatgcctttaaattctttctgttgtctaattcctctggttaggatttctagaatagaagcggtgaaagtgggtgtgtttgtcctcttcctaatctttgaagaaaagcttttatcttttcaccattgagtatgatgttaactgtgtgttttctataagtggcatttattgtgttgtaaacctctttaggttaattgcttttcacatgtctccacatattcattcagtcaaaactatattcatttactaagcatgcaagtaagttaaatagaacttcagaactcaggcagagtagacattccattaactaatctgtgtactctttgcaaatcttcacattccctgttccaacatctacattgcatttaaaaccaacgtttttgtcttgtcttctaagaagcctctgtaaactctcctcctggaattttctcatcttttctgagttccttaagcatcttatctgtgttctcttaagaagctcttcaacaactatcatgtaatgtagtttcatgacttaagagttggggctctggattctgatcacttgtacttctattcctgctccggagttactgtatacttcattttcttttcacaggattacactcaatttcttaagtaacttatctgtatatgtttccttttccatataaaagaggttaatatacattttgcatggagtttttgtgaaatttcagtaaagcacttgacctcatgggggttcaacatatattattattactgaaagcctgtcatggttaactctatggaatgtggtgtaaaaataggatttgaaccctaattcatgtgatttagggcagcctattatttaaatgacttataaaattgataaaataataaatattctactggtttattgtgagagtccagtatactactatttgtaaagtacttagaagagagacttgtaaataataatgattattactgatatgatataataataataatgataattactgatttattatatcagtataatgataattactgatttattatatcagtataataatgataattactgatttattatatgagtataataataatgataattactgattaaatcattataataatgataattactgatattgttaataataatgataattactcatgatataatgatgattgtcattgctttatgtgaattcattttttaatcacaaaaaatacataggagatgttacatttattaaatgtaactttttgtcctgttttgtaacttccatgtgtctttctaataatggttggttcattattggcatatgaactcaagataacctggaaaatgagtctggtgcttctaggccaaaattttgttcaatgtcctgacatgttttctttagaaaatgtattttgtgtgaaagctatccttatatttagataaactagataatgatctttatagagttaacagaagagaggagatatctggcttttccacatacaacctgcttaaatcatatctcttgtattgaaataagtgatttattactttgatatatatatgtgtgtgtgtgtgtgtatgtgtgtatatatatatgtgtatatatatgtatatatgtgtatatatatgtgtgtatatatatgtatatatatgtgtatatatatgtgtatatatatatgtgtatatatatatgtgtgtgtatatatatatatacgtgtgtatatatatatatatacgtgtgtgtgtgtatatatatatatatatatatatatatatatatatatatgtgtgtatatatatatctcctggtaaaaatctgaattataccaaggagtaatacattaactcagtattatattaatctaccataatatttgttaaatattttcaattctaaattttggtttgagaaaaggcgctgaagaattaggtatctagatgcatttatccacttaatgattaagttggatgtttacttatgtattcagcaagcagattaagcacttttaagcattttgagcagaaaattgttaattagcacaattgggtatagcttgtgtgttaaaaaacacaaattcaaagatatagttaattcaccaaggaagctaaatacagagaaaaggaaagatcctgcagtctagtaggaataatttacagtctagacaagagaatggactgtcctgggtgcacacacttcaggtaggtcatcatgagtttgagcaagagagagaaatctgaatacaatggatgaccaggaatttagcattaggcccaatgctgcagaaaggaaaaagacaagctataaaaaacaaacttaagtggcaatgaattgttaaacacagcctggtaggaatttgatgggtgagagaatgctacaggtacaaagaaataatgagtatttgttgaagacatggtaagacagaatgtattttcaagggtgtttcacattacagagctttgtctaaagcaagggcaaaactctttaagctgtgcccagagttgaaggagtctttatatttctgatagaagacagtggcaaaaaaaaaaggcgtaagaattttgaagctatgttcaaaggtatccttcagagtggattggataacttcgtgataaaccacatgctaaagaacaacgtggctggacaaacatctatccagaccctagtacctaatacggatcaaaagtcgaccagtgtaaaaagtaagactggatattttacaatggatatttccaattttttagaatctgttcaattataagtcccatgcagtgacttctgtgatccccctatcctccttcctttatgaaactatcattttcaccaaacctataatttttccttcagggactaccttgtcttttgtggggtgggatccagtttccaatcggctaaaaggctgagtccttgggttcagattgtgcatggaaataattaatagtagaggcttgtagtaagacatattcaaacctaaatctagattctgttactaataatctgtgtggcttcctgcatgtatcttaacctctcttgctccctaatcatcagtcttaccatctatgaaatggggacaatttcagtactttctcacaagactgtggaaggttagaaacattgtgttggctggcatcaacatgccaataactcccaagatattagctgtcatccagaactctctcctctgagctccagactcatttagctctagatgtattttcaacaattctgctccagtgtttcattggcttcattaaactaatgattacctaaaaattaaacactttttcttctaaacaaatttgttccaactttaacccctttccattttagtaaaagaaactaatatatatcaaatttctcccaccagaatgcaactggttgctttaccaatgactggcagtaattagaagagggccaggcaaaaaaatttatcactttgatatctatattttccaataaaaattcaaattatgctaaggtgtagtgattaacctgatgtcacataaattcaccatgctagagtagttatgatattattttcaatttcaaattttgattgaggaaaagatgctaaaaaattaggactct

SEQ ID NO: 586 - DNA, 6000 bp, Homo sapiens
gttatcaatctccttccacttcctcctcagataagtagtcatcgaatttctatcactgtacgttagtttttcctaatctagaactttatataattggaatcacagggtatgtgttccttcctatatggcttctttcactcataattgaaacatatttttttcatccatgttattgcatatattagtaatttttccctttcatgactgaatagcatttcagtgtacatgtatagcacaaattgttattttatgctctggaattggatatttatttgtttccagtttttgacatcttcatttttgaggaaacagtgggcccttgcaatctagtggctcagtgtttagctttccatgacatgagactcaaggcttatggttctacattcccagatatatggtctagtcatggcttctgtttctgggatgtcactctgacatgcttcaactcagtggttcatggctctggctgtgggcgaaaccctcatgtgaaatactttagttaatagaaaaaaaattgaatcatttaaaagtacatgatgggaagataagtaatacacaggcaatttctgctttcttccatgctacaaatcctcccagtggcaaggagcacaagtttgtgctgccatcggattaagtcattggcaaagtaaagataaaacaccatgagaggttgggcatggtggctcacatctataatcccagcactttgggaggccaaggtggccagattacgaggtcaggagtttgagaccagtctggtgaacatagtgaaaccccatctctagtaaaaatacaaaaaattagccaggtgtggtggtgcctgtaattccagctacttgggaggctgaggcaggagaatcacatgaacccgggaggcggagatggcaccattgcactccagtggggtgacagtgcgagactctgtcaaaaaataaaaaataaaaaaaaaaaacgatgtcctcctacacagtgagttctagtcaaacccaaacacatttaacccttcacctagagcacagaaaataaaactggtagcccacatgtcaaaaggtggatgtttttctaactctgggtctttaatctccaaaaatattaaggtaacaaatcaggagaatttttggtaaagaatttgataaacgtaacataccgtgtgcattttgcaattagcccacctttcatcaaatagatttataaaataaattagccacattgagtttgtttctgggataagcaattgaacatgtgattgcaaaggcagagaccttttctggccttccctggctcctctgtctaaagttcatgagtcctgcaatattttgtctcctactttgccaattttttttttatcattctcatcacttgctacatttgaacagtctgaatattccagttacatattacataccaggtgtattagtctgttctcatgctgctaataaagacatacccaagactgggtatttataaagaaaaaaagaggtttaatgggctcatagttccacatggctggggaagcctcacaatcatggtggaaggcaaaagaggagcaaggacacatcttccatggaagcagacaaaaaggcatgtgcaggggaactcccctttatgaagccatcagatctcatgagactttttcactatcatgagaacaacatgggaaaaacccacctccatgattcaattacctcccaccaggtgcctcccatgacaccaggggattattacaatttaaggtgaggttttggtggggacacagagccaaactctgtcattctgcccctggcctctcctaaatgtcatgtgctcacatttcaaaaccaatcctgccttccaactgttcctcaaagtcttcactcattccagcattaacccaaaagtccaagtccaaagtcttctctaagacaaggcaagtcccttccacctatgagcctgtaaaatcaaaagcaagttagttacttcctagatacaacggggatacaggcattgggtaaatacacccattccaaatgggagaaattggccaaaggaaggggctacattccccatgcgagtccaatatccagtagggcagccaaatcttaaagcttcaaaatgatctttgactccatgtctcatatctcggtcatgctgatgcaagagtcggggtcccatggccttgggcagctccaccctcgtggctttgcagtgtacagcatccctcctagctgctttcatgggttggcattgagtgcctgagtattccaggtgcatggtgcaagccgtttgtggatctaccattttaggatctggaggatggtggcccttttctcatggctccactaggcagtgccccagtgaggactctgtgtgggagctcacaccccacatttcccttctgcattgccctagtagaagttcttcatgagggtcccacccctgcagcaaacttctgcctggacatacaagcatttccatacatcctctgaaatctagacagaggttcccaaacctcaattcttgacttctgtgcccctacaggctccacaccacatggaagctgccaaggcttggggcttgcaccctttgaagtcacagcccaagctatttcttggccccttttagccatggcttcagtggcccgggaagaagggcactaagcctttaggctgcatacagcagaagggccctcggcttacctcatgaaaacatttttttccctcttaggtctccagtcctgtgataggaggggctgcctggaaggtctctgacatactctggagacatattccccattgtcttggagattaatgtcttagagattaacatttggctcctcgttacttctgcaaatttctacagttggcttgaatttctccttagaaagtgggttttgctttcccagcacatcatctggctgcgaatgtttcaaacttttatgctctgcttcccttttaaacataagttccaattccaaaccatatctttgcaaatacataaaaatgaatgcttttaacagcacccaaatcacttctggaatgctttgctgcttagaaatttcttctgccagatgccctaaatcatctctctcaagttcaaagttccacagatctctagggcaggggcaagatgccaccactctcttcactaaaacgcagcaacagtcacttttattccacttcccaacaagttcctatcttcattcgagatgagcagcatttagtcaaagccattcaacaagtctctagaaagttccagattctattttcctatctttctctaagccctaagaactgttccaacctctgcattttacccagttccaacatcgcttccacatttttggagatctttacagcagcactccattactcagtataaatttactgcattagtcatttctcacactgctaataaagacatactcaaggctgggtaattatatagaacaaaaaagatatttaatagactcacagttccacatggctggggaggcctcagaatcatagcaaaaggcaaaagaggagcaaggacacgtcttacatgggtgcaggcaagagggtatgagcagaggaattcccttttataaaaccatcggatctcatgagacattcattatcaagagaacagcatggaaaaaaaacagcacccatgattcaattacatcccaccagatacctcccataacacatgaggattattacaattcaaggtgagatttgagtagggaaacagagacagaccatatcaccagccttcatgtttgtctttccctcttgaatgtgagaccaaaggggaaaggaccatgatatgttttgactgaacctctggcacctagagcaatgtcgtccgtatatgtttgctaaatgaatgactagatgcactgcttgaggattctaacaaaagataaacttagctaaataatctgcaaataatcatccttgattatttttctaaccttaaacatttgtattaattataataatatcactcattatttgcttaccatttgccaggctatgttccatgcattttccacattttctctcacttaatgctcaaaactgtgtaggtacatactattaataaaattatttcacatacagaggaaccaatgcatagggaagttcattatcttgccaaggaagggaagtttaaaatgctaagttcgacattctcattccagagcctatgctctgggcctctacaatgcaatttccctcaaaaataaaccctccaggatgggtgggtggctcatgcctgtaatcctagcaatttgggagaccaaggtgggcacattgcttgagcctgggagctgaagacaagcctaggaaacacaaggagaccctgtctttacaagagatacaaatattagctggccatggtggcatgtgccagtaattgcagctactcgggaggctgagttggaagaatcatctgagcctgggaagtggaggctgcagtgagccaaggtcaaataactgcattccggcctgcacgacagaatgataccctgtatcagaaaaaaaaaaaaacagaaagaaaaaagcaatgtgaaaagaaggacattaaataagaaaagctttaattctggtgaaaaatgtttctatttcttaaagcaaaaatgtttcacagggacatacattacccacaactttcccaagagctatgaggtggggtcaggggaacagtggttcacatactccaaaggttgtgttacttttctccgtcaagctttctaatgattgagaaactcttcactgtgtgaatttaattgtacacatactttttcaatcctgtcttactctccaagccccattcccctcctaccctgatctatccaagggctggtgaagaaaatttcccatggatacactacctgatgcaggctacagttctgattctttaatgggaagaaaaataaagacatgcatatgcatgcacagtgagtatttcccaatacatgtacaggccctgccaaaaaggaaggcgaagcatactttcagtttcagtcacacaagaagggaggagagaaaagccatggccggtgagtcttttactgttccaagaacaggtccctgggaagaaagagttttggaaggggctggctcttctggaagccataattagcatctgtggaagtttacttgagtagaagcaaggaaaaggggggagagggaggagagaaggaactagaagattcttgcagactttagaaaggaaaggcaagcccagaaaggaactgaggctttaggggaagcctgatgtcattttgcaatcttaattaaactcttacttacatgttgaaagtctgacagagggtacagaattggcacaggaggagtactagcagcagtggttcctaaatgaaatgggctatttctgcttcattactttattaaccagagttaaataaacatgcgacataagaggatgatctctgctttccagggactgatgtggaaatggtaaactcagtcttcaggtcactccatgcacatgtatggagactattgagggaaacaagtaggacagcaatacagtaagaagagggattacccaactgtgaggagggggacatttcactgatgaaatctaaatgaggtcactttctgttgattacatgagaggaatatgaggctgttttcatgatgtgagaaatccttgtgctctaaacagacaaggtcctgaaggagaagagaaagctgtttatccgttccatgggtgaaggtacaataaatggcttactggatgaattattacagacaagggtgctgaacaaggaagagatggagaaagtaaaacgtgaaaatgctacagttatggataagacccgagctttgattgactccgttattccgaaaggggcacaggcatgccaaatttgcatcacatacatttgtgaagaagacagttacctggcagggacgctgggactctcagcaggtaagggtcagtgacttacactcaagttcacctagggcctgtcttcgtgcctaacatttgatttctttactagtcatg

SEQ ID NO: 587 - DNA, 6000 bp, Homo sapiens
caccatgacgggctatttttttgtatttttagtagagatggggtttcaccgtgttagccaggatagtctcgatctcctgacctcctgatgcgcccgcctttgcctcccaaagtgctgggattacaggcgtgagccaccgcaaccggccacagattttcaactgaatataggggtcagtgcctctaagtatttcattgtttaaaggtcaactgtacatctctgtatcttccacattatatacattttcgcagatttgtgtgtctgccttttaatctgtccattattaaatataactaatttttgtatttatacatgctctatttttattgtttctcaaattattgcttattatagaataattactttttgctccctttatttacatccttctatatttgatatagaatgatttcattctatatttgatatttgatttgtccaatatctcaatgtccttcaagatttaaatttatagtctcttctttctgctgatatatccttatagtggcttgctttctagtgtatttatatacttcatctgtcagtgtagtttatattctgagtgggctgaaggaaaagaatggcttctgtttctgctgctaggcaacacaccacatccaagaccatgtctatccctccttggggatttggctctatctggttccaagatgagactctaacttgtagaggttccatgggtcagttattatctatgctgttggtgtagaaatctgacacaaggagaccacacccctcctggccacttgcctgtccaggcaagctctttactgcttcatcttcgctccttcctactcttctgcagcttctttctgtagtcagcaccaactcccagacattcttaccccttctcctgtctccaacactcagtccaatcaggacccagctcctggttcacatggtaccagcaatgcctcaaagaacatgtcctattaaattctggatgtggcagtgcatgaagtctcaagggtgagggtcaggatgagattttggtttcataatctggggttattccaagtaccaatatttttaaacggttcgacaagaggaaccaatatagatgaagtatctattacagagcctgggccttattaagcactcaatatgaaatagttactttagaagcatgttaacgtgactctcctacttaggaagctgcaatggtttcctattgcccatctcatcatttaaatagtttactggggctgactgttataaattatcatagtctagatgcatttaactcagaatttatttcccactgacacaaaaaagcaccttttatctgcttatctacttcctatttcccagtgtagttagtacccagttgaagaggagtgcatcacatacagcaagtaatgagtgaggtggtgggctggcttctcacccagttctccagcttgggcttaccaaggccttgaagcaattttttacctgatcttcctatcataaaatgaaattaatgcttattcaacatactgaagtgaagcatatgaaaaatttagaagtacttaaccaaaaagtacatttgtacatgaccttgcttctgctctataggtcatgactaccataaatgagaggtactatggcatgatctctacacctggcattgcatcctagaaggtaagaatgattaggaggccccttctatacacgagaacacagaggctgagagatgttaaataacttgtccaaaatctaatagctcataaacagaagttgacctcaggactgttagatacccaagtccacactgataagctgtgcagaaaaggggaaggttttagacaaagaaaacataaaataacatgttatagttgattagtgttctgaattgtattactcaaaatgtgctaatggtccacaaatataaataagaagaggagttggataaactgaaagggtatatgatgttctaaagcttggaaatgggatggtcaaaacccaagcacaggaattttctgtcttctatgtcagaggttcttatagtacctactctgtcatttaaaataatattgtttcacagacttcacactgatagaaggatttttaaatcattatgcagattttaaatatcacttacagtagaattgctacattcatttattttaagataattttacttacgtaatgctattttccaggtacatatttcagtcaataaattggttcctgtaggttatctcccctctgtctacctatccccctccaatgtgggtggcgggtaattacatttcagccactatgagaactgcttcctcttaccagaattatgggtaatttttggaggcttgattgtgtcctgaaatcaagaaaaaaaatgtttttccaaattagtctgttattactaccattgacctttttcatttcaaattttaacattattttagtataatttacataaaagaaaatgtaccccttttaagaatataaattgattattaattacacaagaatatttagtataatatcccatttaatagacaaaccgatattgtcaccccaaaaaattttgtcttgccctttgttctcaatttccttccatttcctcctctgataagcagtgattgaatttctaccactacacattagatttttctaatctagaactttatataattggaatcacagggtatgtgctccttcctatatggcttcttccactcataatgaaagtataagtttttcatccatgttattgcatatattagtaattttttccttttatgactgaatagtatttcagtgtatgtgtctagcacaaattgtttacttatgctcctgaattggaatttgagttgtttccagtttttgacatcttcctttttgaggaaatagcgagcctttgcactctaatggctcagtgtttacattcccaggacatgactcaaagctcatgattctacatccccagacacatggtctaatcattgtttctgtgtcctggatgccactttggcatgcataaactccgtggttcttggctctggctggtggggagaaaccctcatgtgaaacccttaagcagcagaaaaaataaatgagtcagtacataaatttaaaagtaaataaactaaagagaagtggtgcacagacaatttctgctttcttccatgctacaaatccttccagcggcaaggagctcaagattttgctgcaatcggattaggtcattggcagagtaaagataaaaacaccatgaaaaacaccttagattaaaagccacgtcattgtcctcctacacagtccgttctacttaaccaatgacatttaactcttagcctggagcacaggaagtaaaactggtagcccacatgtcaaaccgtaaatatttttgtaaatctggtcattatcctccaaaggtaataacgtaacagcccaagaaaatttttggtaaaaaaaaaaaaaaatgataaatgaaatgtaccgtgtgcattttgctattagtccatcttccatcaagtttattcatgaaataaattagccacattgagtttatttctgggataatcaattcagcatgtactgacaaaggcagagacctcttctggccttccctggctcctctgtgtacaattttcatgagtcctgcaatactttgtctcccacttctccaattaatttcttattcttctcatcgcttggcatattttcacattctaaatattccagttacatattacataccaggtttcatgtgtatctttccctcttgaatgtgcgagcaagagggaaaggatcataatatatgttttgatggaacccctgacaccgagaaccatgttgtccacatatatttgctaaatgaatgactggaggcactgcttgaggattctaacaaaagataaacttagctaaaaaatctgcaaataatcatccttgattatttttctaaactgaaatatttctattaattatagtaatatccctcattatctgcttaccatttgccaggcaatgttccattcatttttcacatttttatctcaatactgctcaaaactgtgtagatgtgtatgtactattaataatattattttacagacagaggaaccaatgtataaagaagtttaatatcttgcccaggaaggtgagtttaacttgctaggttcaacattctgagttcagagtctatgctttgggcctctgtgatgcaatgtccctcaaaagaaagccatccaagatgagtgagtggctcatggctcatgcctgtaatcccagctctttgggaggccaagatgggcggatcgcttgagcgctggaattcaaaatcagccaaggaaacatagggagagcccgtctcaacaaaaaatacaaaaattaaccagccctgatgggatttgcctgtaattttaactactcaggaaactgaagtgggagaatcatctcagcctagggaagtggaggctgcagtgagccgtggtcatgccactgcactccaacctgggcaacagagtgacatcatgtatcagaagacaaaacaaaacaaaaaagccatcaggaaaggaagaacattaaataagaaaagctttaatattggtgaaaaatgtttacatttcttaaagcaaaattgcttcacagggacatatatttcccacaaactttccccaaagctgtgaggtggggtcaagggaacagtggttcacattctccaaaggttgtgttaattttttcggtcaagttttcgaatgaatgggaaactcttcactgtgtgaatttaactgtacacatactttctcaatcctggggcttattctctaagccccattcccctcctaccctgatctatccaagggctggagaaaaaagaattcccttggatacactctctgatgcaggctacagttctgattctttctctgggaagaaaaataaagatatgcatatgaatgtgcagtgggtgtttcccaatatgtgtacacgccctgccaaaaaggaaggcgaaacatactttcagtttcagcccacacaagaagggtaggagagaaaagccatggccggtgagtcttttactgttccaagaacaggtccctgggaagaaagagttgtggaaagggctggctcttctggaagccataattagtatctgtggaagtttaggtgagcagaagtgagggagagggaggagtgggaggagagaaggaactagaagatttttgcaggctttagaaagaaaaggcaagcccagaaaggaacagagactttaggggtagcctgctgtcattttgcaatcttaattaaacccttgcttacctgtcgtaagtctgacagagggtacagaattggcacaggaggagtactagcagcagtggttcctaaatgaaatgggctatttctgcttcattactttattattcagagttaaataaacatgggacacaagaggatgatctctgctttccagggactgatgtggaaatggtaaactcagtcttcaggtcactccatgcacatatatggggactactgagggaaacaagtaggacagcaatacagtaagaagagggattacccaactgtgaggagggggacatttcactgatgaaatctaaatgaggtcactttctgttgatgacgtgagaggaatatgaggctgttttcatgatgtgagaaatccttgtgctccaaacagacaaggtcctgaaggagaagagaaagctgtttatccattccatgggtgaaggtacaataaatggcttactggatgaattattacagacaagggtgctgaaccaggaagagatggagaaagtaaaacgtgaaaatgctacagttatggataagacccgagctttgattgactccgttattccgaaaggggcacaggcatgccaaatttgcatcacatacatttgtgaagaagacagttacctggcagagacgctgggactctcagcaggtaagggtcagtgactcacactcaagttcacctagggcctgtcttcgtgcctaacatttgatttctttactagtcatgttaat

SEQ ID NO: 588 - DNA, 6000 bp, Homo sapiens
tgtttaaattggctttgatgcaactctgttccatgaggaatctcagataagacttttcaagagccgagcccagccatgcatttgtaccctcaaatacctatgagttggataaattcctctcctctcaaggttccaagataaactggagctcctgaacctgttagacagtgatattcttacttaccagagatcaagaaacttgtacaaggactctgtgtagacaaggtatgaagccagattccccaaggggttttattgtctctataagtcaactttgattctttaaaggaagcatgccattccagtcaaattcttggtaaaataaccaatttctccaattgtgtcctgttaaaaaagaaaacagattcttattgtacttatgcaattaactattctgccataaattgtgaatacttacaaatagcttccaaattctggagaaatcaggtagagagaaacaaacatggttcaaaattttttcacaggagcatattttactcacttgttaaaagttgcaaatagctctaaagaaataagttatcttaactctgaaaacaaaaggattagtgatgtttaacacatgcgctctccctgagagtcctagaagtttcattttttcttctattccaataggacaatttttaaagttatctgatacctgcactcagagtcttatatctgattataaactgccttttcaaaaggaccaaagcaggataaaatatctgtggatgacaaatgcctatagacactattaaagttacaattgactagaaattttgcttacttctgtggcatccatcaattttacataacaatgataattactaataatatacactaaataatatcagaattatagaagtttatataaatacacagacagaagattcagcacttgtaagattttttatttgccagatttttaattggattaccagcttcagggtggatcccttggagaaacagggtcaggaaagcatgcatttttttccaagtaaatacacagccacaggtgaagggaaagacagatctccaaaattaagggtgccattttatactggatttgggatccccaaaaggatggaagtactaccggagaagacagtgaagtgcttctaccctgcattttgttgcaaggcaacctaaaaccaatcagcccattttgaaatcagcccaagcccatgggagtctcatctctcagtcagaggtgaggatatttccatatcttccaggtttccaagagcatgtttctctaatccaagtgtgcaaagagccaagtatccctccaaaaatactcttagccatccattatatatatttccagcctagttagtacatatcaaagctctttcataatacaaagtaatttctgatacccccaaaactcaaactgtcagataacacagtgcaaaacagaacagagcctttgattttgagagggatctatgtacattgaattcctggggtttaaggaagaaaacagaggggggttttttttgtttgttttttgttgtttgtttgttttccaaaacaaggtctatggttcctcctctgtttttcccaaggagtcccaggctaccagaagttatcttagggcctctcatgtgtgcattaagagtggcaagacaaaaatggagaaaaataattcacttgactaagaagaaaaaaaccttttacagaaaaacgagatccaagaagagaaaaacatgaaggccttttaagtgtatccatagtttgtttattcacttttaattaagctgaattttaaccatagtgctctttaaaaaatcattttaaatttcttattactcaactttagccaagcagccaatatttctggcttttgaactttaccaaaagtaacctcccatgcacttcaaagacatggtaagcagtttctttttacaagatttagaatttccccaaggtagttcagagcaaggaaaattcaagagaggaagtcagaagctatccgtggggttgtgggggaacctcattaaatggcaaagttatgcaaatagcaaaccagaaagaaatcattccagaagccaagaatagagcctaggccactattgtcaaaaggcaaagtcttacctactgaattacagcattgagcagtttctagtgctagtcccagaaggagcctagagaagccaatgttaaccgtgccaaggcttttaactgctcaagaaaaaattttagggctggatggtgtaaaccaatagaaagtatccacatatggtcacaagattaagctcttaaggagaccaaacaagacagaggaatttcatagagtattggtttcagggacccatggcaaagtttataattggccagcctgctgagcagtctattattactaccactgacctttttcatttcaaaattttaacgttatttcagtataatttacataaaagaaaacataccccttttaagaatgcaagttggttattaatgattagaggatatttagtataataacttcctaatgaataggcaaaccaattatgtcactgcagaaagttttgtcataccctttcttcttaatctccttccacttcctcctcagataagttgtgattgaatttatttcactatacgttagttgttttctaatttagaactttatataattggaatcacagggtatgtgttccttcctacatggcttctttcactcatatttaaaacataatatttttatccatgttattgcatattttggtaatatttcctttttatgactgaatagcatttcagtgtatgtgtatagcacaaattgtttatttatgctcctgaattggatattgagttgttgccagtttatgacatcttcatttttgaggaaacagtgggcacttgtaatctagtggctcaatgcttagcttcccaggacaaaagactcatggctcatggttctacatccctatatatatggtctagtcatggcttctgtgtcctgggtgccattttgtcatactttgtacaagccatgaactcactgattcatggctctgcctgggggagaaaactatgtgtgaaatccttaagttaatagagaaaataaaagaatcagtacataaatgtaaaagtaaatgaatggaagagaagtgatgcacaggtaatttctgctttcttccatgctccaaatcctcccactgtcaaggagctcaagattttgctgcaatctgactaggtcattgacaaagtaaagataaaaaaaaatcatgagaaagcccttaggttaaaagccacattattttccttctacacagtgcattctagtctaacctaaacacgtttaactcatcgcttagagcacaggaagtaacattggtggcccacatgtcaaaaggtggatgtttttgtgactcctggtccttattctccaaagataacaaggtaatgacacaagaaagttttttttaaagaaattgataaatgtgaagtactgtctgcattttttttattagtccaacttgcatcaaagaggttcataaaataaattggccgcattgagtttatttctggaattatcaattgaacatgtgcttgcaaagacagagacctcttctggccttctctggcttctcattctacagttttcatgagtcctaaaatattttgtctcccatttctccaactaatttcttattcttctcatcacttgccatatttgcacattctgaatattccagttacatactacataccaggcttcatgtttgtcttcccctcttgtatgtgagagcaagggggaaatgaccatgatatgttttgactgaacccctggctcctagaaccatatcgtccatatatatttgttgagtgaatgactagatgcactgcttgaagagtctaacgaaagataaacttagctggataatctgcaaataattatccttgatttttctaatgtaaaatatttgtattaattatagtaatatcactcattatctgcttaccatttgccaggcaatgttgcatgcattttgtacattttgtctcacttaatgctcaatgtgtaggtatgtactattattaaaattatttcacaggcagaggaactaatgcatagggaagttcaatttcttgcccaagaaatgaagtttaagatgctaagttcaacattctgagtccagagcctgtgctccaggcctctatgaggtaatgttcctcaaaagaaagccatccaggatgggtgggtggctcacagctgtaatcccagcagtttgggaggccaacgtgagtgaattgcttgagtgcagaatatcaaaaacagcctaggaaacatagggagaccttgtctttacaaacataaaaatattatccagccgtggtagcatgtgcttgtgttcccagctacttgggaggcagagctgagaggatcatctgagcctagggaggtggaggctgctgtgagccctgttagtgccactgcactccagcctgtgtgacagaataaaattctgtatcagaaaaaaaaatctgaaaaggaaggacattaaataggaaaagctttaatttttgtgaaaaatgtgttcatttcttgaagtaaaattgtttcacagggacatacatttcccatgactttccctagactgtgaaatgggcccaggagagcagtggttcaaattctctaaaggttgtgttacttttctccatcaagctttctaacgaatgagaaattcttcactatgagtttaattgtacacatactttgtcattcttgtcttattctccaagccccattcccctcctaccctgacttgttcaaagggctggtgaagaaaatttcccaaagatacactctctgttgcagcctacagttcaggaatctgaatcttactctattaaaaaaatgaaaaaataaaaaaagacatgcatatgcatgtgcagtggtttcccaatatgtgtacatgccctgccaaaatgtataaaaggaaggtaaaaagaaaggtggtgcatgctttcagtttcagcttacacaagaagggaggagagaaaagccatggccggtgagtcttttactgtcccaaaaacaggcccctgggaggaaaaagttgtggaaggcgcttgctcttctggaagctatcatcagtatctgtggaggtttatgtgagcaaaagtgagggacagggaggagagtgaggagagaagaaattagatgactcttgcagcctttagaaaggaaaggaaagcccagaaaggaactgaggctttaggagtagcttgctgtcattttgcaatcttatttaaactcttacatgttgtaagtgtggcagaggctacagaattggcacaggaggagtactagcagcagtggttcctaaatgaaatgggctatttctgtttcattactttattattcagagttaaataatcatgtgacataagaggatgatttctgctttccagggactaatgtggaaatggtaaactgagtcttcaggccactccatgcacatgtatggagactattgagggaaacaagtagtacagcgataaagtaagaagagggattacccaactgtgaggagggggacatttcactgatgaaatctaaatgaggttgccttctggtgatgacatgagaggaatatgaggctgttttcatgatgtgagaaatccttgtgctccaaacagacaaggtcctgaaggagaagagaaagcagtttatccgttcagtgggcgaaggtacaataaatggcttactgggtgaattattggagacaagggtgctgagccaggaagagatagagatagtaaaatgtgaaaatgctacagttatggataaggcccgagctttgcttgactctgttattcggaaaggggctccagcatgccaaatttgcatcacatacatttgtgaagaagacagtcacctggcagggacgctgggactctcagcaggtaagggtcagtgactcatactcaagttcgcctagggcctgtcattgtgactaccatgtgatgtctttactagtcatgtta

SEQ ID NO: 589 - DNA, 6000 bp, Homo sapiens
agggtgggagggttgaaaaattacctgttaggtacaatgtttactattagggtgatacattagaagctcaatctccaccattacccatgtaatactcatgtaacaaacaagcacatacaccccctgaatctaaaataaataaataaaaaggctttatgtcctttccttcattcccatgatttgctcctcttaattttgttcctattattctcagtgtctgaattgtccaggtctctcagctctactttgtacagatacaccgttgtggtctttcaacttaagtaatcaaatcacatttttcacaccccttgacttcattatcttgagtaagaggttcattttctggaagtgtcaatttcctcatctgcaaagctaggatgcaaatgctgtttttctagtgttgtctggctggttaaacagcctactatattacctagaagagggcaagctatcagcaaattagcaacctctttcagtgcttatttaaacgtttttatcctgcagattctgggaagattttatgttacctatgtaaaatcttcctgattgcttcagattatatttaattctcccatctctgatacctcatagcatcttagtccattttctcctgtattgtcatacaatattttcctgtgtttatgccttatcagtgccaaattattttaaattcctcaagggcaggcactgagtcctattttaccagctgattttcttcatgtaatcaaccacagtgctaggatgaggaacatgtagcatatcacacagagcctaggattgagtgagaggccccttgtgccaggtgcatctctgaacctctggtaattagtatttttcataaaatggacatatatttcatcttgtctactatagagaaatctgtaagcattttataaagaaatataaggtaccagggtaccttcttccttcaagactattgctaatttaagagcagcctcttttagatatggccaggcaatgattttatatacattatcttaaatagtcataataaatctaggaatagtaatgatatagatgcgggaagtgtctgaatggggaaactgaggcttagatagttttaactaagtcattcatcatctcatgcaactaacaaagtacacttgaatgggtgatttgactccaaatctgggaagaggggaaggcttctgaaaaaaaaaatcttacatttgatttgtgctcccactaatgtatagtcactagatatgttccagaatgtttatacccaagaacagaggaatgaaagatggaacattgagtatcttcaaagagttataaatgacataagtaaaggtggcaactagataacttatgctttcatgtcataactgctccctactcccacaaaagtaacaaatactcttttcctaatgacaaatctgaattgctagtgcaaataaaattccagaaatctgaaacgagcctagatctaaattttcaagtcatcactcatcctttaaaacactacctgttgcttatcatgtaatttatttattttatgataattatatctcaattcaaattatattctggagtaagtgcctttacaaatagggtagtagataattccacttttagttattatgaggtctctattctcttcttgtagtcttaccaggcttacacatacttgagtgttttccagaaaaacaggaaaaggaaatcctgccttttccattcaaacattataatcatgggcactttcattttgaagtcagcaatagagtggcatatctaagagttctctgcttagctttgagagatctgggaagcatatgtgagtttgggaatcctcgtgcttacagttttgctttctagaggtatcagttggccaccagctattgtcaggcaccatctcctgtacttccatagaatggtgtgctttcctggctggtggagaaccaggataatattcttctctctgtgatttccacagtgatgttccattctttctgtgatttgtcttcttcttgttccagatcccagtttcattcagaccatctctaatttctatcctgccataaatattccctaaagcaagaggacacagagcctgctataagctagattggaaaagtagggagaaaaagaaaaaaaagtcaaagaagtcaaagattaaaatctccacaatgtttgactatatactaccaagatagaaatgtctattcccaagaaaataaatgcaattatttgccaagaaagcagaaagcaaattggcagacttcaggtaaaatgtgaaccacaggcaagctttgtttaattttcacagtgttttaaaacaatagtaaaccaactgaaagtatttttaaaattagagataaagtacccttaaaatgaaaaagtaaactgaattttcattctcttagccaaaattagttgggtctgaggagccctgccccttcagagaggactacccttaccagataggcacagcctcccctctccaattcacctcatttggtgtattcctgggcccatgggcacataagctgtagcaccttgcccagattttaaatatttatcaaattatgtcacatatataagctaatacaaatattttaccaaagatgtgattcccccaatcttctgagaatatttttctttaaagaactcttaaaatattttgtatacatttaatgagtatatgtgtctctcctactatcatacaacttctaatagggtaggaatttttgtctgtttttggtcattactacatccccagcatctataataatgtatggcacatagacttgggtctcagtaaataactatgctgaatatttatgttgaatgaattgatgagatgaataggggattttacatggacatatataataattgaggtgcttcctttatgccaggggctattttaatgacttatatttgttcattaaatacttgcaataaaactgcaaggtaggaattatcatcaaacctatctggcagatgggaagactaaagcttggttaatttcctttcctaagatcagcagttaaaatatggatccaaccattctggcttcagagtctgtgcccttaatctttgtaatacagtgttacttaaaatggtgccatctgaagaaaaagagccttacgtaacaaagcacttttattccaaatagcaaaactgcttcatacaccatttctgcgtctggagactgcctagagcttaggtaaaaaacaatgaaaggaaggtaagaagtcttagtccatctcacacccattaggatggctattatcaaaagaacagaaaaataatatgtattggtgaggacatggaaaaactggaacgcttctgctttatatgtgggaatgtaatacagtgcagctgctatggaaaacagcataccgatttcacaaaacaaaatgaaatagaattactctatgatttgtcagttccacttctgggtatatattcaaataattgacagcagaatctcaaaaacatatttgtataccatgttcatagcagtgttatttacaatagcaaaagggaagaaatttgtgctcaatgaagaatgggtaaactaaaatgtggtacatacatagaatggagtattattcaacttcagaaagaaaggaaattgtgacccatgccacaacatgaataaacaccgaggacattacactaagtgaaataagtcaggcatcaaaaaatgaatactgtataattctacttacatgagatacctagagaagtcaaattcataaagacagaaagtacaatgttagttgccagggactgatggaaggaaaggatagagagttactgtttaaggagtatagagtttcaatttcccaaaatgaaaacaactacagttggatgatattgatggctacacagcaatgtgaatgtacttaatgccactgaactggatactgtaaaatggctaagatggtaaattttatattatgtgtattttaccacaatttaaaaaaggaactcttagtacttgatttaggtggcacaactaccctatactgtgattttactttccatttaaatctcagtgaattaaagattgtttactgcatgtgtttagctctgtgtgtgccttctcaattctctcctattcttgtttctcacccaccaaggaatggtaaagcaattttcttatgggcacagttcatgctacaatctgagattcaattgtgtaaaaataccttgggaaatgacaatagttaacagcttcttgggcaataattataaatacacatgtgtaggtgtaagtattgttcattgatctgtgtacacgccctgcctaaaaggatagagctaccttgcctgtcattgcaagtgtaacacacattgcaagtgccaacgtgaggagccatggctggtgagtcttccccagtaagaggataggtcttagggaggaattagtttgggaaaggactgcctttctcattaggctttgtgaaggtttgtgtgggcagccttggggtggagagagaaagaagaagggagaggcagggtgggaagatgcccagacttgcacagcgtttttgaaggaacagataaaggccaggaagaatctgggatcctactggtatctgctataattttgctagtgttgtccacatttgaagagttatgtagttcaggatgagaatgggcacaggatgggtatcagtagctgttgttctcaaaggaaacagtcaattcccttcaaaattcatgaaactgtcaattcccttcaaaattcaagaaactgggatgtgtcagaatagaatgacttctgatttttaggagattcacagaaaaatcatgaagtcaagtttcccaggtcactcagtgagcatatgtaggtaatgctagaatcagaaggaagtacgtggagtaaatgcaaaggtataagaccgttccttgggattactgtacttgtggagagaaatgtttaaatgattgttaccctgttggtaaattgagagggaaattgtgtcatgttcattatttgaggaatctttgtgcttccaacagaccaactcttgcgtaaaaagagaagaatttttatccattcagtgggtgcaggcacaataaatgccttgctggattgcctattagaggatgaagttattagccaggaagacatgaacaaagtgagagatgaaaatgacactgtcatggataaggctcgagtcttgattgaccttgttactggaaaaggacccaagtcttgctgcaaatttatcaagcatctctgtgaagaagaccctcaacttgcctcaaagatgggtttgcactaaggtaaggtggaatgattcaacctaatgtccaaataggccctgtatcttgaattcagttatgattttcttcacttgtcttgtcagttgataatagggttcctatcattttagcctcagactccattcctttatgcatggctctagcttatgtctcttctgtctacgtttttgtgtcccttgtacctgttctctcagtactccctgctgaccacagctcatctctaattctatgtaggtggtagatcattactgtagttcatttaaagagcctagatgttttatcctgaatcttttaatggtcctggggagcaatgtacaatatcactccctcttgagcctaagaagcccatgtatttattagaagagaaggtataagctctttttgtacctaccaccctgctcttaccccatctccctattaagtacttttcagaatatacaatgatgatggaattgtcaaagaataaattgagtgtgtatataaaattaaatatgcactaaataattatatttgcatgaaattatatatggattctcgttggaagtcatctcctttgccttttcttttgtgtaatatggtctacttgcatggggctagtctacagaccattctctgtagcctatccctttgtatttctaggcctcctaagagccctgatgcaggctcttgtatctgagctggcccattccaataccacttttctccctccacagagagaagatggaactctgg

SEQ ID NO: 590 - DNA, 6000 bp, Homo sapiens
gggattgttgggaggaattaaatgaaatgacgcagacagagcacttagcacagttgtctgtggcacttgctaagcattctggttgggcatttttgtggtggggtaaaaatagacatctaagtctgttcattcctgtttcagagtggctctcctattgcaggtttacctgctaccagtgtctttctcaagggattgtagcatttgaagaaactaagaggtttgtttacgtgatggagctatttttccaaaggcaaattaagcaatgactgaggtacaaatttgagcatacttcagcttctagtatggaatgctgtcagaaatttaatttttattttatttttttgctccatcaattagggaagacagaattagacagaattctgaattagacagaattgcctagtaagcacagtttatttttatttgttgactttcttcagtctggatactttcagtgtcttttacatgtatcctaagcatcctccttccaaatctccacatgctctcatggatcatgtgtttcttctacatgagaggaagtgatctggaaggaaaatttctggaagcatattattgactacttaactatatatacatatatttaaattaaatattttcacagaagaatgtttatccaaagagagacctatcaacacttattctatgagttcgtccaatctatgacttaacaatttacataccactgacattcaaatcgatattaccatctcagaactgtctcttgaacccatactgcatattcaactccttactctagagtatccactccaaattgatctcttgaattcctccacaatcctattcctcccatagtctttcccatctggaaatactatcctttcaattactcaggtcaaaaatctcaggcccatctttaacatgtccttatgctctacgtccagtctgccaagaattgtgttggctttgccttcagaagatagccagaattgggtccttttttgtattcatggctgctacgtttatccaaatgctcatgcctcacctgattactgcaatagcttcccaactcttctttttgtttccctcttcctcctcactttccataacattttctctgcacagtaactgtattattaatagttttctgttgctgcttttacaaatcaccagagactgagtggcttaaaacaatgcacatttatgattgtatagttctacaaatcagaagtctgaaacgggtcttgctggactaaaattaaggtgttggcagtctgtgttatctcctggagtcactaggggagcatcagtttcctattcattccaattgttcacaattcagttctttgtggctctaaaaccaaggtccctgttgtttcgctagctgtaaactaagtgtcattccctgcttctagaggccaccacattcctttgccaccatcttcatagccagcaatggcagagaggatctttcatatgttacatctctctgactcagtcttgggtctccctcttccactttccacctttgtcactcaagtgatcagactgggttcacttagataatccatctcaaggcccttaaccttaatcacttctgtaaattcccttttgccatgtaaggtaataaatatatttacagattccagggattaggaagtagacatgttggagggatcattactctacctaccacagtaactaaagtgactaattttaactgtaaatcagatcatgctgctcctctacttgaagaccctccaatagctttgcattcattcatggtgaaagccaaagccttcagtagcctacagagccctccttgagatgactccctctctacatttggacttcatcttctattattctttacttctcattcattgcaatctagccacatcaaccttcttcaagtacttggatgacatcaggcatgttctctgcttaagacctttgcattggttcccatacctggaatattctttcttctgccgtatgttcttcagatatttgcatggcaaattccctccaagttttgctcaaattttattttctgtataaagctaccttcacctccttcgaatccaggtacttccatttctgttctccaaagcactcatcattttctaacatactatatagtttacttatttattatgtttactgttgctctgccttctcctcctataatgtaagctccatgagggcagggatggttgttttattcacaggatgattacagcttcatggaaccaacttcatagcaaattttcagtaaatgttttaaaatgacacagtaaatgaagaacagtctgattgtggcactagagatactggtagctataatggagaattttgttatttttgtctgctccattacacacatagtcacatacatgtgctgctgtcacacagtgttaaattcaaatatgattactaaacagaaaattatgatgctatcatatcaatgcaaaatttcaaaatgagttatgtttataaactttgtaaaattacatatttttttgcattctccattaccttcgtagggaataaattttccttggcactccataggatgggttttacaaaatctttcttctccaggacattaaaaatgttctgaggccgggtgtggtggctcacgcctgtaatcccagcattttgggaggccgagatgggcggatcactaggtcaggagatcgagacaatcctggccaacacggtgaaaccccgtttctactaaaaatacaaaaaattagccgggcgtggtggcgggtgcctgtagtcccagctagtggggaggctgaggcaggagaatggcgtgaaccggagaggcggagcttgcagtgagccgagattgtgccactgcactctagcctgggcaacagagcgagactccgtctccaaaaaaaaaaaatgttttgagtttgatcttcgtatgtaaatcagggcttacaaagtcttaaatgatctggtcctcactaacctctccaacatctctcacctgcctgtcctatcaaaatgtgtaattaaaataaaaagtgctcatcagttactccacattttacatccttgattgcacttagttctgtcttgactcaaggattaacatgtgccatttttcttcctgtatccagcccttgctccttcccccttcacctggcaaacctatactctttgtcagtttcagcttcatgacactttatcaaggtagtcttcgctgactctgggtatctgggaaagatacctcttttatgtgttcccataatctctacgttttccctagagtactactttggagctgtattattttactttctagattccctacactaggctaacagctccatgagagcagggaacatgatattctcttctaccaatggactccagtgcctagcaaagtatcctgcacatagatgatcaatacatgtttgttatgaagtgaattgtgtgccccctcttcatatatggaagccctaacctgaaatgtgatagtcttaggagatgggccctttgggagacaattagatttagatgaggtcatgagggtggagtccttatgatgggattagtgaccttataagaagagatatcagagagattgtgctctctctctctccccctctctctccccctcccccctcccccctcccctctccctctccctctccctctcccttttgctctctctctgccatgtgaaaacacacagtgagaaagtggctgtctgcaagccagaagagagcctttaacagaatccaatcacgccggcaccctgatcttggatttgcagcctctagaactgtcagaaaataaattgtttttgttgaagccaccaagtttatggcattttgttatggcagctcaaactaactaatgcacatgtttgatggattaaatgaataactaagtaaaaaaatcaatgactgaatgattatttaacagtgataattatcttatgatcctaggccactttggtgtctcagttggcctggtatttttgagcctgtagatgttatattttcttgcttttttttttttaatggacattttcttggtcaacatgatataatggaaactccagatcttctagtacataacaagactttgggttttatgttagaaaggtattttccaagctcaatttaagaagaaccatatatctggctgtagaaatattgacactatgaaatccaaaattgttgactatttaataactactgctatgatcgtgttaattatattgaaataaatctcccagctagaaaacaactgatatggagaaataagaggtatttcatatatatgaaacaaagacatggagaaagtaaagcatttatactacataccacaagaggtaaatatatttgcagaatagtaaatggagaaatatttttctcttttttttttttttttttttttgagacggagtcttgctctgtcgcccaggctggagtgcagtgacgggatctcggctcactgcaagctcctcctcctggattcacgccattctcctgcctcagcctcccgagtagctgggactacaggcgcccgcaaccacgcacggctgattttttttgtatttttagtagagacggagtttcatcgtgttagccaggatggtctcgatctcctgacctcgtgatccgcccgtctcggcctcccaaagtgctgggattacaggcgtgagccattgcgccctgccgagaaagattttctattcctggtggatccgaggagacagaaagcttttcaagggcaaatgcctgccttgtataaatatgaataacttcttaaagaagttacccttctttagttaagaactcactgtgatgttatgtaaaaagaatttgtctaacattcagaaggtctgagtttgggttacacagttagtaaatagtggtccactaattcttttttttctttctttctgagacggagtttcgctctgtctcccaggctgcagtgcggtggcgcgatctcggctcactgcaaactccgcctcccgggttcacgccattttcctgcctcagcctcctgagtagctgggactacaggcgcccgccaccacgcccggctaattttttgtatttttagtagagacagggttttaccgtgttcgccaagatggtctcgatctcctgacctcttcgtccgcccgccttggcctcccaaagtgctgggattagaggcgtgagccaccgcgcccggccggtccactaattcttttaaactctgtaaggcatttttttttcctgtttaaatatatatcgacattagatagctttggctgtggcaaagaggacctgctattgtaggtctgtgggctggcagtgactgggcggggctcatctgagattggcggggctcggctctgtgccatgtactgtctcattccggaacatggacggaaggcggggtcgctgttgggcatgctgttctcaggagggcaagcaaagctctggggcactgcttctgaaagcctctgctcacaatcggcagctgacacctgcagacaatctccactgttgcaagtaagtcatatcgtcaaacagcaagtctgaggttggtgatacactgtgctttgcctattggaaggaaagaaattaatggaagcaataattcaatataccacactccctcattgagttgttgagtgaattaaatgtgtttattgtattttttttcttaacactaaagatttaagcataggtatcagcatgagaaataaaagggagctactttagccagtggggcattattgtagacattagcaatcagttacagaaggctaagaagcaagggaatactagaaagatatgataattaaactcactacatttaaaataaaagatggaagaaataacatagcttgcagcagtctggtgaagaatttcagatacgagggagagattttattatgaacattttctagtatggcttaggcttattttactaaagtaatgcttacttgtaaattatttctgtccattaaatattttgcaatatattctaaca

SEQ ID NO: 591 - DNA, 6000 bp, Homo sapiens
agagtttcaccaaaggtttcacttcaagctaagtagcatataatttcaggaagcagtaaaacagctggttaagcctgatttttgtagacctgtagaagcctacattttctcccctttactaaacttgactgttctctatgccctcaaaatgtaaatttcctccttaaaaataaattccggtaagaagctgccacttataacgcctctcctggaggctgccatcagtaaaggccattgcaggattagcccattaaaactttattgtgggaacatcacacccagtgccagttacgaaatattctaacttttaccctgttttctgacatcagtttcttgctcttaggtacctgcaggagcagccatcttttagatgttaattcaactcccttggacttctctgaaaggagtggggcctgagcaccagcattcacaaaattttttgacctgcattgtcataggagaatgacaccttaaacaaaaaccaggcacagaggagtctgactaggtaactgagatgagagaagaagggaccttttttcctcattttattgagatgggtctcactatgttgcccaagctggtctcaaattcctgggctcaattgatcctcccacctcagcctcccaagtaatggggactataggaaacagccaccatgcccagcgagaagggtacttcatacagatttaattctacattggaaaccaaccttgagaaaaagcctacattgtgtgtgtgtgtgttggggcagggagcggtgtgtatgcttctgtccagatctgagttcctgaaaatcatagtgtcttatccagctttgtatccccagtatctagtatagtgccttatatatactaagtgcttaataaatggttatgacatgaattacggtttggatgagtccttgtgccactggaaaccctctcgagatcacatttagaggactgccacagcagcatgtctgagagtcttagtttgtttagtttaacgcattctctaacatgatgattaaccctcatgtaatctcagtcacaattttatcactatagatattaatgagcatgttgaatccagctgctgctgtggttttacgtccagaataccataagcctataaaatccattccattggaaagcagagtggccttacattaatttctaagctttacacaacaattaggcaaaattagacaagacttcatgctttttaagtccaaagattccctttctagttttattatgaagccaatacatcgaagaatactttcctcccacagtgcttaagaccagtgctagattacaaatacataaatgggccatgacttccaccccacccacaaaatgatccaggcaggaaattccaacttgcttgtccattgctcaatctaccctttgctaaaggaagacatttctaggtgaggacatttatagtcaaataaattctaaatgataatgttcagtaacagatcttctgagcaaggaaatatatccacctgtctggaaaagactcaaattctgtgtcacttgtaatgggccagtatggagtctaagctgatgacaaagcatctcctagctcttccccttcctcttcagctctccggctgtaactctggggaggctgtagaggcacaacattctcctctctggattcttcactcattacctgtaaatgctacatcacatgatctcagtttcttcaaataccctctctgttgactgcatgttaatctgttcaataggtatttttatcccaaaataatgcaggacccagaggtggagaaatctgtggatttgtggtggaagagaaattatgaaaagaaaaactgagccagatcctggtgaagcaattctagggttagcaagaaaaccaattagaaaagaactatagtctaaggagccacatagagttgagaacctgcttacattcattcattcctttcacacttttccttgagtatctattacatattggtcatctgctaagttctgtaatacaaagatgaatgagaccctccccttgaattactcacattaaacagtggcgagattgtctctaattgctatggcatacatgtgtacaaatatgctttgaagaagtcagttctaagtgataccaaggctgcctcacacttagacaataagagaatcagagagaaaagcttgtcattcagacagtaggtagattcaaacagaagatgtatgacagagaataactattgacataaatagaggccaaagatggtgaaaaggtgagagggtgggagtggtgtgcaagaccctggaagagacttttgggatgcaggagatctggggatccaggttgattctggacattttagaaatgccattcctaaaggttagataaaggatataatttgttgtggagattaaactctctagccctcccctaccattttccattcatcacatgggattgcagctacctaccttgagtggtttgagtttaggaaagttttagctgagggaatcaactgaaaggagtaaaagtcactggttcagcaacaaactggcagagatccatgtccatgtcatttgtttggcctagagccaatattaatatttttattgatgttttttggaaggatgagtcaagactctatagcgtaatttgatggataacacaaagacaaaaattaacagaattactagacttctgtccttagtgattatttacagtttaggtgtttattttctgtctttttcaactagactgtaagttccatgagggcaggaactttgtcttgtttgttcttattttcctaacatgtagaatggcgcctgcaaataacagttgctcagtaagtagttttacattgcttgaaccacagtgataggctgtgatgagtactgtgatagcagtatgcactggtgctatgagagcacagcattcactctgtcttgaggttcagggtaggcttcagagagaaggtgacatttgagcttgaagagtgagtagcacttcatgaaatagaatgagagagaatggtatttctttttttttttttttttttttgagaatggtatttcagaaagggtggaacaccatgaataaagcaatgtgttattaaaaaaatagtatgtttgggggataataaaaagtttatcttttgaattctgatacttaaatagtcaacagtatgcatgggaagtaaatttccttccatacaggcatacattacttcatgcaatagttgtgaaacaaggaccacagggagatgcaagcaaattacgtttaaaagactatggagtaaaattcttttgtcaggtggattaatctatccctaatgaatctctcccgagaagcttttccctccaaaggtctatctttttccaagacgtttattcagggaggtatccttcatatctccctgaaaagaaagaaaagtaaatagtggctaatgcttttaacaatgattaaaaaaatcagaaaggtcaaggctttaaggtcatttaatgtgaagaggaaataagataaatgttcagcatttaaggattatcactaacccaacttttcataaacacagaatagtggaggtggaacctgcagagacttttattcagggaacatccactgcgggacaggcagatgctttggtatccaggctgctccgcgccgccagctgcccaagtaatcctcacaacagcccgcagaggtaggtattaaccaccctttgttttacaggtgaggaaacagaggcacaagacggtcaggtaaccggcttggagtgatgaatgaaactaaaataagcgccgacctcgaagctcatttggtctttccccaaccccatgcggcctcattaaagagacttttttgattagctatggagaaaacgttcttcatcaaacatgaaatgcaatccggaaggcacaggtttctctctctctctctctctctctctctctctctctctctctctctctctctctctctctctctctctctctctctctctctctctctctctctctctctctctctctgtctgtatgaagtggcttctggggccccacgaagcaatgttcccccaaacagccccggacgagggtgtctataattcatcctgttataattaaccccggggttacggtattgcttctaaagcccttgttgaaatgcagatatggacctcgcaggattgacacgatctctcaattacacctaattaaagagctggctctttgagaatctgacccgactgggccaggagtgggaaaggcgggggctgccggttggggtgagggatagggttctgcagtcccgggaaggcaggtgaagggtggggatcaggattggaagagtcactgggtgctcggtgagacgagggaggttggagctgaactaaaacaaagtttgacttctggacaattatccagggagagggcggggaacacaccttgcccggactgtctgggaatcccattgacaggtcatctcaggttcaccatcttcctgtcgtgggctcctccagggaggccacccgggagcaattaaactgggccacaccagccacctcccacagcagcggggtccgcagatttaaccctttccccccagattccggcactgggtgccgcgctctctcccccagcaccgcgcccgcgcccccggctcccggactgggcatgctcagtagccgcccgcttcgtgctcccagggaagcctctgcacgccctcccccgctgctctcggtcgcctcctcgccgccagccgccccgggtgcatcccggcttgctccgctccacgcgacccagattcctgccccgcccccgccccttccgcgcccgcagccagtgcggcagccgcggccgcccctgtccagcctcggcgcccgggaccgagcgcgtcgctcgccgccgcggagcgcgtagccggagcgcctggggaaggcggagatgaagaccacgccgccgcgcgccgggagctgctgagcctaccgccgccagagtccaggtgattggcgaccccagaggagcctagggagtaggggcgaatgcccttggggaggagagaggtgcggcgaggacgcgaggcatcacgcaagctgcgctgtgcctgggaggcagcagaaatgctaagcatcgggggcagagagggaacgggaatgaaagtgcactctgccttggtgcaggggctccggggtcacccaggacagtgatttccccttctatcctgtcctcccaattaacacccgagaggctgcaggtcggcgcgagaggctgtttgcatctcggcccgggcgtaggtcgcctagcgacctaacgccgagggctcggggaagggatcccagacagagccaaaatggaaggcgggacaagggcggcctggctggggcgaggggctggtctgggtccctgggaaccccttgccttgtgggcttcggtctccagggaggagctaggcagccgggctgcggggccgccggactgtggggtcctccgcgcagcgagctgggaggagcggtcggctgggctgttgagctgcgcctcctccaactgctgggaaactccgcacttcaatattggagcatctctttcccgggcaggtagaattggacagccgagtggggagtgacagctgacagctgacggggctgttaaaagcagagcagtggagtgtggtggtggggtgagctgttgtgggtgcttttttttgttttccaagtgtgggtacgggctgttctgactcagtgtttatgctcaacctctaagcggcgagttcggtaacacatcttatgaatatttcaggaacgacctcacgggctcacttgcttcagatcaagtttaatgaatatgttgtcagcctttctgctctgcacagtgccctgagctttccacatttcatccctttcccccaccacctaggaaaatacgctgctaacccccagtgggccgtagattggtactatcaattgagtctgtcatttggagagaccaattttgggcaggcatccaggcattgttctgcatctctgcaatgtatacg

SEQ ID NO: 592 - DNA, 6000 bp, Homo sapiens
gacctgcattgtcataggagaatgacaccttaaacaaaaaccaggcacagaggagtctgactaggtaactgagatgagagaagaagggaccttttttcctcattttattgagatgggtctcactatgttgcccaagctggtctcaaattcctgggctcaattgatcctcccacctcagcctcccaagtaatggggactataggaaacagccaccatgcccagcgagaagggtacttcatacagatttaattctacattggaaaccaaccttgagaaaaagcctacattgtgtgtgtgtgtgttggggcagggagcggtgtgtatgcttctgtccagatctgagttcctgaaaatcatagtgtcttatccagctttgtatccccagtatctagtatagtgccttatatatactaagtgcttaataaatggttatgacatgaattacggtttggatgagtccttgtgccactggaaaccctctcgagatcacatttagaggactgccacagcagcatgtctgagagtcttagtttgtttagtttaacgcattctctaacatgatgattaaccctcatgtaatctcagtcacaattttatcactatagatattaatgagcatgttgaatccagctgctgctgtggttttacgtccagaataccataagcctataaaatccattccattggaaagcagagtggccttacattaatttctaagctttacacaacaattaggcaaaattagacaagacttcatgctttttaagtccaaagattccctttctagttttattatgaagccaatacatcgaagaatactttcctcccacagtgcttaagaccagtgctagattacaaatacataaatgggccatgacttccaccccacccacaaaatgatccaggcaggaaattccaacttgcttgtccattgctcaatctaccctttgctaaaggaagacatttctaggtgaggacatttatagtcaaataaattctaaatgataatgttcagtaacagatcttctgagcaaggaaatatatccacctgtctggaaaagactcaaattctgtgtcacttgtaatgggccagtatggagtctaagctgatgacaaagcatctcctagctcttccccttcctcttcagctctccggctgtaactctggggaggctgtagaggcacaacattctcctctctggattcttcactcattacctgtaaatgctacatcacatgatctcagtttcttcaaataccctctctgttgactgcatgttaatctgttcaataggtatttttatcccaaaataatgcaggacccagaggtggagaaatctgtggatttgtggtggaagagaaattatgaaaagaaaaactgagccagatcctggtgaagcaattctagggttagcaagaaaaccaattagaaaagaactatagtctaaggagccacatagagttgagaacctgcttacattcattcattcctttcacacttttccttgagtatctattacatattggtcatctgctaagttctgtaatacaaagatgaatgagaccctccccttgaattactcacattaaacagtggcgagattgtctctaattgctatggcatacatgtgtacaaatatgctttgaagaagtcagttctaagtgataccaaggctgcctcacacttagacaataagagaatcagagagaaaagcttgtcattcagacagtaggtagattcaaacagaagatgtatgacagagaataactattgacataaatagaggccaaagatggtgaaaaggtgagagggtgggagtggtgtgcaagaccctggaagagacttttgggatgcaggagatctggggatccaggttgattctggacattttagaaatgccattcctaaaggttagataaaggatataatttgttgtggagattaaactctctagccctcccctaccattttccattcatcacatgggattgcagctacctaccttgagtggtttgagtttaggaaagttttagctgagggaatcaactgaaaggagtaaaagtcactggttcagcaacaaactggcagagatccatgtccatgtcatttgtttggcctagagccaatattaatatttttattgatgttttttggaaggatgagtcaagactctatagcgtaatttgatggataacacaaagacaaaaattaacagaattactagacttctgtccttagtgattatttacagtttaggtgtttattttctgtctttttcaactagactgtaagttccatgagggcaggaactttgtcttgtttgttcttattttcctaacatgtagaatggcgcctgcaaataacagttgctcagtaagtagttttacattgcttgaaccacagtgataggctgtgatgagtactgtgatagcagtatgcactggtgctatgagagcacagcattcactctgtcttgaggttcagggtaggcttcagagagaaggtgacatttgagcttgaagagtgagtagcacttcatgaaatagaatgagagagaatggtatttctttttttttttttttttttttgagaatggtatttcagaaagggtggaacaccatgaataaagcaatgtgttattaaaaaaatagtatgtttgggggataataaaaagtttatcttttgaattctgatacttaaatagtcaacagtatgcatgggaagtaaatttccttccatacaggcatacattacttcatgcaatagttgtgaaacaaggaccacagggagatgcaagcaaattacgtttaaaagactatggagtaaaattcttttgtcaggtggattaatctatccctaatgaatctctcccgagaagcttttccctccaaaggtctatctttttccaagacgtttattcagggaggtatccttcatatctccctgaaaagaaagaaaagtaaatagtggctaatgcttttaacaatgattaaaaaaatcagaaaggtcaaggctttaaggtcatttaatgtgaagaggaaataagataaatgttcagcatttaaggattatcactaacccaacttttcataaacacagaatagtggaggtggaacctgcagagacttttattcagggaacatccactgcgggacaggcagatgctttggtatccaggctgctccgcgccgccagctgcccaagtaatcctcacaacagcccgcagaggtaggtattaaccaccctttgttttacaggtgaggaaacagaggcacaagacggtcaggtaaccggcttggagtgatgaatgaaactaaaataagcgccgacctcgaagctcatttggtctttccccaaccccatgcggcctcattaaagagacttttttgattagctatggagaaaacgttcttcatcaaacatgaaatgcaatccggaaggcacaggtttctctctctctctctctctctctctctctctctctctctctctctctctctctctctctctctctctctctctctctctctctctctctctctctctctctctctctgtctgtatgaagtggcttctggggccccacgaagcaatgttcccccaaacagccccggacgagggtgtctataattcatcctgttataattaaccccggggttacggtattgcttctaaagcccttgttgaaatgcagatatggacctcgcaggattgacacgatctctcaattacacctaattaaagagctggctctttgagaatctgacccgactgggccaggagtgggaaaggcgggggctgccggttggggtgagggatagggttctgcagtcccgggaaggcaggtgaagggtggggatcaggattggaagagtcactgggtgctcggtgagacgagggaggttggagctgaactaaaacaaagtttgacttctggacaattatccagggagagggcggggaacacaccttgcccggactgtctgggaatcccattgacaggtcatctcaggttcaccatcttcctgtcgtgggctcctccagggaggccacccgggagcaattaaactgggccacaccagccacctcccacagcagcggggtccgcagatttaaccctttccccccagattccggcactgggtgccgcgctctctcccccagcaccgcgcccgcgcccccggctcccggactgggcatgctcagtagccgcccgcttcgtgctcccagggaagcctctgcacgccctcccccgctgctctcggtcgcctcctcgccgccagccgccccgggtgcatcccggcttgctccgctccacgcgacccagattcctgccccgcccccgccccttccgcgcccgcagccagtgcggcagccgcggccgcccctgtccagcctcggcgcccgggaccgagcgcgtcgctcgccgccgcggagcgcgtagccggagcgcctggggaaggcggagatgaagaccacgccgccgcgcgccgggagctgctgagcctaccgccgccagagtccaggtgattggcgaccccagaggagcctagggagtaggggcgaatgcccttggggaggagagaggtgcggcgaggacgcgaggcatcacgcaagctgcgctgtgcctgggaggcagcagaaatgctaagcatcgggggcagagagggaacgggaatgaaagtgcactctgccttggtgcaggggctccggggtcacccaggacagtgatttccccttctatcctgtcctcccaattaacacccgagaggctgcaggtcggcgcgagaggctgtttgcatctcggcccgggcgtaggtcgcctagcgacctaacgccgagggctcggggaagggatcccagacagagccaaaatggaaggcgggacaagggcggcctggctggggcgaggggctggtctgggtccctgggaaccccttgccttgtgggcttcggtctccagggaggagctaggcagccgggctgcggggccgccggactgtggggtcctccgcgcagcgagctgggaggagcggtcggctgggctgttgagctgcgcctcctccaactgctgggaaactccgcacttcaatattggagcatctctttcccgggcaggtagaattggacagccgagtggggagtgacagctgacagctgacggggctgttaaaagcagagcagtggagtgtggtggtggggtgagctgttgtgggtgcttttttttgttttccaagtgtgggtacgggctgttctgactcagtgtttatgctcaacctctaagcggcgagttcggtaacacatcttatgaatatttcaggaacgacctcacgggctcacttgcttcagatcaagtttaatgaatatgttgtcagcctttctgctctgcacagtgccctgagctttccacatttcatccctttcccccaccacctaggaaaatacgctgctaacccccagtgggccgtagattggtactatcaattgagtctgtcatttggagagaccaattttgggcaggcatccaggcattgttctgcatctctgcaatgtatacgttttgtgccggtggcttgacaaccgtccttaactggtgctgccaatatggtggaaagcaggtagtatgcttgtattgggataaatgtcttaattcattaacctattatgacaacacgtagttacagcagacttagtcattccctcccccagaagttttctcgggggtcagtttagttggtattttgccaaaggcacactcttgtatctacattgggaggtatttctctcatcttaatctttttcataggaagaagaaataaatgtcttctctgtaagacatcactgtcaagaacactgaaagaagaacccattaacgtagggaacgttgaggactggaacaggttgtagggcgtcttcctacactttgggttataacttccattgcatcaccaccatttaccagtaaaccagcacacacagcaatcagtactcgaaatggt

SEQ ID NO: 593 - DNA, 6000 bp, Homo sapiens
tcaaaaactttcattgttccagaataagttgaaattccatgatatggccttcaaggtcctgtattatctggtgcaagcctactagtcccatcattttcaactactcctctctatgtacttagccaaatgagtctctctggcaattctgccttgtttcaggactggctcagttaagattcttttatcttcggccgggcgcgctggctcacggctgtaatcccagcactttgggaagctgaggcaggaagatcacctgaggtcgggagttcgagaccagcctggccagcatggtgaaaccctgtgtctactaaaaatccaaacattagccaggcgtggtggcaggcgcctgtaatcccagctacttgggaagctgaggtgagagaatcgcttgaacccaggagagggaggttgcagtgagccgagattgtgccattgcactccagcctgggcaacagagcgagactccacctcaaaaaaaaaaaaaggattcttctatcttcacaaaatcttaatgtttaaacaggtcttacagttcatctaattcaatctcattttttacaagtgagaaaacagggacagtgacggtggatcaagtgacaccagtaagactgagctaaattagaaccgagatctcactcgagtctgaggttattcccactgtccaaccttactttaaagtagcttcaaattttacttttacttttccataaattcggaagggattttccctaggagtccaaatgttgaaacctggaagggtatagtctctgtgtctttgagatgaggggagccctgtccatattcaagttatcaattgactttgttgtttttgagaaacgatgctgatttgggtaactttaacacatctgtttgattagtcctataaaatatgcatatatagaagacagaaagagcaacaacaaatttgaatgatgcttgttaagtaaattctgtatcgtacgtctccattcctgccagtacctttatagtatgtaagtttacgtgctgtaatagtattaatagtatctagaaaatactacacatgcacagcagtgctaactttgccttgggagttggaaaatacttcagagaagccaacaggcagatttttctctcttcccttccccttctaattttccctttccccttcacccccttctcttctctccccaagtaacactgtgcacctatgtcaaacgaaaacttataatcaagtaactgtttctgcaaaaataagttcgttttcctgtcatggctcaaggcctcagcagatccaggcctggtggacgggctggtcttcgtcgtgtgccaaacactgaccactgccctggctctgccatcttaggcttagtgacctggctgttactaagcactgtcccctctgccccatgcagctgtctccttctagtcttctccctcttctcaacgcgatcctagcccctcaggccatttcacctccattttccctcacttcccgccgcccctccgcacttcctccctactgttgtttccgccccactagagcccctcagaggaagtttccatcctcgcacccttccttgtgtcacagtccgtcacattctcacaggcgcccatccctccagccccaccccaaggccaatgtacttcgcggtatggggaccttcctcgtcagcgaacgcgagggagtgaagaccccgggcgcggggtgctcggacttcgggggtggaggtgggaagcgcgccgcactcccagcagcccctgcacgagtcacgtgacagctctcccaccaccaccccccccaacttccccaccgtagcctcccagagccaggccccacggaaaggcagctttttcccggttttctcccgctctttcccctccacttggaatactcgtgaaacaaaaatctctccctgccaccctgtgtgtgtttgaaccaggaaaaaatctgaaactggtcaagaaagaacaaggaagacttgccaaagcaaggccggtgtgtgtcccagcagcttagaatctcagcaaaggaacacaaaatagcacatccacggcctcttttcgagtaaaatttacttggtttgtttgcaggaagggtttaaaactgcgtttgcagatgctctgtttgcaggaaggctttaatcacgtgttcccctggcccacaagcaaggcttttagatccagagcctcagttactgccccctcttcctctttggtgcaaccaaacgttcagaatcacgccttcttagaaaattcttccccgggtgtgtcaataagttaagtctaattggcaacagctatcaaaaagtgttgcataacacacatggctcacataattgtagctttgcctcatcgggtgctttaatgcggaggctttgacctgcaatttcaaagatatacattccaagcttacgcccagttagtggatgtggaagaaaaaaaaaagcaaattacctcataacacaaaggtcaataacacacatccataagctccaggtacaaaatcttacatcttagagaactatatttaacatttacatacattactaaggttttttttttccttttgcttgattaaatgttagttatcattaagtcttggaagtattctgtgtgtgtatatttatttgctgtttgtgaagaagccggttgttttaaataagttcctagaaaataagcgctcaatgtgtttaatctgagttgctaatattgtgaaatataggccacataatactagcctagataactatggcgaagtaaggagtctcaaacactgtcccagaacaatagcaatctgtgttgaatttttaccctctgtggtaaaatgaagggaaaaggaatgaagttttagtttgccttaatttttatctttattgtttcagactcttcagcagtataaagttttcatcaagtcaaatatattcactttaaagtgactgtgctttattctgataccatgtccttcctaatttggggggcacaggtgagataagttttatgaaataaaaagattaaaaattcttacatttttagtgtccttccttggtaaaatgtagagttgtccactgtgtttatctcctcctccttattatcatggttgctgttattatttttaatggttcattaaacccaagggtctgggaaatactcatggaattcatctcacagccttcacactgtatgatatttaaacaggtggttgtccatctgattcttaaaatatttccaagaaaaatgattccacctaatgcataaatgctttcatcagattaagagaacaccatggacattttattttcttttattttttaaatattaacttccattgcataagctaaatgggtaggaataagtgagatgatattgttatctagagctttaaaatattcaaagggctgtcatcattatctcatttaatctttgaaaacaactctatgaagtacaaaggacactgagacatttgttgctctatatcaaagaaaaaagtgtttgtcccaaaacttcaaaatgtgtaaattacacattctgcatctttacagctggagaaaattcactggcaatggaatatttaaaattagagcttgcttagtgtgctgcttctgatcactacttgatcccacttcgtgctttcatgttaattggcccaattggactctacagttggaaggtgaaaacttactatttcaacttgagtcacgtatgtattcttatcatatacttcttaaaggtactattttttttcttctgatagtcaccacaccaagcacttccagccaccctgccacagacttcctttgtaatcactgttgaaggacatgatgtttttatgacttcccgaaatgaaaaccctatcttgtttttaaaacaaacaaaccaacaaaaagtagtgtttatgtaagcattttgttccctgactctaggaacccctctgtttttatatcaactctgtactggcaaaacacaaaaacaaaatgccaccttgctaattcccttcctagcaaagtaatacagtttagcacatgttcaagaaaaaaatggctaagaaattttgtttccactaattattttcaagactgtgatatttacactctgctcttcaaacgttacattttataagactattttttaacatgttgaacataagccctaaatatatgtatccttaaattgtatttcaaatattttaggtcagtctttgctatcattccaggaatagaaagttttaacactggaaactgcaagtaaatatttgccctcttacctgaattttggtatccctctccccaagcttactttctgttgcagaaagtgtaaaaattattaaataaaattctaatgatggtatccgtgtggcttgcatctgatacagcagataaagaagttttatgaaaatggactcctgttccactgaaaagtaaatcttaatggcctgtatcaactatcctttgacaccatattgagcttgggaggaaggggaagtcctgaatgaggttataaagtaaaagaaaatatttgcaaaatgttcctttttttaaaatgttacattttagaaatattttaagtgttgtaacattgtaggaattaccccaataggactgattattccgcattgtaaaataagaaaaagttttgtgctgaagtgtgaccaggaagtctgaaaatgaagagagacagatgacaaaagaagatgcttctaatggactaaggaggtgctttcttaaagtcagaaagagatactcagaaagaggtacaggttttggaaggcacagagccccaacttttacggaagaaaagatttcatgaaaatagtgatattacattaaaagaagtactcgtatcctctgccactttatttcgacttccattgccctaggaaagagcctgtttgaaggcgggcccaaggagtgccgacagcagtctcctccctccaccttcttcctcattctctccccagcttgctgagccctttgctcccctggcgactgcctggacagtcagcaaggaattgtctcccagtgcattttgccctcctggctgccaactctggctgctaaagcggctgccacctgctgcagtctacacagcttcgggaagaggaaaggaacctcagaccttccagatcgcttcctctcgcaacaaactatttgtcgcaggtaagaaatatcattcctctttatttggaaagtcagccatggcaattagaggtaaataagctagaaagcaattgagaggaatataaaccatctagcatcactacgatgagcagtcagtatcaacataagaaatataagcaaagtcagagtagaatttttttcttttatcagatatgggagagtatcactttagaggagaggttctcaaactttttgctctcatgttccctttacactaagcacatcacatgttagcataagtaacatttttaattaaaaataactatgtacttttttaacaacaaaaaaaaagcataaagagtgacacttttttatttttacaagtgttttaactggtttaatagaagccatatagatctgctggattctcatctgctttgcattcagactattgcaatattgcacagaatgtagcctctggtaaactctgttgtacactcatgagagaatgagtgaaaaagacaaattacgtcttagaattattagaaatagctttcactttaggaactccctgagaattgctgctttagagtggtaaaataaataagcttctctttaaacggaatctcaagacagaatcagttacattaaaagcaaacaaaaaatttgcccatggttagtcatcttgtgaaatctgccacacctttggactgggctacaattggataatatagcattccccgagataattttctttcacaattaaggaaagggctgaataaatatctctgtttgaagttgaataacaaaaattaggaccccctaaattttaggactcctgaaattcgtctttttgcctatattcagctactttacgttctattaaatcttctttcaggccagg

SEQ ID NO: 594 - DNA, 6000 bp, Homo sapiens
tgttaggaaccccataaaacctggcacatggtttgtgacacccagtgaaacaccgtgcttcttccataatatcctgagccctgctgcctgtcattaagggacctctcttattaagcatctcttttttaaatggctgccatcatctggtcccagtgtacattaaatcccattataattataaacacacttccccataacattcgttgcagatctcatcctcagtgcctacccccttagggcatctttgcactaataacaactcagatttgctatctgagttgacaacattaggtcccaacaccatttgcaatatgctggggaaagagacagagagagaagaaaaagctttttcttccttaatcacgaagatcttggggtcacagtgacccaaggcctcaggagctaaaaaaaaaaaatccctcctcctacccttttgaaaagtcactctctactctacagatgagggaagggcatacttggcacctgggagagaaactcaagtttgtaaacaccactaaccaggtctctgttggttggggcggtgatggtggtggtagtggtggggtgggggatgagggatgatggcaatcactaatcaaagaagctgtcttatttggtttgctgagcctcaactaaccggaatgcatacatcacctgattctttccccctctgctttttggagggggcatctaaggacataatgtaaaagaattaaaatttaaaaacaaaaacaaaatgtcaacatatgcaggagtaaattccactctgcctaatttttttttttttttgaaatgagatcttgttctgtcacccaggctggagggcagtggtgcaatctcagctcactgcagccaccacctcccaggttcaagcgattctcccgcctcagccccctaagtagctggtattacaggcacgtgccaccacgcctggctaatttttgtatttttagtagagatagggtttcaccatgttggccaggctggtctcaaactcctgacctcaagtgatccgcctgcctcggcctcctaaagtgctgggagtacaggcatgagccactgcgcccagcctactctgcccaattgttgacatcacctacagctctatagtagatgtctggaatgatgatctgaaggactgtaagactgtaagattttttgactccagaaatggacacaataggcttgcggtgtcttcccctaacagtccctggcagggtaaaggtctgatgccctggtacgttccccagtggcaatctggagttctcaactgcagagaatacttttcctctactcaggggcgtcactacctgcatctctccctgaacatgcttcattttccactcatcacaagtttttggggaaatgcaaagtggcatcttctccccaaaaggtagggatctttgatttttttaatcacgatagaaaagtttactttgaaataaaaaaattaaatatatgttccaaattaagagttggaacttaaagagttgcaacattccattcatactcagatactcaaaacaccactgtattcttcttcctatctctttagttgaagtttttttttgtaattcaaagccccctccccaatttctgcctgagattctgagggaggaggaaaagtgtaagatcctgggggatctaagtctctttacctggtgaccaagctgagaaccatttggtcctcagcttggctggctgctgcacagatcttggcctcagcagagtaagagaagaaggaaaattaaaagcccttgcttccttcatctatttcactagaggctacataatctagaagttaagagcatgagctttgcagtcagaatggtctgatttaaagtttcagctctgatgtttaatagatctacagtctgcagtaaggcacttaatctctctgaacctcagttttcatgtccacagaaattgggaaaataatagcacctgcattaataggattgttatgtggattaaataaaacaacataggtaatgtgttgagtttcgtagtcagtgctcagaatgagttattattttcgctgtctccttcctgtatgatctcttagaactgctataccctcctgttccactaactgagctctgaaaggctgccagtggtgggaggtacatgggtaaagagggagatgagggagtaagatttagcaatggaattccatgcaaaggccagctcatctattcctctgtctctagcatgatctccccctaagattgagatctcctgtatttttagaactgatacccaggtttcccttaaaagacgcttcaagaaaaaatgtaaaagaaaaatcactctaaatacacgaacatgagagagacagaaagagagcgggcatgtgcgcgcgagagagattgagtattctcttgtaattttccatcctgcttgtttttaggtgctgccatatgaaatctctgaactgaggattctcatcagccttcccaggacccaaggacatagctctggctataaatggtgccagttttggtgggggagctgctgctgctttatctgggcccaataaaccttatcaaactgctgtgcagccagccttcagcgctaagtggaaatgcttggagcccaatgctggcattcagcccacagcctcgcctgccttcttcctttttgttaccttctccacctcttaaattcaggcattaatctctctttaacacttactaacaagggctgggcttttaatgggcagcgtttatgaagcaagggagattttcacatagagtgaatatggcacgggggtggggaggccagggccatagaggattgtgctttctctcccattgtttccagagattctctctttctctgatttgaggattaataggagattaggatcaggggttaattgtgtgcttctcctgctactgcactgaggagaggctggtaggtggatgtggacagcaaagcggaaacctccagcaggcactatctaggcagaagctcaacaagtgtagtgattctttcttctgtttccctggtgaggcaccaggagggtcttttctcctctccttacatccctccactcttgctctccttgcagcccagttctttcctaactttctttaaatccctttcctctaacagggtgtatagaccttagttagaaaaacaggtagtctctaaatgggattgctctttattgttaatgaaatgaatacccagggactgggcttcccctccgcttgccctgggtttgatgtggttgtatcccgtgctatcagaggagcccttccttcactcaagtgtgttcccctgcccagctctctccgcagactcctgctgggctgagctttccctgctcttaagagtcaggagtggctcttgctgggatggaatgacccgtctttggggctgcctcatgagcggctcttgtgaacccggatcagttccgatgtgtaaactctaccgcctggccttcagcgaacagatacagatttctgccaccttccatgaccctacagttcatgggactgggtctggggcagtgccagaggcacgcatggaggtgtgattctaggtgagtcctgcggaaaacctctggcccacccgtgagtcacggacagaacatgcagactcaggccttggtgacataagctccgcattgctaaaaccgcgtgacctcgagggctgactggcctgagaaccctggatggcgctctcggccacccccacctcccaccccaacctcctgggcttcggtcagaatccacagcccgtgcccgaagagcgcttcccgcctctggcaccctaccttcgctcagctccagggaaaaggggagagggcagctttctgcagtcagaggaagagtacattttctttggctgctctaccctctgaagtagggcggccagctgaaggaggacacacttttgaggggcccagaggttgtccaagcttccccctgccccctgaagactgtgcactgagctgggcgcagttctcgggaactgtttccacccagattgctggggggcgggggggtaggatgagggcagagccgagaggctgtccaaggtttgggagagagaaaagtttctcccaggactcgaccttggcctccagcaatcgcgacagctaaaaacgggtgtctcgcttcgacaatagatccccgcggaccttctggcacctggttcactagcgcccgcgaactctgcctcgggagacttattgaaatccggatgctcaagccgggaggcgcgcagtaaccaggaggatgagagggccgggtttgggctaggaaagcggccttttaaaacagatgtcagggggactgcagccccgagccatgagaaaaaagttaaaggcgagatgacacgcactgaattggggcaaacattggaagaggagacaaaactgcgtgcttgagcaccggggtgcggggagggggggacaaaacccgtatccagtgcaaattaaaatcttgggagtaggtgggggctgctgcgcgcccttcaccctcagttcccctattaaggattctgagtccccatgcactcctgtcctctggctccttccttcctctccgctcggccggtgagaggcggccgccggcgccccagcagcagctagatgtcaggcgaagcccggagcgcggagcgcggggaagggaggggaagggaggggaggggaaaggaggggtggggcggggagcgcgcgcgggctcggccagtgcggggtggtgggcgggctgagcccggggacggcgcgggaggggggagggaaggggggcagctgtgggcagggagccgggctcggccgccagcactaaagatggagaggcgccggggccttgcaggggagggggctcggcgttgacgtgggacgcggcggaggcgcagcagccggtggtgatttgctaacctcgcagcagagaggagttgagggcgatgagagcgggtactgcgaactgccgggcgatgctgtcgctgccgccgtgatacggagagcaacagttccccagcaacacccctccccgacacaggcacacaccccccgacaggcacgcacacccaccccacagtgcccggctcggctgcggtgagtgaggggccgggaagaggcgcaccgcccagcgagcgccgcgcgccggggcttcccggggctggagaggtctggggggcgcgcgctcgcttcggccactcggccgctgggcttgtgccttttttatttggcgtgttcccttcctgccgctgcagccgtcgccgccaccggttgggggtcggctagaagggggagccccggctgtcagcctgggcgcagctgcctccccagcccttcctcttcagggcacggtcggggtgagaggtggggggcgtagcggtgtgcgggggctgagggcgtgagcagaggggtcggggatccggaggctttgtaccgccaggggctggcggagcaacagagcccgtgggtgctcttatgtatgcggaccggtgcgcgggcgcaagataaggttgtggtttatttatttgtgtgtttattcgccggccggctgggaagctagaatcggaggagctgacgagtagatctgggggcggaggggagcaggactgggactgcttacgttttgtttctctttgagaaaacgtggtgggctttttcttgattggacttgatccccaccccccttttgcaggggagggagggaagctccagagggtctgcagcgctgcgggccctcctcggctctcggcgggaccggcggtgacaccggagctcgccgtgcgctcccggccgctctcggtgggtgccggtctctgcacctgatgcgttcgggatgcctttcccaccctggcgcgcccgccgctagctcgcacagcgcctcgcacactcccgcacgcgcttgaaatgcgcacggtcccgccggcccgcggaaccacccggacgcacggagcgctccgcaccgactcgctcgccgcctccccgagacgctcgcaccgtgcttgggccgggcgcgctggccgctggcg

SEQ ID NO: 595 - DNA, 6000 bp, Homo sapiens
gtaaattccactctgcctaatttttttttttttttgaaatgagatcttgttctgtcacccaggctggagggcagtggtgcaatctcagctcactgcagccaccacctcccaggttcaagcgattctcccgcctcagccccctaagtagctggtattacaggcacgtgccaccacgcctggctaatttttgtatttttagtagagatagggtttcaccatgttggccaggctggtctcaaactcctgacctcaagtgatccgcctgcctcggcctcctaaagtgctgggagtacaggcatgagccactgcgcccagcctactctgcccaattgttgacatcacctacagctctatagtagatgtctggaatgatgatctgaaggactgtaagactgtaagattttttgactccagaaatggacacaataggcttgcggtgtcttcccctaacagtccctggcagggtaaaggtctgatgccctggtacgttccccagtggcaatctggagttctcaactgcagagaatacttttcctctactcaggggcgtcactacctgcatctctccctgaacatgcttcattttccactcatcacaagtttttggggaaatgcaaagtggcatcttctccccaaaaggtagggatctttgatttttttaatcacgatagaaaagtttactttgaaataaaaaaattaaatatatgttccaaattaagagttggaacttaaagagttgcaacattccattcatactcagatactcaaaacaccactgtattcttcttcctatctctttagttgaagtttttttttgtaattcaaagccccctccccaatttctgcctgagattctgagggaggaggaaaagtgtaagatcctgggggatctaagtctctttacctggtgaccaagctgagaaccatttggtcctcagcttggctggctgctgcacagatcttggcctcagcagagtaagagaagaaggaaaattaaaagcccttgcttccttcatctatttcactagaggctacataatctagaagttaagagcatgagctttgcagtcagaatggtctgatttaaagtttcagctctgatgtttaatagatctacagtctgcagtaaggcacttaatctctctgaacctcagttttcatgtccacagaaattgggaaaataatagcacctgcattaataggattgttatgtggattaaataaaacaacataggtaatgtgttgagtttcgtagtcagtgctcagaatgagttattattttcgctgtctccttcctgtatgatctcttagaactgctataccctcctgttccactaactgagctctgaaaggctgccagtggtgggaggtacatgggtaaagagggagatgagggagtaagatttagcaatggaattccatgcaaaggccagctcatctattcctctgtctctagcatgatctccccctaagattgagatctcctgtatttttagaactgatacccaggtttcccttaaaagacgcttcaagaaaaaatgtaaaagaaaaatcactctaaatacacgaacatgagagagacagaaagagagcgggcatgtgcgcgcgagagagattgagtattctcttgtaattttccatcctgcttgtttttaggtgctgccatatgaaatctctgaactgaggattctcatcagccttcccaggacccaaggacatagctctggctataaatggtgccagttttggtgggggagctgctgctgctttatctgggcccaataaaccttatcaaactgctgtgcagccagccttcagcgctaagtggaaatgcttggagcccaatgctggcattcagcccacagcctcgcctgccttcttcctttttgttaccttctccacctcttaaattcaggcattaatctctctttaacacttactaacaagggctgggcttttaatgggcagcgtttatgaagcaagggagattttcacatagagtgaatatggcacgggggtggggaggccagggccatagaggattgtgctttctctcccattgtttccagagattctctctttctctgatttgaggattaataggagattaggatcaggggttaattgtgtgcttctcctgctactgcactgaggagaggctggtaggtggatgtggacagcaaagcggaaacctccagcaggcactatctaggcagaagctcaacaagtgtagtgattctttcttctgtttccctggtgaggcaccaggagggtcttttctcctctccttacatccctccactcttgctctccttgcagcccagttctttcctaactttctttaaatccctttcctctaacagggtgtatagaccttagttagaaaaacaggtagtctctaaatgggattgctctttattgttaatgaaatgaatacccagggactgggcttcccctccgcttgccctgggtttgatgtggttgtatcccgtgctatcagaggagcccttccttcactcaagtgtgttcccctgcccagctctctccgcagactcctgctgggctgagctttccctgctcttaagagtcaggagtggctcttgctgggatggaatgacccgtctttggggctgcctcatgagcggctcttgtgaacccggatcagttccgatgtgtaaactctaccgcctggccttcagcgaacagatacagatttctgccaccttccatgaccctacagttcatgggactgggtctggggcagtgccagaggcacgcatggaggtgtgattctaggtgagtcctgcggaaaacctctggcccacccgtgagtcacggacagaacatgcagactcaggccttggtgacataagctccgcattgctaaaaccgcgtgacctcgagggctgactggcctgagaaccctggatggcgctctcggccacccccacctcccaccccaacctcctgggcttcggtcagaatccacagcccgtgcccgaagagcgcttcccgcctctggcaccctaccttcgctcagctccagggaaaaggggagagggcagctttctgcagtcagaggaagagtacattttctttggctgctctaccctctgaagtagggcggccagctgaaggaggacacacttttgaggggcccagaggttgtccaagcttccccctgccccctgaagactgtgcactgagctgggcgcagttctcgggaactgtttccacccagattgctggggggcgggggggtaggatgagggcagagccgagaggctgtccaaggtttgggagagagaaaagtttctcccaggactcgaccttggcctccagcaatcgcgacagctaaaaacgggtgtctcgcttcgacaatagatccccgcggaccttctggcacctggttcactagcgcccgcgaactctgcctcgggagacttattgaaatccggatgctcaagccgggaggcgcgcagtaaccaggaggatgagagggccgggtttgggctaggaaagcggccttttaaaacagatgtcagggggactgcagccccgagccatgagaaaaaagttaaaggcgagatgacacgcactgaattggggcaaacattggaagaggagacaaaactgcgtgcttgagcaccggggtgcggggagggggggacaaaacccgtatccagtgcaaattaaaatcttgggagtaggtgggggctgctgcgcgcccttcaccctcagttcccctattaaggattctgagtccccatgcactcctgtcctctggctccttccttcctctccgctcggccggtgagaggcggccgccggcgccccagcagcagctagatgtcaggcgaagcccggagcgcggagcgcggggaagggaggggaagggaggggaggggaaaggaggggtggggcggggagcgcgcgcgggctcggccagtgcggggtggtgggcgggctgagcccggggacggcgcgggaggggggagggaaggggggcagctgtgggcagggagccgggctcggccgccagcactaaagatggagaggcgccggggccttgcaggggagggggctcggcgttgacgtgggacgcggcggaggcgcagcagccggtggtgatttgctaacctcgcagcagagaggagttgagggcgatgagagcgggtactgcgaactgccgggcgatgctgtcgctgccgccgtgatacggagagcaacagttccccagcaacacccctccccgacacaggcacacaccccccgacaggcacgcacacccaccccacagtgcccggctcggctgcggtgagtgaggggccgggaagaggcgcaccgcccagcgagcgccgcgcgccggggcttcccggggctggagaggtctggggggcgcgcgctcgcttcggccactcggccgctgggcttgtgccttttttatttggcgtgttcccttcctgccgctgcagccgtcgccgccaccggttgggggtcggctagaagggggagccccggctgtcagcctgggcgcagctgcctccccagcccttcctcttcagggcacggtcggggtgagaggtggggggcgtagcggtgtgcgggggctgagggcgtgagcagaggggtcggggatccggaggctttgtaccgccaggggctggcggagcaacagagcccgtgggtgctcttatgtatgcggaccggtgcgcgggcgcaagataaggttgtggtttatttatttgtgtgtttattcgccggccggctgggaagctagaatcggaggagctgacgagtagatctgggggcggaggggagcaggactgggactgcttacgttttgtttctctttgagaaaacgtggtgggctttttcttgattggacttgatccccaccccccttttgcaggggagggagggaagctccagagggtctgcagcgctgcgggccctcctcggctctcggcgggaccggcggtgacaccggagctcgccgtgcgctcccggccgctctcggtgggtgccggtctctgcacctgatgcgttcgggatgcctttcccaccctggcgcgcccgccgctagctcgcacagcgcctcgcacactcccgcacgcgcttgaaatgcgcacggtcccgccggcccgcggaaccacccggacgcacggagcgctccgcaccgactcgctcgccgcctccccgagacgctcgcaccgtgcttgggccgggcgcgctggccgctggcgccgctggccagaggcctgggacccagccggtcgctcccagggggtcacggccctgggtcggagagggagggcgggcagaccccttctcgcctttcctcccacaactcgctgcggggcttttgtgcttccccttcgccgcggggcgggtccgcctcccctgccgctctcgccgcggagtccagcccgcccggactgtcgccgttcctccccgtctctttcgctttccctcgtccctagctcagctctccttctttcaggagtctagctcctcgggaaaagttgcttccccaagtttgctgaagtcgtctccaagtctcggtgggggtcgctgggaactgggggggtgtgagagcgcggtcgatccccggagctcgggcgggttatcgccggctcttccccgcgccgcctggctggacgctgcagccagcgccagccggatcgcgggcgccgagcggcgggtgggggagacggctgcccgtgggcgcccagatttccctcaggacccaaaaggcttgtttcagggcgccaagcttccattcttttggctgttccctcctagttctcagaaaccccgatgtctgcgggaaagcacgcggtggctcggctcggctgaatgctcatcccaaccttgacggcctccgtccccaccccggggcgggcagcaaaaatgtcttgaccagccgtcctgtgaatcctttctgcgtgagcttggtggctcctgaactgatagagctccttctgggggtggaggcaa

SEQ ID NO: 596 - DNA, 6000 bp, Homo sapiens
gctacctgatgggctattcttgaagtccagctgacagaggagaataaagcctgagcttccttgacagatgtcatcttagtatgtggatgcaagccaaaaatggaatgctgcagtcctgcagtcctgcattcccactagggaacgagcttgaaagagtagtaaagggaaccgggtgtggtggctcacacctataatcccagcacttttggaggccaaggcgggtggattgcctgagcttgggagttcaagaccacccttggcaacatggtgaaaccttgtctctactaaaatacaaaaaattagctgggagtgttagcacgtgactgtagtcccagctactcgggaggctgagacacaagcatcgcttgagcaccagaagcagaggttgcagtgagccgagatggtgccacagcactccagcctgggcgacagagtgagactgtgtctcaaaaaaaaaaaagaaaagaaaagaaaaagaaagaggagtaaagggaaatcctctcaaagggcagagcttctgccattgtacgtggttattcactttatgtggaaagagaagtggcctaatgttagaatatacagagatccatgggcagtggtgagtggcttgatttattgattaggggcctggaacaagtaagagtagaagattggggacagaaaagtctggggaagatgcacgtgtatgggcccacgggagtcgttaccagatgtgaagatctttgtgtcacatgtgaacaccaagcagagaacatccgtcgtgggagaagcaccacaacacaaagtagaagaaaatgacttggcccgttaaagtcaactagcctctgtccatggccatctcaagactcaaacagtggggttatgaatgtagtagctatggtggcaatggtaaatgctagacctcggcacaacagggtgagctgtcactcacaaaggttgatccagctactgccactgccaaaacagagttcagtgcagagcctccaatttggcatcatcgttgaaggaaaccaaccagtcatttcttgacaagaggattacattggacccttttcaaaccaaaatctggaaagggctcaattcattgacaggacaaatcaattcatttgacatactctgggtatgagtttgattctcttacctgcagtgcctgagctagccctactatccaagagttcacatactgtctgatccgtcagcattagatcttccatagcatcacaacagaccatgggacccactttaaaacaaggatgtgtccgtggacatatgaccatgggatccactggccctatcatataccacaacacccagaagctgccagcctgatggatccatggaatagtcttttcaagacatagctaaggtatcaacttagagatgacaccctgctaggattgggcactgtccttcaggatgtggtgtacatattaagccaatgactgttatatgatactatgtctccaaaaggtaaaacgcatgtgtgcaagagctaaaggttagaagtagggatattcatgcttaccattacttccagtgacccacttaggaaatctgtgcttcctgtcccgctaactctaggctctgagcttctaggggccatggtttccagagacagaacactttcaccacagcacccattaaactttaagctacaccactgccaagagaccagcatgccaaaaaaaaaaaaaaaatgatttgctcccccagcagagtgaatctttccatatctgatgataaggaggaggcagggctgcagggacaactcagatagaatccaagggctcccctggggcattttttagtgcaattttgatggtaaatgggcaagtgcagcagccacaacccgaaaagaccacgacggccaggggctcagactcctcaagctatgtcttccctgaggtcagcagaggtgctaactgaggctaggagcaatccagaaaagggaacaagcattgcctatcagatgcgccctggggcaactgtgctaatggggctgtaatttgtcccattaggaaactttccttttataagcttctccaaaaaaagagataaccagaatcccgaaaaggctgtttaaggacaggatgaaattatcacatgaagcgaatggctccaagcagtgcaagtgttaaactgcatggatgctgtggctgcacccaggtcatcactccagggctgctccctcccccaactgctgggattcttgtactcagaggactcacagttgagctctttcaaagacattgccttcagcagaagcagctgcctcacccaacttcgcagccccctcacccaacttcgcagcccctcaattcataatacctgtatttttcatggcccctttgctcaattcaggataactcaggataacttgggaaggtgatcccaggctaagaactccccatggctctggctgaggctcctgatatgtctcatcgcagttcacctctctctgccagatgctgcccctctctcccttacagatgatgctcctgtgcttcctcagagagccacctgcccaaatctccatctttttttcccagaaaacccgatggatagcaatgcacatttacagacacgaaggtaaccaccaggaaaaaaaaaaaaaagttgaaaaacttaaaagttgttttctctagggagaagtgtaggggtgaagcaaggtagaacaggggctattgttatacagcccttctatatgcattgtttttaacatgcacgtattacttccatcattaaaacttttttcattttggccaggcatggtggctcatgtctgtaatcccagcacttcaggaggccaaggtgggcagatcgcttgagctcaggagttcgagaccagcctgggcaacatggtgaaactctatctctaccaaaaatacaaaaattagttgggcgtggtggcaggcacatgcaattccagctacctgggaggatgagacaggaggatcccttgagcccaggagggggaggttgcagtgagccaagatcgcacgattgcattccagcctgagcaacaaagtgagacttcatctaaaaaaaaccccaactttttccatttgaatattataagaatttgatactgtcactcacctttttaaaactatttgaatacttcctacagccctaagaaaatccttaagaatccctaacatagcttgcaaatcccttcccatctggcccctgctgagtttcctatctcttttatttttttcatttttattttttgacagggtcttgctctattgcccaggctggagcatagtagcacaatcatagctgactgcagcctcaacctcctgagctcaagtgatcctcccacctcagcctcccgagtagctgggactacaggtgagcaccatcacatccggctaattttttgtatttttttgtagagatagggtttcaccatgttgctcaggctggtcttgagctcctggcctcaagcaatctgcctgctttggcctcccaaagtaccatatctggcgaatttcttatattatttcttacactcctcgttctccctgttacctgccgtgctggattttccatttctcttcctcatctctggacttcaaacatgctgctgcctctatctggaatgctttccactccacctggttcattgctgttcctccatcaaatttcagcttagatgtcacctgctcagggggaccttctcttccccatcccaccccagactatcttagatcccttctatcactcccacagcacctgaacgtcttttttcttagcatcaatctcctgaagttatctggggggttttttagagatgggatctcactatgttgcctaggctggagcgcagtggctattcacaggcacaatcacactcactgcagtctcgaacccctgggctcagtcagtcctcctgcctcagcctcctgagtagctgggaatacaggtgtacaccatcatgcggggcatggttattggttatgaggttatctgtttaatctccacatttccttttttatccaagaggactatttatcttgtttctcctgtattactagcacccagcatataactacagtacagtagacagaaaatatgtattaaataagtgaatttcatcaaaatgttttctagagtcccagctctgtaatctgcaacttagataacctgcctgagccttagtttgctcaagtataaaatggaaataaaaataaaaataatacttaccttagagggtcgttttgaggattaaataagatatatcagaaaagctcttagaacggtgcttggatatagtaagcatttgattaatgcatgcttaaacataaagaaaggttacatcaattcacactcataccagcagactttgacactatcactctttaccctgttcaacattgagtcttgtgtttttaaatatttttgtaaagaatataggtaaaaagtggcattttttctttggatttaattcttatggatttaagtcaacatgtattttcaagccaacaagttttgttaataagatggctgcaccctgctgctccatgccagatccaccacacagaaagcaaatgttcagtgcatctccctcttcctgtcagagcttatagaggaaggaagaccccgcaatgtggaggcatattgtattacaattacttttaatggcaaaaactgcagttacttttgtgccaacctactacatggtctggacagctaaatgtcatgtatttttcatggcccctccaggtattgtcagagtcctcttgtttggccttctaggaaggctgtgggacccagctttcttcaaccagtccaggtggaggcctctgccttgaacgtttccaagtgaggtaaaacccgcaggcccagaggcctctctacttcctgtgtggggttcagaaaccctcctcccctcccagcctcaggtgcctgcttcagaaaatggtgagtctctctcttataaagccctcctttttcatcctagcattgggaacaatggccccagggtccttatctctagcagatgttttgaaaaagtcatctgttttgctttttttccagaagtagtaagtctgctggcctccgccatcttagtaaagtaacagtcccatgaaacaaagatgcagtcgggcactcactggagagttctgggcctctgcctcttatcaggtgagtaggatggagtggaaagggtggtgtgtctccagaccgctggaaggcttacagccttacctggcactgcctagtggcaccaaggagcctcatttaccagatgtaaggaactgtttgtgctatgttagggtgagggattagagctggggactaaagaaaaagataggccacgggtgcctgggagagcgttcggggagcaggcaaagaagagcagttggggtgatcatagctattgtgagcagagaggtctcgctacctctaagtacgagctcattccaacttacccagccctccagaactaacccaaaagagactggaagagcgaagctccactccttgttttgaagagaccagatacttgcgtccaaactctgcacagggcatatatagcaattcactatctttgagaccataaaacgcctcgtaatttttagtccttttcaagtgaccaacaactttcagtttatttcatttttttgaagcaagatggattatgaattgataaataaccaagagcatttctgtatctcatatgagataaataataccaaaaaaagttgccatttattgtcagatactgtgtaaagaaaaaattatttagacgtgttaactggtttaatcctacttctgcctaggaaggaaggtgttatatcctctttttaaaattctttttaattttgactatataaactgataagtcctctctacttcacagattaagaaattgatactcaaaaaagttaaataacttgttttaaaccacatagtaagtgccgaagccaatctgtgagaccaggactgtttgtactctaaatggctgcaccacatgaggcaaaatggctc

SEQ ID NO: 597 - DNA, 6000 bp, Homo sapiens
cctctctatccccacttaccctcccttcattcctgcctccttcccctcaacgctcacctgatagacctggtcattcctcaacagagcttgtgtgtcggcagctagaagaaccagagagagacatcaatggcctagcagatgggactgtgagatccaccctcccacaccctcagaagtctgcatgagtgatatgaacacacaagttctttcaacagtcaaagttctaggagtctttaggagattgcaagagtaactcccagctgagactaaacctaccaccagccccattccttagctggtgcataagctcactggtacacacacacacacacacacacacacacacacaaacacactctcatgctctgctcttccactaacccccagacagccttccagtctcatgtccagcaaagcagaagactcccaaagcaaggagcagagtggcaatgacatcagtgacaatgatgccagccacggtggctggatccagctccacacagctctggcacactgtgggggaagggaggagagaggagaggttgagagcctttaagatcagggaaccatcctctgcctcctagggcaacccttagatctcttatgccaaaacccaaacttcaataagaccctgggagaaaggcctggtgatgggcttgccacaccttcctccaccctgcatcctaaggaatccctgggaagagccaagaagtaatctcagcttttgggaccttgaacaaggtggtgggccaaacctctcacccaaccaaggctgcagtaacatgacccctactgctctgtcttgctgagttaagctctctcttccactttgaaggtccccaaatctggcttgtaccattacaatagtgacctcactttgtttagagaacagatgggttcaccatatccctctctagccagaaagttctcacatccagaagccctatccattccaacccaaagggttcaggaagcacgtacttcgataatgaacttgcacggtagattctttgtccttgtatatatctgtcccattacacctatatattcctcgtgggtccaggatgcgttttcccaggtccagtcttgtaatgtctgagagcagtgttcccaccgttccctctacccatgtgatgctggtattgcaattcacaaacactctgtcctcaagttcctctataggtatcttgaaggggctcactaaaggggaaaaaatatcacagttggagacagctctttgatctgcaccaagccctttgttctgcggaagctcatacttaacagagaccattttcctggtccaggacagtttatggcttccatcaagagagacagaagtcacaagaaaaagccttcagaaagttccccaccaactgcaggggtcaagggggacatgaggatgccattcaagcagaggacaggtcttggggccttggtgcaaaagaggacccctcagagcaggattgacccaagcaccttcctggaaatgaatccagaccactgatgaggagtagggggagcacggaccactgaagcacctggaagatgtggaaagacagaagaacattcctcgattggaaatgtctgcattttttcttcaaggaaacatctaattccacttcccagccatctacaacactcccacttcagcttcttatcctcatccttcctcattgcccctgctccattgacaaccaagaaagcggggctctcaacactgaagcctttcccagggccagggatggctgtgggtggagaccagctggtttaccagcccctgaattatcagccaagtggtccagaacgggaccagggcaaatcccatgtacagttttccacccttggttagaaggaggagaacaggaaaaaaattttattgaatccatccctagagctcctcacaagtcaagtcttgtgggagacttttagggctggaggtgagtgcagcaacattccagatgcagtgagttcctctgacagcctgagcacatctccacaggccacagaggcactacagtctatgcctccaaacacagggaaaagtggaggctacattcattcatcctgggcttcacactaagtcccaaatttggatacaagagcatcttctagaaaaccctgaaacagctgttgctcacacttctgaagcaggttggaagtatatgcatgtatcctcagggagacacatgcacatcaaatgcttcacgtcctacagtcgcgtcctcttcagggatctgtctccagtggaaatcctgagtgccctagtgcagccaactattaggtgaccattggacccagtttgcttagtgttgaaggggttcctcggacatgggactttccattttaaaactgaaattggcaaactgagatgagttaaaatcctaccatgtaacaacccctcaaatcttccctccgtcctgctcaacctaaagttaacttctcttaaagcattcacataagtgctaggacatgcctccagggatgacataatcatggccaaacaaacaagagtcctgattccagaggccatcaggcctaaaaggagtagtgcaggaagctgtgctcccatggccagtcccagattcaggtacatacgtactgagctattttctgcagatctctggcctaaggccttctgagagacattctaggcccacatgcacccatggctggagtcagtcaaagccaagagcctgtttcccagactctatgctacatcctgcccctgccctcctgacacccctggggtgcctggtgaactgaagctagcaccgagaagcacttttttttttttttgagataaggtctcacaggttgcctaggttggagggcagtggcatgatcacagctcactgaagccttgaaatcccgggctcaagtgaccctcctgcctcagcctctcaaatagctgggactacagttgtgcaccaccatgcctggctaattcttttgttttttgtaaagatagagtctcatcatgttgctcagactggtctcaaactcctggcctcaaaggatcctcccacttcggcctcccaaagctctgggattactggtgtgagccaccgtgcctggcaagaaacactttcaagtgggcctcactcccatcagtaatgtccctctcaggtcccttcccccacccacctggagtagccttaccttgcgagagaagggtagccagtaccaggccagagagaaacgtgctatgttccatctcccagcggaactcatccagtagataaagccaggtcaccgaactatcagcctgggtgagagctgccctcccctagctgactcacaggtaccggaaagaggagagtgggggaggaactagaagatgtctgcttctctgctttctgccgttgatggtgggaaattttcagagtgggggtgggctaggggtagggtaggaaggaagcggtgtaaattgctctatctctgagcagggagctggcagagaatatggaaaaggtggcctgaactttagcgtccctattgacaatgcaaccacatttacacacaacctaaacactgccacatctcgaagccccttgagagaagccgtcggccccatagcgcaagccgtagcagctagatttctcatggaggctgatctttctcaggacccttcactaggcagccagggacaccagatctagcagcttcttgtcagtgggaggttgggctttagagaccccagccagagatttgaatcctgggtccaatactgcctacctgtggggcctgggccagccataaaatttttcagagtcttattccattagtaccattattaggattcaaacaagatatttgcatggtgcctcacgcatcatatgtgctcattaaggggtagttattaataataatataattgactgacaggcaatattgagcctcccggtgagacaaatggacctttttcccctgtggcctacgaggatctgaaactcttcacgctgctgcagttagactgtcacttacctggggacagagtcatgcctgtcttgctcactgctgtatcttgtgcctggcacataacgggagctctgcacatttttgttggctcactgactgactggctgagggagataggggcctgagatcctggacattcagtccgggctctggcccctgaaaatgtgctggcctgtcctcggaattgttccacctattgccttccaggcgcctctttcatgatctcaaaagaatagtgaaaccaggtgccgtgtctcacgcctgtaatcccaacactttgggaggctgaggcaggtggatcacaaggtcaggagttcgagaccagcctgaccaacaaggtgaaaccccgtctctactaaaaatacaaaaattagccgggcttgctggcacgcacctgtaatctcagctactcaggaggctgaggcaggagaatcgcttgaaccccggaggtggaggttgcagtgagctgagatagcgccactgcactccagcctgggcaacaaagtgagactctgtctcaaaaaagaaaaagaaaaaaaaagtgaaaaaaattcctgaatgaaggcctggactgaggtggctttccatttggaggtccagccccaagcatctgagagtccctcctaaattcattacctacagcaacaacaactagcaacaagtaacaactggctacgatcctaacaactaatgacagggacatttatctccctcatgaagaaacggtcccaggaccatctcccacccagcatccattgcggttccctgtgcaagatgagtctctgagtgggaatccagcactctctccctcttcttccccaccaccttcaccctccttaacggaaaaacaaaaggcatctgcacctgcagccctgctgaggcccctgctgctcacacttgcagcagagggtggaggctctgggttcttgccttctctcaaaggccccagccccaacagtgatgggtggagccagtctagctgctgcacaggctggctggctggctggctgctaagggctgctccacgcttttgccggaggacagagactgacatggaacaggggaagggcctggctgtcctcatcctggctatcattcttcttcaaggtaagggcctactaggggtctggaagcctggggaagggctcaagggaagagcccatcactagtgagacaggaatattggtatccctaaccttcagcctacctctgctgtcaccttagagttcaaagaagggcaaaatggaggctcttaactgttctctgctagagagaaacagtgtcccatggaggagaaggaatccttgtctctgaaaaatgcaaacagagtacttaaatggctgaagagaggaccctgttaccgccatcttagatttgaatgcagcccaaaagggcataggccaagaaactaaaaggaaaaagtatatgttccctacttcagagctgggggctagcagtcgacctaggaaatgtccattcactcagttgggcagttggccaattggtcaacaaagatgggtgagaccctaatatgtgatatgccatgaggaaataaaaatgaataaaacacttatgctctacagaactcatagtctcattggagagattagttttcatggtgccagactgagtgtacagtatagtatgggtgcctgcatgaatactccattggactatccaataggaagtggatgaactgggttgatgcctggagtctggacatcctgggaaagttaaaaccatggaatttgctgaagtcacacaagtactatgtgaggaagagggagctgaagatggaacagtgagggcaccaattttaaggggcagttagagaaaaaaaaacattccaggaaagagataaaaggagaatcaaagagctgaaataatcaaatgtatgcactaccttggaaaccaagagagtagagagcttctagaagaagagaattaccaagagtataaaatgttaaagagagcccactaatataagaatatatttaaaagtttaagtctgcgggatgtggc

SEQ ID NO: 598 - DNA, 6000 bp, Homo sapiens
accttatcaaaatagcactgctaggccttccacccagcaacactcagagacagggccaaagagtgggaaacggagcatccagggcctcagccagcagagcccagatgccttctgcagttaagatccctggactcagaatcagaaagctgttaagcaggaaggagtgcgctgccatgaagaggcagacagaagccagagccagtgtgtctggaatgcatcaggtagatgaatgggaagatggctgggatggagttggagggaggagggaagtcagcagccaggggccaggacattcatggccttaaaaagtatcctacaaacaagaagccaggttagctcacctatgaagagggacagtcttaccagatcatgtgttagagtccccagatcctggggagcgtgagaaaagtgcagactcagctggctctagtactagattaaggaggtcctaggtgggcaaggccagctgcatttttcataaaatgccctagaaacctctgcagtttaccaaagtgaatagctcctttggacttaaccatctgcaaggctcattccagttagagtgttccatcaccctaaatgctgggaaaccaagcgaatctcctcccacttgcaagcttccaacagtggcttccaacagtgccactgcagtatcagaaactgcagggaaggtgccagggctgacttccatgaagaaataggagaacaggcaggcagacattggggaggcccacagaatgtcgtgatcagaattcataaagaggctggcaggatacaaatcaatcaaataaacgttagttcaaaaaaattcactacacctgtgagtgagagaaagtcatcagcactgtctctaaaaatgagcctagggcttctggtgacatccaatcggtgggttatcaggagtgccccaggtgatcaggagttggcctcgactcagtcctttttgtgctgtctcctcctctttcccagagttcctctctctcttctcccactaggcagggatgagcaagaggaatggctcacccttgagagctggggtccatagcccaggtcagttctccagctctcccacttaccagccaagacaggaggtgaggattgagatgggatgaacccagcaggcggccatgggttaaaggtcgccatgaatgtaatgtgcccagcacagtgcctgctaaaaggcaacactcccttcctggtctgaagaccaaacaagcagactgtactcaggaaagccagaagaaccttccagctgtctggaccagaaggtgccagcccaggggctgaagaagacgtaatgcccagagcaaaaagcgcctgcagccccctgaagggctgggtgctctggaatagatgagggggcgaaatggggctggggaccagggacggacagggtgggtccagcacctgcctcgcttccgaagggctgctccaacactgaaaaacacccaaccagcttcctttcagaaagactggaatattccaaaacttctcactggaggctccggaggaggtgggctccagctgaaaaggaaatgtggaggcgtgggcgctcccggcctgcatcctgcacctcttacactttggttttcccacagactcctgaagaataggtcagaagaaagggttaaagccttaaaaggggaacaaccattgcggggctcagggaggaggataatgttctttgggctgccgcaccctgatccccggggtcccgaaccctcccgtccctggccaggcctgccagccacagggtgagggcccccttccgccgcaacctgccactctcacaccaatgcgggaccgccttctcttccttccccaccccccaccccaccctgccgtcctttctcccccaatctccgcctctgattggctgagcccccggctccccgctccccctctcctccatccccggtgaaaactgcgggctccgagctgggtgcagcaaccggaggcggcggcgcgtctggaggaggctgcagcagcggaagaccccagtccaggtgggaactggagccggtgggacctggggctcggggaccgccgtcaggcgcccatgcaagacttcccaacactaggcttcgggccacggtccgagggcgcccagggaagaagggcgcagagcttagggaggggcctgctttccaggcaggggcgggagggggatgcttctgcagggcaggggccgcgtggcaccctgatgtctttcggggaaggcgctcccgggctttcgcccgctgggggactggtgtctggggctggggcgctggagaacagggaggaagggcaccaaggacagcctgtgggtctacattccacccagacgtccccaaacccagctcgcagaggcggggaggaggacggatgaaactgcggggagaggatggaggatggcgagctagagggaatctgccgggtgacctcgcggcgggctgggtgcggggcaccggaggagaaggaagccgcagtgccgcaggcggggactgggtggaaggcgggcggacgggggaggggagagctggaaaaggatgagagagggggaagggggactcatttgggaaaggagaggattggaatacggaaatggattaaggatgaggcccgccgggggcttgagagggaggaagagcagaccttctctgggtctggagccgcctgaggacacagaccagaggaaatgaatacagactgcacctccccagccgctctccacccctcccctggctcttctaccctctccagccccagacccatttcttccctttcttgctctggccattgctcccccttcccctcctagatcccaagcccgcacaacatctcaaacaagagtcctcgattcaaaagccagatgccgaccccccttcctcctggatctggctcagggcagcagctccaccccgggacagagagagcattgattgtagctgcagccgccgcgggatcctagcctcacccgtcaaggggctgagcgccagggaccctgaactcgtctagtggtgcgccctgcgcacccgggcgcactcaaccgaggcaatgccctgcgcgctctcgcgggtgcacgccccttctgtggcctctcctgggcgagcactgctctgcagataggctagactaccggctccgcgtcgcctcgccaagggttggttcagccaaggctgcaaaaaacaaaaaaagaccaggcagacagcctatccagggtggctattgaaactgggctggaaaactgcagtcccaggaactccagagagctggacattgggaagcatccttggctcacatacaatcggagatcactatgtctttctctcctccaggaacacgattagcttgtgtcctatccagataggaatagatgctccctatctgggagcatccttagctatggtgaatggtatctagccatccactggggatggcgagtgacttagggatttgtgtctcacgtatatgaagcagtcatcgccagatgttggttgtttttcttaacccccatcataacccggtgggtatgtaagattcagagagattcattcattcattcacaataaatatctttggagtgtatgctatatgccagtaatctgcaaacggaaacggttttgagcattggggattttcttctgaacaggaaatgggaagtccctaaatggggagtctttgtttaacagatacagagttttactttgaaagacaaaaagagttccggagatgggctgcatagcaacgtgaatgtatccagcactgctgaatatactgaatttaagtactgaatttaaatggttaaaatagtaattattatgctttttgtattttaccacgattaaattttttttttaaatacgaagcctcagccctcataggtcttatattaccatacactatgttaatgtaagaagaggagaaagagtggtaaagttacttaaagtcacccagctagtaagtgctccatggccaagcgcagaaacacaccgtgactgggcttgttctccctccttccttgctttccctgagcaggaaagagccagtggcagtatcatgttcagtgagatgcagggacgagagggggaatggagagagggacttagatgactgccatagccactatgccatgttcccagggacccccagccctggtggtaagtgtggcacagcttggctgattcccatcctgttcccaccccagatccaggactgagatcccagaaccatgaacctggccatcagcatcgctctcctgctaacaggtacccggcatggggcaggactggggctccaggcgccctggcttccttccctccagagaagcagcttctccctcacagtctcagaaaagcgcaggtgacaaagagagggctctttttcatcctgaagtcagccaatccaccgcgctgatattctgacggcctgaggtggtttttgaaaacacagtttgctgagccctccttcacactattgaactagaatccccaactgagaacccggaaccagcatcaactccctaagatctcctgtccttgaaacacattgataggatccaaggctcaagcagagtggggagggaggctggggtctgcaaaggagaagtgggatccctggggtggggaaaggcactcagagagcagaccccggtcccctccctagccaggcccatctctccacttcaggtgggtgggaggcccctgtgccgcaggcccctccagtttgaaggaggcactgctggtgccagtcttgcaggtctcccgagggcagaaggtgaccagcctaacggcctgcctagtggaccagagccttcgtctggactgccgccatgagaataccagcagttcacccatccagtacgagttcagcctgacccgtgagacaaagaagcacgtgctctttggcactgtgggggtgcctgagcacacataccgctcccgaaccaacttcaccagcaaatacaacatgaaggtcctctacttatccgccttcactagcaaggacgagggcacctacacgtgtgcactccaccactctggccattccccacccatctcctcccagaacgtcacagtgctcagaggtgagacaagcccctaacaaggtcaagtgagctgggagagccaggctcggggacagcaggcagttcccttggctggactagagaggagaatagccccataacgctctcaccctctcccaactgctgcctggtcaactggggaaccattgccttcggtgtgaatggggtgaagagctcagggccagacaggcagagcagtgtggttccaccagaactgtgggcaaggcctttggcctccctaatcttccttctcccagcgggaaaacagggatgacaccacctccctcagccagttttcttgtcatgatgtttagtaaggttttcataagatgatatgtgtgcaagagatcagtaatctgcaaatgggaaagatggctggttctgtgagaccgggctgttcctggtcccagctaagacattgcagtacccacctcccaaagggagtacacccttgctttgggcctgtgcctgcctgagtcctgatccgtcttccttcctaccctgcccccggcccccttctctttctgcagacaaactggtcaagtgtgagggcatcagcctgctggctcagaacacctcgtggctgctgctgctcctgctctccctctccctcctccaggccacggatttcatgtccctgtgactggtggggcccatggaggagacaggaagcctcaagttccagtgcagagatcctacttctctgagtcagctgaccccctccccccaatccctcaaaccttgaggagaagtggggaccccacccctcatcaggagttccagtgctgcatgcgattatctacccacgtccacgcggccacctcaccctctccgcacacctctggctgtctttttgtactttttgttccagagctgcttctgtctggtttatttaggttttatccttccttttctttgagagttcgtgaaga

SEQ ID NO: 599 - DNA, 6000 bp, Homo sapiens
gtggcaactgaactccaaaaaagcaagctccaacgtacaaacatttcacaagcttctgctttcatcacatttgctgatggcccattggccaaagcaaggcacgtggccaagcccagaatcagcacggaagggattacacaaaagcatggacaccgggcgggggggggcatgactcactggaggccattgatgtgacagtctaccatacctgggcaactcccatttatctttaaaagctcagttcatgcctggcctccaagaagccctctctgacagattgggtcatcacctgtccctcctctggactcccacagtaccctttacacgtctctacctctgtgtctaccctcttttttctaattatctatgtatcatttctgtttcccccattggaacaagcctttgagatggtgttctactaatctttgtatacctagcgtctagccccgtgccttggaacattattggtaccaataatgtcttaattatttggtcaattaaaccatccatgaataaagtttttaaaataactatcaaagattaaagtgtctccattggtgccttctctcaacttctgccctgcattccaagaaataatgtttagtttgtatttgtcacattctccaaccaaatatgcagttcttcagggagctgaccttgctcaggaagttgacctcgactagaggttaggagaggtagcggagtgtagagcagcagttccaagatattttaatttcatagacttagtcacatttccaaagaagtgtgagggttaacaggaagttaccaattttcttttttttatatataaagtaggacattaaaaaccacacatacacacatatcaataccaccatctcttcagaaaaatggaaaggtataaccttagaatgaaagtataggaaaggcaggtgtatagtctcaattagtcaaagattagagctcagtattatggctgccttgatatcagggagacctcaaatggcctaattacaagatcccctccctactttgctgatgaggtcccccagccaaaccaccctccttattgtgggggccaggcacaatttctgcttaaccctgagtactgggcttcagcaccctgccagcccacagaattatgcaaacagccaatcacattctcttacaggaaacgggggcattccaccgttttgacattacaaagcctgcctcccacagctcctggtaatacctgtttctgagtgcaactcccatgaagcagttcatggcgtgcagtgttatcctcccaggtatgagcatatgtgactaataaactgctattgctctcattcgtccagtgttgaggtcatgtgatccccctaactttaggggatgggaatctctccctcatcaacagggtgaagaacataaaatcaaaacaaggtgataacctgacagctatgttcagagtaccccggactgtcctcgttttacttatttcaccgtgaaccagggaaatgagtctagcagagatctgagggtccgccctgggagcactggagagcacagtgggaacatggagtcaggagacttaagatctaatagtccagaccatgcttcaaaatatttgtctgaccttgacaaatcattacctttctcgggcctcaagtcccagctataaaatagtggggcaagccaggtgcagtggctcccacctgtaatcccagcattttgagaggccaggcgggaggattacttgagcccaggagttcaagatcagcctgggcaacatggtgagatcccatctctacaaaaaaaaaaaaaaaaaattaattagctgggcatagtgtcaagtgcctattgtcccagctactcaggaggctgaggtaggaggatcacttgagcccaggaggtcaaagcttcagtgagtggtgattgcaccactgcactctagcctaggcaacagagtgagaccctggctcaaaaataaaataaaataaaatttaaaagatgggaccactgtagtcacctctgtgattctagaaagacaatctgatgaaatgagggaatggctggcagtccctaggtcatgctaaaggactgtgtgtttttagaagagtttttatccccatatgtttctgggtgggaaaacaggagatggtgggaaaagagagatctaagagaccaacagggcagccgcagtcttctggcaggaagtcttgccttagctggattcctctaaagccttgctggtttcagcactccgatcctatccacagtaaatggagttttaaaatctcctccctccaccaccttgtgctctatcccctgacctcagatgtctaatcagagccattaattccatccaatcagagatcttgcttggcagacacagaattgccacaccttctacagtctatactcccctcccctgcctaaaagcaaggtgcttggggacccagaaattaggccaggtcctcataaccttatcaaaatagcactgctaggccttccacccagcaacactcagagacagggccaaagagtgggaaacggagcatccagggcctcagccagcagagcccagatgccttctgcagttaagatccctggactcagaatcagaaagctgttaagcaggaaggagtgcgctgccatgaagaggcagacagaagccagagccagtgtgtctggaatgcatcaggtagatgaatgggaagatggctgggatggagttggagggaggagggaagtcagcagccaggggccaggacattcatggccttaaaaagtatcctacaaacaagaagccaggttagctcacctatgaagagggacagtcttaccagatcatgtgttagagtccccagatcctggggagcgtgagaaaagtgcagactcagctggctctagtactagattaaggaggtcctaggtgggcaaggccagctgcatttttcataaaatgccctagaaacctctgcagtttaccaaagtgaatagctcctttggacttaaccatctgcaaggctcattccagttagagtgttccatcaccctaaatgctgggaaaccaagcgaatctcctcccacttgcaagcttccaacagtggcttccaacagtgccactgcagtatcagaaactgcagggaaggtgccagggctgacttccatgaagaaataggagaacaggcaggcagacattggggaggcccacagaatgtcgtgatcagaattcataaagaggctggcaggatacaaatcaatcaaataaacgttagttcaaaaaaattcactacacctgtgagtgagagaaagtcatcagcactgtctctaaaaatgagcctagggcttctggtgacatccaatcggtgggttatcaggagtgccccaggtgatcaggagttggcctcgactcagtcctttttgtgctgtctcctcctctttcccagagttcctctctctcttctcccactaggcagggatgagcaagaggaatggctcacccttgagagctggggtccatagcccaggtcagttctccagctctcccacttaccagccaagacaggaggtgaggattgagatgggatgaacccagcaggcggccatgggttaaaggtcgccatgaatgtaatgtgcccagcacagtgcctgctaaaaggcaacactcccttcctggtctgaagaccaaacaagcagactgtactcaggaaagccagaagaaccttccagctgtctggaccagaaggtgccagcccaggggctgaagaagacgtaatgcccagagcaaaaagcgcctgcagccccctgaagggctgggtgctctggaatagatgagggggcgaaatggggctggggaccagggacggacagggtgggtccagcacctgcctcgcttccgaagggctgctccaacactgaaaaacacccaaccagcttcctttcagaaagactggaatattccaaaacttctcactggaggctccggaggaggtgggctccagctgaaaaggaaatgtggaggcgtgggcgctcccggcctgcatcctgcacctcttacactttggttttcccacagactcctgaagaataggtcagaagaaagggttaaagccttaaaaggggaacaaccattgcggggctcagggaggaggataatgttctttgggctgccgcaccctgatccccggggtcccgaaccctcccgtccctggccaggcctgccagccacagggtgagggcccccttccgccgcaacctgccactctcacaccaatgcgggaccgccttctcttccttccccaccccccaccccaccctgccgtcctttctcccccaatctccgcctctgattggctgagcccccggctccccgctccccctctcctccatccccggtgaaaactgcgggctccgagctgggtgcagcaaccggaggcggcggcgcgtctggaggaggctgcagcagcggaagaccccagtccaggtgggaactggagccggtgggacctggggctcggggaccgccgtcaggcgcccatgcaagacttcccaacactaggcttcgggccacggtccgagggcgcccagggaagaagggcgcagagcttagggaggggcctgctttccaggcaggggcgggagggggatgcttctgcagggcaggggccgcgtggcaccctgatgtctttcggggaaggcgctcccgggctttcgcccgctgggggactggtgtctggggctggggcgctggagaacagggaggaagggcaccaaggacagcctgtgggtctacattccacccagacgtccccaaacccagctcgcagaggcggggaggaggacggatgaaactgcggggagaggatggaggatggcgagctagagggaatctgccgggtgacctcgcggcgggctgggtgcggggcaccggaggagaaggaagccgcagtgccgcaggcggggactgggtggaaggcgggcggacgggggaggggagagctggaaaaggatgagagagggggaagggggactcatttgggaaaggagaggattggaatacggaaatggattaaggatgaggcccgccgggggcttgagagggaggaagagcagaccttctctgggtctggagccgcctgaggacacagaccagaggaaatgaatacagactgcacctccccagccgctctccacccctcccctggctcttctaccctctccagccccagacccatttcttccctttcttgctctggccattgctcccccttcccctcctagatcccaagcccgcacaacatctcaaacaagagtcctcgattcaaaagccagatgccgaccccccttcctcctggatctggctcagggcagcagctccaccccgggacagagagagcattgattgtagctgcagccgccgcgggatcctagcctcacccgtcaaggggctgagcgccagggaccctgaactcgtctagtggtgcgccctgcgcacccgggcgcactcaaccgaggcaatgccctgcgcgctctcgcgggtgcacgccccttctgtggcctctcctgggcgagcactgctctgcagataggctagactaccggctccgcgtcgcctcgccaagggttggttcagccaaggctgcaaaaaacaaaaaaagaccaggcagacagcctatccagggtggctattgaaactgggctggaaaactgcagtcccaggaactccagagagctggacattgggaagcatccttggctcacatacaatcggagatcactatgtctttctctcctccaggaacacgattagcttgtgtcctatccagataggaatagatgctccctatctgggagcatccttagctatggtgaatggtatctagccatccactggggatggcgagtgacttagggatttgtgtctcacgtatatgaagcagtcatcgccagatgttggttgtttttcttaacccccatcataacccggtgggtatgtaagattcagagagattcattcattcattcacaataaat

SEQ ID NO: 600 - DNA, 6000 bp, Homo sapiens
ggacatagatgtcacctcttttttttttttttttttgagacggagtctcgctctgtcgcccaggctggagtgcagtggctgccatctcggctcactgcaacctctgcctcccaggttcacgccattctcctgcctcagcctcccgagtagctgggactacaggcacccgccatcacgcccggctaattttttatatttgtagtagagacggggtttcactgtattaaccaggatggtctcgatctcctgacctcatgatccgcccacctcagcctcctaaagtactcagattacaggcatgagccaccgcgcccggcctagatgtcacctcttgatgaaggaatgtcaaagaatttgtgtccacattttagaatcaccacggtagccttatctgggtggctcatttctcttctgtatggcatcacttggaattacacatgcttttgtggtcccatgacaggtcacatgcctgtgtggtcccatggcaggtcacaggcctgtgtggtcccatggcaggtcaactgggggctggcagatcccaaatggtgattgatgtaaactgagatagttcagactccctcaagtggcaactgaactccaaaaaagcaagctccaacgtacaaacatttcacaagcttctgctttcatcacatttgctgatggcccattggccaaagcaaggcacgtggccaagcccagaatcagcacggaagggattacacaaaagcatggacaccgggcgggggggggcatgactcactggaggccattgatgtgacagtctaccatacctgggcaactcccatttatctttaaaagctcagttcatgcctggcctccaagaagccctctctgacagattgggtcatcacctgtccctcctctggactcccacagtaccctttacacgtctctacctctgtgtctaccctcttttttctaattatctatgtatcatttctgtttcccccattggaacaagcctttgagatggtgttctactaatctttgtatacctagcgtctagccccgtgccttggaacattattggtaccaataatgtcttaattatttggtcaattaaaccatccatgaataaagtttttaaaataactatcaaagattaaagtgtctccattggtgccttctctcaacttctgccctgcattccaagaaataatgtttagtttgtatttgtcacattctccaaccaaatatgcagttcttcagggagctgaccttgctcaggaagttgacctcgactagaggttaggagaggtagcggagtgtagagcagcagttccaagatattttaatttcatagacttagtcacatttccaaagaagtgtgagggttaacaggaagttaccaattttcttttttttatatataaagtaggacattaaaaaccacacatacacacatatcaataccaccatctcttcagaaaaatggaaaggtataaccttagaatgaaagtataggaaaggcaggtgtatagtctcaattagtcaaagattagagctcagtattatggctgccttgatatcagggagacctcaaatggcctaattacaagatcccctccctactttgctgatgaggtcccccagccaaaccaccctccttattgtgggggccaggcacaatttctgcttaaccctgagtactgggcttcagcaccctgccagcccacagaattatgcaaacagccaatcacattctcttacaggaaacgggggcattccaccgttttgacattacaaagcctgcctcccacagctcctggtaatacctgtttctgagtgcaactcccatgaagcagttcatggcgtgcagtgttatcctcccaggtatgagcatatgtgactaataaactgctattgctctcattcgtccagtgttgaggtcatgtgatccccctaactttaggggatgggaatctctccctcatcaacagggtgaagaacataaaatcaaaacaaggtgataacctgacagctatgttcagagtaccccggactgtcctcgttttacttatttcaccgtgaaccagggaaatgagtctagcagagatctgagggtccgccctgggagcactggagagcacagtgggaacatggagtcaggagacttaagatctaatagtccagaccatgcttcaaaatatttgtctgaccttgacaaatcattacctttctcgggcctcaagtcccagctataaaatagtggggcaagccaggtgcagtggctcccacctgtaatcccagcattttgagaggccaggcgggaggattacttgagcccaggagttcaagatcagcctgggcaacatggtgagatcccatctctacaaaaaaaaaaaaaaaaaattaattagctgggcatagtgtcaagtgcctattgtcccagctactcaggaggctgaggtaggaggatcacttgagcccaggaggtcaaagcttcagtgagtggtgattgcaccactgcactctagcctaggcaacagagtgagaccctggctcaaaaataaaataaaataaaatttaaaagatgggaccactgtagtcacctctgtgattctagaaagacaatctgatgaaatgagggaatggctggcagtccctaggtcatgctaaaggactgtgtgtttttagaagagtttttatccccatatgtttctgggtgggaaaacaggagatggtgggaaaagagagatctaagagaccaacagggcagccgcagtcttctggcaggaagtcttgccttagctggattcctctaaagccttgctggtttcagcactccgatcctatccacagtaaatggagttttaaaatctcctccctccaccaccttgtgctctatcccctgacctcagatgtctaatcagagccattaattccatccaatcagagatcttgcttggcagacacagaattgccacaccttctacagtctatactcccctcccctgcctaaaagcaaggtgcttggggacccagaaattaggccaggtcctcataaccttatcaaaatagcactgctaggccttccacccagcaacactcagagacagggccaaagagtgggaaacggagcatccagggcctcagccagcagagcccagatgccttctgcagttaagatccctggactcagaatcagaaagctgttaagcaggaaggagtgcgctgccatgaagaggcagacagaagccagagccagtgtgtctggaatgcatcaggtagatgaatgggaagatggctgggatggagttggagggaggagggaagtcagcagccaggggccaggacattcatggccttaaaaagtatcctacaaacaagaagccaggttagctcacctatgaagagggacagtcttaccagatcatgtgttagagtccccagatcctggggagcgtgagaaaagtgcagactcagctggctctagtactagattaaggaggtcctaggtgggcaaggccagctgcatttttcataaaatgccctagaaacctctgcagtttaccaaagtgaatagctcctttggacttaaccatctgcaaggctcattccagttagagtgttccatcaccctaaatgctgggaaaccaagcgaatctcctcccacttgcaagcttccaacagtggcttccaacagtgccactgcagtatcagaaactgcagggaaggtgccagggctgacttccatgaagaaataggagaacaggcaggcagacattggggaggcccacagaatgtcgtgatcagaattcataaagaggctggcaggatacaaatcaatcaaataaacgttagttcaaaaaaattcactacacctgtgagtgagagaaagtcatcagcactgtctctaaaaatgagcctagggcttctggtgacatccaatcggtgggttatcaggagtgccccaggtgatcaggagttggcctcgactcagtcctttttgtgctgtctcctcctctttcccagagttcctctctctcttctcccactaggcagggatgagcaagaggaatggctcacccttgagagctggggtccatagcccaggtcagttctccagctctcccacttaccagccaagacaggaggtgaggattgagatgggatgaacccagcaggcggccatgggttaaaggtcgccatgaatgtaatgtgcccagcacagtgcctgctaaaaggcaacactcccttcctggtctgaagaccaaacaagcagactgtactcaggaaagccagaagaaccttccagctgtctggaccagaaggtgccagcccaggggctgaagaagacgtaatgcccagagcaaaaagcgcctgcagccccctgaagggctgggtgctctggaatagatgagggggcgaaatggggctggggaccagggacggacagggtgggtccagcacctgcctcgcttccgaagggctgctccaacactgaaaaacacccaaccagcttcctttcagaaagactggaatattccaaaacttctcactggaggctccggaggaggtgggctccagctgaaaaggaaatgtggaggcgtgggcgctcccggcctgcatcctgcacctcttacactttggttttcccacagactcctgaagaataggtcagaagaaagggttaaagccttaaaaggggaacaaccattgcggggctcagggaggaggataatgttctttgggctgccgcaccctgatccccggggtcccgaaccctcccgtccctggccaggcctgccagccacagggtgagggcccccttccgccgcaacctgccactctcacaccaatgcgggaccgccttctcttccttccccaccccccaccccaccctgccgtcctttctcccccaatctccgcctctgattggctgagcccccggctccccgctccccctctcctccatccccggtgaaaactgcgggctccgagctgggtgcagcaaccggaggcggcggcgcgtctggaggaggctgcagcagcggaagaccccagtccaggtgggaactggagccggtgggacctggggctcggggaccgccgtcaggcgcccatgcaagacttcccaacactaggcttcgggccacggtccgagggcgcccagggaagaagggcgcagagcttagggaggggcctgctttccaggcaggggcgggagggggatgcttctgcagggcaggggccgcgtggcaccctgatgtctttcggggaaggcgctcccgggctttcgcccgctgggggactggtgtctggggctggggcgctggagaacagggaggaagggcaccaaggacagcctgtgggtctacattccacccagacgtccccaaacccagctcgcagaggcggggaggaggacggatgaaactgcggggagaggatggaggatggcgagctagagggaatctgccgggtgacctcgcggcgggctgggtgcggggcaccggaggagaaggaagccgcagtgccgcaggcggggactgggtggaaggcgggcggacgggggaggggagagctggaaaaggatgagagagggggaagggggactcatttgggaaaggagaggattggaatacggaaatggattaaggatgaggcccgccgggggcttgagagggaggaagagcagaccttctctgggtctggagccgcctgaggacacagaccagaggaaatgaatacagactgcacctccccagccgctctccacccctcccctggctcttctaccctctccagccccagacccatttcttccctttcttgctctggccattgctcccccttcccctcctagatcccaagcccgcacaacatctcaaacaagagtcctcgattcaaaagccagatgccgaccccccttcctcctggatctggctcagggcagcagctccaccccgggacagagagagcattgattgtagctgcagccgccgcgggatcctagcctcacccgtcaaggggctg

SEQ ID NO: 601 - DNA, 6000 bp, Homo sapiens
gccacacacataattaatttcaaaaagactccatttcagctataggacaatgcgttttttttttttttttaggcagggccttgctctgttgcccatgttgcccaggctggggtgcctcactgaagcctcaacctctcaggctcaagagatcctcccacctcagtctcccaagtatctgggaccacaggcacgtgacaccacacccagctagttttttattttttgtagagatgaggtctcattatgttgcccaggctgatctcaaactcctgggttcaagtgattttcctgccttggcctctcaaagtgctgagattacaggcatgagccactgtgcctggcaaggacaatgtccttaacattcttagaaacccttctgtcttgtcaagaaggtctaatgaacaccatttaaatctcctggggtcttaacgaaggttgtaaaatcgtacccttgatttaatctctacctttaggccagttctagttttgagagcccattgcctgatactgaaactggcaatgagatctggttttcttttccacctaacaaactgagcaggtccttttgtagctcagctctcttgtaatactttatcatgccaactagaagcacccaaatgacacttggagcattctgtctccaggtccctttagccaaatctacaaattcattaagcacttcttctgttgtctaagttgccacgagaaattttgtttttgccagttgtttcaccactacctgagtcacccttgttccagccaccaaagagtccctccttacttgaaattgcctggagccaggcatggtggctgcaggtggatagccagatgttttccatgttggctccaagagtgagtgttctggcaaaaaggatagaagctatgtggccttctaaggcctcagtgcagaagtctcttagcatcacatctgtcctactctattagctgaagcagtcacaagcccactgagatttaagacaaggggacatagatgtcacctcttttttttttttttttttgagacggagtctcgctctgtcgcccaggctggagtgcagtggctgccatctcggctcactgcaacctctgcctcccaggttcacgccattctcctgcctcagcctcccgagtagctgggactacaggcacccgccatcacgcccggctaattttttatatttgtagtagagacggggtttcactgtattaaccaggatggtctcgatctcctgacctcatgatccgcccacctcagcctcctaaagtactcagattacaggcatgagccaccgcgcccggcctagatgtcacctcttgatgaaggaatgtcaaagaatttgtgtccacattttagaatcaccacggtagccttatctgggtggctcatttctcttctgtatggcatcacttggaattacacatgcttttgtggtcccatgacaggtcacatgcctgtgtggtcccatggcaggtcacaggcctgtgtggtcccatggcaggtcaactgggggctggcagatcccaaatggtgattgatgtaaactgagatagttcagactccctcaagtggcaactgaactccaaaaaagcaagctccaacgtacaaacatttcacaagcttctgctttcatcacatttgctgatggcccattggccaaagcaaggcacgtggccaagcccagaatcagcacggaagggattacacaaaagcatggacaccgggcgggggggggcatgactcactggaggccattgatgtgacagtctaccatacctgggcaactcccatttatctttaaaagctcagttcatgcctggcctccaagaagccctctctgacagattgggtcatcacctgtccctcctctggactcccacagtaccctttacacgtctctacctctgtgtctaccctcttttttctaattatctatgtatcatttctgtttcccccattggaacaagcctttgagatggtgttctactaatctttgtatacctagcgtctagccccgtgccttggaacattattggtaccaataatgtcttaattatttggtcaattaaaccatccatgaataaagtttttaaaataactatcaaagattaaagtgtctccattggtgccttctctcaacttctgccctgcattccaagaaataatgtttagtttgtatttgtcacattctccaaccaaatatgcagttcttcagggagctgaccttgctcaggaagttgacctcgactagaggttaggagaggtagcggagtgtagagcagcagttccaagatattttaatttcatagacttagtcacatttccaaagaagtgtgagggttaacaggaagttaccaattttcttttttttatatataaagtaggacattaaaaaccacacatacacacatatcaataccaccatctcttcagaaaaatggaaaggtataaccttagaatgaaagtataggaaaggcaggtgtatagtctcaattagtcaaagattagagctcagtattatggctgccttgatatcagggagacctcaaatggcctaattacaagatcccctccctactttgctgatgaggtcccccagccaaaccaccctccttattgtgggggccaggcacaatttctgcttaaccctgagtactgggcttcagcaccctgccagcccacagaattatgcaaacagccaatcacattctcttacaggaaacgggggcattccaccgttttgacattacaaagcctgcctcccacagctcctggtaatacctgtttctgagtgcaactcccatgaagcagttcatggcgtgcagtgttatcctcccaggtatgagcatatgtgactaataaactgctattgctctcattcgtccagtgttgaggtcatgtgatccccctaactttaggggatgggaatctctccctcatcaacagggtgaagaacataaaatcaaaacaaggtgataacctgacagctatgttcagagtaccccggactgtcctcgttttacttatttcaccgtgaaccagggaaatgagtctagcagagatctgagggtccgccctgggagcactggagagcacagtgggaacatggagtcaggagacttaagatctaatagtccagaccatgcttcaaaatatttgtctgaccttgacaaatcattacctttctcgggcctcaagtcccagctataaaatagtggggcaagccaggtgcagtggctcccacctgtaatcccagcattttgagaggccaggcgggaggattacttgagcccaggagttcaagatcagcctgggcaacatggtgagatcccatctctacaaaaaaaaaaaaaaaaaattaattagctgggcatagtgtcaagtgcctattgtcccagctactcaggaggctgaggtaggaggatcacttgagcccaggaggtcaaagcttcagtgagtggtgattgcaccactgcactctagcctaggcaacagagtgagaccctggctcaaaaataaaataaaataaaatttaaaagatgggaccactgtagtcacctctgtgattctagaaagacaatctgatgaaatgagggaatggctggcagtccctaggtcatgctaaaggactgtgtgtttttagaagagtttttatccccatatgtttctgggtgggaaaacaggagatggtgggaaaagagagatctaagagaccaacagggcagccgcagtcttctggcaggaagtcttgccttagctggattcctctaaagccttgctggtttcagcactccgatcctatccacagtaaatggagttttaaaatctcctccctccaccaccttgtgctctatcccctgacctcagatgtctaatcagagccattaattccatccaatcagagatcttgcttggcagacacagaattgccacaccttctacagtctatactcccctcccctgcctaaaagcaaggtgcttggggacccagaaattaggccaggtcctcataaccttatcaaaatagcactgctaggccttccacccagcaacactcagagacagggccaaagagtgggaaacggagcatccagggcctcagccagcagagcccagatgccttctgcagttaagatccctggactcagaatcagaaagctgttaagcaggaaggagtgcgctgccatgaagaggcagacagaagccagagccagtgtgtctggaatgcatcaggtagatgaatgggaagatggctgggatggagttggagggaggagggaagtcagcagccaggggccaggacattcatggccttaaaaagtatcctacaaacaagaagccaggttagctcacctatgaagagggacagtcttaccagatcatgtgttagagtccccagatcctggggagcgtgagaaaagtgcagactcagctggctctagtactagattaaggaggtcctaggtgggcaaggccagctgcatttttcataaaatgccctagaaacctctgcagtttaccaaagtgaatagctcctttggacttaaccatctgcaaggctcattccagttagagtgttccatcaccctaaatgctgggaaaccaagcgaatctcctcccacttgcaagcttccaacagtggcttccaacagtgccactgcagtatcagaaactgcagggaaggtgccagggctgacttccatgaagaaataggagaacaggcaggcagacattggggaggcccacagaatgtcgtgatcagaattcataaagaggctggcaggatacaaatcaatcaaataaacgttagttcaaaaaaattcactacacctgtgagtgagagaaagtcatcagcactgtctctaaaaatgagcctagggcttctggtgacatccaatcggtgggttatcaggagtgccccaggtgatcaggagttggcctcgactcagtcctttttgtgctgtctcctcctctttcccagagttcctctctctcttctcccactaggcagggatgagcaagaggaatggctcacccttgagagctggggtccatagcccaggtcagttctccagctctcccacttaccagccaagacaggaggtgaggattgagatgggatgaacccagcaggcggccatgggttaaaggtcgccatgaatgtaatgtgcccagcacagtgcctgctaaaaggcaacactcccttcctggtctgaagaccaaacaagcagactgtactcaggaaagccagaagaaccttccagctgtctggaccagaaggtgccagcccaggggctgaagaagacgtaatgcccagagcaaaaagcgcctgcagccccctgaagggctgggtgctctggaatagatgagggggcgaaatggggctggggaccagggacggacagggtgggtccagcacctgcctcgcttccgaagggctgctccaacactgaaaaacacccaaccagcttcctttcagaaagactggaatattccaaaacttctcactggaggctccggaggaggtgggctccagctgaaaaggaaatgtggaggcgtgggcgctcccggcctgcatcctgcacctcttacactttggttttcccacagactcctgaagaataggtcagaagaaagggttaaagccttaaaaggggaacaaccattgcggggctcagggaggaggataatgttctttgggctgccgcaccctgatccccggggtcccgaaccctcccgtccctggccaggcctgccagccacagggtgagggcccccttccgccgcaacctgccactctcacaccaatgcgggaccgccttctcttccttccccaccccccaccccaccctgccgtcctttctcccccaatctccgcctctgattggctgagcccccggctccccgctccccctctcctccatccccggtgaaaactgcgggctccgagctgggtgcagcaaccggaggcggcggcgcgtctggaggaggctgcagcagcg

SEQ ID NO: 602 - DNA, 6000 bp, Homo sapiens
gaccagcctaggcaacactgagaccttgtctcaaaaaataaataagtaaataaataaataaataaaagaattaaaaataaaactaggcagaaatcccatgagccatactttgccaattttaagtattgcatttaaatattatttatcttgattgctgggctgctcccttcctgctagccctgacttgtccccctagtcctcatctctcagattggaggccactccagatttccttggtaccagccacaggccaggaacctgaagggagttatggggaaggatcagctgcaaggatctcagggcatcgcactgcctaaaggcaccttctgctccgcttgtctgttccctgctggtgcaggatattatgagagttccagaaggaagcagggcataaactgcctggggctgagcagacgcacctgtggtctctatcaccccctggagttctgacctctaagtgaaaagaaaaggaggcagaggtggagaccagacccaacagctccttccaaacaatggttctgcctgtctccttgggctccccaatttcccaggaagcctttcctgcgtgggggggcaactaccctcaggtctctgctctgtggttaactattttcctccattcatccatcatttagtcacttatttaataatcattggtccctactacgtgccgagcatttgctagattctaaagatacggagaaaaccccactactgtcagagcaaacaataagaccaatgtacacaaataattacagtaatgttctgtatataaagtgcaaaaagaaaacctgtgtgtgcacaggtttagctggggcatggaaaaggatatgattacttgtctctggaagcctcagaacaagggggtctgatttctccaaagagacaaggtgtcaatggatcttcccagcagagagaagcgcacgcacaagaacctggatggagaaggagcaatggaaacagaagtgagagaactgattgaaagagaggcattgttatagctgggtagcaggcaatcgacatgagctcatctgagcgtaggaataatcgtgctaccatttctatgaggttgttgagaatattaaatgagttatctaacccttagcacagtacgtagcacaaggtaatcacaatgttaaccactactactcattaaagcattgcatgagaataaaagtttagtcacatagatggatttttgcacgtggagaaaggttgatttaatcaacacttaaacacctactacatctgcagacactctatggttaactttcagaaattcaatgatcagtcctgagtttaaactaagccttcttggaatttaaagctaaactgtttctctcttaagctctagctcttgcaaatcaaaatcgctttgcccatagactattgtatctgcatctgcctcgagttaaaaaaaaaatccattcagcaactcaattgacttctttgttctaggctgtagccgccctccccagaggcatcgatgtcattgactcagtgggtgcagggctaccaggcaataggaacacggaggtttactatttcaaaaacattatccagcctcttatgaaactggcaagatttagggatgaagcttaggtaatggggatgagggaaggcttagatccaagaggtttaatttacagaagggtttgtttttggggggtctttcttattcctcccaggagggaataaatatcctgctaaactgttccacttgatggaaaataggatgccatatatttactgagcacctgctatgtgccaggctctattctcaaaggggttcctcaaaaagattggggcaattctgcttctatagattccacctgaggcatctatctcatgggggcaggggtagaattgtcccagctcttggaaggttagagaaaagttattgtgtagcttggaatttagaaaacagagtttctacttcttccaggattcctagcactcagaatctgccctttggaaaactgattctgctatttgtattttctatttctattttctagcttttaacagatacagttatatttgaaaataccagcctgtctttggcagcgctaaaagaactaaagaaaggatttaatttcagcatgagctgaagttaaaagggaaaaactgtcccttacctctggggaggctggtccccaagggatgtgagacccttgagacagagaagtcttggctactggggaggccttgagagatggagaaagtaggttgggtttctggcttccctggtttctgaaaaaaaaaaaaagttcaggaaatgtcaccccaaaatattcagctcttcagctctggtatgctgattacctcaaactgagagcacttggggtacagtaaatgaggtcaggggctctctctctctctctgaactccctgtaactgcctaaagacaggtcctccaaaaagaagccaattgtcgtgagtccctccccaggaatccatcaaccagagaagactggctcctatcacaggagagagaggaaactgggggtctagggggcacccacccaggcagacttagactgtcgcttattctcttaagggcccattcatttttccaaaccttgtatactctcccctaacttgcctgcatcccccttctccctcctctatgaagaatgcatctcagcttctagatctcgctgggtttggggtatgcagttttcctccatgtgacgctcctgtacacacaaaaaacacatctatcttttctcctgttaatctgcctgctgtcagtttatttcatagactcaattatggaagtctcagagggagagggaggggtttccctccctgatacgggctcctgcgtggatcagctgttgttcccttccttccttggggtatctatccccaagagccccaacaccttgcccttgcaatgtctcccttgtcacttgagccagtctgggaagctttctttctatttcttgcaagtcaccatcccagtgtgtttcttttttatttttattttttaaattactttattttggagtgggggacacggtcttgctctcttgcccaggctggagtgcagtggtaccatcacagctcactgcagcctggttctcctgagctcaagcgatcctccctcttcagcctcctgagtggctgagactacaagtgcacaccaccacccctcgctaagttttgtttttttgttttttgttttttgtttgtggtagagatgcggggtctcactatgttgcacaggctggtctcaaacttctggcctcaggcaatcctcctgactggctggaagctccagatgctctgggtcttcctcaccacagacctcttcttctacttactgtgtccccagcactggagataaaaataaataaataaagatcctgcccccgccgcctgaggagcccctggctgatgaggtaaatgggctgggctgggcgagcctttcaggggatgccagcaagagccccaattctggaattgcctcctccaaggcactgaactaggccccgttaaaattaactccaccaattaaaggcatcgttaggagacaatgctgcctgtcttcttctttatttttaattacagagcctagcctaaagttgtcaaaccatttataaattagagcagagttcctaagcagaaggccaaggaacagggaaggggaagaagggatggagacaggggttcttggtctgcctccccaggcctctctggcctggtccgggctcatctacctctggacagttgtgacaggccactgccccactaatggatgggctgtctagggaagcactcgctgtccctccctcacctctccgcgcacaccccgattatagtcattagggaatcaccctgagcgacgggaagacaagcgggtggtacgtcggcagcccgggaggccagaggtggctggggggtgccgcaggactggctcaggctggagagcagagcctggagaaagcgcagaggctgagctcctctcctgccctctccctgtggggaggcatcctttgctccagtcaaacagcccatggctggcacagcaagaacagtgggagggtgacagtgagaggctctagacaaaatggatgcctctcagtccggcctccaggcccccgccagcttcagggcactctgtaaccacggccagctcctgcacatcttcccataggatggttggaaagaaggcttgagagggaagaggctaaagaaaattcttgtccctaccgggcagaggtcagacatgcagcagcctctaaacttggtgggagagagcagggcccaggctcctgggctcccacctccagcctctgctcccacccagagggatagggctctgcctctcctggtccagggcgtagaccagggagtggcccagcccccagtgtctccctgggccacaggtggggagcacagggaggtcaagcaagcggtgaactgcccagcaccattgcctcctcttaccacatgccacctctttctagccaggaccagcttctaaagcttcccccatccctgccttcccatttccaaggtgggactaaattgctgttccattccaccccaggctgcagtggccagtgacaatgctaaatgcatcctgagccctgtgcccgatggtcaagaaactccccacccttttgtgttctaggaaaaggctcactgccaagaagcccccttccccaagattccttccttaggtgtgagaaggccaggcacagacactcctaagtcccatcctttgtctcataactgatgagccaaaccagcagccaatctagacaaaatgccgccagcttgacccgaccacacttgagtcaggcatctctgccctgaactttgccccaccctcagcctgagccagcataggaactcaggacacccttctcaacgccccctctcaggatgcaggggcaaacattcctgcatcaactgccagccaggccacctgctggccccactccccgcacctggctccttttagccttatttattaaaaataatagaccaagaagcagcttctccgctccttctggaatctccacctggttcagcccacctgcctccactcctgcctccaccatgtccatcagggtgactcagaagtcctacaaggtgtccacctctgaaccccgggccttcagcagccacttctacaccagtgggcccagtgcccgcatcagctcctcgagcttctcctgagtgggcagcagcagcttccggggtggcctgggcagaggctatggtggggccagcggcataggaggcatcaccactgtcacggtcaaccagagcctgctgagcccccttaacctggaggtggaccccaatatccaggctgtgcgcacccaggagaaggagcagatcaagaccctcaacaacaagtttgcctccttcacagacaagatacggttcctagagcagcagaacaagatgctggagaccaagtggagcctcctgcagcagcagaagatggctcagagcaacatggacaacatgttcgggagctacatcaacaaccttacgcagcagctggagactctgggccaggagaagctgaagctggaggtggagcttggcaacatgcaggggctggtggaggacttcaagaacaagtatgaggatgagatccataagcttacagagatggagaatgaatttgtcctcatcaagaaggaggtggacgaagcttacatgaacaaggtagagctggggtctcgcctggaaggactgactgatgagatcaacttcctcaggcagctgtatgaagaggagatccgggagctgcagtgccagatctcagacacatctgcggtgctgtccatggacaacagccctccctggacatggacagcatcatcgctgaggtcaaggtgcagtacgaggagatcaccaaccacagccaggctgaggctgagagcatgtaccagatcaagtatgaggaactgcagacgctggttgggaagcacgggaatgacctgcggcgcacaaagactgagatctccgaga

SEQ ID NO: 603 - DNA, 6000 bp, Homo sapiens
agcactttaggaggacaaggcggtcagatcacttgaggtcaggagtttcaaacaagatgtttgtttaccttggaaatgcccttcgtaagccaaacagctcatgaaagctgtctatcaggcactgcagaatttagcagctcctcacatacatagttagaatcagtcctagggagaaagcggctccctgcttatgagtatctcctccttgtatccccaggtggcaagattttattttatcatggaactctttggggcatcattatttcagttagcataggggtagcttcagttaacatttcatagcaaggcagtaaatgcacctcaagtggaaattctctagtccggtagttgtcattgggaagtacttataagagttttttgttttgttttgttttttgccattatccccaataaacactccacaaagggctatgaaggggatgatttgtcccaactagtactctagcttctacctgatactttgtgggctcaggtgattttactatttcccattaacatgtccaactaacacttttcaaaagagcagctttacatgtctttggttttatagtactagataggggaagcatcctccagctagatacaatacccattttcataagacatttaggcaaagagattacaactacgttacataaaccctgtttaaacatcttaaatttcataattctattaacctgtacattttttggttctacccccagatgattttacctttcctggcaaaaaaaagggcttgagttcccagcagggagttgcatctgtaagacccatgaggaatggcagtttttttttgttttttttttttttgagacagagtctcgctctagtgcccaggctggagtgcagtggcacaatctcagctcactgcaacctccacctcccaggttcaagtgattctcctgcatcagcctcctgagtagctgggactacaggtgtgcacaaccacaccaggctaatttttgtatttttagaagagacagggtttcaccatgttgttcaggctggtctcaaacttctgacctcaggtgatccacccgcctctgcctcccaaagtactgggattacaggcatgagccaccatactggccaacactttcattattttctttctctctctctttttttcttttagcaaccacaggcaaaacaaagaggagcactactttaataatgacaatacacaacctaaatttaaatgagaagacttttgtgatccataatggaacacaaatatggtagaggaaagggtgtggaatcgggcgttagacaaacctggttggagtttttttttcttaataggaaggcatggaatttttttttaaatcagctacaacagctactcaggaggctgaggcaagaggattgcttaggcccaggaggtcaaggcttcagtgagccatgatcatgccactgtactccagcctgagtgtcagagtgagactctatctcaaaaacaaaaaaaaatagtgataatttttcattacaacacttaaattgttgttgaaataataaatataaaaggcttggtatagtagatgcttaataaatcatagtatctctctctcctagaagattccaaggctggaagctaggagatctggcccctaatgatgcaggatttttcttggcccctttgacaaactcatggaagggggcgccttgtctaccaggcccaccacaatcaaccacttgcaggagggagcacatgagcaagcaagttcaagatccagccagccactctgggcactggcacaggagcaagctctgtgtggggcctgtggccagaccaggcatgttgcctcaagaggaacactgcagtgcccaggtgaaagtgcccatgaccctgaagcctcagagcgggtgttacagtgctcctttagtttcatcatccacaaacagcagtgtgttagtagctcagttggccctttgccttgtcacgtggggcagctgccttccactggtgggggcaaaggaccagtgtgacagcctttctgggtacctgtacttggtgggtcccaagctcttgtccagtgtccaagaagaatgaggtcacatgcaggattgaaggatggcgggccaggtgcggtggctcacgccagtaatctcaacactttgagagcctgaggtgggtggatcacctgaggtcaggagtttgagatcagcctggccaacatggtgaaaccccatctctactaaaaatacaaaaacttagctgggcgtggtggcaggtgcctataatcccagctacttaggaggctgaggcaggagaattgcttgaacccaggaggcataggttgcagtgagctgagattgcaccattgcactccagcctgggtgacagagcaagactctgtctcaaaaaaaaaaacaaagaaaaaaacaaagaaggatgttgagggcagagaattttttttagtgatgaaaacgagtctcagcagtgaggggagctggagaagggacaggaagggcaggtcgtcttcctcaaagtcaggcggtctcccactctactgactaagtcaggggtccttataggcacaggatggggagtatgtgcagattggtttgtggctatgcaagaaaggttaaagcaaaggcaccactcaaaggtgggcacaacagtgtagaaaaccaatcaggaaagggtaggtatatgtaaaataggtgaagggtggggatcaatcagaggaaaacatgcaagacaggaagacaagttctcaatctggtctgaggacttaacttgtagcttggctttcgagctttaaactgtttttggcttggaggtggggtttcaatggggacccgccactaactgcctaggcatttggctgtctcctgtcgctatcactagatctagtattgttatcatttcactaaatcatatatccatacagttaaaaaacaccttcatatatataccatttatttcagcagcctgtgttaaagaaactaaggtttgggccaggcgtgctggctcacacctgtaatcccagcactttgggaggccaaggcgggtggatcacgaggtcagaagatcgagaccatcctggctaacatggtgaaaccccgtctctactaaaaatacaaaaaattagccgggcgtggtggcgggcacctgtagtcccagctacttgggaggctgagacaggagaatggtgtgaacccgggaggtggagcttgcagtgagccaagatagagagacactgtctcaaaaaaaaaaaaaaaaaaaaaaagaaactaaggttcacagcttaactggaggtcatgtcttctcaaagtgctctgccacaaacttcctcatttgtgaaatttggaaaataatatcctctacttgtccacaaatagcatctaatcatacataagcatgtgagagctctttaaaaatgcaaggtattaattattattggtttttattttaaatgtggttatacatgttgagatttaaaagatttcctcccggccaggcgcagtggctcacgcctgtaatcccagcactttgggaggctgtaggtgggcggaccacgaggtcaggagatcgagaccatcctggctaacacggtgaaaccccgtctctactaaaaatacaaaaaaattagccatgcttggtggcaggtgcctgtagtcccagctactcaggaggctgaggcaggagaatggcgtgaacccagggggcggagcttgcagtgagccgagatcgcaccactgcactccagcctgggagacaaagacagactcagtctcaaaaaaaaaaaaaaaaaaagatttcctcccatgaagtaagccagaataaactcatacctactaaattctttctaaaatcttttctaaattgacactcttgagaaagaatagagcttggaggaagagctattattataattaatagcacaataatcagtttgtcattaaaccacttaggtctctttgtaacaagatttctaagctttagtagatggattccttattctattctattttatattgttttgttttgttttattttattttatttttcgagacagtctagctgtgtcacccaggctgaagtgcagtagtgcgatctcggctcaccgcaacctctgcctcctgaattgaagtgattctcattccttagccgaccaagtagctgggaccacaggtgtgtgccaccatgcccagctaattttttgtatttttagtagagacgggatttcaccatcttggccagggtggcctcaagtgatctgcccgcctcagcttcccaaagtgctgaggttacacgcatgagccaccgtgcccagccacttattttatttcattttttaaatttattattattattattattttgagactgagtcttgctcagtcgcccaggcaggagtgcagtggtgtgatctcggctcactgcaaccttcatcccctgagttcaagtaattctcctgcctcagcctcctgagtagctgggaccacaggcaggtaccaccacacctggctaatttttgttattttagtagagatggggtttcgctatgttggccaggctggtcttgaactcctgacctcgtgatctgcctgccttggcctcccaaaatgctgggattaaaggcatcctgttactaatttcacaggattttagaaacgcaagcagcgttgtggagtcaatgggggagggcaaagaacaggaggagagatctgtgagaacgggatcggcgaggaggcgacggggaggaggcgacgcggaggggtgaggggtcctctccgccgccaggcggagttgggagccggacgatcccgcacgcagcgcgaggcgggaccccggactgactacatttcccagtctccgtcgctccgcgcggcccaccccttcggctctgggccccgcctcgtggtgccggctggttcttcgcgctcgcccgacttcccagcggccccgtgcggcccgggcatgcccagtgcgggcgcagcggccccggccctggaagcgccccggcggagctggcctgcggtgggctaggggcagggccggagccgcggcggcggagctgtgggtaggtgcgggctcagccgagctaggcctcggggccgccgcgccgcccattctgagtggcagggaccgggagggcaggcagggcccgagcgtgggttggtggggctaccggcgaggaccccttatgggaaggggccggagggagcgggacggggccgggcacatccccgggcgaggctgccccaggtgcggcgcagctatctttagctccctgtgtgacccggagcgtgcgtgatccgcacctcgcgtgatccgtacctcgtgcacagttgtgcctagggagaccagttttctgccgaattgcctaggagctgtggggagatgggcctgaatggacccgtggactcagaggcagcccgtggagccccgtgggaagtgaggatgtttaccttccctgtacctggagtgggctacgacagcttcctgtttgccgagacttgggtttagtgacttagaaataaaagtgtgtctcagcagatgcttattagcttctaatgactgttgggaatttaatggcatttgtatttccaggtttgagaggttatttgtccatgggatgctcgtgttaaaacaaaaatcttcattgcaaagcttaagtaaaaacaagtctcgaccgaggtaacgttagaacaccgggttctgaggttcactgtagctgccattcatttgctgtcagtctgggcaagtcatttaacttctgagactgggttctctcacctgttaaatgagccagatgcatcttcatctgtctagctcagctgtaggattccccctgtgtcattcagtctgtgtgtgtgttctcaaattgtggcaggttatttttccccatgcctcagctatttgtcagactgggtaattcaccaaatattcctgtaggaaggatgttaggatctaagtataaaagtgaagtgatttatccttcataggtcactcttaggaggtgtcctgcc

SEQ ID NO: 604 - DNA, 6000 bp, Homo sapiens
tcataatcataaatactacaaagaagctgaaaacagccacatttctcactcttcctggacatcaccctgaacttctggtttctccacaaacatgctccatgaattaccatctccaattcagttactggcaactttattcttccagttattcaggccaaaaaccttattctttattcttctgtttggcccacatcccgcaaacaaccaccaacaaattctataggtctaccctcaaaatacatacaaaatccaacccctcctccccatttcaccttggtcagagataccctcacctggaacaatacagcataagctcctgactactgcccgtacttttatttatttattatttatttgagatagccttccctcactctgtcgcccaggctggagtgcaacgacggaatgacagctcactgcaacctcgaacccctaggttcaagtgatcctcctgcctcagtctcctgagtagctgagactataggcacatactgccatgctaatttttttttttttttttgagacagagtcttgctctgtcacccaggctggagtgcaatagcacgatctccactcactgcaacctccgcctcctgggttcaagagattttcctgccttagccttgcgagtagccaggattccaggcacgcgccaccacccccagctaattgtttgtattttcagtagagacggggtttcaccatgctggccaggctggtctcgaacccctgacctcatgatccgcccgccttggcctcccaaagtgctgggattacaggcgtgagccaccgcacccggcctaatttttttatttttgtagagacatggtctcgctatgttgcccagccatcctcccacctcggcctcccaaagtgctgggagaactgttcactactatgataccagcatctagaatatgtggtacataatatgtatttaatatatacttattaagtaaaaatagtatacacagttaaacttcaaatgatgttagtgaaccagctaattatgtgcccaaactgttctaaatacatgaattaattcatttgaccagcttaagaggttaggtactactgttattatttctattttgcagatgaagaaattaaggtacaggttaaggttaggaaataaacaacattaagcagtttgccctacatcataccatggcaaagccaggatttgaactcaggcactctgaccccagaacccaaactctagtacactgaaagacttggtgagcaacagatttcaattacattccacacacaaaaaataaataagaaaaaaaaacaaattatattccacataatctgtatgctaagtttattttactatatgtctctgaaaactgataatcaatgtactactgattcttaaaccaaaatacttcatttcttgatctttttccattaatgtttctgatgaaatatgtgtaaaatacacatttaacaactctcatacttctaaatgtaaacatagtgtaaaaccgagcagctgttgctatgaaaaccttcactttttttttttttttttttttttttttttgagacggagttttgccgtgactcaggctggagtgcagtggtgcaatctcggctcactgcaagctccacctcccaggttcaagcaattctcctgcctcagcttcctgagtagctggggttacaggtgtgcaccaccacacccagccaatttttatttttattttttgagatggaatctcgctctgtagcccagactggagtgcagtggcatgatctcggctcactgcagcctctgcctcccaggctcaagcaattcttctgcctcagcctcctgagtagctgggattacaggcatgtgccaccacgcccagctaattcttatatttttagtagagacagggtttcaccatgttggccaggctagtctcgaactcctgacctcatgatccgcctgcctcggcctcccaaagtgctgggattacaggcatgagccacggcgcccggccaagaaccttcacttttaagtttgcagtattaatgttgaattaacagactggcatacttatctatgacacaggtaatgaaggaaaaaaaacacctcagtagactcaacaaggatatcacaagtaatgactagcaagcaacattttttgaaaaataaaatgtaggcataatttcaggcacaagaaatgctaaacgaaatagcttacttttaccttaagactttccccaaattatgtgatttcattcctacaaggacaagaatcacagcttactaccagccatgcaaatgtcattttaggagtacacacaagttttacccagtatcttagttcacatttgtcccaattaattaagtctatgtataatttaaaagcgaaaactagatatgtcaattttgttttccttctaactaatccaaagtcaaaactgttcactttaccaaatgaattaactgaatacagttaattaaatcttttatttataattaaaaattggaacacacactttctcacttaatacctattatgtcctgtttcccatacctctctataaagtagaagtatttgctggaagacaataatctgctcattaagtaggcacttagaaaaagcaacgatctgcaactactgaaattcttatctgtatatttctcttttgggttacaagaaagcacttctctggctattttcccaaataaactaggcaagccttgggaaagtcactgcttaaatcccactttctgacagcttctcttcctccataaatgaattattgagagccatgtctacttccatccattacataatacatgtccatcatgggacctgttttctgaacaagaaatagcttaaatgacactaactgataagtagggccagagaatactgtaatctaacagggagcaagaatccagaaaagaagattctgatttacagtgctaagttgtgaaagagtgatgtgaagaacattgaacactgcttactctaatatttccatacaaagtgacacacctgcccccaaaatgtttttaaagcacttgactccaagaacatttctcagaaattgaggagcctaccaaaaaaaaagagttccatttcattttaaagtgttttaataaagactgcaagaaacataactgcaaatgagaaataaaatttcaacaatttagcactgaacacaaaatgtctaaaagtcaaggtgtactgagcaagcaacacgctataaaagacggttgtactttaaaacatttaagcatttttcatataattagctccaacagaactattccaattgttcactttatccacccaaagcagtcaaccacaaccacctgcaactattattcagcaatgtgccttccaaagcaaccacctgagtttggggccttctctcaaggggccaggataaagcctgtaaaagggtggtataaagagatcttttaggcattggggggaaaaaaaactggaagacaccaccttgaaggagctaagcgtaatgcgacccaaatggtggctgccggaacgaagttgtctaaaccgaagatctccctcttcttcggtgtaaaactttcagatacatccacgctcacaatttacctgagccaaagtaaggggattctcttccctctccgaccccccacccaccccgccagaagaaaaagaatcgaaccctaaagtagaaacgtgagatctagtgcaataaaataggttctgcaactgcctcaaaggcaacatgcacagctcatcgtccttttgaaatacacttcatcttttatctcaccatttcatcgaaaagaaaagaatcatcttcagcattttacatcactcacctaacccaaagatccaccctgaccgcaccccaacctcatggctccccaatttctccgtctccccactacctcgtccgcggcttcactagtcctaagcctccccccctccgctccccaagtgcccagagccccagtccccactcccccacctcccgccccaggatccccacatctaccgcctcggctcccgcccgatcccggagcccggctgggtggagcccgcgggtgggcgccggtggtctgggtggggcccgcccctccccaccccccgggctgccgaggagggggagggggtcgcgaagcctcacctacagctccgcccctccccgggggcgcgttgccctgcccagcccagcccgggccgtgagcaagaagctgggtaggaaaggcgaaagcctcagcactagcgacaggggggaagctctgggtcccgcgcgacttccgcgctgtcgccgccgccgcggccgtctcaccgtcctcagggctgccgctactgctgctgctgccgcccaggcaccgccgccgccgccactaccgccgccgccgccgccacagcacggcccaggcgcccgcgacgtcaccgcgccccgccccctgcgcgagacacctagccccgcccccagccccgccgcggggcgcagcgcgcctccccgggctcccggctcggctgcctccctttccctcagcctcccgggagcgtgacgcggcggcccgggggcctccgggcgccttccggggcacgcgggtgaggaactgggaagcgggggaaatcggcgccacggcggtcgattagcaccgaaacagagtgatgggcgcggagcgtccctgcacacacacacacactcacacacacacacacacgacccctgcggccacgggaggggagagccggggtcggctccgcgagcgcagggtggcgcttgtctcctcctgcttgccgtaggaagtggacgctggaagcccgaggagccgcttcgtgtcttcccaaacctaagcggcgccccaccccctacttctcgtggcccgttacgcccggggcagccaagcgccgcgggagcagcgccgggatcgaccctggctgctggggggacgctttgtcccaagaaagctggttttttgccccttagcttcgtggaacgcggccgcgaaattagtggtcttctgacctgagactcgcggggctgcgcacacgggcatcgccgaggaccccagcaatggacgtcgtgtctgtggtgatcccgccaggacgcggggagcgtgggcggaaattagtgtccacgttccgaccctgcgctgtgccaaacgctgcttcgggagctgtttatttagcctccgacagctaagcgaatcggcgggcggctggggcctggtgcaacccgattttctcgtgcagactcgcagccggctttggttttgttttttgttttttgttttttttttggagccatgcagagggtagctacagccattaatttaaggatgtagataagctatctctaaaccaagaaagtaagaatggtgtgaattatatttattcccagccttccagtgtttattaaaataattttcggtgtccttgagaggagttaaaagccatcattttactcctgcttacctccgccaccgtaattaaccactttatactgcctcataatcccattaacaaattgcagtcgctcctcagccttcacattcattcactcaccagtttctactgtttcatcctgcccggactcttaactgttccctcccaggatcgacatgcacttggatcattgcagtttctgggcctgctgtcatctcccccttcagtacttcccacatatgactaccaactgttagacgatgtgctgctgccagaccagcctttcatttcttggacatccggctatttacccaggaaaagtcatcctttgactatttttcatgacctttctcatctgactcgtgatctgcccatcttgttactccctagcagtgtggtaaggtaagagaaaattcaactaggagtcaatagatatttctgttctcattctcccactgtctacttgtgtggcctcaggcaattcattctacttgtggtcttacttaactgtaaagtgaggtttgaagtaggtgtctgagatacatcatgtccttaaaatatgtggatctggagaattaagttgctaagcgctatg

SEQ ID NO: 605 - DNA, 6000 bp, Homo sapiens
cagcataaagttaatttatagggtggttaggaattcatgtcatgactggtgaaataggagactttattatgatttctacatccacctgtgtggtaggaatacataccttccctctatcattacgggtaatttcttgaaacgtaattatgaatatgtatgccatgtcacagaataagttgattcaccgttgttcaatgcaattcattatattgttcaatgtaagccctagaacataattagcaataacaacaaaccaataatataccaggcaatctgttaagagttgaaggatatggtggaatttccttttaaatgatgaggtggttctgggtgaaaggcagagaatgaataagacgagattttgaaatccttcaattctgtctttcatgcacattgaggtccacgttgggaagctatataaattctaaatatgtccactacttcattctgctgatttatttctgtatttgtccaaaggggaaaatatacatccataaaattacattaatgaaatgtgtagtggcatacaaataataatacacaggccattccagagccaagcttctttctaaagatagctcattcccccagtggtgtgacagtgtttcctgtgtaaggactagcagatcgggactggcattcacattgtgccaggcactgtgttgaatgttttaaattaattagttcctttggtcctcatattacttctatgagattggtgttgtcttcaccaattgcagatgggttctaagaagttaagaaacctgtacaaaagcacatggctactgagtggagaaggtagaggggaacctgcttttctcaggcaccaaaatctactctggcagtaaattctaggtcgtggtctgtcattatgtttttgtttttgttttttgttattctgagtttcctcagttattaaatgcagagtgggggacataggggctgatagaagtttatctctgatgtctgtattctgtgtagagagatcaatgctagtccttagagcaaagctgtgctttcttaaaatgacagaaatttgggggaagacctggtcttgttaaataaacataaacaagccactcagtttctgtggacaagtgcatgcgaattgaaagaaaagaagaatgtctcacaggtgactccaggtcatctgagaggaattgctatatggcttgacagcctgtagctcttggtgaataatgctgttgccagtatatagaaacgggtgggcagccaggaatctttcaagtgcggaggcacaaaggtagcatgaagccgcctttcctgacccttaagctcccagtccctgtgcaaacaccttttgcattcactttaattgtttgaaaaacgaagacttccagactccatcagctctagcagctgtctgggtggatgggggtggggatggagggggtagggcgagacctccccacagcgccctccagcagcagaagatgcaacttgcaaatacttcaggatcagtgagaagtgtggtgtttattttagtaacctcaaaagagagaaaaagaaaagcagtggaagaggacagacattcaaggctagctacacgatcatggggaaaaaaaacaagcttgtctttgacacggaaagggtccttggaggccattcggtccacttctctcatttcctgggtcaacatgtcacaatgaattaaccacatactgccactgcacaagaccccctccctcaccacacgctgagcccccaccaccagcattcagtccactgagctcaaacatagggagataagtgctgttttcacaagataaaggcaaaattcaatcccacgttgccgttttgtttctgttcagtgttccaaccacagagtggtgctattgcaaaagataagggtaaccagaaggcacgctctggaaatttgctttaggagagagttttaaagggggttttcaaaaacaagatctgattcctgctctcagaaatcacttccaggagtcagggccttactctcagatgcagcagggagaagaagaaagttcagcaacctaaaaatacagtcgacagatgggcagccaaagtcatggccacgaagtcaacttggagaggagcacctacctagtgaatcctaaaagatctcatcctggatgcttccttaaccaggcctatgtacagggcacaagctcgcagccagcttactttccagtcctgatctttgcttttgctatccataccaatggtatttctatagaaaagaaaaatctctatttagaaacacggatttacttagaagtcacaatattctagtttaaaaatggctctacatagtagagaatgatctttttattctgtcttcttaaaaatacacctttctaattctttttttcttcccaccttcttcattcagcaccttgccactcccttggaagccacaacagcgagctggggggtcagtccctagtcttagagggaagaaatctttaggtctgaagtctaaagaaaaacagtaaaggaaaaggcagttggcggtgctcaaggtagactgtctgaaagaggtcttctactcagaaaagggctaaggctctccctttgggaaaccaatccttctgagaaaaagtgcatctttcaccctctgctcctgtctgggtctctccctcttcctccctccttccctcagtccctcctcccctctctccacaaagacacagcacatatttggcaagattaaggtgtcacctctcatattacaaggcctgttgattgcaagcaaagacagacccaccagcttaggacaaaaccccttggagttggaaataagacaaactctgggatccccgaaagtcccggcaaaatgacgcggccagccagtgcaaggcatctgcagaacaaatccaagtcctaaacgcactgcttgctgccttttcttctccttcctttcttctgatttttcaagtttgtttgccccccttcccctcctccctccagactgccagggacctgggagctgcctgcagatcagcccgcacatgtatttaaccccttccctgctgcagcaggagccaaccacctctttccttgcaatcttcaggttcccagaggacctggagcttgagaaaagaactctgccagtggatctgaaactggggcctgaatccctcctttgaccagggcgagaagctggaggaggggggcaagtgcgggaagtgggggagggcagggaggcgggccagatgagagggagaaaagcagaacccgacagagcacgcccaatccaaaccttcatggtgctgtgtggctgggtggagggaacgactcggcagcctcttctggccctgaggaagacgtcgatattttggcacgaggggagccactgaaggactaccctacccttgcgagggaccgcaggaggtgacgcccctgggcctcggtgggcgcttctggcggttttcgatgtggcaacccccatcagccaggataatgatgaggcaggtacaatctatctagtacgcagcccccagactcccccctcccttcccacctccccatccaaccccccagctactctctgcggccggttggtcctgaactggtgggtgcagttccgatgtttaaccaaattctcaagcaatttcaaggtatttggattttttgaacctgggccctaaccgaaacgcggaacggcttgcttattagacacctcgaacgacagggcagggaggaaacgggatactcgctgcccttcccagtcgcgcgtgagtcaaaaggtcctggcaggagatgatgtgaggagcggctgaagtggcagggaggaagggatgaggggcttggagcggaggtccaccacgcaaggactcgggaagcgggcaagtgggcaaaactctgcttccgggctctcgatttctcgttgatcactaagtggtatttttcccccttctctcgatggcaaatgggcgaaatcaagatgacttaacttggtaaatttagagagaacggctcggagcaagtgaggtctaacgggcagctaaaattatctccaaataagagattttgaccccctccccctatcctctcctcgaatgtatccaccggtggggaagtgagcgtcattactttcggggcgccacgaacaggtttgtttgttgctcgcctttcctgcttctcgcgctgtccccgcgtgcagactggtgggtgctgggcgagtgattagctgcagggccccatcctagtttggaaggaaggggtttagaagttggaggatgggtgaaatgggaggctgcgatccatctccctctcccttccacactcaagctcccgcaaacacgcgcgcgcacacacagcccctccctagtccctcggaccacccgcccccacgcccctctaccttgacctcccttgaccgccgacacagcgtcctgggtgcgggtccccgggagcggggagttcgccggggagcgattgtccttgggcgtgttcgtgctgtggggtggggggaggagtggcgggtgggcttggtagggggtggggagagatctggagctggaagggtctaaggtttggaggaggagtttacgcctcagacctgatcctcctgaggaaaaaggcaggaaaaggccctgatgccttgtaaagaaaatcttgaaagaaaaaagatcaaaaagaaaaatttcaagaaaaagaaccactaagaaaggctgaagacactaacatgtaacctgttacgatacatttaacgtttcgttttttcctggatctctaaaagggaactcaagggtgggggttactgaagaatactacagatttggaagtttttgttgctgttgttgtttggtttggttttgtttttcaagaggggccaggagaaatgaccccttccccgccacgggtcccgaagtgagggcggggggggggctctggggcgcgggcgcgcgcggcgcggcgcgggccggcgggggagggcggcgcggcgcggaaggggttaaggcgctgagcgcggagccatctggccgggttggctggttataaccgcgcagattctgttcacgggactcagagttgaagctcctctcccttccgaacagctccgcgcaccgccccgcgacgcagcccggcgcaactactttcttctctctcctttctttcttcctctcctttttcccctgctgggtagtggctgcggcggggtgggggagactttgaatgaccgagctcgcgtccacctttctcttcatgtcgacgtccctggaaacggccacacggatgccatggttacttttgccacggtaaggggaggcggcgggcaccttgggtgggcaggtttggggatgggggtccacgtggggagggattttccagtggactggtgcggggggccccagatccgcatcccgccccacccccatcgcgccgcgctcactcactttcccgggcttgtgtcttccccaaagtttgcgctgggatctgctcaggccgaagcgcaaccgcagccaccccgctacacacacacacacacacacacacacacacacacacacacacacacacacagacacggacacccttctccacctcctcccctcttgtccctcggctgcccaagaagcttccctcaatctgggaaagtgatcaggtttaagggacctggattggaaagggtgggggcagaagaggggaaatggggacgacgaaagagcaggaaagagattcaacagaatcaaccacccaccactcccaaccgacccgcctgctcctccgagaaagctcctagcgcatcctataacaaaagggggtggcagacagaactccgggcggggaggtgccgcggcagctcccctgcacacgccctgcactctgccggccgctgagcctgattctcagctcgccccagcaccactctggcccgggcgtgggctggggggaggggacgcgcagctcaggacccggaacctcgcgttccagttttgggagttgggactcactgccacgcgccgcgtacctgcgttggagttccccgaaagggttttttca

SEQ ID NO: 606 - DNA, 6000 bp, Homo sapiens
taattagcaataacaacaaaccaataatataccaggcaatctgttaagagttgaaggatatggtggaatttccttttaaatgatgaggtggttctgggtgaaaggcagagaatgaataagacgagattttgaaatccttcaattctgtctttcatgcacattgaggtccacgttgggaagctatataaattctaaatatgtccactacttcattctgctgatttatttctgtatttgtccaaaggggaaaatatacatccataaaattacattaatgaaatgtgtagtggcatacaaataataatacacaggccattccagagccaagcttctttctaaagatagctcattcccccagtggtgtgacagtgtttcctgtgtaaggactagcagatcgggactggcattcacattgtgccaggcactgtgttgaatgttttaaattaattagttcctttggtcctcatattacttctatgagattggtgttgtcttcaccaattgcagatgggttctaagaagttaagaaacctgtacaaaagcacatggctactgagtggagaaggtagaggggaacctgcttttctcaggcaccaaaatctactctggcagtaaattctaggtcgtggtctgtcattatgtttttgtttttgttttttgttattctgagtttcctcagttattaaatgcagagtgggggacataggggctgatagaagtttatctctgatgtctgtattctgtgtagagagatcaatgctagtccttagagcaaagctgtgctttcttaaaatgacagaaatttgggggaagacctggtcttgttaaataaacataaacaagccactcagtttctgtggacaagtgcatgcgaattgaaagaaaagaagaatgtctcacaggtgactccaggtcatctgagaggaattgctatatggcttgacagcctgtagctcttggtgaataatgctgttgccagtatatagaaacgggtgggcagccaggaatctttcaagtgcggaggcacaaaggtagcatgaagccgcctttcctgacccttaagctcccagtccctgtgcaaacaccttttgcattcactttaattgtttgaaaaacgaagacttccagactccatcagctctagcagctgtctgggtggatgggggtggggatggagggggtagggcgagacctccccacagcgccctccagcagcagaagatgcaacttgcaaatacttcaggatcagtgagaagtgtggtgtttattttagtaacctcaaaagagagaaaaagaaaagcagtggaagaggacagacattcaaggctagctacacgatcatggggaaaaaaaacaagcttgtctttgacacggaaagggtccttggaggccattcggtccacttctctcatttcctgggtcaacatgtcacaatgaattaaccacatactgccactgcacaagaccccctccctcaccacacgctgagcccccaccaccagcattcagtccactgagctcaaacatagggagataagtgctgttttcacaagataaaggcaaaattcaatcccacgttgccgttttgtttctgttcagtgttccaaccacagagtggtgctattgcaaaagataagggtaaccagaaggcacgctctggaaatttgctttaggagagagttttaaagggggttttcaaaaacaagatctgattcctgctctcagaaatcacttccaggagtcagggccttactctcagatgcagcagggagaagaagaaagttcagcaacctaaaaatacagtcgacagatgggcagccaaagtcatggccacgaagtcaacttggagaggagcacctacctagtgaatcctaaaagatctcatcctggatgcttccttaaccaggcctatgtacagggcacaagctcgcagccagcttactttccagtcctgatctttgcttttgctatccataccaatggtatttctatagaaaagaaaaatctctatttagaaacacggatttacttagaagtcacaatattctagtttaaaaatggctctacatagtagagaatgatctttttattctgtcttcttaaaaatacacctttctaattctttttttcttcccaccttcttcattcagcaccttgccactcccttggaagccacaacagcgagctggggggtcagtccctagtcttagagggaagaaatctttaggtctgaagtctaaagaaaaacagtaaaggaaaaggcagttggcggtgctcaaggtagactgtctgaaagaggtcttctactcagaaaagggctaaggctctccctttgggaaaccaatccttctgagaaaaagtgcatctttcaccctctgctcctgtctgggtctctccctcttcctccctccttccctcagtccctcctcccctctctccacaaagacacagcacatatttggcaagattaaggtgtcacctctcatattacaaggcctgttgattgcaagcaaagacagacccaccagcttaggacaaaaccccttggagttggaaataagacaaactctgggatccccgaaagtcccggcaaaatgacgcggccagccagtgcaaggcatctgcagaacaaatccaagtcctaaacgcactgcttgctgccttttcttctccttcctttcttctgatttttcaagtttgtttgccccccttcccctcctccctccagactgccagggacctgggagctgcctgcagatcagcccgcacatgtatttaaccccttccctgctgcagcaggagccaaccacctctttccttgcaatcttcaggttcccagaggacctggagcttgagaaaagaactctgccagtggatctgaaactggggcctgaatccctcctttgaccagggcgagaagctggaggaggggggcaagtgcgggaagtgggggagggcagggaggcgggccagatgagagggagaaaagcagaacccgacagagcacgcccaatccaaaccttcatggtgctgtgtggctgggtggagggaacgactcggcagcctcttctggccctgaggaagacgtcgatattttggcacgaggggagccactgaaggactaccctacccttgcgagggaccgcaggaggtgacgcccctgggcctcggtgggcgcttctggcggttttcgatgtggcaacccccatcagccaggataatgatgaggcaggtacaatctatctagtacgcagcccccagactcccccctcccttcccacctccccatccaaccccccagctactctctgcggccggttggtcctgaactggtgggtgcagttccgatgtttaaccaaattctcaagcaatttcaaggtatttggattttttgaacctgggccctaaccgaaacgcggaacggcttgcttattagacacctcgaacgacagggcagggaggaaacgggatactcgctgcccttcccagtcgcgcgtgagtcaaaaggtcctggcaggagatgatgtgaggagcggctgaagtggcagggaggaagggatgaggggcttggagcggaggtccaccacgcaaggactcgggaagcgggcaagtgggcaaaactctgcttccgggctctcgatttctcgttgatcactaagtggtatttttcccccttctctcgatggcaaatgggcgaaatcaagatgacttaacttggtaaatttagagagaacggctcggagcaagtgaggtctaacgggcagctaaaattatctccaaataagagattttgaccccctccccctatcctctcctcgaatgtatccaccggtggggaagtgagcgtcattactttcggggcgccacgaacaggtttgtttgttgctcgcctttcctgcttctcgcgctgtccccgcgtgcagactggtgggtgctgggcgagtgattagctgcagggccccatcctagtttggaaggaaggggtttagaagttggaggatgggtgaaatgggaggctgcgatccatctccctctcccttccacactcaagctcccgcaaacacgcgcgcgcacacacagcccctccctagtccctcggaccacccgcccccacgcccctctaccttgacctcccttgaccgccgacacagcgtcctgggtgcgggtccccgggagcggggagttcgccggggagcgattgtccttgggcgtgttcgtgctgtggggtggggggaggagtggcgggtgggcttggtagggggtggggagagatctggagctggaagggtctaaggtttggaggaggagtttacgcctcagacctgatcctcctgaggaaaaaggcaggaaaaggccctgatgccttgtaaagaaaatcttgaaagaaaaaagatcaaaaagaaaaatttcaagaaaaagaaccactaagaaaggctgaagacactaacatgtaacctgttacgatacatttaacgtttcgttttttcctggatctctaaaagggaactcaagggtgggggttactgaagaatactacagatttggaagtttttgttgctgttgttgtttggtttggttttgtttttcaagaggggccaggagaaatgaccccttccccgccacgggtcccgaagtgagggcggggggggggctctggggcgcgggcgcgcgcggcgcggcgcgggccggcgggggagggcggcgcggcgcggaaggggttaaggcgctgagcgcggagccatctggccgggttggctggttataaccgcgcagattctgttcacgggactcagagttgaagctcctctcccttccgaacagctccgcgcaccgccccgcgacgcagcccggcgcaactactttcttctctctcctttctttcttcctctcctttttcccctgctgggtagtggctgcggcggggtgggggagactttgaatgaccgagctcgcgtccacctttctcttcatgtcgacgtccctggaaacggccacacggatgccatggttacttttgccacggtaaggggaggcggcgggcaccttgggtgggcaggtttggggatgggggtccacgtggggagggattttccagtggactggtgcggggggccccagatccgcatcccgccccacccccatcgcgccgcgctcactcactttcccgggcttgtgtcttccccaaagtttgcgctgggatctgctcaggccgaagcgcaaccgcagccaccccgctacacacacacacacacacacacacacacacacacacacacacacacacacagacacggacacccttctccacctcctcccctcttgtccctcggctgcccaagaagcttccctcaatctgggaaagtgatcaggtttaagggacctggattggaaagggtgggggcagaagaggggaaatggggacgacgaaagagcaggaaagagattcaacagaatcaaccacccaccactcccaaccgacccgcctgctcctccgagaaagctcctagcgcatcctataacaaaagggggtggcagacagaactccgggcggggaggtgccgcggcagctcccctgcacacgccctgcactctgccggccgctgagcctgattctcagctcgccccagcaccactctggcccgggcgtgggctggggggaggggacgcgcagctcaggacccggaacctcgcgttccagttttgggagttgggactcactgccacgcgccgcgtacctgcgttggagttccccgaaagggttttttcagaaaagacctcgcgccccgggctcctcttggccagcgcccacccggtggccaccccaccctgggcctttgcgcagatgttggagctccgtacgcagcccgcacatctgggacccctccggggagcggcgggcacccgggcccggccatcccaggggatctccttgcggtatcgtccagcctgttctcggactttgagcggtggcgtgggaggccgggagacctgggcacccgc

SEQ ID NO: 607 - DNA, 6000 bp, Homo sapiens
tacttttgtgggggatgctttcatagggaatacagggaggaggacacaggattgatggcctcaaatctctgcaaactctgcttagagctgaggcttcttggggaaggacacagcctgctgacagcagccgtcctggctccaggcttggagcttgggcttcccctggaagtaaactctctagaatgtttgagagcaaggacagacggagaggcagccgagtgtcatcattaataacatgagctctagagccagaaggtgcaaatcctgactctgttgcttgttagctggttgtggaacccctctttgccttggtttccccattcaaaatgggaaatataatagtacgtacttcaggatggttgttactaggatttaagatttatgtaagccagtacctggcactttgcatttttattcttggtgatctcacccctaagcagtctaaaaatttacttcacacatgtgcagcaagaggcgtctttaggtacacggtcaggaggtgctcctgtgtagggaagctggtcctggagaggtgaattggaacctgaaggctgcagcccagtctctgcacgtgacagggcagacgcaggttgctgggggctcagattctgtgccactgtctacctcagcttccttttccatgtcagctgcttcttgaatacccccaaaccctctgtggatgctgtaaactgagccaaaaaggaggaatcagaaattgctctcttttgagtattttgagggatggtgaaaccttgtaggaatgttgctccagggactgagaaaacaccatatgtgggaaagcgtttctaagtgaggaaaatcgcacatgcacgtcggtcaggatcttggaaaactctgagcaggggaaatgggcactggggagagtgtagaaagggggttcactaaggtctttaacaggtctttttctaattatagccaagaagagcctggggaccatggccgacttcagagccagggcctgtattttctttgggaaaagaaggcagagttgattggcttccaaaaccaggcttggcaaaagcccatgcaggctctccagccagtaagcagtgcctggggtaggtctcgatcgtagcaggcgctcattcagtaaatagacgtcgaaagtccgcagcgtgtccagccctatgctgggagtcaaggatgtgtggatggaaaggacatggtccctgtcgtcaaagagaaggcacaccaacaataatagcacaatatgacaattgcttaaatgaagctctctgcagatgacagggacccctagagaaagagcgtagacattcccctaaatagcagaactcgctgctgtgccttgcctggatggagctggcactgccttcctgtttccattccccactccagggaactggcccactgggggactcccaccccggacatggagtgagaaatgaaggtattggtggccaaaaagtgaccagagatcagaatgcatctattcttgcccccagcaaattcagaaacaccacctctcccttgcccgtgtttgctttcgtcatttgtctgttctctgggcttcgagttcataatattcctatcttctcccacaaccagtgtaactggtctgagatccaagcagtcgggcaccatggcatctgggggaaagccttgtggggaccgtgttggtaaagattgctgtgagccagatgtagaggagggagctctccagactctgggtccctcgcccgtgtgcgtcaagggcaggtgtgcaccatctcccgtggccacaggccattcagcttcatgttctctaacatttctagtgtgctcactctgtacctgatgctatgctaggtgcttccatgtggatttcattgtttacccctcacgataactttcatggtgcacaagccatgtgatttttgttgcgcctacgaaccaaatgcccccgtcactctctgccattgtttagcagtctgaccttagacagctcacttcaccacaactgcaggcctccgttcccttatatgtataaatgaggaggttgtctagggtcctttccagctgcaaacctctgtgttttggggagttctgttagcaacattcttggacttgctctctacgagaaaagctagaagtcgattattaaaatggagtccacaggaagcctgcagggctttaagacagccttctaaagagtttagaaacactcaccagcctgcagatgacttactcccactacttattacaaagtatcatggcaagtaagaaagaaatggtcagccactgggagagcaggctgaggttgcaaggaagtggcaggtgctatcgttgggatcttgggggagcattgtagaaaggtcagctttggaaccaggcactgaaaaacgggtgaaatttcaacaggagaggcagtgcacatgggttgtgatttgagcagcagtgagtagtgaatggggttggagcaagaggcctgtgagcccagtcatcacatggaaaagggaggtgagggccagagtgcagagaacccctctcactttcctgtgggtctctcctcttctttttttttttttttttttttgaattggagtcttgctctgtcgcccaggctggagtgcagtggcgtgatgttggctcactgtaagctccgcctcccgggttcacaccattctcctgcctcagcctcccgagtagctgggactacaggctgccaccgtgccctgctaatttttgtatttttttttagacggggtttcaccttgttagccaggatggtctcgatctcctgacctcgtgatccacccacctcggcctcccaaagtgctgggattacaggcataagccaccgtacccggcctttctcctcttctttaaactgcatttaggttgtcctcatctataagatgaaggaataagattagatggcctctttatatggcttatctacttctaataaactttggttccatattccagccaccacccataaagactcttactttttcctcctcaatccatcagcatcagccagcattctccctctcagttcatcctggtcattacctcactaatctgtaccttgactcttattctacctgggacctcccctcactaaccatacttgatttatttccttaagagcggatatcctgtgtattcttagcttacagtggctgagcttttgggaggtttaacaaattgtttttcaatagactctcagtcctaaatgattttattgcagctgtattattctttttgaggggagtagagaatgtaatcctagttgtatgccatattttttgtattgttcaagttgcattttgttgggcctgtaatattgaagaaaatgtcacttgtatgcagaataggagggagattccttatgctgtagaggaaccattttcctaggatagtacaattccttagagtcatctctaagggtgagcagcaaagctagaatccctctcttggctttgaccttgaaggagtcagttttcccaaagactagttcccatggaaagaagatggtctccttatcacagcagcaagaggaggcagtatgagcagagtgcctcactgttgttgacctctagggacaagtgagccggcagtatttcagacaagctgggaaagaggctgtctgtgagtcctgggagcgagtgagcactggcaggctcagacataggtgctggttagcaggactgcttttctgtttcttgtgtcggctttgtttatttcctctctattttccccctggacttagtaaagtctttccgaaaataccaaaggtgaaccaggggaagagtttttattttccatgtttggacagaactttaaagaggaaatgatgtacccccctgggagccagtgaggtggcagcgatggtgattaaggagtgaatatctcaaggaggtggacgaattcggggatcactagctcagctgcccctctccacctggagcatctccttccagtgctaccctcagaacatctgggctttgctctagtgagggagagactagcaatgaaggtgtcttgagatcagcactgtaattccaccaggacgccaccggagtccggtgttaagcttctactatggcaacagaatgagagcgtggatgggttgaaatgccatttcaacaaggaaatagtagaattagaagaagcataagcactaaaaggaacattttgtagcagaaatgttaaaaatctaaaggaggcaagtgaatcaacaatgactcttctattctgggcaagtccagcccatttatgtaaggtggttattctgcatctctgtcttctgcaagtagtgctgtggcagagctgcgttttgtggagagcgtccccggggatggagcagatcagttggtgatgcgtatgtatcagaaagctcggcagagcaccctggaacgtaggccctctcgcggagtgggtagtggccctacatgttcatttccaagggcaggagaatagaccgttccagctgcggcctggccagggatgaccccacatctgacactgcaatatgggggcaactgaaccagtcctcagcctcagtgtgttccaggggctgcagctggggagcagtcgaactctttcttgagacaattacaaggccaccgctgctgctgctgaagggaagttactccatgtttacaattctcaggtttgaagttttcatgctttgccaaggtagagtgaaccatgcgtctttgcaggctcaagggatgtttaaagaagcggtaggacatcgtccacccacaagcagagaccgcaggataaagcagacatccaatgtaaatacaacccgtgcaaaaagcagagtcggcagacctggagtgcattcgcagtatctcccgggggtgggggaaagaaatcacctcttcagaatgtccagaggggagttgccttgcttacctggggggcggtaccctctctcgtgccctcacagggctactcagcctcaggtagctggtgccagaataacacagactcagctgccagagcctgctcttaacacctgtgtttccttttcagatcttacaggtgaacaaggtgatgtccatcttgttttatgtgatatttctcgcttatctccgtggcatccaaggtaacaacatggatcaaaggagtttgccagaagactcgctcaattccctcattattaagctgatccaggcagatattttgaaaaacaagctctccaagcagatggtggacgttaaggaaaattaccagagcaccctgcccaaagctgaggctccccgagagccggagcggggagggcccgccaagtcagcattccagccggtgattgcaatggacaccgaactgctgcgacaacagagacgctacaactcaccgcgggtcctgctgagcgacagcacccccttggagcccccgcccttgtatctcatggaggattacgtgggcagccccgtggtggcgaacagaacatcacggcggaaacggtacgcggagcataagagtcaccgaggggagtactcggtatgtgacagtgagagtctgtgggtgaccgacaagtcatcggccatcgacattcggggacaccaggtcacggtgctgggggagatcaaaacgggcaactctcccgtcaaacaatatttttatgaaacgcgatgtaaggaagccaggccggtcaaaaacggttgcaggggtattgatgataaacactggaactctcagtgcaaaacatcccaaacctacgtccgagcactgacttcagagaacaataaactcgtgggctggcggtggatacggatagacacgtcctgtgtgtgtgccttgtcgagaaaaatcggaagaacatgaattggcatctctccccatatataaattattactttaaattatatgatatgcatgtagcatataaatgtttatattgtttttatatattataagttgacctttatttattaaacttcagcaaccctacagtatataagcttttttctcaataaaatcagtgtgcttgccttccctcaggcctctcccatctgttaa

SEQ ID NO: 608 - DNA, 6000 bp, Homo sapiens
gtttgctgacccagtctgcagaagacagcagaactggcgtctttcctagtttatctttgacagagcgggatatgctacgaaaaagcatctgcaaaacttcaaacatcctaacttcctctgacaacccatttatttgtggtctattaatttatctaaattttcttcacttttccctgttcacttctatcctttccaggataagaatcagttacttagttaaatgcaactctttattcttactacttggagctaattagccacttcacactgggggctgcccactgtggaagacaacagtcctttcagctgcccttatgtggtacagatttctctttcatttaaaatgatggaccagaaaaatgccactcttcatctagtcccctggcagtttacttagaagttcactactagaagttggccgggcatggtggctcacgcctgtaatcccagcactttgggaggccgaggcgggtggatcatgaggtcaggggatcgaggccatcctggctaacatggtgaaaccccgtctctactaaaattacaaaaaaaattagctgggcataagtggtgcacgcctgtagtcccagctactcgggaggctgaggcaggagaatggcataaaaccggggaggtggagcttggagtgagccaagatcgtgccactgcactccagcctgggagacaaagcaagactctgtctcaaaaaaaaaaaaaacaaaaaaaaaaacaaaaaaagaagttcactactagaagtttatcactttgattgaagacagggtttatcaaccttggcactattgacattttcggctgtatcattctttgtggtgggacaggatgattctgtcctatctacaatcctgtgcaggatgttcagcagcatccctggcttccatctattagatgctagtagcacctcctgagtcattgtgaccaaaacatctccaaatattgccaaatgacttctggggggcaaagtcacccccgttgaaaagactgggttaaggcattgtcaccactgaaaatgcaaatactctggaaaaggacaaccctcatctgttatgcacttctgggtgtttgccagaccatttccaagagcactagtcagctaagagcagagtggagaagaagagagaaagaaaaagtatttagaagaatccattcctggccgggtacagtggctcgtgcctgtaatcccagtactttgggaggctaaggtgggcgaaatgacttgagaccaggaattcaaaaccagcctgtggccaacatggcaaaacaccatctctactaaaaatacaaaaattagccgggcctgttggcgcatgcctgtagtcccagctactcaacttgggaggctgaggccaggaaaatcacttgaacctgggaggcggaggttgcagtgagctgagattgcaccattgcactccagcctgggcgacagactgagactctgtctcaaaaaaaaaaaaaaaagaagaagaagaagaagaagaatccatttccatcagccccctttctggatgcctaatgggcctgtggaaagaaggctctctcagcagctccttcggaagaaggcctgggagaagagtcccaccctcacacaccttctaggcgtcctggggtgctcggtctgggtctggtgttgcccagtggaaatcagtctcaggaggctctggtgaaaaacacaaaaggacaggagtaaagacaatgccctgcccgcggtgaacctgtggatttctcacccctggagtctccctttatcctcctggggatggctgggcattatagtagccatttattggtaagatttgtctttcgtgatccagctgggaaacaagaaacactctaagtctttcaaacagaagaagtttaacacagagaactaactggtacatgggtgatggaggagctgagaagacaatgggaggcagctcagaaaacagcagagcgggaagcagctaccatctctaggcctggaaagatggcagggtgatgtagcatcaaagaccaagaagcctccagagccatttggcaggaactaaatagtgtggactactggtaggagatgggattatggaagtggggaaggaaggaagacaaccaactgcaggtgaagccagaaagcagagaggagagaaatagcctggctgcttcactcctcccatcccacctccatcccacagacctgcaagcaaaccagtagctgactgacacaataaagaggcacacagagataaagtgatggggccaggatcaaaacccagatctcagggctcgttccttagggtgtagagagtccatgagggctgaagcgccagcttacggctggcagcagaaagaaacatacagtccagccagctggggttaaaaggggtctggacatagtggttacctgtgaagcaggaagctttgactgggaagggcatgtagcaaacatttgtagtgcaaggaacattctggggccgggtgccgtggctcacgcctgtaatcccagcactttgggaggccaaggcgggtggatcacaacatcaggagttcaagaccagcctggtcaacatggcgaaaccccatctctactaaaaatacaaaaatcagccaggcatggtggcaggcgcccgtaatcccagctactcgggaggttgaggcagagaattgtttgaacctgggaggcagaggttgtagtgagccgagattgcaccactgcactccagcctgggcgacaaagcgagactctgtatggaaaggaaaagagaaaagaagagaagagaagaggtgttctggaccagttgggggatatgcaagaatacacaaaagtgaagactctctgagctgtatctgtaagatcagtgtaccttacggtttcattgtattatatgttacacctctattaaaagaaagggtctcagcagcataagacagggtggggaaaaaaagaaaaatagaatagagaaagagtccctgtcttttagggtaaaatcctgaaatattttcaaatgaaatgatatgatgtctgggatttacttcaaaataataatgagggatttgaagagtgtgtgcgttggtgggggagggggtatacagaataaatgaaactgacagtgagttgaagctgggtaaggagtatatgggagactcccaatattactttttctcttttggtatattatcttgcatgtggaatttccacagtaaaaagtaaaaagaagagagagaaaaaaggacctagggtcgctacacacacattcctttacgcgtttaagagctcagcagggactctcatcccagcccccagcgctagggccctggaaggctcagcagccccgcgcagtgcatgctgttctgatacttctgccctttccagccatctttggcccatctgtacggtgagctgcctgcaccaggtgaggggagagagcctcacagagtgaaatgcctacagcctaggcaggtcctttcccccttttgtgacctctcctccccatgcacacttcccatcacctgcacctgtccagacatcagacctgaagttagacagaccagtgtaaggacgagtgctgaacagagtccttcagggagggggatagtgcccaagtgacctatctcaagagaggttagcccctcatcccaagggagacatccctgagccacaaggagttggcaggactgctggaatgagttgggacctagacatcaggagacccagattgtagctggctctgcggtggactggctctgtgatgtggccatcactcatttattccataaatacctattgggcacatggtatgtgccagactctgctaagcatggggaacacagacttgaagattcagcctgggccatggtggcactcacagcctggtgggaagcaaacaagacagccaggtacagagggcagtcttcacggggactgtgcaacctagggcagaggttgccttccagagcctcagtgaagcctcaaggacaggtgggagttaggaagacggaaacttggggaccagagaaccacgtgtaaaagggggcagctgcaagtaactccacgggtgggtggggtgttgggttgagggagatgggaggatgaaacagggcaggaacgagaccaggccaccctggaatcccggttcccttatgtatcacccttagcctccctctccatgcttaaggtgagggggctggactgcgtgggctctcagctttctccagttctaaggggtttgaaggttcatgggcaaagaagccagagcagagggactgagtgcccaggtccagcctgctggccccaggactcccctccgcatatcctccccctctctttgggagggaggttccctgaggacagggagcagggcaagctgcacagctctcaagggtctcctaggtgacctgtgcccactcctgtgcggattgggctgggttggtagcgtggggggctggctgatttgctagtcccttgtaatttgtctgaaaaactcccacagtagggcaggacaacgggggaggaacccgggcatctgccagccggttctcctcggtctcagagctgcttctgcggccttgcagtccccgcgccctgccctctccatgactgcccgtcctgggcccctcgctttccagatcccgcacccagctgtcccttgcgctctctggaactccctctgctctccctgcgaggcttgtccaagggctgaccccgggcccgccgcccttccctcggctgggccagggctgtccgcagtccgctctcccgatcgggcttccgaagaagggaggaggccggttccggccccgcggccctcacgtgctttcccggccgcccctcccgccccgcatcgaggcagacaagcctgttcctcttccctgggctgcgattgcgacaggccggcctggctcccagcgctccctgtccccgccccgcggccagctcgctccactcccacttcctgagctccgccatgggagccctggaggcccggcctggccgctcccggccctggggtgcacatcggccctgagtcccgtcccaggctctgggctcgggcagccgccgccaccgctgcccaggacgtcgggcctcctgccttcctcccaggcccccacgttgctggccgcctggccgagtggccgccatgctcctgccttgggccacctctgcccccggcctggcctgggggcctctggtgctgggcctcttcgggctcctggcagcatcgcagccccaggcggtgaggaaggggcctggtaggagtgggcgagggtgggcaagagggatctgggcagccgtcgctccattccctctgccctcccaagctgacccctgactaattcttctctcctcttctccatctccctttgaaggtgcctccatatgcgtcggagaaccagacctgcagggaccaggaaaaggaatactatgagccccagcaccgcatctgctgctcccgctgcccgccaggtgagaggcaatggcaggacgaacctgggcctcggaagtgggtcacgggggctccagccccctcgcggcctcagagggaaggtgggcactgtcccccaggaaaactggctgctggagacgagcgtgggaaaccctggacatcacgtggaggagatgggactggccctccccactgggcctcctctttccttacctcactgagagggagccggagggccactggcaggatgatggggggccagagagaccgagggaaaggccagggtcacactacaggcagcggaggtgagggtggagcctcgtctcctgaggctctactgctccactcacgttctaggcacctatgtctcagctaaatgtagccgcatccgggacacagtttgtgccacatgtgccgagaattcctacaacgagcactggaactacctgaccatctgccagctgtgccgcccctgtgacccaggtgagtggggatgtgcctgcgggggggctggatcccctggagcttggcccctccctgagccctcccgtctccccgccagtgatgg

SEQ ID NO: 609 - DNA, 6000 bp, Homo sapiens
ctggtgaaaaacacaaaaggacaggagtaaagacaatgccctgcccgcggtgaacctgtggatttctcacccctggagtctccctttatcctcctggggatggctgggcattatagtagccatttattggtaagatttgtctttcgtgatccagctgggaaacaagaaacactctaagtctttcaaacagaagaagtttaacacagagaactaactggtacatgggtgatggaggagctgagaagacaatgggaggcagctcagaaaacagcagagcgggaagcagctaccatctctaggcctggaaagatggcagggtgatgtagcatcaaagaccaagaagcctccagagccatttggcaggaactaaatagtgtggactactggtaggagatgggattatggaagtggggaaggaaggaagacaaccaactgcaggtgaagccagaaagcagagaggagagaaatagcctggctgcttcactcctcccatcccacctccatcccacagacctgcaagcaaaccagtagctgactgacacaataaagaggcacacagagataaagtgatggggccaggatcaaaacccagatctcagggctcgttccttagggtgtagagagtccatgagggctgaagcgccagcttacggctggcagcagaaagaaacatacagtccagccagctggggttaaaaggggtctggacatagtggttacctgtgaagcaggaagctttgactgggaagggcatgtagcaaacatttgtagtgcaaggaacattctggggccgggtgccgtggctcacgcctgtaatcccagcactttgggaggccaaggcgggtggatcacaacatcaggagttcaagaccagcctggtcaacatggcgaaaccccatctctactaaaaatacaaaaatcagccaggcatggtggcaggcgcccgtaatcccagctactcgggaggttgaggcagagaattgtttgaacctgggaggcagaggttgtagtgagccgagattgcaccactgcactccagcctgggcgacaaagcgagactctgtatggaaaggaaaagagaaaagaagagaagagaagaggtgttctggaccagttgggggatatgcaagaatacacaaaagtgaagactctctgagctgtatctgtaagatcagtgtaccttacggtttcattgtattatatgttacacctctattaaaagaaagggtctcagcagcataagacagggtggggaaaaaaagaaaaatagaatagagaaagagtccctgtcttttagggtaaaatcctgaaatattttcaaatgaaatgatatgatgtctgggatttacttcaaaataataatgagggatttgaagagtgtgtgcgttggtgggggagggggtatacagaataaatgaaactgacagtgagttgaagctgggtaaggagtatatgggagactcccaatattactttttctcttttggtatattatcttgcatgtggaatttccacagtaaaaagtaaaaagaagagagagaaaaaaggacctagggtcgctacacacacattcctttacgcgtttaagagctcagcagggactctcatcccagcccccagcgctagggccctggaaggctcagcagccccgcgcagtgcatgctgttctgatacttctgccctttccagccatctttggcccatctgtacggtgagctgcctgcaccaggtgaggggagagagcctcacagagtgaaatgcctacagcctaggcaggtcctttcccccttttgtgacctctcctccccatgcacacttcccatcacctgcacctgtccagacatcagacctgaagttagacagaccagtgtaaggacgagtgctgaacagagtccttcagggagggggatagtgcccaagtgacctatctcaagagaggttagcccctcatcccaagggagacatccctgagccacaaggagttggcaggactgctggaatgagttgggacctagacatcaggagacccagattgtagctggctctgcggtggactggctctgtgatgtggccatcactcatttattccataaatacctattgggcacatggtatgtgccagactctgctaagcatggggaacacagacttgaagattcagcctgggccatggtggcactcacagcctggtgggaagcaaacaagacagccaggtacagagggcagtcttcacggggactgtgcaacctagggcagaggttgccttccagagcctcagtgaagcctcaaggacaggtgggagttaggaagacggaaacttggggaccagagaaccacgtgtaaaagggggcagctgcaagtaactccacgggtgggtggggtgttgggttgagggagatgggaggatgaaacagggcaggaacgagaccaggccaccctggaatcccggttcccttatgtatcacccttagcctccctctccatgcttaaggtgagggggctggactgcgtgggctctcagctttctccagttctaaggggtttgaaggttcatgggcaaagaagccagagcagagggactgagtgcccaggtccagcctgctggccccaggactcccctccgcatatcctccccctctctttgggagggaggttccctgaggacagggagcagggcaagctgcacagctctcaagggtctcctaggtgacctgtgcccactcctgtgcggattgggctgggttggtagcgtggggggctggctgatttgctagtcccttgtaatttgtctgaaaaactcccacagtagggcaggacaacgggggaggaacccgggcatctgccagccggttctcctcggtctcagagctgcttctgcggccttgcagtccccgcgccctgccctctccatgactgcccgtcctgggcccctcgctttccagatcccgcacccagctgtcccttgcgctctctggaactccctctgctctccctgcgaggcttgtccaagggctgaccccgggcccgccgcccttccctcggctgggccagggctgtccgcagtccgctctcccgatcgggcttccgaagaagggaggaggccggttccggccccgcggccctcacgtgctttcccggccgcccctcccgccccgcatcgaggcagacaagcctgttcctcttccctgggctgcgattgcgacaggccggcctggctcccagcgctccctgtccccgccccgcggccagctcgctccactcccacttcctgagctccgccatgggagccctggaggcccggcctggccgctcccggccctggggtgcacatcggccctgagtcccgtcccaggctctgggctcgggcagccgccgccaccgctgcccaggacgtcgggcctcctgccttcctcccaggcccccacgttgctggccgcctggccgagtggccgccatgctcctgccttgggccacctctgcccccggcctggcctgggggcctctggtgctgggcctcttcgggctcctggcagcatcgcagccccaggcggtgaggaaggggcctggtaggagtgggcgagggtgggcaagagggatctgggcagccgtcgctccattccctctgccctcccaagctgacccctgactaattcttctctcctcttctccatctccctttgaaggtgcctccatatgcgtcggagaaccagacctgcagggaccaggaaaaggaatactatgagccccagcaccgcatctgctgctcccgctgcccgccaggtgagaggcaatggcaggacgaacctgggcctcggaagtgggtcacgggggctccagccccctcgcggcctcagagggaaggtgggcactgtcccccaggaaaactggctgctggagacgagcgtgggaaaccctggacatcacgtggaggagatgggactggccctccccactgggcctcctctttccttacctcactgagagggagccggagggccactggcaggatgatggggggccagagagaccgagggaaaggccagggtcacactacaggcagcggaggtgagggtggagcctcgtctcctgaggctctactgctccactcacgttctaggcacctatgtctcagctaaatgtagccgcatccgggacacagtttgtgccacatgtgccgagaattcctacaacgagcactggaactacctgaccatctgccagctgtgccgcccctgtgacccaggtgagtggggatgtgcctgcgggggggctggatcccctggagcttggcccctccctgagccctcccgtctccccgccagtgatgggcctcgaggagattgccccctgcacaagcaaacggaagacccagtgccgctgccagccgggaatgttctgtgctgcctgggccctcgagtgtacacactgcgagctactttctgactgcccgcctggcactgaagccgagctcaaaggtcagaggtccctgaggggctggatgtgaaaaggaggctgggtgccagggatctcaagtgggagcagggaatatggtactgtgtccacggcgaccccccagatccttggcttaaaattcctcttctcattccatgcagaggctcacagaagggttctggagggacatggaactgggacaggtgcaggggacacaggaggtggttcttctcagtactgggaagcttgggcaaaatggtaggcagtaggccgggtgtggtggcccacgcctgtaatcccagcactttgggaggccgaggtgggcggatcacgaggtcaggagatcgagaccatcctggctaacacagtgaaaccccgtctctactaaaaatacaaaaaattagccgggcgtggtggtgggcgcctgtatcccagctactcgggaggctgaggcaggagaatggcgtgaacttgggaggcggagcttgcagtgagccgagatcgcgccactgcactccagcctgggcgacagagcaagactccgtctcaaaaaaaaaaaaaaaaaaggcagcaaagcagagcttgggaaaggtgagagctacgcaatggggtggatgggcatcctgaggcttaaaggaaactcacaggccggcaaagggcccctcccttttgcccattcaccctggctggcctgcctttctcttgccagatgaagttgggaagggtaacaaccactgcgtcccctgcaaggccgggcacttccagaatacctcctcccccagcgcccgctgccagccccacaccaggtgagtgcagccccacccaagctccttccaccctctgagaagcctcagctgctaacaacccccagcgcctatccttgacaccacggactcgactcaccactttcagcctccccgcctgcccagtggagtcgggacactggtgggccagggcgtgaaaaggtcatcatctttttttcctctgcaggtgtgagaaccaaggtctggtggaggcagctccaggcactgcccagtccgacacaacctgcaaaaatccattagagccactgcccccagagatgtcaggtgagggaccagggctgagggacacggggggggcgcctctgaaaatgccttaatgctccacatcttaaaaaaaatggggaaaagatgaacacttccctcccagaattgggcaagaagaaagttccttacagaaaaaattggagtatctctaggctagtttacacacacacacacacacacacacacacacacttttaaaattatatatactgtaatactatgtcaaggaacacatcccacactgagatgtaatgataactactattgtcatcattttgggcttaccaacattacacaatccgtttttttttttcacacaatccattaactagaccaaacacctctttattagactatatacttttattattagacagaagattcccatttgactctttcttgactgtttcctgtggactgattggcttgctagcctagtagatgactattgtttctaatg

SEQ ID NO: 610 - DNA, 6000 bp, Homo sapiens
cccctcctctcccaaccccttcggtaagagggggcaaggtcagagttggtctcaagtctcttacctctctgctatgcactgccccttccctagtcacctgaagaaggaaagcgacaagccactgtagaacctgcgatcaagagagcaccatggctcctacattggaccttggagcacccccaccctccccccaccgtgcccttggcctgccacccagagccaagagggtgctgctcagttgcagggcctccgcagctggacagagagtgggggagggagggacagacagaaggccaaggcccgatgtggtgtgcagaggtggggaggtggcgaggatggggacagaaagcgcacagaatcttggaccaggtctctcttccttgtcccccctgcttttctcctcccccatgcccaacccctgtggccgccgcccctcccctgccccgttggtgtgattatttcatctgttagatgtggctgttttgcgtagcatcgtgtgccacccctgcccctccccgatccctgtgtgcgcgccccctctgcaatgtatgccccttgccccttccccacactaataatttatatatataaatatctatatgacgctcttaaaaaaacatcccaaccaaaaccaaccaaacaaaaacatcctcacaactccccaggaacatggctgtgactattctttgcgggatatgggggtgaggctgggtctcagtgcagcggtgcttagagagaactgcagccagggcctggcagggaagcgggaagagaccagaccttcttaaggaacggggtgtgggggctgggaagaattggagaggggatccctgaagagcccagagccttgactcagctggaggcggtaccatgggtgctggtgccccctcctgccccaaggctgggcaggaccgctgcgcgccagtggaggcctcggtctgggctctgtggcttatgcctgtgagacgcgggtggattgcttgagcccaggagttggaaaccagcttgggcaacatagagaaaccccatcttaagacaaaatcagctgggggttgtggtgcacttgtggtcccagctactcaggaggctgaggtgggaggatcacttgggggtcgaggctacagtgagtcatgatcgcaccactgcactctagcctgggtgacagagcaaggccctatctcaaaacaaacaaacaaaagacaccccaaccaaccaaacactagaggcctgggacaggcccacctctgacgtggtcagttctaggaatctattcagacgggtctcactgctaggagccaccagagtcctccggaacaagggcttcagagtcctgaaacctttccgtggaatactttaagaaacggttatgaggccaggcgcgacggctcacgctggtaatcccaggactttgggaggccgaggcgggcggatcacgaggtcaggagttccagaccagcttggccaacatggcaaaaccctgtctctactaaaaacaaaacattagctgggcatggtggcgcgcgcctgtcgtcccagcgacttgggaggttgaggcaggagaatcgcttgaacccgggaggtggaggttatggtgagccaagatcccccccagctgcactccagcttggcgacagagcaagactccgtctcaaaaacaaaaaacaaagccggttatgaagcgggggtggggtgggctagttttaataggtccaggcgattagtacctggcatccttaaccacctacagtttgagaagggagtgggtgataaaagcctggaagggaagggaaatcgggccgggcattaggctccatcgctcatcaatagacaaggcctttaggaaactgcgacaacggcttttgctctgggcctttactgccgaatccaggtctccgggcttaacaacaacgaaggggctgtgactggctgctttctcaaccaatcagcaccgaactcatttgcatgggctgagaacaaatgttcgcgaactctagaaatgaatgacttaagtaagttccttagaatattatttttcctactgaaagttaccacatgcgtcgttgtttatacagtaataggaacaagaaaaaagtcacctaagctcaccctcatcaattgtggagttcctttatatcccatcttctctccaaacacatacgcagcagtgttacagctcttttagaatttgtctagtaggctttctggctttttaccggaaagcccctcttatgatgtttgttgccaatgatagattgttttcactgtgcaaaaattatgggtagttttggtggtcttgatgcagttgtaagcttggggtatgaaggtttgggccacgcctgggcgcttccggctgcgccggatgctgtttcctttccgctcccaggggcgttgggaacggttgtaggacgtggctctttattcgtgagttttccatttacctccgctgaacctagagcttcagacgccctatggcgtccgcctcgacccaaccggcggccttgagcgctgagcaagcaaagggtgagaatcgtcctagtcaaggcataggctgctggcctggggtagtcaaggcatgggctgctggtctggggaggatgcgggcggaggatgtggggcgacaaacctggctacgtccgccgggaaaatggggtaggggacgccgggtaccgtccttctaagtggggcgcttgcccccaagacttgggatcttattgggttacctacagcctcaatccactaattccttgcgctctccgctgggcccgctgtctgttctccgacgcctacccgggacgcctccctgggatgcttctggcgcgcagtggtcctcgcggaggtgatccaggcgttctccgccccggagaatgcagtgcgcatggacgaggctcgggataacgcctgcaacgacatgggtaagatgctgcaattcgtgctgcccgtggccacgcagatccagcaggaggttatcaaagcctatggcttcagctgcgacggggaaggtgggtcagacgcgggaaggcgggtcagacgcgggaaggcgggagttgggtcgggagagggcgccggatctgtgggcccatgagcggttgtcccctttctcgccacacggcggcagccacaatctgactaacattcttggcactcagagcccagggtctaccctgagcttgtgcgtccgagttgcgttttgtacagtagaggttctgtatcccttacccgaaatggttgggaccggaagtgtttcgggttttttcagatttcggaatatttacatatacatggatatcttgggggatgggacctaaatctgaacacgaaattgttttgtttcatatacacgcaccttatgcacatagcctgagggtaattttatataatagtctgaataattttgtgcatgagacaaagttttgactgcgttttgactacagtctcccccaccccccactatgaagtcaggtgtggaattttccattttcggcctcacactggcactcataatttcagattttggattttctaattaaggatggtcaacctgtactgttaatcacattattattccattttgtgatgaggaagcaaactctaatggtgcagactctcgagtagcagagctggacttaaatgctgttgtgccaccttttagtgacatgtctgcatgacagcagtggctgcagtctctccagggtgtttcagctaatttttgtttggggggggttggtggttaaatttttggtgagatcctggtgttccccaaaggtgttgactgattcagctctgctgcctcatagccttcctgagttccagctacagacctggggtctcgtgttcattcttggggttccagtgactaaactgctaaaatggttcacctgagagcaagaagcacactgccttgggacattttcattcactgcatcccatctagttgtgcccagtgtagaccaaatgtcatcatccaaaccacacgggacagaggcctgcatgcgtcctgtttggcaaacagctgcccagccagtgggggagcagttcatgcttagactaccaccccctccaggtgtcttaggcacgctggtccttaggagaagggttgaccttccactccctcttgcaggtgtccttaagtttgctcgcttggtcaagtcctacgaagcccaggatcctgagatcgccagcctgtcaggcaagctgaaggcgctgtttctgccgcccatgaccctgccaccccatgggcctgctgctggtggcagcgtggccgcctcctgagagttggccctcccttgtgccactgccaggggaggaaaggccttgatgttccagacaataataaatgcgcctgtgacttagccttggtgtcagtctcttgcggacctgacaacccccatctctccttccctgattccctctgcctttccaggccccatccccctgaacagctcctccctatggtcctggctgggcctaaccctgccccagggcctaaccctacctgaggctcctccccttcccccggggcaggttgagaggctggagtgggtccctcagcgccctgggtgggtgggcctgcacagggggtacctccttctctgaggaactgggctgttagggattttccttaggccctttggtttccgcctacggagaggtttcccccattggttgctcttcctcagccagggttacttcctggtctgttcccctacccaataccccgccgctctgtcagcttgagctccaggtggagctccaggtggctcctcctctcccgggggaaggcggccctggaccagcaggcgggcctgctgtactcccgctttggggctgcagggaagctggccgctgtgggcggtctcgggccagccccgccccacctgtccttttcctggagactattagtccagggtttgtccctgcagtgccattggcctggcaggcaggatcgaggaggaagtggctgattactgagcggttcttcctcacctggcttgggccactgtgcacagctgtgccgctggctcagccccgccccctgcggccctctgccgtggcttccccctccctacagagagatgctgtcccgtgggtaagtcccgggcaccatcggggtcccagtctcctgttagttttggagggagggagggctttgttgatgctcactccgacgtgtgtgaacgtgagtgcgatctgccgctgccctgcgcctgtttccggtccctatgaacttccccttcccgcaaggtgtgaggacccccggctcactcatgctcctctgccccctctttaacattttcccctggacaagtgtgtatctgttctctccattgcatttctacttccagcctctgggctcctgcttctgcctcctgcttaggacctgtccccctgggtagctcacaacacctcaaacatagcagtcagaggccacccgcgaaggccctcccacgtccagccaacttctccgcacttcccaacatcagactttggtcccatcttctttgtttcctttcacttccctttcccctgcatcattcattcaacaggtacgtgttgagcatctattatgcaccaggtgctgtttaagatgctggtaatactggagtgaacaagacagacatggtctctgctctcacggagcttacattccagtgggaggttacagaccgaacaaataacccaataaattggatcattgcagattctcagaagtattacgcagaaaatagacagccttggccgggtgtagtggttcacacctgtgatcccagcactgtgggaggctgaggcgagaggattgcttgagcccaggagtttgagaccagcctggccaatatagtgagaccctgtctctacaaaaaataagaaattagctgggtgtggtggcacacgtcctgtggttccagctatggagaggctaaggtgagaggcttgcttgagcctgggaggtcaaggctgcagtcagcgatgattgcaccactgcacaccagcctgggcgacaga

SEQ ID NO: 611 - DNA, 6000 bp, Homo sapiens
cctgctgtactcccgctttggggctgcagggaagctggccgctgtgggcggtctcgggccagccccgccccacctgtccttttcctggagactattagtccagggtttgtccctgcagtgccattggcctggcaggcaggatcgaggaggaagtggctgattactgagcggttcttcctcacctggcttgggccactgtgcacagctgtgccgctggctcagccccgccccctgcggccctctgccgtggcttccccctccctacagagagatgctgtcccgtgggtaagtcccgggcaccatcggggtcccagtctcctgttagttttggagggagggagggctttgttgatgctcactccgacgtgtgtgaacgtgagtgcgatctgccgctgccctgcgcctgtttccggtccctatgaacttccccttcccgcaaggtgtgaggacccccggctcactcatgctcctctgccccctctttaacattttcccctggacaagtgtgtatctgttctctccattgcatttctacttccagcctctgggctcctgcttctgcctcctgcttaggacctgtccccctgggtagctcacaacacctcaaacatagcagtcagaggccacccgcgaaggccctcccacgtccagccaacttctccgcacttcccaacatcagactttggtcccatcttctttgtttcctttcacttccctttcccctgcatcattcattcaacaggtacgtgttgagcatctattatgcaccaggtgctgtttaagatgctggtaatactggagtgaacaagacagacatggtctctgctctcacggagcttacattccagtgggaggttacagaccgaacaaataacccaataaattggatcattgcagattctcagaagtattacgcagaaaatagacagccttggccgggtgtagtggttcacacctgtgatcccagcactgtgggaggctgaggcgagaggattgcttgagcccaggagtttgagaccagcctggccaatatagtgagaccctgtctctacaaaaaataagaaattagctgggtgtggtggcacacgtcctgtggttccagctatggagaggctaaggtgagaggcttgcttgagcctgggaggtcaaggctgcagtcagcgatgattgcaccactgcacaccagcctgggcgacagagtgagaccttgtctcaaaaaaaaaaaaaaaaaaagaaaatgaaccagcttcatatgctagcaagtgactgggtgtgcaggtgacattactagctggagggatcagggaggccttcccgaggaggtgacatttgagctgagacccggatgaggaggaagaggagctggccatgtgacgtagtgatcaagagtcaagcatctctgggcagaggagatggtgagcacaaagccctaatgtgggaacaaacaaaaaaaggacagtgtgcccgtggcagaggaccctagtggagcggaggcagggccacagcaggttagaccatgttggagctaggatgttgaaagtgaaaacctgacgagatgaggtggcgcacgtctgtgatcccagcactttgggaggccgaagggggaagattgcttgagctcaggagtttaaaaccagcctgggcaacatagagagaccccatctctattaaaaaaaaatactgggtatgatggcccaagcatgtggtagtcctagcagtttgggaggctgaggtgggaggatcacttgagcccaagagttcaagaccaccctgggcaacatagggagagacctcatctctactacgactacgactactactactactaataaatagctggatgtagtggcatgcacctgtggtctcagttacttggaaggctgaggcaggaggatcacctgagccaaggaggtcgacgctgcagtgagttggattgtgacactgcacttcagcctgggtgataaagcaagattctgtgtcaaaaaaaaaaaaaaaagagagggaaggaaagaaggaagggaaggaagaaagaaaaagagaaagaaggaaaaaaaggaaagagcgagaaagaagaaagaaaaggaaggaaggaaagaaagaaaagaaaggaaagaaaaagaaaaagtgacacccagtcgaaagaagaaaggaaagaaaaagaaaaagtgacaaccggtcgaaagaaaaaagaaaaagtgacaaccggctgggcatggtggctcaagcctgtaatcccagcactttgggaggccgaggcaggtggatcacgaggtcaggagttcaagaccagcctggccaacatggtgaaaccctgtctcaactaaagatacaaaaaaaaaattaggctggcacagtggtgcgcacctgtgagtcccagctactagggaggctgaggcaggagaattgcttgaacccaggaggcggaggttgcagtgagccgagattgcgtcactgcactccagcctgagtgcagcgggagagactccatctcaaaaaaaaaaaaaaaagaaaagaaaaagtgacaacctgcttacagagtactggcgagtttgtgggtgggtggctccctagccctgctgattcttgcttctcacactcatgtctgcccctgccccagtgcacatcttgtcactgtcggccccaccgatggggttcctactgagtcttctggtccctgatcccgtctgtggtcattttcctgccaggtagcttggccaggcctcccctggtgcagatttcatccttggtttctcagcctggccttgaatgaccctctacagcagggtccccacctctcagaacaactttgctccagccacatggcttgctcacggccaggcactgcccatgtggactctgtgcgtgccacctctttgccctgacccatgttgcctctgggggagcacttcttcctccaccttccatcatgggctgtggcagtgcccatcccatctgcccccgacgctgtctgctgcagtatggttgttgggggaaagggcaccaggctccggcgtctgacagccgtgttttacccaccttcctactcactagcttgtgaccttgggcaattacttaacatctctgagtcttagtttctgtttctaaaattgggtgaataacacctactaagtagggttggcctgaggattaatagtataatgtaaaagctggcagcactgaaaccctgccacttaccagcttttcacatcagtatttgggaaatattgttaagctcatttgtcaggcggggattctgaggctcagagcagttccagaactttctacagattattttgccttgtttgcgcttccagactgcctatcttcttgtatcaccattgatcttgatctgtatggtttttaatttttttttttttgagacggagtttcactctgttgcccaggctggagtgcggtggcatgatctcggctcactgcaacctccacctcctgagaagctgggattacaggcatgtgccaccacacccggctaatctttgtatttttagtagagttggggtttcactatgttggccaggctggtctcgatctcctgacctcgtgatccgccagccttggcctcccaaagtgctgggattacaggcgtgagccactgcgcccggccaacttcacgtttatacacacccatgcaaacagcatccagatagagacaaagagccttccctgtaccctaaaagtttcccagaaattgttcccagttagcatatttatttttataaaggtaatgcatgcccatcatataacattcaaaaaggtatgtagagaaccaagtgtctcccccagccctgtcctccagccacccagtttccctccctaggggaagccaccaatatgtgtttcttatgtatcccctgttgagctgcttttcctcgttttggtttggcggtgttgatgtttgtatttggaattacaggtaggcagcatcatataccttagtgtttagggcctctaagatcaaccagccctgagaaaatcagccatggtgaggaccttgtcccccagccccccaggagataggccccctggtgggagtgctggggcagggcagaggcctagggacaagaattagaaaggacccatgttgacagggctgctcagggtcatgttgtccatccctctgccacagtggcatggacaaactgcatatgttggttagaggagggcacccttctctcttgcaagcattggcaaggtcttaactattagtctcctgctcccatggcagcccctttggacaaggaggctcttaatctctgttctttgaagccctgagggctggtgtataggagttcaaagcactggctttggaaccggactgtctgggtttgaatcctggcactgcagctgactcactgatggactcaggcaatgccttaaactccctgagcctcaggttccttgtctgtaaaatgataaagatagcccctgtttcatagggctgtggtgagaaaccaatcagacaaggcatgtgaacgccattatagcacagcgcccggcatccagcaggactcactcgatgacagttgtcaccgccatcattgttattagcgtgggccagggagggctgcgtaaaagcagctggtggaggagggagagatgccgtgggaccgtctgggttcgcatgcgtgaagtattatctgggcctggagtgtgcaaggcacacatgtgtccttactgcatgtgttgtcacatatgtgcaatgccatgctcctgagcctttgattgcagacgtgtgggaagtgggccccgtccccacccccagtgccaccctgctctgcttctcttcccttgctgtgctctaaaacgagaagtacaagtgagttcccccaaggggtcggccgcgcctcttcctgtccccgccctgccggctgccccaggccagtggagtggcagccccagaactgggaccaccgggggtggtgaggcggcccggcactgggagctgcatctgaggcttagtccctgagctctctgcctgcccagactagctgcacctcctcattccctgcgcccccttcctctccggaagcccccaggatggtgaggtaagggcctgccacccacggtagacaggaggcaagggtgcctggtgcccacgggacccctcctcactgccctgcctgggccgcccaggtggtttcaccgagacctcagtgggctggatgcagagaccctgctcaagggccgaggtgtccacggtagcttcctggctcggcccagtcgcaagaaccagggtgacttctcgctctccgtcaggtaggtgggccccccgcaaccccgggcattttggccactctcttgtgccatccaggccctgaaccactcattcctggttccccgtggcagtgctgactccccgtctgttcccttgcccccaacccccacactccccatccctgtctgtgcccacccatgcccatgtgtgcccccacccaggacctcagccgatccctgccctcctgcctctactcctgcaccgactggcctcaccgcctggtgccctgcagggtgggggatcaggtgacccatattcggatccagaactcaggggatttctatgacctgtatggaggggagaagtttgcgactctgacagagctggtggagtactacactcagcagcagggtgtcctgcaggaccgcgacggcaccatcatccacctcaagtacccgctgaactgctccgatcccactagtgagaggtgagggctccgcacccccgccattcccaagcagggatgagccggctcccaccctgaacagccagggaggcagggagactggcagccggcgctgcctaccctccatcccctcccctccctgcaccagctggggctctcaatgtccctcctccctgctgtcctgggacctggtgtctcagagcctaacctaccaccctttccacctaaccccgaggaagccacagaaagctgcctcgccctactccgggagccctggccgctgcaacccaggtcccac

SEQ ID NO: 612 - DNA, 6000 bp, Homo sapiens
atagtcaagatctagaatgacgtaaagtgttgtgtttttttcacatatggagaatgccctgtgatagggttcttagacttgacaccaaaagcacagttcataaaaggaaagatgtataaactggacttcatcaagattttaaatttttgttctgtaaaaaatcttgttaagagaatgaaaagacaagctacagagtgggaagaaaatatttgcaaaccatatatctgacataggactagtatctggaatatataaagaactctcaaaaattaaacaataagaaagcaaacaatccaattaggaaatggacaaaacatgtgaagagacattttaacacagaaaatatacagacgacaaataagcacgtgaaaatatgttcaacagcataagccattcgtgaaattcaagttgaaaccactatgcagtattactacatatctatcaggatggctaagatgaaaaatagtgacaccaccaaattctgacaaggatgcagagaaactagatcactcatatgatgctggtgagaatgtgaaatggtggtgtttggaagtttcttagaaaagtaaacatgcaactgccatatgacccagcaattgagctcctgggtatttatctcagagaaatgaagacttgtagtcacacaaaagtttgtgcacaaatgtttatagcagctatattcataagagctcaaaactagaagcaatctagatgtccttcaataggtgactgcttagacaaaatatggtacattctatgcgatgttattcaacagtaaaaaggaacaaacttttgataaacacaacaacctagatgaatctccagaggattaggctgagtggggaaaaaagccaatcttggccgggcgcggtggctcacacctgtaatcccagcactttgggaggccgaggcaggcagatcacgaggtcaggagatcgagaccatcctggctaacacagtgaaaccccgtctctactaaaaatacaaaaaaattagctgggcgtggtggcgggtgcctgtagtcccagctactcgggtggctgaggcaggagaatggcgtgaacccgggaggcggagcttgcagtgagccgagatcgcgccactgcactccagcctgggcaacagagcgagactccgtctcaaaaaaaaacaaaaaacaaaaaacaaaaaaaaaagccaatctcaaaaggttgcctatgtatgatttcatttccataacgtttttgaaatgacaaaattctagaaatgaagagttgattagtggttgtcaggagttatggagggggtgggagcaggaagtcacgggttgtggctataaaatggcaagatgagggaactttatggtaacgaaaatgttctgtatcttgacagtatcaatgtctatatcctgattataacattgtgctattatatgctgttaccattggaaaaaaaatgggtaaacggtacacaggatcttgattatttcttacaactacatatgaatctacaattatctcaaaattaaaagttaatttttaaaaacaaattcagggcatacacatacaaaactaaatttatcttttataagttggcagggttctgctgatatagaccaggtggctctgctgaacttagctggcctcactcgtgtgtgctgctgatctaggctgggttcctccaggtcaactggagaatttgattctgtttcatgtatctgtcatcctcagcaggctggcctgggcatgttcttatggccatagctgaggtgcatgagaaaacaagctctagcttgggcgcagtggctcacgcctgtaatctcaacactttgggaggccaaagcaggtggatcacttgacgtcaggagttcgagaccagtctggtcaacttggtgaaaacccatctttactaaaaatacaaaaacttagccaggcgtggtggtgcacggctgtaatcccagctattcgtgaggctgaggcacgagaatcgcttgagcccaggaggcaaatgttgcagtgagccaagatggcaccactggctgggtgcagtggctcacgcctgtgatcccagcactttgggagactgaggctggtggatcacctgaagtcaggagtttgagaccagcctgaccaatatggtgaaaccctatctctactaaaaatacaaaaattagccagacatggtgacgtgcgcctgtagtcccagctacttagaaggctgagacaggagaattgcttgaacccgggaggcagaggttgcagtgagccaagatcgtgccactgcactctagcctgggcaacaaagcaaaactccatctcaaaaaacaaacaaacaaaaaaaaatcacaccactgcactcctgcactccactctgggtaacagagtgagacaagacgagacaagacaggacaggacaggacaggacacgacaggacaggacaggacaggacagggaaaggaaaggaaagaaaaggggaaagggaagaagaaaacaagttctcgtggacaaacctctctacagcccaaatttgagtcacggcttttacacactaatgacaaaagcaagtcacatgattgagcccagaaccaggggacagggcaggtcattcatgcatggtgggagggcactgtgaagttacgtggcaacaggcatgaatatggggcagaggaggtgaaaagctggggtcaaggactctaccaccatccttgaacacctccaggactaaaaatacctattgcggctttctcttcttactgcagtaactcttacccactcccccactctacctgcctcatccaagtgagggggaaatgaaaggaagaagaggaaacagagcattgaaaatgtgtgcctctgtgtgtgtctgtgtgtctgtgtgtgtctgcgtttgtgtctatctgtgtctctctgtgtgtctgtgtctgtgtatgtgtgtctgtgtgtatgtctgtgtatctctgtgtgtctatgtgtgtgcctgtgtgtgcctgcgtgtccgtatatgtatgtgtttgtctctgtgtctgtgtatctgtgtgtctgtgtatcagtgtgtgtgtgtctatcagtgtgtgtgtctgtgtatcagtgtctgtgtgtctgtttgtgtatctgtgtgtctgtgtatctgtgtgtgtctgtgtgtgtgcctgtgtgtgtctgtgtatctgtgtgtctgtgtgtctctgtgtgtggctgtgtgtgtctctgtgtgtgtgtgtacctgtatctgtgtatctgtgtgtgtgtctctgtgtgtgtctgtgtgtgtgcctgtgtgtgtctgtgtatctgtgtgtctgtctctgtgtgtggctgtgtgtgtctctgtgtgtgtgtctgtgtttctgtgtgtgtctgtgtatctgtgtgtatgtctgtgtatgtgtgtgtgtgtctgtgtgtgtctgcatgtgtgcctctgtgtgtgtatctgtatgtctgtgtatgtgtccctgtgtatgtgtctctgtgtatctgtgtgtctctttgtgtgtgtctgtgggtatgttgtggaaatccttggaaatctcctatttgtgggaactgaatccccagcactgccatgtaaatatttttccctctcatgggccactgtggccattgtccattgtttcaaagaccctacaacaggatctgagtttccctttgccaaaagacaggtcacagggaagggaacacagctgacccttgaacaatgtggggttagggatgctgacccccacgtcgtcaaaaatccgcgtataacttttgattcccaaaaaaggagtcaggctgatgtctgcccaatattctactgaacttaactaccaagagcctacagttgactgggaaaccttgctgataacatagtcagttaactcatatttcgtgtatgaattatataatgtattcttacaataaagtaagccaaagaaaagaaaatactattaagaaaatcatgaggaagaaaaatatttcctcttcgttaagtgcaagtggagtttcatgaaggttttcatccttattgtcttcacactgagtagggtgcggaggaggaagcggaggggttattcttgctgtctctgggtggcagaggcagaagaggcggaggaagtaaaagggaaggcaggagaggcagacacactcagtgtagcttgtactggaaaaaacctgtgtataagtgaacctgtgcagttcaaatccgtcttgttcaagggtcaactctctataacgtctacaaatgtcctaccctgcgccaggctgcctctgccccaatctttattccatcttctgccccatctctgactctcttctcacctttacagttttctagagtccttgttcctttcctagcacgcacccagactttatgttatgagaatccctgtccaaagccactgagagcagtctctttgcctccgtatcttcattagtaaaacatgggtatcagcagtgcccacctcacagcgttgatgtgaggatgaagcgacatgactgataatgagtttacactgcccggtatgcggtgattcctcaataaattgcaggatgtgttttttcttttcttttaatatgggggtaggggctgcccagtctcactgcagacagctaaaggaatcgcagcaccaggcgcgatggctcacgcctgtaatcccaacactttgggaggccgaggcgggtgcatcacgaggtcaggagttttgagaccaacctggcaacatggtgaaaacccatctctactaaaaatacaaaaattagccggacctggtggcgagcgcctgtagccccagctactcaggaggctgaagcaagagaatcgcttgaacccgggaggcagaggttgtagtgagccgagaccgcgccaatgcactccagcctgggcgacagagcgagactccatctaaaaaaaaaaaaaaaaaaaaaaaaaggaatcccagcaatccaaggcggaattctagaaatagtttcccgtagaaacaccgttctacactgcagtcttattctatcccactattattactcccaaagattctaaggtcccagtgctttcgcttcatcctagaggctaaatgggctcccctggactcgcctggcagaactaaccacctagaagaacgttattgtaagggggaaatgtgagtgctacataagtttcttataaatgtgcttttgaaatagagtccactcttaagtttgatatttcctaaaatttaatgtgtgaaggaagatgcttgggagacaatccgtttatcaggctgatatatggcagatagtctactgacctccctgagcaagaaccttaggaatgaggccaggtggcagaaacactcagggccaagggtagggagcaaaactgtgatgtaaagagacctagatggacttgggaggaggtggggttcaataggaggccacgactaatgccctggcatgcaaaggctggacaggagtcttgaaagagcctcaattagctgggcgtggtggcgggcgcatgtagtcccagctactcgggaggctgaggcaggagaatggcgtgaacccgagaggcggagcttgcagtgagcctagattgcgccactgcactccaacctgggcgacagagggagacaccatctcaaaaaaaaaaaaaaaaagaaaagaaaagaaaagaagaaacaaagagcctcaaaaatatggaaaaccagatcctaagagcaaaatgccaagggggacacttattagtgaggagtctgcaaaaacagaaaggttttagccagaagcttataggagtagacctggaacccaaattgaaaaggaacagtgcgacccgtaatttgagaaggaaatagaataggcagaagaactacagaaactatagcttcgagtctaagagcctatttacaggggtgtccaatcttttggcttccctgggccacactggaagaagaattgtcttgggccacacataaaacacactaacactaatagctgatgagctaaaaaaaaaaaaaaaaaaaagaaaagaaaagaaaagaaaaaagaatggccgtgcataaatctcat

SEQ ID NO: 613 - DNA, 6000 bp, Homo sapiens
ttagtagagatggggtttcgccatgatgaccaggctggtcttgaactcctgacctcagatgatccacccacctcggcctcccaaagtgttggaattacaggcgtgagccaccgcacctggccgagagtttttcttgtgtctgcttcatcttcattgccttcagctcaaaatgatcttaaggttaaagtgttgtactttggggagtggcatgttgaccccttcacagatgttcttcataatgaatagtgcttctcctctgctccgtttcccaaatctttcatttcaaccagtcacagccttttattgctccattccaactctgatcctatttcattgagtttcatcattgatatcaaaacaaggataaatgtcaaaccccagagtaatctggtgtccactctaaaatctgctcatctggcctttcaagtcttctttggttactcagtgatgggcaaaaaccccaacgttttcctgaggatgggctttttatctatattattcaaactcttaggcatttttatctaagatatatttccagtgatgatataaatcaattccagaatcatagattaaagtgaattcaaagcatatataacaatttcaaaaatattcatacccaataattccactctcaggcatcatttctcaggaaacaatagaaaatgtgagcaaagatgaaaagctctaccctgcagcattatttgtaacagtaagcacttgaagacaaacaaaacattattattattattttttttttttttttttgagacagagtctcgctctgtcgcccaggctggagtggcgcaatctcggctcactgcaagctccgcctcccgggttcacgccattctcctgcctcagcctcctgagtagctgggactacaggcgcccaccaccatgtctagctaattttttgtatttttagtagagacggggtttcgctgtgttagccaggatggtctcgatctcctgacctcgtgatctacctgccttggcctcccaaagtgctgggattacaagcatgagccaccgcacctggtgacaaacaaaacatttaaaaatagttggctggctgattatttgatttgatttgatttttattttgatttttttggagactgagtctcgctctgtcacccaggctggagtgcagtggtgtgatcccagctcactgcaacctctgcctcctgggttcaagtgattctcctctggatgaatatttttagtgctatcattcactggaatgatgtcgccactaaaaaattttatttacaaaataagtttattagaagttatgatggctggacgtggtggctcacacctgtaatcccagcacttttgggaggctgaggcagacaaatatcttgagctcaggagttggagaccagtctggccaacatagtgaaaccccgtctttattaaaaatacaaaaatgagccaggcgtggtggcacatgcctgtaattgcaactactctggagactgaggtgggagaatagcttgaacccgggaggcagaggttgcagtgagccgagatcgtgccactgcactccagcctggggaacagagtgagactctgtctgaagaaaaaaaaagaatcatcctgactttccttatagagagggggagggcagagagtttgtcctgtgtctcctttttctcaaagaaaagaagggacgtccaccaaatttttagcagcatttcccactgaatgactgcattatggcaatccttattatgaccctgttttacgagttttctacaacagcatgtctatgtttacaatcgggagaaaagtggtttttgcttttgctgtttaatatctaacatgtgttgtgacctgtccctggccaacttgttaggcgtggagataacatagttgaatgagaggtggacagttgctctcctcagcttccgtgtggggtttgccccttccctgtgttaatagttgctttaccaaaacctttcaggactttttttttttgagacagggtctggctctgtcacccaggctgagtgcagtggtgccatcatggctcattgcagcctcaagcccccggccccctgccaggctcaagcaatcctcccgcctcagtctcctgagtagctgagactacaggtgtgctccaccacgcccagctaactttttatttttttgtagtgatggggttatcaccatgttgcccaggctggtttcaaactccaggacacagtctgtcctcctgcctcagcctcccaaagcgctgggattgcaggtatgagccactgtgcatgaccaagactcttcaggatcctaaatggtttcagcaacaaacattgtttagttatgtaactcagaactccagtatggacatactatgtgatgtgattttattattgcttatatgcttttgtggttttattgtttgtttttctgtttgtttgttttgagacagggtttttgtttttgttttgagacagggtcttactctgtcacccaggctaaactacaatagcatgatcctagcttgctgcccccttgaactcctaggctcaagcaatctttctgtctcagactaccaagtagctaggactacaggcatgtgccaccatgctatgttgtctggctggtgttgaatacctggtctccagtgatcctcccacctcagccccctgagtagctagcactacatgcgtgagtcatgcctggctaattaaaaaaaaaaaaattaagagatggggtcttactatcacagcgtgaatcccaaaattggggttcagtctgggaggccacatgggttcttggcttcccacaagaaggaattcaagagtgagccaacaaagtaaaatgaaagcaaggttattaagcaagttaaggaataaaaggggggctactccataggcagagcagtggcatgggctgtttgattgagtatacgggtattccttgatcatatgctaaacaaaaagtgaattattcgtgagttttctgggaaaaaggtggggagttcccagaactgagggttttcccatttcagacaatatagggtaacttccagacattgccataacatttgtaaactgacatggggctggtaggagcgagtgtcttttagcacaacagtgcattatcattggcatataatgagctgtgaggacgaccggaggttgctttcatcgcatcttggttttgatagatttgggctgctgctttactacatgtcattttatcagtggtgtctttgtgacctgtaccttgcaaaccagtcctgaagaactcttgtctcatcactgtgttgtccaggctggtcttcaagtgatcctcctggcttcagagtgatcctctcacctcagcatcccaaaatgctgggcttgcaggcttgagacactgagccagaccctgtttattcttgaattgtttccagtgaatatatctcatcgtctccccccaaaaaaaggttgcaagtttttggccaggcgcggtggctcacgcctgtaatcccagcactttgggaggtggaggcgggcagatcgggaggtcaggagatcgaggccatcctggctaacacggtgaaaccccgtctctactaaaaatacaaaaaaaaaaaaaaattatccaggcttggtggcgggcgcctgtagtcccagctacttgggaggctgaggcaggagaatggcgtgaacccaggaggtggagcttgcagtgagccaagatcgcaccactgcactccagcctgggcgacagagcaagactccgtctcaaaaaaaaaaaaaaaaaggtggcaagtttttataaaaagagaaaaatcattcttagtatttctttaataccctctacattgacctcactggtgcaaaaaatattagtttgctggtgaaaattcacctcgagttactaaatatctaactttcccataactaccatctgtttgtctcttgtggatctgtttgcctaatatttaaatgacccattcttccccacttttacgaaaatagcattaattcccctttcactattcacacttccttcatcgtcacagtttgaccagcggtccagggtttatgatctcaagcatggccatatatatctatttcacttaagactctggaaagagcataaaatcagatgtaactgtttcctatttcatataatagggaattccatctctaaagttatgacatttggcctttcagtgggtttttgtggtttttactatggctgtgcttagattcctttttgaacacttttccagtggttccacttgaacacaatctttgagtcacataggagaggtgacatgatagagtgtaaagccagaaagagcacgatttggatctcagctcaactgatagggatccgtagcaagatacttcacctctctgagcctcagtttcctcatctgtgcaatgggaatcgtaacgcctgcctctcaatgttgttaagattaaatatgttggccgggcgcagtggcttacgcctgtaatcccagcactttgggaggccgaggagggcagaccacctgaggccaggagttcgagaccaacatggtgaaacccctgtctctactaaaaatacaaaaattagccaggcgtgctggtgcaagcctgtaatcccagaaactcaggaggctgagatatgagaatcgcttgaacccaggaggcggaggttgcagtgcgccaagatcgcaccactgcactccagcctgggcaacagagtgaaactctgtctcaaaaaaaaaaaaaagattaaatatgtgtacagtacctgtaccatgttaggcggtcagtaaacatttgtttaactaacaactgataaggatagtaaagaagtatcagaacacccacctagttatcccaaagggcaggaagagtgctaggtaatggatatagaattccttttagagtcaaattacacgggcaaagatcagcccctccttcaattaaaaagccaggggcagggcgtaataaggaagtggttctccttctttaagcctcttttcaggctgagtcctaaacctgaagaaagtttagagcctggggctctaaactacctgagtctttccaaacgacaagccaagaagacctgttgaaagtttcctcttaagtttcgtggagagagactcaggtatagaaatatccttactgccacctgacctgaagcagaagaaatcacagacagcttccagaccaggtaacaccaggaggcaccagtcttcatcctcagcctttgcaggaggacacagcctggtctttagctgtttgccaaatgaggcagtctaattcagggagctctttactgggtttattacaaagttcttatcatgtaagtctcaggacacaaaatgacattgagaatctagtttagcggggtttccaggaaagacgaagaaaggttatttaggtttctctttcatttctcttttgctacaaagggtttgggacattcagttaagaacacattactggttgaggtatgtgacgttactcagtcttctctgcttatgtatctggggaggtatgcaatgacatgacagccattccgtggccagggacaccactgcccaagctggagaccacgaggattcagggactgaagccagcatgggaattcctggtttgagatcagagtcctgagtacctcgtgggaacttgggcactcatccgcaggaggtctagacccccagagaattccttgagtctaaggcacaggtaaatggaagacccttctctctcctctctcccctctagaaagctccctcctccctgagctccctgtccccttctttccacaatcagagcctcggaccttctgtttggtgaatatgacctgaggctctgtctagcattcagcttctattgtgggaagttaaggcactttctctcattcctcatttcacctttagtattaaagaacagtccaggcagaaggcacgaagagcctgagaggtctgaagtgagggggagaggagaggggcagaaggggaggctccggacaacagaaccaagctgagcttaggatgtg

SEQ ID NO: 614 - DNA, 6000 bp, Homo sapiens
tcaaactcttaggcatttttatctaagatatatttccagtgatgatataaatcaattccagaatcatagattaaagtgaattcaaagcatatataacaatttcaaaaatattcatacccaataattccactctcaggcatcatttctcaggaaacaatagaaaatgtgagcaaagatgaaaagctctaccctgcagcattatttgtaacagtaagcacttgaagacaaacaaaacattattattattattttttttttttttttttgagacagagtctcgctctgtcgcccaggctggagtggcgcaatctcggctcactgcaagctccgcctcccgggttcacgccattctcctgcctcagcctcctgagtagctgggactacaggcgcccaccaccatgtctagctaattttttgtatttttagtagagacggggtttcgctgtgttagccaggatggtctcgatctcctgacctcgtgatctacctgccttggcctcccaaagtgctgggattacaagcatgagccaccgcacctggtgacaaacaaaacatttaaaaatagttggctggctgattatttgatttgatttgatttttattttgatttttttggagactgagtctcgctctgtcacccaggctggagtgcagtggtgtgatcccagctcactgcaacctctgcctcctgggttcaagtgattctcctctggatgaatatttttagtgctatcattcactggaatgatgtcgccactaaaaaattttatttacaaaataagtttattagaagttatgatggctggacgtggtggctcacacctgtaatcccagcacttttgggaggctgaggcagacaaatatcttgagctcaggagttggagaccagtctggccaacatagtgaaaccccgtctttattaaaaatacaaaaatgagccaggcgtggtggcacatgcctgtaattgcaactactctggagactgaggtgggagaatagcttgaacccgggaggcagaggttgcagtgagccgagatcgtgccactgcactccagcctggggaacagagtgagactctgtctgaagaaaaaaaaagaatcatcctgactttccttatagagagggggagggcagagagtttgtcctgtgtctcctttttctcaaagaaaagaagggacgtccaccaaatttttagcagcatttcccactgaatgactgcattatggcaatccttattatgaccctgttttacgagttttctacaacagcatgtctatgtttacaatcgggagaaaagtggtttttgcttttgctgtttaatatctaacatgtgttgtgacctgtccctggccaacttgttaggcgtggagataacatagttgaatgagaggtggacagttgctctcctcagcttccgtgtggggtttgccccttccctgtgttaatagttgctttaccaaaacctttcaggactttttttttttgagacagggtctggctctgtcacccaggctgagtgcagtggtgccatcatggctcattgcagcctcaagcccccggccccctgccaggctcaagcaatcctcccgcctcagtctcctgagtagctgagactacaggtgtgctccaccacgcccagctaactttttatttttttgtagtgatggggttatcaccatgttgcccaggctggtttcaaactccaggacacagtctgtcctcctgcctcagcctcccaaagcgctgggattgcaggtatgagccactgtgcatgaccaagactcttcaggatcctaaatggtttcagcaacaaacattgtttagttatgtaactcagaactccagtatggacatactatgtgatgtgattttattattgcttatatgcttttgtggttttattgtttgtttttctgtttgtttgttttgagacagggtttttgtttttgttttgagacagggtcttactctgtcacccaggctaaactacaatagcatgatcctagcttgctgcccccttgaactcctaggctcaagcaatctttctgtctcagactaccaagtagctaggactacaggcatgtgccaccatgctatgttgtctggctggtgttgaatacctggtctccagtgatcctcccacctcagccccctgagtagctagcactacatgcgtgagtcatgcctggctaattaaaaaaaaaaaaattaagagatggggtcttactatcacagcgtgaatcccaaaattggggttcagtctgggaggccacatgggttcttggcttcccacaagaaggaattcaagagtgagccaacaaagtaaaatgaaagcaaggttattaagcaagttaaggaataaaaggggggctactccataggcagagcagtggcatgggctgtttgattgagtatacgggtattccttgatcatatgctaaacaaaaagtgaattattcgtgagttttctgggaaaaaggtggggagttcccagaactgagggttttcccatttcagacaatatagggtaacttccagacattgccataacatttgtaaactgacatggggctggtaggagcgagtgtcttttagcacaacagtgcattatcattggcatataatgagctgtgaggacgaccggaggttgctttcatcgcatcttggttttgatagatttgggctgctgctttactacatgtcattttatcagtggtgtctttgtgacctgtaccttgcaaaccagtcctgaagaactcttgtctcatcactgtgttgtccaggctggtcttcaagtgatcctcctggcttcagagtgatcctctcacctcagcatcccaaaatgctgggcttgcaggcttgagacactgagccagaccctgtttattcttgaattgtttccagtgaatatatctcatcgtctccccccaaaaaaaggttgcaagtttttggccaggcgcggtggctcacgcctgtaatcccagcactttgggaggtggaggcgggcagatcgggaggtcaggagatcgaggccatcctggctaacacggtgaaaccccgtctctactaaaaatacaaaaaaaaaaaaaaattatccaggcttggtggcgggcgcctgtagtcccagctacttgggaggctgaggcaggagaatggcgtgaacccaggaggtggagcttgcagtgagccaagatcgcaccactgcactccagcctgggcgacagagcaagactccgtctcaaaaaaaaaaaaaaaaaggtggcaagtttttataaaaagagaaaaatcattcttagtatttctttaataccctctacattgacctcactggtgcaaaaaatattagtttgctggtgaaaattcacctcgagttactaaatatctaactttcccataactaccatctgtttgtctcttgtggatctgtttgcctaatatttaaatgacccattcttccccacttttacgaaaatagcattaattcccctttcactattcacacttccttcatcgtcacagtttgaccagcggtccagggtttatgatctcaagcatggccatatatatctatttcacttaagactctggaaagagcataaaatcagatgtaactgtttcctatttcatataatagggaattccatctctaaagttatgacatttggcctttcagtgggtttttgtggtttttactatggctgtgcttagattcctttttgaacacttttccagtggttccacttgaacacaatctttgagtcacataggagaggtgacatgatagagtgtaaagccagaaagagcacgatttggatctcagctcaactgatagggatccgtagcaagatacttcacctctctgagcctcagtttcctcatctgtgcaatgggaatcgtaacgcctgcctctcaatgttgttaagattaaatatgttggccgggcgcagtggcttacgcctgtaatcccagcactttgggaggccgaggagggcagaccacctgaggccaggagttcgagaccaacatggtgaaacccctgtctctactaaaaatacaaaaattagccaggcgtgctggtgcaagcctgtaatcccagaaactcaggaggctgagatatgagaatcgcttgaacccaggaggcggaggttgcagtgcgccaagatcgcaccactgcactccagcctgggcaacagagtgaaactctgtctcaaaaaaaaaaaaaagattaaatatgtgtacagtacctgtaccatgttaggcggtcagtaaacatttgtttaactaacaactgataaggatagtaaagaagtatcagaacacccacctagttatcccaaagggcaggaagagtgctaggtaatggatatagaattccttttagagtcaaattacacgggcaaagatcagcccctccttcaattaaaaagccaggggcagggcgtaataaggaagtggttctccttctttaagcctcttttcaggctgagtcctaaacctgaagaaagtttagagcctggggctctaaactacctgagtctttccaaacgacaagccaagaagacctgttgaaagtttcctcttaagtttcgtggagagagactcaggtatagaaatatccttactgccacctgacctgaagcagaagaaatcacagacagcttccagaccaggtaacaccaggaggcaccagtcttcatcctcagcctttgcaggaggacacagcctggtctttagctgtttgccaaatgaggcagtctaattcagggagctctttactgggtttattacaaagttcttatcatgtaagtctcaggacacaaaatgacattgagaatctagtttagcggggtttccaggaaagacgaagaaaggttatttaggtttctctttcatttctcttttgctacaaagggtttgggacattcagttaagaacacattactggttgaggtatgtgacgttactcagtcttctctgcttatgtatctggggaggtatgcaatgacatgacagccattccgtggccagggacaccactgcccaagctggagaccacgaggattcagggactgaagccagcatgggaattcctggtttgagatcagagtcctgagtacctcgtgggaacttgggcactcatccgcaggaggtctagacccccagagaattccttgagtctaaggcacaggtaaatggaagacccttctctctcctctctcccctctagaaagctccctcctccctgagctccctgtccccttctttccacaatcagagcctcggaccttctgtttggtgaatatgacctgaggctctgtctagcattcagcttctattgtgggaagttaaggcactttctctcattcctcatttcacctttagtattaaagaacagtccaggcagaaggcacgaagagcctgagaggtctgaagtgagggggagaggagaggggcagaaggggaggctccggacaacagaaccaagctgagcttaggatgtgctgtgggaggctccgtggggatgagtgtcagtgcccacgagatccactcaggcctcaactgtgtgtcctgagcacatgaagtcagctcttctgctgggacagccaccaagggattctccacacccctcaccgctgggacaggcagaggcacagcgaaccaggtgtccagcgtaactggggcactgggtggtggccgcctctgtgtgtggaaacacgaggtgcttgctgcagtttcctctgtgtgcttatccgttagctgccacccaccgggagggaagtgaaatctcacctcaacaagtgagtccgcagagcgagaaccgtgcgacagtgcgtctgccaatacctggaatgtaggtgttcgttgcagtgtggccttcccagccggcctctcagcacacccggccaggcagccagtgttcccagaggacacgctggggccagacgtggaggaccccggccacctcggggagggaaagagaccaagaaaagaacctctgta

SEQ ID NO: 615 - DNA, 6000 bp, Homo sapiens
agctcagtcagtagagcatcaagcgctactctaggtgctggggaagccagccaaagtcccgccttcatatcttacagtatgtctactttgtttttatatacatgtacactatatatacttgaagatatgtacctttttctttttttctttttattatttttttttgagacagagtctgactctattactcagtgcagtggcaccatctcagctcactgcaacttctacctcctgggttcaagtgattctccagcctcagcctcccaagtagctaggattacaggcatgtgccaccatacctggctaatttttgtatttttagtagagacaaagtttcaccatgttggccaggcttgtcttgaactcctgacctcaagtgatctgcccacctcggcctcccaaagtgctaggattacaggcgtgagccaccgcgcccagcccagatatgtactttttaatggcaatgttaccacatttaatgagattatctttttaaaaaatgttttaatttttaaattttaaaaaatagggatgggatcttactttgttgcctagactggtctccaaatccaggtctcaagtgatcctcccaccttggcctcctaaggtggtgggattacaggtgtgagccacggtgccagccaagatgatcaatacttccttaatatcatctaaaacatacactgtactgtgtttagttctctatcatctcaaagatatctacatctttatacagtatgtttgaattacgatttaataaagatccactcatgacatctaattgatgtctctttttttttaatatgtttcttttttttctttttatttatttatttatttttgagacagagtctccgtgtgtcacccaggctggagtgcaatggcgcgatccccgctcactgcaacctttgcctcccaggttcaagtgattctcctgttgcagtctcccaactcactggaattacaggcacctgccatcatgcccagctaatttttgtattttttttagagacagggtttcaccacgttggccaggctgctcttgaactcctgcctcccaaagtgctgggattacaggcgtgaacgattgtgccctgcctgatatgtttctattctttctttctttctttctttcttttttttttgagacggagtttcgctgttgttgcccaggctggatgcaatggcgtgatctcggctcactgcaacctccgcctcctgggttcaagtgattctcctgcctcagcctcccgagtagctgggattgcaggcatgtgccaccatgcctggctaattttgtatttttagtagagacggggtttctccatgttggtcaggctggtctcaaactcccgacctctggtgaactacccgccttggcctcccaaagtgctaggattacaggcgtgagccatcgtcccctgccggatatgtttcttatgtctcttttaagctgtagcagttctctgtcttcacctttttttggcgccatttatttgttgaagaaaccggccatttgtcttgcagaacttaccagatactgaatttggatagctgccttcttgtggtcattagtttatttctctgtcccctgtatttcctgtaaactgatcattagatccagaggcttgatcagattcggatccaatgtttttggatcaggagacacataatggttgtctcacctttagtgagaccaagattggtcattgggaacagggaagtggagctggggtgagtatagggtcaccagatgtccagtacaagcagaatggacagggctgtgctgcaggatggatgaggggagggtgggatgcccggaaaatgcatgggggagggtgggatgcccggaaaatgcatgggggagggtgggatgcccggaaaatgcatgggggagggtgggatgcccggaaaatgcatgggggagggtgggattggatggaattggggagcgggaaggggtaagtggaaaagcagtaaggaacatgaccttcgaggagacactgacgtgactccttacagagcaaacgatttgcatgtaagtgaaatgcatgtaagtgaatgtgaaattggagcagtggcgggaagaaagattgtccaagccctggaataagacaggaatgtgaagaaacagcagaggaggaggaaggattgcagtcatgacccccacttcatgccatactcctcaagcatttgcttacatccagttatgtgagggaggtttgcggggcttggaagttgtataattgtatctgtgtagttggtctggtgggttttgcaacttgccctttgctgcactgggagggccatttttgtcccctccagcatcacctgatgttgcagcatagcccgctgcatccctcccaggctcacttccatcagaacgcacctagccagggacccttgctttcctggggcctggccaaggagcagttcctcagatcaacagcttcgctatcagccaatgtgagcctcttctaagtaaaggagaggagacagtgatggaaaaaggcagcatccagcaggccctcaggggagatatttcagctcctacacctccttccaatagcagaaccagggggaaaagttagagaatatccttattctatctaacaacttggacaccgaggaacaaaaaggtggcgtgacttgcccaaggatgttgcaggttagaagctgagccagccgtggctatccatccttcagacacccaggccaacttgtctgtaccacctcacattgcctcaaaccctgtctgcagttactgtcccatttctttatcatttggtcctggtatgacaaggtacagtggaaagaaaaagaggaacatgccagccagtccccttaatattactgcagcttctttatcatcacagcagcttacatgccgaaagaccgtcttaaattaggaccagaaagggaagggaacattattaagagccatattaagacagagcctgaggccgggcatggtagctcatggctgtaatctcagcactttgggaggctgaggcaggtggatcacttgagcccaggagtttcgcaccagactgggcaacatagcgagaccttgtctctaaaagacaaaacaaaaaaattagccaggtgtggtggcatgtgcctgtgttcccagctacttgaggggctgaggtgagagaatcccttgagccggggaggttgaggctgtggtgagctatgatctgcactccagcctgggcaacagagcaaaactgagtctcaaaaaaaaaaaaaaaaagagagcctggggcctaggacaacagctgaactagaaaaaaaacatagctaccacttttgaaccaggttctgtgcaggaacttctcttgtgtatcttacacccttacaatatccctgcaagatgactattattatttacaatttgcctgcaggaagttcatgtttggagagatggagtaacctgccacaggtcacaaaactagtcactggcatggccacaatctgaatttgggactgttagactgagaagcccaagctaattcttgatacgctcactgcctgggacatttcacacggtagatctgagctttctcgcatctgagactaaaaggaaaatgtagtccttaacagacagcagaaggaaacagattattagcaaaaagaactgctttcctagcaggaaaccagagaaggagttatttcatgtaagctcaagcaaaggaaattgaacaaaatcagttctttatctatcctgttattcgtatggaaataaagaagaaatgcttgcatcctgttgttttagtgcttgtactgatctttttcaaacatgcctgtgatcacatcactctctactcaaaactttgaacagctctccattgcctccatcagtgtgtttcaaattcgtaaaaagtaaaataaaataacaggatgcttttttcagatgaaatcttacatggcataccaaatatagcaagaaaaaagaaagagagagagagaggagagagaagccgggacaagctaaagcagagggtagagggagaaggaaccgaggaagggaagggtcaggtcccaggcatttctcttccctgaattggcctccctcttttgccacctccccagcaagacctttaactccacagtccacagctcattttgaaatgtactgatcaacgtgagaaaatgcgaagcttcagcctgatagtcaaagaccaccataatctggacccaagtgctagttcacttattttccctccactattttcaagccctggctatttgcaaactgcatacgtatgctgtcccagttctctcaccactcttcaaacacattctgaattcacctataatctcccctctgcccgccctgttgtagccccaatatccacccacctgtctaactccttctagctttccaaaagctttcacttgcctctttctttgaagctcacctatccctgccttctaacctggctatctgcatctctgttagacctcttacttagttcattagttcattctctctctgttgttttttgttttttgagacggagtctcactctgtcgccaggctggagtgcagtggcgcaatctcagctcactacaacccccgactcctgggttcaagcgattcttctgccgcagcctcccaagtagccgggtctacaggcgtgcgccaccatgcctggctaatttttgtatctttagtagagacgggctttcactgtataggccaggctggtcttgaactcctgacctcatgatctgcccgccttggcctcccaaagttttgggattacaggcgtgagccaccgcacccggcagttcattttctttatgtggagttatctatggccatgtctctcttcccaccctagtaagactgtggcttttccctctctaccctccagcacaaacacaatagatgttcaataaatgtttcctgagttttcacccctgtctctcctaacctgcaaagggtaagtggccctgcatagaagggcacagtgtggactttgttgttacaggcccaacatgtgtagcaccagtgggtgtgacctggaagaaatccccctagatgatgatgacctaaacaccatagaattcaaaatcctcgcctactacaccagacatcatgtcttcaagagcacccctgctctcttctcaccaaagctgctgagaacaagaagtttgtcccagaggggcctggggaattgttcagcaaatgagtcatggacagaggtgtcatggccttgcagaaattcccaatccagtgagaaggccataaaccttggcaagaaaaagtcttcttggaaagcattctttggagtagtggagaaggaagattcgcagagcacgcctgccaaggtctctgctcagggtcaaaggacgttggaataccaagattcgcacagccagcagtggtccaggtgtctttctaacgtggagcagtgcttggagcatgaaggtaggcatctgggatttctttctctcccgcttcctggtttttcccttctttgtgtccagagtggtacatctcttctcatgttgtaaagtggctttagagaaggcatgcgttgtgcctcagctttccaacttattagtgttcaatcataattgccctgcttttctcaagactaaaaggagttgctgcctgggcgcggtggctcacgcctgtaatcccagcactctgggaggccaaggcgggtggatcatgaggtcaggagattgagaccatcctggctaacacggtaaaaccccgtctccactaaaaaatacaaaaaattagccgggcgtgttggcgggtgcctgtagtcccagctactcgggaggctgaggcaggagaatggcgtgaacccagcaggcggagcttgcagtgagccaagatggcatcactgcactccagcttgggtgacagagtgagactccgtcaaaaaaaaaaaaatgactaaaaggaaatgatggaagttaagggtgctgggactggttttctttctccactgtctataaataagcttgtttcccaaa

SEQ ID NO: 616 - DNA, 6000 bp, Homo sapiens
aatagttaacaagagatgttctctttcattgaagaatttcaactaataaatgacaaatgaatgacagaattagactagcactatttttcaacccctaataaaaaggatttcaggcaattatcagcaaagattgctaaaaccagtaaatgaaaggctgatagagaactcagaatgaacaacttgcctgctatctgaacccactgatcatttttaacctcataaaagatattatgtaccccttgatataatgcaataggaaataaacagcatcacgtgagacatattcttaccaaaataatggaagccgaatcatatcaagcctctagaccaaactacaagtatagaggaaatgcaaatgagaaaggaacgtgttaaatgataccacacgtatgccatcagcaaaatccaggatgtgggaaattctacacaacaaatgcccccattttttaaatatcagtaatgtgaaaaataacggacagaaaattgtaaattaaagagtcacacagagcaaccaaatgcaatcttgtttagatcctgaatccaacaaaccagttaaatttttttttttgtagacaactggaaaacgtgaatgctgaatgaatatttatattaaggaattcccataaattgtatgtttagatgggataatggtttcagagctatgttctataaaatgtccttatcttttatagcactaaaaaatgtacagttaaaattatgtgatctctaggatttgttttaaataatacagtgggaggtgggaggaaagtaggtaggaatatagagtgagcaagatagatcatttgttgataattgttctaattttatatacatttgaaagttcccaaaagaaacactttaaaatgtaaatagaaaaaagatgtacacctaatattgatataattcaaaaaatttattaaactattttacgatagtgatagagaagaaaagtgaggagagctgaatcttcttcttctaatatgggatatcaacatataaaatgtaaatttaataaatcaagagtgtccagagaagtaaatatttttgaaatgtagaaacagctaaaataaagaaatgtagaaacacctaaaatagttaaaactgtgtggagagcaaaatttatgggtgggcagaattaaggcaaggaactactgtgtttattattagtcttctaataccatttgaacacatacaaatttgataaaatgtaaaaattatttttaaaatgatatataaaacatcttttacttttaaaatgtgataggaagaagattaatacatattatgaattatatcctgacactcatgtttatcttcaatctcttctcatttcttccctttattcatgtcattgtcaaagcatgttatgattatgaatatgacttggagtcatttacttctctaactcctcagcaaccaccctggtctaaggcctcatgatctcactgacatcgtctgctaatagatttcctgtttttactcttgccaccctctaattcattccacaaatatcctgggacaggcagatgagaatttgtctttcactctgcacttaatagctctttcaccttaagcaagtcacttatgttctttgaatctcagtttcactatctataaattagagcagatgataaccaccgtagaggtgtgaagatgaagtgagatatcacatattattccacatccagactgatgttttaaagttgcgggacagtttttctccaactgtagtgtgtatgcaattgctaaggaaagatcatttttgaaatgcagattttgatagagtggatccaaggtggggcctgagattctgcatttctaataagctcccaggtgatgcaaaagctgccagcacctcattcacactttgacttagcaaggctagaggggataccaagataagtgacagtgatgcttgtcctttagaaaggagattatgcccttgtaaagataatctaaatatccacataccttcactttcattagtgctacagggagcatgtaaactctgaagctatttgagattgggatagatgttgattttactaaacattatacgagacagaccagcataaggtcacatctggctataacaaaatcattcaaggtgttgtaacaagatatacaacttagagaaagcaattagcaatttagaatatgaaaatatagatcatttttaacaaaaaaacaaatatcctggatcagacagataagaatttgtctttcattctgctcctgagtagctctgtaaccttaagcaagtcacttatattctttgaatctcattttcattatctataaattagggcaaataataaccaccgaagaggtgcaaagatgaagtgggatatcgcatatcaattttatgactgtgcctgacatatgatagtccttataaaataccaggtcttccttttcttttttttttattatactttaagttttagggtacatgtgcataacgtgcaggtttgttacatatatatacatgtgccatgttggtgtgctgcacccatcaactcgtcatttaacattaggtatatctcctaatgctatccctcccccctcccccgaccccacaacaggccctggtgtgtgatgttccccttcctgtgtccatgtgttctcattgttcaattcccacctatgagtgagaacgtgcagtgtttcgatagaagattttccttataacattagggtaagagaggatccattttgaatgttatgtttggcacccttaacatcttagagaaacaaaaaaggttatgaaaatagaataaataacaatgtaggtaataagcaagtatttttgtctaaatgaacactagaccatgagtcataaagctaagctttggtccaggattcagcattaactagatgtttgatgttgaactttatttaatgtcactggccctggtatgctttctacatcactgtatttaacgcagaacaggtgagacccaaactggggcttagccctcaagggttcttggctttgttcatgaaagagttcaggggcaagttggaggtagaagaaaacagctttattgaagaggcggtgttacagctctggcatttataactctgtgactgctcctgcagggcagggctaacccatatgcagagagtagcagcttacggcggttttgcagtcatatttatacccacttttaactacatgcagattaagggatggtttatgcggaaatttcaagggaagtggtagtaatttttgggtcatctggtcattgccctggaaagaggcagtaactcctgggtgttgttatagcaatggtaaactgacatggcacactagggggcgtgtcttatggaaagctgctttccattggccctgttttagctagttctcaatttggtctggtgttcaagccctgcctctggagtctagtcctgcctcctacctcatattcaccttgttaagtacattatcttcttacggaaatgcattatccttccatttcttttgattttttttcttttggaatatcagtaaatttcacagaaatattaaaattgtagaatcattgaataattagaacaaggattctaaacaagtttctttcctcctgaaatctctaccaaacaccttcaaacaatgttacaaagcttttaagaagtatatgaaatcaatgaactaatgtttctagttagagaacttcaatttttttaagattacacaggcatgcacattttcactgacaattgaaatttatttgctttacatgacactaagttgttctattaataactaagataccaaatataatttagaaatacaaaaaaagaggatgggtgcggtggctgacgcctgtaatcccagcactttgggaggcagaagtgggcggatcacctgaggttgggagttcgagaccagcctgaccaacatagagaatccccgtctccactaaaaatacaaaattagccatacatggtgatgcatgcctgtaatcccagctactctgtaggctgaggcaggagaatcacttgaacccgggaggcacaggttacagtgagccgagatcgcacccttgtactccagcctgggcaacaaagagtgaaacttcatctcaaaaaaaaagaaaaaaaaagaaagagagaaagaaatacaagaaaaagaaaaagcaatttggagaaaattttaaaaagcaaatcattttaaaagacaaactacaaagtactgtgtgagctaagccattcataatgttctcatggagctaatgggaaacaaatctgttctttcaaaataattgtaaaatttctgtgtaagaatgaatggaaaaggtcatccaaaaactacttgactacatatacctatggatctctatctaagtgctgaaaaatgaatttttttattcatttggttatgtagcatttgttcattctaattttgttttgttccctgtcatatctctggtacctagaataatccctaccacagagtaggtcttccattactcttatgcttttaaatctcccctcacctcattgtaaatgacttttgatttctcttttatgccctttttatacacctttcccttatatctccatttattcctgaagcttcatgggattcagccattgaggtcacttgggtttagatataccaaaagtctgtgatttctctgtttgcatatatgcacatttgttgttatccttacccttttctatcagttccttaccataacatacacttaattcttggaaattcactcatgtcttacaaagatggcaaattcaaacttctgctgtgtatgacacaccattaactgcacaaggacactgtgtatttgctacgttaatatttactgatgagttaatgtaataatgacccatccgcttctgctgcctgtgaggtactttctatctatagggatggaaattaatgacagaggctctctgagctgcctgatgtcagagctgagaaaggtgtgaggggtatataagagctggattactagttagcaaatgagggggtaaatattccagtggatacaagcttggactcttttcttgaagctttctttctatcagaagcatttgctgatattgctgacattgaaacattaaaaggtaaagaatttcctatttctgggaaagttttatttatttagagaaatgcacacttggtgttaaattcatggtttatttcaaagaaaggctaaagggagaatgtattacaatataaatgttcagattgcttagagaaggaaattgggaaagtaaaaatctcgaaattacttgaaaagtggacaatattaagggactgtatcaataaaaattttgatccttgtaaattacgttttaaaaagatgtttcttttaaaaactaagctctaatttaaaattacatcaattagaactgtaagaaatctcttgatttcagtgctggattattctttgcagaaaatttgagaagcaatgggcatcctgaagctgcaagtatttctcattgtgctctctgttgcattgaaccatctgaaagctacacccattgaaaggttggtaactttaaaatcctgtttctttgtaacttttgtaaagtgtgagaaaattagaattaaatactgtcaaataactacagccttagatttctgactatatcatacttaagaacagtaccttcagctattccattgttccttgaattctgtgttctttaaagaataacaccagtggcaaataaatatctttgatggaacttctgacagacaggaatggataattccagttttgtcaagaaatatactcttggaacttagaggggcaaagccagaacatgaagcgggaaaaaaatcaaaaggtagtaatttcttctatattaacctgatactgaaacaaaccagagaaacttaactaaagcatatatttttataccaagtggattctttttgtatatattacttagatttttgttttcctcagatgtctctggaaatgttaaaaacttttacatcttgtggaaatggaaatgtatagaaat

SEQ ID NO: 617 - DNA, 6000 bp, Homo sapiens
aatctctgggacacattcaaagcagtgtgtagagggaaatttatagcactaaatgcccacaagagaaagcaggaaagatccaaaattgacaccctaacatcacaattaaaagaactagaaaagcaagagcaaacacattcaaaagctagcagaaagcaagaaataactaaaatcagagcagaactgaaggaaatagagacataaaaaacccttcaaaaattaatgaatccaggagctggtttttttgaaaggatcaacaaaattgatagaccgctagcaaggctaataaagaagaaaagagagaagaatcaaatagatgcaataaaaaatgataaaggggatatcaccaccgatcccatagagatgcaaactaccatcagagaatactataaacatctctacgcaaataaactagaaaatctagaagaaatggataaattccttgacatatacaccctcctaagactaaaccaggaagaagttgactctctgaatagaccaataacaggctcttttttgttttttaaattttggtgggtacatcatagctgtgtatatttatggggtacataaaatgttttgatacaggcatgcaatgtgaaataaatactttatggggaatgcggtggtagattgttaatatgagttgccaggatgatgtttggcaaggaagaaatgaggaggaagaaagggaagccattcctaaaaggaaaggaaaaactaccatgttcacaaaaaataggatgtaagattctatcaaaggtgttgatgtaaaattatgtaaatatgtttatttaaaaataaacattttataaattaaaaatgaaaaatcaattaaaatttgcatagaaatttttttagcttcttggtaattacatgtgtatcggtttgttttagctaatattcagttaaaaaggtaaaatttattttagtatcttttaaaatcatttttgtgttataatttatatttccatgcttgcattttttggttgatactatccccaattcacacaaatgaatcaatggttcatttaagtataaaagcagtgatataaatagtaatgcaaatatagcaatccaaaataagcccatataaattgcaagcaggcctttggtgtgggatatagaatgtgaatctataatgctgagtaactttgtaaggacttttggacaagcagctgaaaaagaaaaatgccaataaaaaatcactccctttctaaatcttaattactttaattaactctttaatttggttaaacattttcatgaaatttgggtttcaagatctagcatcattgtctacctagtgataattttcctgaattatgagagaaagtagaacaagatgaggatataagtgtattttaaaatagagacagggtcttgctctattgcccaggctagagtgagtggcacaatcaaagcccactgcattcttgaactcctgggctcaagcaatcctcgtacctcagtagctaggactataggcacgtgccactatgcctggctaatttttatttttttttgtagtgacagagtcttgctatgttgcccaggctggtctccaactcctggcctcaagtgatcctcctgcctcagcctcccaaaatgttgggagtataggcatgagccactgcaggcacaaggtaaggatattaactgcaagatgtaatggccattatgactgtggctctcagggtgttccctctaaatggcaggcctaggctctgtctagaaactccagctcacctacagactacagtttcagatggaaaacgtgccttgaaacacatgctttcaatttctttattttcagaaataaagatattttaattttatttttattattattattattttttgagatggagtcttgctctgtttcccaggctggagtgcagtggcacaatcttggctcactgcagccttcacctcctgggttcaagcgatcctcctgcctcagctgcccgagtagctgggattatagactcctgccagcatgctcagctaatttttgtatttttagtagagacggaattttgccatgttggtcaggctggtctcgaactcctgacctcaaataatctgcctaccttggcttctcaaagtgctgggattacaggcatgacccaccatgcccggcctgaactttttattttataaataaagaaatttacttttagaaataaaatttttattttgttcatcttcaaaaaggtgatttctggttttagaaacctggatatttccccacagcatctgagagaatgaacataattttctagtctatttctaacaaaatctaggtaagtgtattgtaaatgcctcttcaccatcttgattcagctctcgacctccatgcagagcaccctgagtaaacctctctggaaagggagattttggaggaggtttcttcctggacaggaattgttgagcaggagctttcttccacgagctgtgcttaatgtctttccacatacttcctctttcagtgctgcgatcattgtgtattgttctcctttggacaatctccaagaggctgcatctttctctggatgtttgcagttgttcccattagacactttctatcttctttttcagatgacccccacgtatcctattttaagaacatttatagggaaataatggttccttttgccggagacatgtttattttcttttctgcacttagttgtgattcctgacctgtatgcttatttttattgcttatagggaagggccaaggtataatcaaatgataggcaagcaggcagctgccttaggtcttgacttggctgaaagtgtagaaaacccctgtgattcttgagaccctggcccacccttttactctatcacaggtacttagtcaatagcctagggcaggaggcattttacacaagactccactattggaaggactagtcctcaggactagcttttcttatctttccctctcacacatggttcaaggtcactctcagccatattctcaacaaagcttagagtgatagaattcccattcctgtcgtgtacccttgcagtgcctctgggtggaatgcggagaaatggagtggctccacttctgttgtgtttctgaacatgtatctcttgctatcagaactttctgctcatcccttctggcacaccaagatcctccacattcccttcactcatgccacttcatatactggttatccatggtacagaagacaggatttaactgagaggacttttccctgactctgaatacatgtaggagataacgatatggaagaccttcagtatgtaagtcttaaatagattggttgggataaatgttccctgaaacataagaaacagcgcagcggctcctgtctgtaatcctagcactttgggaggccgaggcccaggcaggcaaattgcctgagctcagaagtttgagaccagcctggccaacatgcagaaactccgtctctactaaaaatacataaattaaccgggcatggtaacacgtgcctgtagtcccagctactcgggaggctgaggcaggagaatcacttgagcctgggaggcagaggttgcagtgagccaagatcgcgccactgcattccagcctgggcaacagagtgagacttggtcaaaaaaaaaaaaaaaaaaggaagaagaagaagaaatcaggtttagagatgaggacaaagaagacgaatggtggcatgaaggagctaagagctacttgtcaccatgacatgaagcttcatgccagcaaattaaaggagctattcagaactagtatcctcaactctacttgctcaggggcactgaccttatagagattccagacataagcttgttcagccttaaagtccaatctttccactggcttgggtccttcccactttctgtggccaactctgaggttgtctacaagttattggtcttagatttatgtaatgtctcaatgccagtgtagtatttggttatttacggtaggagtggttaggggtggggaatctgataatagctcgtaggatagctagattctttttttttttttttttttttaaagatagggtctcactttgtctcccaggatggatggagtgcagtggagtgaacatggctcactgcagcctcgacctcctgtgctcaagtgttcctcctgcctcagcccctcaagtagctgggactacaggcacatgtcaccatgcccagctaattttttttgtagagatgggattttaccatgttgcccaggctggtctcgagctcctgggctcaagtgatccaccagactcggcctcccaaaatgccgggattacaggtgtgagccactgtgcctggcctagatgctttcatacaggcttttcaattatgcattttccttaagtaggaagtcttaagatccaagttatatcggattgttgtagtctacgttcccatattctattcctatttctgagccttcagtcatgagctaccatattaaagaactaattctgggccttgttacatggctggattggttggacaagtgccagctctgatcctgggactgtggcatgtgatgacatacaccccctctccacattctgcatgtctctaggggggaagggggaagctcggtatagaactttattgtattttctgattgcctcacttcttatattgcccccatgcccttctttgttcctcaagtaaccagagacagtgcttcccagaaccaaccctacaagaaacaaagggctaaacaaagccaaatgggaagcaggatcatggtttgaactctttctggccagagaacaatacctgctatggactagatactgggagagggaaaggaaaagtagggtgaattatggaaggaagctggcaggctcagcgtttctgtcttggcatgaccagtctctcttcattctcttcctagatgtagggcttggtaccagagcccctgaggctttctgcatgaatataaataaatgaaactgagtgatgcttccatttcaggttcttgggggtagccaaaatgaggttctttgtccctctgttcctggtgggcatcctgttccctgccatcctggccaagcaattcacaaaatgtgagctgtcccagctgctgaaagacatagatggttatggaggcatcgctttgcctgaatgtgagttccctgcctctgtgtttcatccattcctcatacgcttctctcctccatcccctctttcttccacttcgcccctccacttttacttaattatctaatcatcctcttttctgctcatttgcatactcttttatttcatgtatgtatatatgtatgtatttatttatttttgaggtggagtttcgctcttgttgcccagactggagtgcaatggtgtaatctcggctcactgcaacctccgcctcctcggttcaagtgattctcctgcctcagcctcccaagtagctggaattacaggcacccaccaccatgcctggctaattttgtattttttgtagagacagggtttcaccatgttggccaggctggtctcaaacttctgacctcaggtgatccgccctcctcagcctcccaaagtgttgggattacaagcgtgagccatcatgcctggccccatttattttcctatcctttctttctcttattgtctgatttttttttggaattctccatctcatcaagaaactctgagctttgccatctttggagattggctggaaagcatttttgtctgagaattacagttcctcctttatgcagatcctgtacatctctgtggtatctctttctcatctttccctcagtgatctgtaccatgtttcacaccagtggttatgacacacaagccatagttgaaaacaatgaaagcacggaatatggactcttccagatcagtaataagctttggtgcaagagcagccaggtccctcagtcaaggaacatctgtgacatctcctgtgacagtgagtagcccctataaccctctttctctgtttttctgaggcctgcccttgggataatc

SEQ ID NO: 618 - DNA, 6000 bp, Homo sapiens
aaaatcatagaaaaagcattgttaaatgtaaaatggtatttggctttctttggtttaaaaactaataaaaataggtgctaaagaaaatttctcagtaaaaaggcactaaggactaagtccactgccaaggtccccacatttaaaacaaaaggtcaatttcttaaaaattatatacttggtttatcttccactttcctttccctcaaaaactaaaagtcttttagcacatgtaccacccctagaatttccggtaaaccagcaccagcctgaagatcacgttctcatcaaagggtggaaagaagaaaaactcgagccagcctgggaaggaccctaccttgtgctgctaaccaccgagactgttgtttgtacagtggaaaggggatggactcaccacacccaagtcaagaaccccctccagagtcgtgggccatagtcccaggggaaaaccttaccaaactaaagctaagaaaaatttaactttttcatctattctattactcttccttctttcctcgctctattgctaaccgtctagttattaacattaccaagtcaattttgcctcaaactattgcatttaatgcttgccttgttataccctgtggggacttgccaagtcaaagacagctctttacttcagaaaagtacttctgtcccttctgactctcctcagattgggcattagtaaattaggaccatttaatctggggaaatttcgataaagattccagtgtcaaccaggagtcttgccccacaatgtagagcttttatgctgtagttggtccaacattctatggaccactaaagagcaaggatggactgccctaactggtttttgtaatttcctaaaatcatacattcattttactagaggatcatagaagttaaagacttaaaacaaactttagcagttaagacaggataccaagatgcaaatgcctggttaaaatgaatcaaatattccatctgcacattaaacaaaagcaattgttatgcttgtgcacatggcaggccagaggcccagattgtcccccttccactaaggtggtcctccagttgaccaggcataggtctgcatggtagctcttttccaggattctacagcctggagtaataagtcatgccaagctctctctgctatatcccgaagtccggcaccctgcgggtcagcccccaagggctatccagcttccgtctctcaacactaagttcacttcatgtctccctggcattccttggagacctgaaaggatgcaatgagcttaagaattttcaagagcttatccatcagtcagcccttgttcatccccgagtggatgtgtggtggtattgtggtggacctttactgagcactctgccgaataactggagtggcacttgtgctttggtccatttggctatccctttcaccctggcatttcatcaaccagagggagaaaaaaataagacatcgtaaagtgagagaagccccttattggtcttccgactctcacgtccatttagacacaattggagtcccacagggaataccagatcaatttaaagcttggaatcaaatagcggcaggatttgagtcaatattttggtaggtgacagttaataaaaatgtagattggataaactatattataaccaacagcaacaagcttttcatgagttaaaactcatgtcggccccagccctggggctacctgacctgacaaaaccctttacactctatgtatcagaaaaagaaaaaatggcagttggagttttaacccagactgtggggccatggccaaggccagtggcctatctctcaaaacaactggacggggtttccaaaggctggcccccatgtctaagggccctggcagcaatggccctgttagcacaagaagcagataaactaacccttaggcaaaacctgaatataaaggccccccatgctgtggtaactttgatgaataccagaggacatcattggctaacaaatgctagattaaccaagtaccaaagcttgctatgtgaaaatccccgcataaccattgaagtttacaacaccctaaaccttgccaccttgctcccagtatcagagagcccagttgaacataactgtgtagaggtattggactcagtttattctagtgggccgaacctccaagaccatccttgaacatcagtagactgtgagctgtacattgacaggagcagctttgccaacccctgcaaagtgactctgaaaaagacgacaagccctgctccagtcatatccggaagctgactaatccacacacggctgaagcatgagaaaactcatcacgggactcattttccttaaaatttggacttgtacagtaaggacttcaactgaccttcctcagactgaggactgttcccagtgtatacatcaagtcactgaggtaggacaaaaagttgctacagtcttattattttatggttattataggtgtaccgggactctaaaaagaacttgtttgtataatgctattctatacaaggtatgtagcccaggaaatgaccaacctgatgtgtgttatgacccatctgagcctcccatgaccacagtttttaaaataagattaaggactgaggactggtggggaggactcataaatgatacgagtaaagtgttagccaaaacaaaagaaaaaggggtgcccaaacaagtcaccttgaagtttgatgcctgtgctgtcattaatagcaataagttaggaaggggatgtggctcttttagttgggaaaaaggctatatgaccgaaaataagtacatttgtcatgaatgaggactgtgtgaaaatgaatgtggatactggtcttgtgtcatttaggccacttggataaaaaatgaaaaggatccagtccaccttcagaaaggaaaaaatggctcttcctgtactaagggacaatgtaaccccttagagctagtaataaccaatccccttgatcctcgctggaaaaaaaggggagcgtgtgaccttaggaatcgacagggctggactggatcgtcgagtaaatatcttagttcgaggagaagtctgtggaaaatttaaccttaccaattgctgcctgcacatagatgatcagaggcaagtagtcgaagatatagttaaagacatgacgaaactggcacatgtgcctgtacaagtgtgacacggatttgaccctgaagctatgtttaaaaatggttcccagtgctaggaggatttaaaactcttataataaaaattatagtagtaatagcctgcttactgatcccttatttactatctgtactcattcaaatggtaaaaggtttcatcactactctagttcaccagaatgcttcagcacaagtgtactacataaatcactatcgatctgtcatgcaggaagacataggtagtgaagatgaaggtgagaactcccactaataaaatgagtgagagtctcaaagtgggggaataagggaggagaccacccctcatattgtcttatgcccaatttctgcctccaaagaaagaagtagtaaaaactaaaaggcagaaatgaaatccacaagcagacagccaggcaccacaccctgggcctcgtagttaaagatcgacccctgacctaatcggttatgttatctatagattacagacattgtatagaaaagcactgtgaaaatccctgtcctgttctgatctaattaccggtgcatgcttgctcaatcgatcactaccctctcaagcggatccctttagagttgtgaggccttaaaagggacaggaattgctcactcagggagctcagctcttgagacaggagtcttggccgatgctcctggcggaataaaccgcttcctgctttaactcggtgtctgaggggttttgtctgcggcttgtcctgctacactacagcaaaaattaggttgtattatagaaaattaacttttttggtttttttgagacggggtctcgctctgtctcccaggctggagtgcagtggcaccatctcggctcactgcaaccttcacctccagggtcaagcaattctcctgcctcagcctcccgagtagttgggattacaggcacacgccaccacgcccagctaattttttaaatttttaatagagatggggttttaccatgttagccaggctggtctcaaactcctggcctcaagtgatctgcccacctcagcctcccaaagtgctgggattacagacgtaagccaccacgcccagccgaaaattaacttctattaattgcatacctgggtttgcctactgagaatcataccctggatatttgtattctttactgaaaagaactgttctatctttccagaaagtggtttcctaaattctggttttcctcctggaatcctgctatttccttctcgcatactctagagaaatcgaagtgttttcaaaggtgctctgaagcttacgctccactagtttcacagtaaatcgccccttgcgagggcgctttttttttttttttaatgtgttctctgaatcgctttccccctttaacactgcatgacaagactaaagccagaatcccaagactgcagcgctaccccttcacaagccgtcgggctgtcccgggcggggccggcccattttcactttctccactagaggcagcagcgcaccgtgaccctggcttactacggtaagaaagcggagaccttttgcttcgaggcggttggtggccagtagtcttgatcgacaagctcaggcctctgaactaagcagccgctgtttatgcacgtacagccaatggaaaggcaggagtgcggccaacggccaatgaggactggtcttaagcggaccacagggcggggtttccctcgagaggcgaacgccgggtaaaagatcgggagcggaagtgggcgagtcagagcacatccggtgttagaagcgctggtaggccttggagaggcgggttaggaaggtacgtctgaacctagtactgggcgaactgggagtgagaaatggaaagggagttagcagttactgtctgagcaagagtggcagtagcttccttctgcggacagatggcaccctgaaggaacgaggccctgctcggagaccagactcgggaaaacagggtgtggagggaagctagggaactagtgctgcgcgtgcgcaacagtgctgaagcgggggtggggcggaggcgagtctgcgggggttttggggggtgtcgaggcctctattctgccccagagcgctggcgaaggccccttctcagcccgccttttcctttctcccgctccttctcctctactaagtgtagacgcagggccccttggcctagcttcgatcgttcgaattcagagcacgtccttccgaggtgaaggaacgcgaaactccacccatccgattgctgttcggctgcgggcgggtcctttggtcgggctgaccctgggtgagcggcccggagccaagactcgaggtagggcctggcgggcgggtgatgtcacactcctctgtgacacgcgaggctcctcagttacttagccaacggcagaggcgggaagtgagaggagtctggggctggggctgccttccaggcccacggggcggccccgctcttttcggattggttacctttgggcaggtgaggtggctttgctttgcttggtcttgaggttttgtgggcgtctttctaagtctgctcagcaagggcgtcgttgggcagtttttatcttgggcctacttgctggacctgtggtaacaagtaggctttggtatctttgtatatttactgagtgtagaattactacccggtgccagcccgggctgcttggggtcatcagcctttcattgaccacccccacaacaaaaatcactatgaacttgagactgtgttctagcaacttgtgaatgtgtaacccagtagaagggctgactgtgcttgaaacagacaaggattttaaggtcaaaggtaaataaatggcaaatggacttttctagttacttattgatatttatttacagtttatcttttgtatgtgtgg

SEQ ID NO: 619 - DNA, 6000 bp, Homo sapiens
aacccaggaggcagaggttgcagtgagctgagatcgtgccactgcactccagcctgggcaacagagcgagactctgtctcaaaaaaaaaaacccagcacatttagaatttccatcttttcccagactagggatatctggtatgatattttcacatgagatatttaacactttattataaagtaggctttgcgttagatagttttgcccaacttcagactaatgtaagcgttctgggcacatttaaggtaaggtaggctaggcttaagctataatgtttggtaggttatatgtagtaagtgcataaattacgatactttcagtttacaatgggattattgggatgtaacttcattgtaaatcgagcatctatacttttaccagtaatgagatttttcaagtgcctttatgtttcagtttataattttcttttctctctttttttttttttcttttttgagacagagtctcactctgtcgcccaggctggagtgcagtggtgcaatctcggctcactgcaacctccgcctcctgggttcaagccattctcctgcctcagcctcccaagtagctgggattataggcgcccaccaccacgcctggctaattttttgtatttttagtagagatggggtttcattgtgttggctgggctggtctcgaactcctgacctcaagtgatccgcctgcctcagcctcccaaagtgctgggattacaggctaaaactagacttttaaaagagaataatctactgaagatattgtagtaatgagtacaccagtaataacaatgttagtacaccagtaataacaatggttaccatgtattgaactcattctatgtacaaagagctattttaagaactttatttgtattatctcacctaatctgcaaccttaggaaataaggattgttatgtactagtattttacacatggtaggtgaaactgaagtacagtgaggttaagtgccagcagcttgctgcatgtcccactgctaaggaaataactaggattcagaagtagcaggcagtcttaaccactatgcaggggacatggttatacagtgtatgaacattactcagtagtaaaaactaatgaatggaaagctttcttggccaaaaacacagaagaagaagaagaagaagaaaaaaaactactgacaaattactaacagttcttccccctcctttttttgtttttgtttttttgagacagagtctggctctgtcacccaggctggagtgcagtagcgcaatctcggctcactgcaaactctgcctcctgggttcaaacgattttccttccctagcctcctgagtagctgggattacaggcgcccaccaccacatctggctgatttttgtatttttttactagagactgggtgtcaccatgttggccaggttggtctcgatctcgtgacctcaggtgatccacccacttaggcatcccaaagtgctgggattacaggcatgagccaccgtgcccagccctttcccctcttttaaactatatgggatttttcttctaagtatcaatttggtcccttctagatatgtgggaacaaggttcaggatggttgaatttatacaacaggaagaaagaaccatgtaattgacaaactaatttttttgttttaattttataaaacggttttgctgtgttgcccaggctggggtgcagtgacacatttttgctctgttaccaggctggagtgaagcaacatgatgatggctcactgcagcctgaaattcctgggctcaagcaattctccttcctcagcctcccaagtagttgggacaacaggcgcacaccaccacacccagctaattttttaattgtttgcagagatgaggttttgctgtgttgcccaggttggtctggaactcctgggctcaagcgaccctcccaccttggcttcccaaagtgctgggctcacaggtgtgagacattgtgcatggcctttttccttttttgttttttggaagtgaacataaccttgagactttattgtcttcataataaaacataaactgatatttaattaaatgtgcgaacagtgtttctttgacttgctgttttaatgttgctgtacacactgaggcaaagtctgtcttggctccagcattgcatagaacgcatactaaatccacgatagttttgttttgcatagcttttggctacttcagcatgtttcatgttcactgtagctcctaggtgtgtgggaataggactgaagagaatggttgtgttttttttaatttttaaattttttttacacgtagtctcgcactgtcacccatggtggagggcaatggcgtgatctcagttcactgcaacctccgcttccctggctcaagcgattctcctgcctcagcctcctgagtagctgggactataggtgcccgccatcacgcccagctaatttttgtatttttagtagagacagggtttcaccatgttggccaggctggtctccaactcctgacctcatgatctgcttgcctttgcctcccaaagtgctgggattacaggcgtgagccaccgcacccagcctgttttttttttgttttgttttgttttgtttttaatttaaggctggacccttgataatagtctttcattttaggacaagggtaagggagatacctagaacaaaacaaggcatttaacatgacctagatgtccactgctaagaatgcctgtctcctcctaccagcccctgctgtccctgtcttcccaagcaaaagcagaccacaggaatatctaactcaaacaattgtgtttacttgagttttttcttgggagagctatgtattaagctcttagctttttgtttttgcatggctctggcagaggaggctggtcagggataccacagaatgatgacacttcagcaaaactttagcagtatgtgcatgacatgttgacagcttctgacaggttttcctctcctgggatgaaggcataacaggaggctctgaatgaaattagaggaatttggttatgattaacacctgaacatttacttttcagttacaaacgcagtataggcagattttccacaactccaggaggcactatccacattgtattctatgtaaataacccctcctctttattttagaattgaattagtaagtaataggcttagaggtgtgaaaggactgctgtattgaattttttagcagcttgtaatgtactttttttctttattgtggtaaactataacattttaatgtgtttttttaaaacaaagattttcatttaactgtgggctcctctggaatgttagcgagttacttggttaatggtactgaatataatacttcaagctcttaagagctgattgctcctagaatggaaaatacttgatatgagagctgctatttttgagttaagtgcaacttaatcttgtttggctgagtttgcatatcggccattgaaatgtaggtatcttttctgagcttcgctagttgaagctaagattgaaacttggtaagtttattttatctggcaaaacttgtcagaacagtttgatctcattacttatctgtatattcttgtctatttggaacagctctagagcaaactatcatatttctttgattctaagacctatgtattccctctcacattttaacatttctgaaattgtcatctgtacattgtgtcatatacattaaatgtatacagatgctcctcaagacggggctgcatctggaaaaccccatcataagttgaaaataccgtaagttgaaaatgtaagtccttttctttttgtaagtcatttttgtttttttttgaaacggagtctcgctgtgttgcccaagctggagtacagtggtgtgatctcggcttactgcaacctccacctcctggattcaagtgattctcctgcctcagcctcccaagtagctgggactacaggggcgtgcctctatgcccagataatttttgtattttttgtagagacagggtttcgccgtgttggccagactggtctcgaactcctgacgtcaaagtgatccacctgcctcggcctcccaaagtactgggattacaggcgtgagccactgtgcccaacctgtaagtcatttttgagtcaacgatatttttaatttacaatgggtgtatccagatgtaagccatcgcaaatcaaggagtgtaccgaatgagtatcaatttctcccagtgataggtcaaccctggtaagtcagggaccatctgctttaccaggtttcttttttttctccataaagctaataaaattgctgtgcccttttgcgtctataatatttggtagttacatgttttgttttaaattttgaaatactgatattgaaaaacagaagttttagttattttttaatgatttcaaaccacaagcttctattaaatcaaagtgaaattgccgtttgacatctcatccccctgccccaacccacacagcctttgatggttttggtttttccatcaacagttgttaagagagaaccagaaagaggcagtcagtaccccctgggaaacgtcagagaagtatctgagaaaggggagtttctgccattctcccctcgaacagattccgccaagcagggtctggttacatgagcattgcctctttcttagaatcccctgggcgtttgaggatccaccccgctccatcccttacctttctttaattcttgtaattggaagcaagaggttctttagcattgctgttgtgaatactgagaaacttggctctgaaagttgcttcagtattattgtaagtgctgtctagggatgtcattaggggtgttaatgggaaaccttaaacaaagacactttccaggtgctgaattctgccatgctgtaagtgtgctctctagaggacatagtcatattcatcttggttatggaaggctgtggttggccttgtaacaacctgcaataattgcaccatctagatcaagagggcccagatccgtgtgactcagaggagagagcaacaaccttagtaggttctgcagcttctcactgtatctgtccttaagaacagaattaacaaaagttctgaggtgagtagtgatgttaatgagagaaggaaagaagaaaccagagaaagcaagccagccattgtgattgtttcatttgtgggagagagcctcaggaagcagatgatgtttatatctttccactggcccaggattccttaggaaatttgtttggggactgtaacttttattattacctagatgaattgttctgagtgttgggctgggtgctgattagagtgcttcattcagtaggtggcgtttcacacaactttatgtttgaatcccttcctccctgcccctccttttctggtagatttaaaatggatgggcattatggccctgataggagtttggaggatttatatttagaagagatgaaagttcttgactggatctttagtactgtagattgaacacgtttacttaggattgcatgtgaaataggggagggagcaaaacttaagaacttgactttatggtgttgatatgatctaacctggatatagttcagtttaaaaatgccctttttgacattgggacagttggcaaaaatctgaataaggtctgcagattagaaatagtattgcattagtattaatatcctgattttgatcattgctttcaggatatacacactgaagtgtttaggagcactgtgtctgtatggttagggaaaaaatatttttacatctgtctatatattgctatatagaaagaagatgaagcaaatgtgaaatattagcatttaggaaatctgggtgaaggttgtacaggaattctttgtactgttctaacctttctgtaggaaaggttctgaaactgtcaaaaaaataccccccaaaaaatcctcctttctgcataaattccttttttatggaggtaggaacctctctttttttaaaattgtgagtccttttcagttcagttcttaaatgtgttaggttaagaaaatttgatacg

SEQ ID NO: 620 - DNA, 6000 bp, Homo sapiens
ctcaagcgaccctcccaccttggcttcccaaagtgctgggctcacaggtgtgagacattgtgcatggcctttttccttttttgttttttggaagtgaacataaccttgagactttattgtcttcataataaaacataaactgatatttaattaaatgtgcgaacagtgtttctttgacttgctgttttaatgttgctgtacacactgaggcaaagtctgtcttggctccagcattgcatagaacgcatactaaatccacgatagttttgttttgcatagcttttggctacttcagcatgtttcatgttcactgtagctcctaggtgtgtgggaataggactgaagagaatggttgtgttttttttaatttttaaattttttttacacgtagtctcgcactgtcacccatggtggagggcaatggcgtgatctcagttcactgcaacctccgcttccctggctcaagcgattctcctgcctcagcctcctgagtagctgggactataggtgcccgccatcacgcccagctaatttttgtatttttagtagagacagggtttcaccatgttggccaggctggtctccaactcctgacctcatgatctgcttgcctttgcctcccaaagtgctgggattacaggcgtgagccaccgcacccagcctgttttttttttgttttgttttgttttgtttttaatttaaggctggacccttgataatagtctttcattttaggacaagggtaagggagatacctagaacaaaacaaggcatttaacatgacctagatgtccactgctaagaatgcctgtctcctcctaccagcccctgctgtccctgtcttcccaagcaaaagcagaccacaggaatatctaactcaaacaattgtgtttacttgagttttttcttgggagagctatgtattaagctcttagctttttgtttttgcatggctctggcagaggaggctggtcagggataccacagaatgatgacacttcagcaaaactttagcagtatgtgcatgacatgttgacagcttctgacaggttttcctctcctgggatgaaggcataacaggaggctctgaatgaaattagaggaatttggttatgattaacacctgaacatttacttttcagttacaaacgcagtataggcagattttccacaactccaggaggcactatccacattgtattctatgtaaataacccctcctctttattttagaattgaattagtaagtaataggcttagaggtgtgaaaggactgctgtattgaattttttagcagcttgtaatgtactttttttctttattgtggtaaactataacattttaatgtgtttttttaaaacaaagattttcatttaactgtgggctcctctggaatgttagcgagttacttggttaatggtactgaatataatacttcaagctcttaagagctgattgctcctagaatggaaaatacttgatatgagagctgctatttttgagttaagtgcaacttaatcttgtttggctgagtttgcatatcggccattgaaatgtaggtatcttttctgagcttcgctagttgaagctaagattgaaacttggtaagtttattttatctggcaaaacttgtcagaacagtttgatctcattacttatctgtatattcttgtctatttggaacagctctagagcaaactatcatatttctttgattctaagacctatgtattccctctcacattttaacatttctgaaattgtcatctgtacattgtgtcatatacattaaatgtatacagatgctcctcaagacggggctgcatctggaaaaccccatcataagttgaaaataccgtaagttgaaaatgtaagtccttttctttttgtaagtcatttttgtttttttttgaaacggagtctcgctgtgttgcccaagctggagtacagtggtgtgatctcggcttactgcaacctccacctcctggattcaagtgattctcctgcctcagcctcccaagtagctgggactacaggggcgtgcctctatgcccagataatttttgtattttttgtagagacagggtttcgccgtgttggccagactggtctcgaactcctgacgtcaaagtgatccacctgcctcggcctcccaaagtactgggattacaggcgtgagccactgtgcccaacctgtaagtcatttttgagtcaacgatatttttaatttacaatgggtgtatccagatgtaagccatcgcaaatcaaggagtgtaccgaatgagtatcaatttctcccagtgataggtcaaccctggtaagtcagggaccatctgctttaccaggtttcttttttttctccataaagctaataaaattgctgtgcccttttgcgtctataatatttggtagttacatgttttgttttaaattttgaaatactgatattgaaaaacagaagttttagttattttttaatgatttcaaaccacaagcttctattaaatcaaagtgaaattgccgtttgacatctcatccccctgccccaacccacacagcctttgatggttttggtttttccatcaacagttgttaagagagaaccagaaagaggcagtcagtaccccctgggaaacgtcagagaagtatctgagaaaggggagtttctgccattctcccctcgaacagattccgccaagcagggtctggttacatgagcattgcctctttcttagaatcccctgggcgtttgaggatccaccccgctccatcccttacctttctttaattcttgtaattggaagcaagaggttctttagcattgctgttgtgaatactgagaaacttggctctgaaagttgcttcagtattattgtaagtgctgtctagggatgtcattaggggtgttaatgggaaaccttaaacaaagacactttccaggtgctgaattctgccatgctgtaagtgtgctctctagaggacatagtcatattcatcttggttatggaaggctgtggttggccttgtaacaacctgcaataattgcaccatctagatcaagagggcccagatccgtgtgactcagaggagagagcaacaaccttagtaggttctgcagcttctcactgtatctgtccttaagaacagaattaacaaaagttctgaggtgagtagtgatgttaatgagagaaggaaagaagaaaccagagaaagcaagccagccattgtgattgtttcatttgtgggagagagcctcaggaagcagatgatgtttatatctttccactggcccaggattccttaggaaatttgtttggggactgtaacttttattattacctagatgaattgttctgagtgttgggctgggtgctgattagagtgcttcattcagtaggtggcgtttcacacaactttatgtttgaatcccttcctccctgcccctccttttctggtagatttaaaatggatgggcattatggccctgataggagtttggaggatttatatttagaagagatgaaagttcttgactggatctttagtactgtagattgaacacgtttacttaggattgcatgtgaaataggggagggagcaaaacttaagaacttgactttatggtgttgatatgatctaacctggatatagttcagtttaaaaatgccctttttgacattgggacagttggcaaaaatctgaataaggtctgcagattagaaatagtattgcattagtattaatatcctgattttgatcattgctttcaggatatacacactgaagtgtttaggagcactgtgtctgtatggttagggaaaaaatatttttacatctgtctatatattgctatatagaaagaagatgaagcaaatgtgaaatattagcatttaggaaatctgggtgaaggttgtacaggaattctttgtactgttctaacctttctgtaggaaaggttctgaaactgtcaaaaaaataccccccaaaaaatcctcctttctgcataaattccttttttatggaggtaggaacctctctttttttaaaattgtgagtccttttcagttcagttcttaaatgtgttaggttaagaaaatttgatacgcatatatttaaaatgcaagtcttaatgccagacccagctttatagtttttgtttgttttgttaagactagtcaaagttttgttttttatctttgaggtgctgctagtgagataatttttttttttttttttttttttgagatggactcttgccctgttgcccaggctggagtgcagtggcgtgtcttggctcactgcagcctctgcctcccaggttcaagcaattcttctgtcttaggctcctgagtagctgggattacaggtgtgtgccaacacacccagctaatttttgtatttttagtagagacagggtttcaccatgttggccaggctggtctcgaactcctgacctcaggtgatccgcccacctcagcctctcagaagtgctgggattataggcctcagtgagccactatgcccagccaagggaattctttagcatcttgaaacaatgacataaaattgctttatgtgccaatgtctaggttcctttaactagattgttaattgagaatttcttttataaacttactgccttttaaagtggcaaatcacctgaaagaatagaaatcagatgatagtaacaaaatagtttgagggagaagaagatgcattcaattcctctgtcgtctttaagatggttgactatgattgcaaatatattgtaggacacataaaaataaaaatggttgtgttagggctgtagaattttaggcaagttttcatctttctgaacttacatgttgcttttttttttttttataagctgttcgtgtgattctgtatgacttaatgactctaacctttctttattctgcagagtggagactgctgcacggactctggaaccatgaacatatttgatcgaaagatcaactttgatgcgcttttaaaattttctcatatgtaagtgttttgaccttgactggttttgtactgcatttcttttcatatctctttgtcccttttctgcatttataacttttgtgtgtataagctaacaaattaacttggccagaatccagaggacctgatgaaaatgtccaaattctacacgttgctgtgtggttattggaaaggcatttattctagtttgggtactgattattcataattttgggcatttggtcttcctcagcatttaaggttctgttaacctattttcaaaatattattttttattgtaatatgctttcctaaaagtatttcaaactatttgtaacagaacttttacatattcccaggaagggaaagagagaaatgattcttcttagcttaaatatgagattgatctgggactgattgctcttattcacattcttttcttagaaccccgtcaacgcagcagcacctgaagaaggtctatgcaagttttgccctttgtatgtttgtggcggctgcaggggcctatgtccatatggtcactcatttcattcaggtaagaacgattttctctcctggttgctgtggtacaaattacattaggaaaaaaccagctcagcaaggtggtccaagggaccctgttcctctctttaatctttatcagtagtttaggatttaaactcagacattaaatcaggacatgtaaagccattttaattttctggcaactgtgccccctctagataccgaaaaacagaatgccttaaccttggcactgaatggtgtgctgctgacgtacaagacccccacccactgagtaggcgcatggcatgcatgctgggattctttggcacagaagcttttttatcttttcctccattcttcctttacaaaactctgattgtgtgattaactatcaggagaggcaggattgagatctttttaaggaattgacctgttttattttccgataactgttgtctgcatggttgggtaaaaaccttcaacaatttg

SEQ ID NO: 621 - DNA, 6000 bp, Homo sapiens
ccgccatcacgcccagctaatttttgtatttttagtagagacagggtttcaccatgttggccaggctggtctccaactcctgacctcatgatctgcttgcctttgcctcccaaagtgctgggattacaggcgtgagccaccgcacccagcctgttttttttttgttttgttttgttttgtttttaatttaaggctggacccttgataatagtctttcattttaggacaagggtaagggagatacctagaacaaaacaaggcatttaacatgacctagatgtccactgctaagaatgcctgtctcctcctaccagcccctgctgtccctgtcttcccaagcaaaagcagaccacaggaatatctaactcaaacaattgtgtttacttgagttttttcttgggagagctatgtattaagctcttagctttttgtttttgcatggctctggcagaggaggctggtcagggataccacagaatgatgacacttcagcaaaactttagcagtatgtgcatgacatgttgacagcttctgacaggttttcctctcctgggatgaaggcataacaggaggctctgaatgaaattagaggaatttggttatgattaacacctgaacatttacttttcagttacaaacgcagtataggcagattttccacaactccaggaggcactatccacattgtattctatgtaaataacccctcctctttattttagaattgaattagtaagtaataggcttagaggtgtgaaaggactgctgtattgaattttttagcagcttgtaatgtactttttttctttattgtggtaaactataacattttaatgtgtttttttaaaacaaagattttcatttaactgtgggctcctctggaatgttagcgagttacttggttaatggtactgaatataatacttcaagctcttaagagctgattgctcctagaatggaaaatacttgatatgagagctgctatttttgagttaagtgcaacttaatcttgtttggctgagtttgcatatcggccattgaaatgtaggtatcttttctgagcttcgctagttgaagctaagattgaaacttggtaagtttattttatctggcaaaacttgtcagaacagtttgatctcattacttatctgtatattcttgtctatttggaacagctctagagcaaactatcatatttctttgattctaagacctatgtattccctctcacattttaacatttctgaaattgtcatctgtacattgtgtcatatacattaaatgtatacagatgctcctcaagacggggctgcatctggaaaaccccatcataagttgaaaataccgtaagttgaaaatgtaagtccttttctttttgtaagtcatttttgtttttttttgaaacggagtctcgctgtgttgcccaagctggagtacagtggtgtgatctcggcttactgcaacctccacctcctggattcaagtgattctcctgcctcagcctcccaagtagctgggactacaggggcgtgcctctatgcccagataatttttgtattttttgtagagacagggtttcgccgtgttggccagactggtctcgaactcctgacgtcaaagtgatccacctgcctcggcctcccaaagtactgggattacaggcgtgagccactgtgcccaacctgtaagtcatttttgagtcaacgatatttttaatttacaatgggtgtatccagatgtaagccatcgcaaatcaaggagtgtaccgaatgagtatcaatttctcccagtgataggtcaaccctggtaagtcagggaccatctgctttaccaggtttcttttttttctccataaagctaataaaattgctgtgcccttttgcgtctataatatttggtagttacatgttttgttttaaattttgaaatactgatattgaaaaacagaagttttagttattttttaatgatttcaaaccacaagcttctattaaatcaaagtgaaattgccgtttgacatctcatccccctgccccaacccacacagcctttgatggttttggtttttccatcaacagttgttaagagagaaccagaaagaggcagtcagtaccccctgggaaacgtcagagaagtatctgagaaaggggagtttctgccattctcccctcgaacagattccgccaagcagggtctggttacatgagcattgcctctttcttagaatcccctgggcgtttgaggatccaccccgctccatcccttacctttctttaattcttgtaattggaagcaagaggttctttagcattgctgttgtgaatactgagaaacttggctctgaaagttgcttcagtattattgtaagtgctgtctagggatgtcattaggggtgttaatgggaaaccttaaacaaagacactttccaggtgctgaattctgccatgctgtaagtgtgctctctagaggacatagtcatattcatcttggttatggaaggctgtggttggccttgtaacaacctgcaataattgcaccatctagatcaagagggcccagatccgtgtgactcagaggagagagcaacaaccttagtaggttctgcagcttctcactgtatctgtccttaagaacagaattaacaaaagttctgaggtgagtagtgatgttaatgagagaaggaaagaagaaaccagagaaagcaagccagccattgtgattgtttcatttgtgggagagagcctcaggaagcagatgatgtttatatctttccactggcccaggattccttaggaaatttgtttggggactgtaacttttattattacctagatgaattgttctgagtgttgggctgggtgctgattagagtgcttcattcagtaggtggcgtttcacacaactttatgtttgaatcccttcctccctgcccctccttttctggtagatttaaaatggatgggcattatggccctgataggagtttggaggatttatatttagaagagatgaaagttcttgactggatctttagtactgtagattgaacacgtttacttaggattgcatgtgaaataggggagggagcaaaacttaagaacttgactttatggtgttgatatgatctaacctggatatagttcagtttaaaaatgccctttttgacattgggacagttggcaaaaatctgaataaggtctgcagattagaaatagtattgcattagtattaatatcctgattttgatcattgctttcaggatatacacactgaagtgtttaggagcactgtgtctgtatggttagggaaaaaatatttttacatctgtctatatattgctatatagaaagaagatgaagcaaatgtgaaatattagcatttaggaaatctgggtgaaggttgtacaggaattctttgtactgttctaacctttctgtaggaaaggttctgaaactgtcaaaaaaataccccccaaaaaatcctcctttctgcataaattccttttttatggaggtaggaacctctctttttttaaaattgtgagtccttttcagttcagttcttaaatgtgttaggttaagaaaatttgatacgcatatatttaaaatgcaagtcttaatgccagacccagctttatagtttttgtttgttttgttaagactagtcaaagttttgttttttatctttgaggtgctgctagtgagataatttttttttttttttttttttttgagatggactcttgccctgttgcccaggctggagtgcagtggcgtgtcttggctcactgcagcctctgcctcccaggttcaagcaattcttctgtcttaggctcctgagtagctgggattacaggtgtgtgccaacacacccagctaatttttgtatttttagtagagacagggtttcaccatgttggccaggctggtctcgaactcctgacctcaggtgatccgcccacctcagcctctcagaagtgctgggattataggcctcagtgagccactatgcccagccaagggaattctttagcatcttgaaacaatgacataaaattgctttatgtgccaatgtctaggttcctttaactagattgttaattgagaatttcttttataaacttactgccttttaaagtggcaaatcacctgaaagaatagaaatcagatgatagtaacaaaatagtttgagggagaagaagatgcattcaattcctctgtcgtctttaagatggttgactatgattgcaaatatattgtaggacacataaaaataaaaatggttgtgttagggctgtagaattttaggcaagttttcatctttctgaacttacatgttgcttttttttttttttataagctgttcgtgtgattctgtatgacttaatgactctaacctttctttattctgcagagtggagactgctgcacggactctggaaccatgaacatatttgatcgaaagatcaactttgatgcgcttttaaaattttctcatatgtaagtgttttgaccttgactggttttgtactgcatttcttttcatatctctttgtcccttttctgcatttataacttttgtgtgtataagctaacaaattaacttggccagaatccagaggacctgatgaaaatgtccaaattctacacgttgctgtgtggttattggaaaggcatttattctagtttgggtactgattattcataattttgggcatttggtcttcctcagcatttaaggttctgttaacctattttcaaaatattattttttattgtaatatgctttcctaaaagtatttcaaactatttgtaacagaacttttacatattcccaggaagggaaagagagaaatgattcttcttagcttaaatatgagattgatctgggactgattgctcttattcacattcttttcttagaaccccgtcaacgcagcagcacctgaagaaggtctatgcaagttttgccctttgtatgtttgtggcggctgcaggggcctatgtccatatggtcactcatttcattcaggtaagaacgattttctctcctggttgctgtggtacaaattacattaggaaaaaaccagctcagcaaggtggtccaagggaccctgttcctctctttaatctttatcagtagtttaggatttaaactcagacattaaatcaggacatgtaaagccattttaattttctggcaactgtgccccctctagataccgaaaaacagaatgccttaaccttggcactgaatggtgtgctgctgacgtacaagacccccacccactgagtaggcgcatggcatgcatgctgggattctttggcacagaagcttttttatcttttcctccattcttcctttacaaaactctgattgtgtgattaactatcaggagaggcaggattgagatctttttaaggaattgacctgttttattttccgataactgttgtctgcatggttgggtaaaaaccttcaacaatttgttttcctgtattgagagagaatctgggtttggtcagcaggagtagaaggtacagtttgaggaataaccagaaagtttgaagactccctaacatagtcttgtgcctttgtagagtattccttttagcataaatgtagaggtgggcctctgttggcatttgccactgttgagaactatccttatgttcaggcatctcctggcagggattgtgtgaaaaattactttagacactcaaaggatagggctttgatcgcttgagttttaggcaaggttagcccttaaataatttagtaaaatacagtcaatccttgttattcacagactctatatttgtgaattcacctactcattaaaatttgtaaccccaaaatcaatactcatggcacttttttttttttttttgagacagagtctcgctctgttactcatggcactttttgcagacagtcacagagtggtgaaaaagttgagtcaccctgctgttgcagtgttttcagctgaggttgaacaag

SEQ ID NO: 622 - DNA, 6000 bp, Homo sapiens
gaaagaagaaaccagagaaagcaagccagccattgtgattgtttcatttgtgggagagagcctcaggaagcagatgatgtttatatctttccactggcccaggattccttaggaaatttgtttggggactgtaacttttattattacctagatgaattgttctgagtgttgggctgggtgctgattagagtgcttcattcagtaggtggcgtttcacacaactttatgtttgaatcccttcctccctgcccctccttttctggtagatttaaaatggatgggcattatggccctgataggagtttggaggatttatatttagaagagatgaaagttcttgactggatctttagtactgtagattgaacacgtttacttaggattgcatgtgaaataggggagggagcaaaacttaagaacttgactttatggtgttgatatgatctaacctggatatagttcagtttaaaaatgccctttttgacattgggacagttggcaaaaatctgaataaggtctgcagattagaaatagtattgcattagtattaatatcctgattttgatcattgctttcaggatatacacactgaagtgtttaggagcactgtgtctgtatggttagggaaaaaatatttttacatctgtctatatattgctatatagaaagaagatgaagcaaatgtgaaatattagcatttaggaaatctgggtgaaggttgtacaggaattctttgtactgttctaacctttctgtaggaaaggttctgaaactgtcaaaaaaataccccccaaaaaatcctcctttctgcataaattccttttttatggaggtaggaacctctctttttttaaaattgtgagtccttttcagttcagttcttaaatgtgttaggttaagaaaatttgatacgcatatatttaaaatgcaagtcttaatgccagacccagctttatagtttttgtttgttttgttaagactagtcaaagttttgttttttatctttgaggtgctgctagtgagataatttttttttttttttttttttttgagatggactcttgccctgttgcccaggctggagtgcagtggcgtgtcttggctcactgcagcctctgcctcccaggttcaagcaattcttctgtcttaggctcctgagtagctgggattacaggtgtgtgccaacacacccagctaatttttgtatttttagtagagacagggtttcaccatgttggccaggctggtctcgaactcctgacctcaggtgatccgcccacctcagcctctcagaagtgctgggattataggcctcagtgagccactatgcccagccaagggaattctttagcatcttgaaacaatgacataaaattgctttatgtgccaatgtctaggttcctttaactagattgttaattgagaatttcttttataaacttactgccttttaaagtggcaaatcacctgaaagaatagaaatcagatgatagtaacaaaatagtttgagggagaagaagatgcattcaattcctctgtcgtctttaagatggttgactatgattgcaaatatattgtaggacacataaaaataaaaatggttgtgttagggctgtagaattttaggcaagttttcatctttctgaacttacatgttgcttttttttttttttataagctgttcgtgtgattctgtatgacttaatgactctaacctttctttattctgcagagtggagactgctgcacggactctggaaccatgaacatatttgatcgaaagatcaactttgatgcgcttttaaaattttctcatatgtaagtgttttgaccttgactggttttgtactgcatttcttttcatatctctttgtcccttttctgcatttataacttttgtgtgtataagctaacaaattaacttggccagaatccagaggacctgatgaaaatgtccaaattctacacgttgctgtgtggttattggaaaggcatttattctagtttgggtactgattattcataattttgggcatttggtcttcctcagcatttaaggttctgttaacctattttcaaaatattattttttattgtaatatgctttcctaaaagtatttcaaactatttgtaacagaacttttacatattcccaggaagggaaagagagaaatgattcttcttagcttaaatatgagattgatctgggactgattgctcttattcacattcttttcttagaaccccgtcaacgcagcagcacctgaagaaggtctatgcaagttttgccctttgtatgtttgtggcggctgcaggggcctatgtccatatggtcactcatttcattcaggtaagaacgattttctctcctggttgctgtggtacaaattacattaggaaaaaaccagctcagcaaggtggtccaagggaccctgttcctctctttaatctttatcagtagtttaggatttaaactcagacattaaatcaggacatgtaaagccattttaattttctggcaactgtgccccctctagataccgaaaaacagaatgccttaaccttggcactgaatggtgtgctgctgacgtacaagacccccacccactgagtaggcgcatggcatgcatgctgggattctttggcacagaagcttttttatcttttcctccattcttcctttacaaaactctgattgtgtgattaactatcaggagaggcaggattgagatctttttaaggaattgacctgttttattttccgataactgttgtctgcatggttgggtaaaaaccttcaacaatttgttttcctgtattgagagagaatctgggtttggtcagcaggagtagaaggtacagtttgaggaataaccagaaagtttgaagactccctaacatagtcttgtgcctttgtagagtattccttttagcataaatgtagaggtgggcctctgttggcatttgccactgttgagaactatccttatgttcaggcatctcctggcagggattgtgtgaaaaattactttagacactcaaaggatagggctttgatcgcttgagttttaggcaaggttagcccttaaataatttagtaaaatacagtcaatccttgttattcacagactctatatttgtgaattcacctactcattaaaatttgtaaccccaaaatcaatactcatggcacttttttttttttttttgagacagagtctcgctctgttactcatggcactttttgcagacagtcacagagtggtgaaaaagttgagtcaccctgctgttgcagtgttttcagctgaggttgaacaagacagtgctctgccttcttgtttcagttctcgtattgtaaacaaatgttcttttcatggtcatttagtgccacttcctttgtatttttgtgcttttaattggtgattttgctgggttttttgagtggaggtcttgtggtgtcgtcctgactggtctcaaactcctgggctcaattgatcctcgcacctcagcctcccaagtagctgggaatacaagcacatgccaccatgcttggcttaattttgctgttcagaatgcaaacagcatagtgctgaagtgctgtctagtattcctgagtgcagaaagaccgtaatgtgccttatgaagaaaatgtgtatattagataagcttcattccggcatgagttgtactgctgttgtaactgtgagttcaatgttaaggaatcaaaaataatgtcaaatgaggtgtccttaaacagaaacacatataaaagcaaggtatctattgatcatttgatgaaaatgttgtgaccttaggcttgcaggaacctacctaccttttatttccctcaggaacaagggtttactaattcattgtccactgtgattttataacataaacactgaataatgagaatcaacttcttcctttaaaggaaggaaggaacttcagtgtctacgtccatccttaatgatttctcttttttctaatgcctatagtttttcccacttggcgtttttaaaaaaagaaacacttttttcttactacaaagctaatatgtgttcattttagaaaattcagaaaacagactagcaatgagaaggaagtattttagaaacttccataatcccatcatccagaaataactactgttaacattttagtactttgcagtcttctgtatatgtatgtgtcttggtgttttggtgtttgggggttttgtttgttggtttttgtttttttgagacggagtttcactcttgttgcccaggctgaagtgcaatggcgtgatcttggcttactgcaacctctgcctccctgggttcaagcaattctcttgcctcagcctcctgagtagctgggattacaggcgtgtgccaccatgcctggctaattttgtatttttagtagagacggggtttctccatgttggtcaggctggtctcgaactcctgatctcaggtgatttgcccacctcggcctcccaaagtgctgggattacaggcgtgagccaccatgttttttttaaagtgaccaaagggggatcatttctatttgttctacagatggaatgtactttaagcacttgtcacgtttcattcatcctttctattttttgggcaagactcactcatagtttgacttgggtagttgtactgtagttgaaggactacgcaagccagaagagcctccagcatccaccatggtcctaactctgtgcttcaaggcttctgggttatctcctcagccccatccctgagaaaacactactttttctcctgcctccaggttataagcaaatgttaggaagttcagacgagtgtttgaacccaataaaggtctcttgcaaaataaatttgaaactttcaagtgtttaatgattgattgattctgactctaacaggctggcctgctgtctgccttgggctccctgatattgatgatttggctgatggcaacacctcatagccatgaaactgaacagaaaagactgggacttcttgctggatttgcattccttacaggtacgttaagggatttgtctaattttgaggggtgagctatattttcagtatctcttaattagttcccccccctttttttttcttttttttttttttgagacagagtctcgctctgttgcccaggccagagtgcagtggcttgatcttggctcactgcaagctccgcctcccaggttcacaccattcttctgctttagcctcccgtgtaggtgggaccacaggcacctgccaccacacccggctaatattttgcatttttagtagagacggggtttcatcgtgttagccaggatggtcttgatctcctgacctcatgatccgcccgtctcggcctcctaaaatgctaggattacaggcatgagccaccgtgcctggccctttttttcctttttttttgagacagtgtctccgtctgtcacccaggctagagagtgcagtggcgtgatcttggctcactgcaaactctgccttccgggttcaagcgattctcctgcctcagcctcccaaatagctgggattacaggcatgtgccaccatgcccggctaatttttgtatttttagtagagatggggttttaccatgttggccaggatggtgttgatctcttgacctagtgatccacccaccttagcctcccaaagtgttaggatgacaggcgtgagccatagtaccctgcctcctggcttttttttttttttttttttttaagatggagtctcaccctgtggccaggctggagtgcagtggcgagatctcagctcattgcaatctctgcctcccaggttcaagcgattccccttcctcagcctcccaagtagctgggactacagcggctaattttttgtattttagtagagacggggtttcaccatgttggccaggatggtcttgatctcctgacctcgtgatctgctcgcctcagcctcccaaaatgctgggattacaggcatgagccaccacacccagcgctttttt

SEQ ID NO: 623 - DNA, 6000 bp, Homo sapiens
catctcctggcagggattgtgtgaaaaattactttagacactcaaaggatagggctttgatcgcttgagttttaggcaaggttagcccttaaataatttagtaaaatacagtcaatccttgttattcacagactctatatttgtgaattcacctactcattaaaatttgtaaccccaaaatcaatactcatggcacttttttttttttttttgagacagagtctcgctctgttactcatggcactttttgcagacagtcacagagtggtgaaaaagttgagtcaccctgctgttgcagtgttttcagctgaggttgaacaagacagtgctctgccttcttgtttcagttctcgtattgtaaacaaatgttcttttcatggtcatttagtgccacttcctttgtatttttgtgcttttaattggtgattttgctgggttttttgagtggaggtcttgtggtgtcgtcctgactggtctcaaactcctgggctcaattgatcctcgcacctcagcctcccaagtagctgggaatacaagcacatgccaccatgcttggcttaattttgctgttcagaatgcaaacagcatagtgctgaagtgctgtctagtattcctgagtgcagaaagaccgtaatgtgccttatgaagaaaatgtgtatattagataagcttcattccggcatgagttgtactgctgttgtaactgtgagttcaatgttaaggaatcaaaaataatgtcaaatgaggtgtccttaaacagaaacacatataaaagcaaggtatctattgatcatttgatgaaaatgttgtgaccttaggcttgcaggaacctacctaccttttatttccctcaggaacaagggtttactaattcattgtccactgtgattttataacataaacactgaataatgagaatcaacttcttcctttaaaggaaggaaggaacttcagtgtctacgtccatccttaatgatttctcttttttctaatgcctatagtttttcccacttggcgtttttaaaaaaagaaacacttttttcttactacaaagctaatatgtgttcattttagaaaattcagaaaacagactagcaatgagaaggaagtattttagaaacttccataatcccatcatccagaaataactactgttaacattttagtactttgcagtcttctgtatatgtatgtgtcttggtgttttggtgtttgggggttttgtttgttggtttttgtttttttgagacggagtttcactcttgttgcccaggctgaagtgcaatggcgtgatcttggcttactgcaacctctgcctccctgggttcaagcaattctcttgcctcagcctcctgagtagctgggattacaggcgtgtgccaccatgcctggctaattttgtatttttagtagagacggggtttctccatgttggtcaggctggtctcgaactcctgatctcaggtgatttgcccacctcggcctcccaaagtgctgggattacaggcgtgagccaccatgttttttttaaagtgaccaaagggggatcatttctatttgttctacagatggaatgtactttaagcacttgtcacgtttcattcatcctttctattttttgggcaagactcactcatagtttgacttgggtagttgtactgtagttgaaggactacgcaagccagaagagcctccagcatccaccatggtcctaactctgtgcttcaaggcttctgggttatctcctcagccccatccctgagaaaacactactttttctcctgcctccaggttataagcaaatgttaggaagttcagacgagtgtttgaacccaataaaggtctcttgcaaaataaatttgaaactttcaagtgtttaatgattgattgattctgactctaacaggctggcctgctgtctgccttgggctccctgatattgatgatttggctgatggcaacacctcatagccatgaaactgaacagaaaagactgggacttcttgctggatttgcattccttacaggtacgttaagggatttgtctaattttgaggggtgagctatattttcagtatctcttaattagttcccccccctttttttttcttttttttttttttgagacagagtctcgctctgttgcccaggccagagtgcagtggcttgatcttggctcactgcaagctccgcctcccaggttcacaccattcttctgctttagcctcccgtgtaggtgggaccacaggcacctgccaccacacccggctaatattttgcatttttagtagagacggggtttcatcgtgttagccaggatggtcttgatctcctgacctcatgatccgcccgtctcggcctcctaaaatgctaggattacaggcatgagccaccgtgcctggccctttttttcctttttttttgagacagtgtctccgtctgtcacccaggctagagagtgcagtggcgtgatcttggctcactgcaaactctgccttccgggttcaagcgattctcctgcctcagcctcccaaatagctgggattacaggcatgtgccaccatgcccggctaatttttgtatttttagtagagatggggttttaccatgttggccaggatggtgttgatctcttgacctagtgatccacccaccttagcctcccaaagtgttaggatgacaggcgtgagccatagtaccctgcctcctggcttttttttttttttttttttttaagatggagtctcaccctgtggccaggctggagtgcagtggcgagatctcagctcattgcaatctctgcctcccaggttcaagcgattccccttcctcagcctcccaagtagctgggactacagcggctaattttttgtattttagtagagacggggtttcaccatgttggccaggatggtcttgatctcctgacctcgtgatctgctcgcctcagcctcccaaaatgctgggattacaggcatgagccaccacacccagcgcttttttttgtttttttgtttttttttttgagactgagtttcactcttgttgcccaggctggagtgcagtggcacgatcttggctcactgcagcctccacctcccaggttcaagcgattctcctgcctcagcctcccgaatagctgggattataggcatcaaccaccacgccagctaatcttttgtatttttagtagagatgggccactatgttggccaggctggtctcgaactcctgacctcgtgatccgcccacctcggcctcccaaagtgctgggattacaggcatgagccactgcccctggccctaattttgtattttagtagagacggggtttcaccatgttggtcagactggtctcgaactcctgacctcaggtaatctacctgcctcagcctcccaaagtgctgggattacagacgtgagccactgtgcctggccttcctggcctgctttctaatctcatataggttcattttgtttccccatccattaggggaaactctgtgagtagccactgtgactctacttttgtgtccaaaaatagccattgtgtacttgaatgaatgaggttcaagagcttaggtagcataacctattaatagtaggcatagaacttttaataaactagacttgagaatccgacatagttgcacccatactggcaattatcataggagcttctgttctgagtcttacagacagtgcattaaagctatacattgagatctattgtgcaggacactttgctgattctcaaaaaaagaaaggcacagctcttctagaattgtcataaaggaaacaagactcaagctatgtaataaaaatgtttgcaaaacatttgaattagaacagcttgttctgagtgacagtctaatatacgtaggagaaattttagaaaggaagagatttagggattaaaatttttgcatcagggcaagctagtttttgaaggcattaaggggtggaattatcagaaggaaagaggaaagtaattagaacgaaagaaatgttagagctggaacaggttgccctcctgttggcaggtgtccacctgcagaaccagtctcacctttctttgctacaaaggggagtcagtcctacatgactataaggttgctggccacgaggcactgttttgctctttatcctttttttctaattcctgatctggcctatattaccatcttacatcactctagctctgaaatgtttggcatgcctactttattttcttgtaatctctgtaccctccctgaggtcatccatgattttcagctaagaggacaattttgcagctatttctataaaaaaaaaaaaaacaacgcagtcaggtatacattttattgaaaacaattacagcggaggggagagagatttaattctttagtccacgtttgttaagagcatgagtatgcctatatttcgggatcagcttttggatgaggatcctattcaagaattgatcgtaatactgtgttctgggttttctgttttctaggagttggcctgggccctgccctggagttttgtattgctgtcaaccccaggtaactcttttggtagtgtcttatgtgcttttatctttatgaatataccttctaaatgtagaccgtatacctgtagcccttaatctaatggtctttttttctaacagcatccttcccactgctttcatgggcacggcaatgatctttacctgcttcaccctcagtgcactctatgccaggcgccgtagctacctctttctgggaggtaagtgtgaactgggaaacagggaatgggggctcctttttagccagaattctcactagtactccttccttacccctaactcctttgcgactattgagttgagattaaccttcattctgggggaagttaaggaatggctttaatgggattgctttactttgccttggcttctctcaagacagctttttgctgtgtcttataggtatcttgatgtcagccctgagcttgttgcttttgtcttccctggggaatgttttctttggatccatttggcttttccaggtaagacttagcctggaactttccagcagccatttgcctcacacttctttctttccttttttttttttttttgcacttctttctgtactactttgggcagtgctctctaagccttcccattatccttcataggatggagccttctgccacaagtgaaaacaggctgcacaaggttgggcattgctaagagaaaatggtttgctcagacaccatttgtgtaaggccagtctggcagtggctgattgttaaaatgattgaaactcttccagtgaccagtgcagtattgtgcctagggaagtaaagtggtcttcaccctaggctgcagttctcgtgaatggtaatgttcatagggttcacatttgatgtactttcaagtgactatgagccagaaagtatggctggtttttttttctctgcaacttctgctgtatagtaacttcatctcttacatttgttaggcaaacctgtatgtgggactggtggtcatgtgtggcttcgtcctttttgatactcaactcattattgaaaaggccgaacatggagatcaagattatatctggtgagtgtgggaactagtctttaacaagcatgaaggttgaggcataccgttcagcagctgaacttaggttggcattggctgaacataggtggccaagctttgggagtgtatgtggtaggaaacccacggttttggaactgtgtaccataatcttcctcaattcctgaaagatttcagattttttaaaaatctgggctaataggccaggtgtggtggctcacacctataatcctagcactttgggaggctgaggccactggatcgcttgagctcagaagtttgagaccagcctgggcaacatggcgaaatcccatctctactaaaaatataaaaaaattagctgggcatggtggcacatgtatataatcccagctactcaggaggctaaggtataagaatcatttgaa

SEQ ID NO: 624 - DNA, 6000 bp, Homo sapiens
cttaattttgctgttcagaatgcaaacagcatagtgctgaagtgctgtctagtattcctgagtgcagaaagaccgtaatgtgccttatgaagaaaatgtgtatattagataagcttcattccggcatgagttgtactgctgttgtaactgtgagttcaatgttaaggaatcaaaaataatgtcaaatgaggtgtccttaaacagaaacacatataaaagcaaggtatctattgatcatttgatgaaaatgttgtgaccttaggcttgcaggaacctacctaccttttatttccctcaggaacaagggtttactaattcattgtccactgtgattttataacataaacactgaataatgagaatcaacttcttcctttaaaggaaggaaggaacttcagtgtctacgtccatccttaatgatttctcttttttctaatgcctatagtttttcccacttggcgtttttaaaaaaagaaacacttttttcttactacaaagctaatatgtgttcattttagaaaattcagaaaacagactagcaatgagaaggaagtattttagaaacttccataatcccatcatccagaaataactactgttaacattttagtactttgcagtcttctgtatatgtatgtgtcttggtgttttggtgtttgggggttttgtttgttggtttttgtttttttgagacggagtttcactcttgttgcccaggctgaagtgcaatggcgtgatcttggcttactgcaacctctgcctccctgggttcaagcaattctcttgcctcagcctcctgagtagctgggattacaggcgtgtgccaccatgcctggctaattttgtatttttagtagagacggggtttctccatgttggtcaggctggtctcgaactcctgatctcaggtgatttgcccacctcggcctcccaaagtgctgggattacaggcgtgagccaccatgttttttttaaagtgaccaaagggggatcatttctatttgttctacagatggaatgtactttaagcacttgtcacgtttcattcatcctttctattttttgggcaagactcactcatagtttgacttgggtagttgtactgtagttgaaggactacgcaagccagaagagcctccagcatccaccatggtcctaactctgtgcttcaaggcttctgggttatctcctcagccccatccctgagaaaacactactttttctcctgcctccaggttataagcaaatgttaggaagttcagacgagtgtttgaacccaataaaggtctcttgcaaaataaatttgaaactttcaagtgtttaatgattgattgattctgactctaacaggctggcctgctgtctgccttgggctccctgatattgatgatttggctgatggcaacacctcatagccatgaaactgaacagaaaagactgggacttcttgctggatttgcattccttacaggtacgttaagggatttgtctaattttgaggggtgagctatattttcagtatctcttaattagttcccccccctttttttttcttttttttttttttgagacagagtctcgctctgttgcccaggccagagtgcagtggcttgatcttggctcactgcaagctccgcctcccaggttcacaccattcttctgctttagcctcccgtgtaggtgggaccacaggcacctgccaccacacccggctaatattttgcatttttagtagagacggggtttcatcgtgttagccaggatggtcttgatctcctgacctcatgatccgcccgtctcggcctcctaaaatgctaggattacaggcatgagccaccgtgcctggccctttttttcctttttttttgagacagtgtctccgtctgtcacccaggctagagagtgcagtggcgtgatcttggctcactgcaaactctgccttccgggttcaagcgattctcctgcctcagcctcccaaatagctgggattacaggcatgtgccaccatgcccggctaatttttgtatttttagtagagatggggttttaccatgttggccaggatggtgttgatctcttgacctagtgatccacccaccttagcctcccaaagtgttaggatgacaggcgtgagccatagtaccctgcctcctggcttttttttttttttttttttttaagatggagtctcaccctgtggccaggctggagtgcagtggcgagatctcagctcattgcaatctctgcctcccaggttcaagcgattccccttcctcagcctcccaagtagctgggactacagcggctaattttttgtattttagtagagacggggtttcaccatgttggccaggatggtcttgatctcctgacctcgtgatctgctcgcctcagcctcccaaaatgctgggattacaggcatgagccaccacacccagcgcttttttttgtttttttgtttttttttttgagactgagtttcactcttgttgcccaggctggagtgcagtggcacgatcttggctcactgcagcctccacctcccaggttcaagcgattctcctgcctcagcctcccgaatagctgggattataggcatcaaccaccacgccagctaatcttttgtatttttagtagagatgggccactatgttggccaggctggtctcgaactcctgacctcgtgatccgcccacctcggcctcccaaagtgctgggattacaggcatgagccactgcccctggccctaattttgtattttagtagagacggggtttcaccatgttggtcagactggtctcgaactcctgacctcaggtaatctacctgcctcagcctcccaaagtgctgggattacagacgtgagccactgtgcctggccttcctggcctgctttctaatctcatataggttcattttgtttccccatccattaggggaaactctgtgagtagccactgtgactctacttttgtgtccaaaaatagccattgtgtacttgaatgaatgaggttcaagagcttaggtagcataacctattaatagtaggcatagaacttttaataaactagacttgagaatccgacatagttgcacccatactggcaattatcataggagcttctgttctgagtcttacagacagtgcattaaagctatacattgagatctattgtgcaggacactttgctgattctcaaaaaaagaaaggcacagctcttctagaattgtcataaaggaaacaagactcaagctatgtaataaaaatgtttgcaaaacatttgaattagaacagcttgttctgagtgacagtctaatatacgtaggagaaattttagaaaggaagagatttagggattaaaatttttgcatcagggcaagctagtttttgaaggcattaaggggtggaattatcagaaggaaagaggaaagtaattagaacgaaagaaatgttagagctggaacaggttgccctcctgttggcaggtgtccacctgcagaaccagtctcacctttctttgctacaaaggggagtcagtcctacatgactataaggttgctggccacgaggcactgttttgctctttatcctttttttctaattcctgatctggcctatattaccatcttacatcactctagctctgaaatgtttggcatgcctactttattttcttgtaatctctgtaccctccctgaggtcatccatgattttcagctaagaggacaattttgcagctatttctataaaaaaaaaaaaaacaacgcagtcaggtatacattttattgaaaacaattacagcggaggggagagagatttaattctttagtccacgtttgttaagagcatgagtatgcctatatttcgggatcagcttttggatgaggatcctattcaagaattgatcgtaatactgtgttctgggttttctgttttctaggagttggcctgggccctgccctggagttttgtattgctgtcaaccccaggtaactcttttggtagtgtcttatgtgcttttatctttatgaatataccttctaaatgtagaccgtatacctgtagcccttaatctaatggtctttttttctaacagcatccttcccactgctttcatgggcacggcaatgatctttacctgcttcaccctcagtgcactctatgccaggcgccgtagctacctctttctgggaggtaagtgtgaactgggaaacagggaatgggggctcctttttagccagaattctcactagtactccttccttacccctaactcctttgcgactattgagttgagattaaccttcattctgggggaagttaaggaatggctttaatgggattgctttactttgccttggcttctctcaagacagctttttgctgtgtcttataggtatcttgatgtcagccctgagcttgttgcttttgtcttccctggggaatgttttctttggatccatttggcttttccaggtaagacttagcctggaactttccagcagccatttgcctcacacttctttctttccttttttttttttttttgcacttctttctgtactactttgggcagtgctctctaagccttcccattatccttcataggatggagccttctgccacaagtgaaaacaggctgcacaaggttgggcattgctaagagaaaatggtttgctcagacaccatttgtgtaaggccagtctggcagtggctgattgttaaaatgattgaaactcttccagtgaccagtgcagtattgtgcctagggaagtaaagtggtcttcaccctaggctgcagttctcgtgaatggtaatgttcatagggttcacatttgatgtactttcaagtgactatgagccagaaagtatggctggtttttttttctctgcaacttctgctgtatagtaacttcatctcttacatttgttaggcaaacctgtatgtgggactggtggtcatgtgtggcttcgtcctttttgatactcaactcattattgaaaaggccgaacatggagatcaagattatatctggtgagtgtgggaactagtctttaacaagcatgaaggttgaggcataccgttcagcagctgaacttaggttggcattggctgaacataggtggccaagctttgggagtgtatgtggtaggaaacccacggttttggaactgtgtaccataatcttcctcaattcctgaaagatttcagattttttaaaaatctgggctaataggccaggtgtggtggctcacacctataatcctagcactttgggaggctgaggccactggatcgcttgagctcagaagtttgagaccagcctgggcaacatggcgaaatcccatctctactaaaaatataaaaaaattagctgggcatggtggcacatgtatataatcccagctactcaggaggctaaggtataagaatcatttgaacctaggaggtggaggttgaagtgagccaagattgcaccactgcactccagcctggcaacagagcgagaccctgtctcaaaaaaaaaaaaaaaaaagtgtgggggccgggcacggtggctcacgcctgtaatcccagcactttgggaggtcggggcaggcggatcacgaggtcaggagatcgaaaccatcctggctaacacggtgaaaccctgtctctactaaaaatacaaaaaattagtcgggcgtggtggcgggcacctgtagtcccagctactcaggaggcggaggcaggagaatggtgtgaaccggggaggcggagcttgcagtgagcggagattgcaccactgcactccagcctggacgacagagcgagactccttctcaaaaaaaaaaaaaaaaaaagtgttggggggtggctatatatttacatatccatagtggctacctccaagcagaagtgagggaaagagatctttctccttttcctatttatacttctgtattttttaaacaatgagtagaagatacactctttttttagagacagggtctcgct

SEQ ID NO: 625 - DNA, 6000 bp, Homo sapiens
ttttgtttttttttttgagactgagtttcactcttgttgcccaggctggagtgcagtggcacgatcttggctcactgcagcctccacctcccaggttcaagcgattctcctgcctcagcctcccgaatagctgggattataggcatcaaccaccacgccagctaatcttttgtatttttagtagagatgggccactatgttggccaggctggtctcgaactcctgacctcgtgatccgcccacctcggcctcccaaagtgctgggattacaggcatgagccactgcccctggccctaattttgtattttagtagagacggggtttcaccatgttggtcagactggtctcgaactcctgacctcaggtaatctacctgcctcagcctcccaaagtgctgggattacagacgtgagccactgtgcctggccttcctggcctgctttctaatctcatataggttcattttgtttccccatccattaggggaaactctgtgagtagccactgtgactctacttttgtgtccaaaaatagccattgtgtacttgaatgaatgaggttcaagagcttaggtagcataacctattaatagtaggcatagaacttttaataaactagacttgagaatccgacatagttgcacccatactggcaattatcataggagcttctgttctgagtcttacagacagtgcattaaagctatacattgagatctattgtgcaggacactttgctgattctcaaaaaaagaaaggcacagctcttctagaattgtcataaaggaaacaagactcaagctatgtaataaaaatgtttgcaaaacatttgaattagaacagcttgttctgagtgacagtctaatatacgtaggagaaattttagaaaggaagagatttagggattaaaatttttgcatcagggcaagctagtttttgaaggcattaaggggtggaattatcagaaggaaagaggaaagtaattagaacgaaagaaatgttagagctggaacaggttgccctcctgttggcaggtgtccacctgcagaaccagtctcacctttctttgctacaaaggggagtcagtcctacatgactataaggttgctggccacgaggcactgttttgctctttatcctttttttctaattcctgatctggcctatattaccatcttacatcactctagctctgaaatgtttggcatgcctactttattttcttgtaatctctgtaccctccctgaggtcatccatgattttcagctaagaggacaattttgcagctatttctataaaaaaaaaaaaaacaacgcagtcaggtatacattttattgaaaacaattacagcggaggggagagagatttaattctttagtccacgtttgttaagagcatgagtatgcctatatttcgggatcagcttttggatgaggatcctattcaagaattgatcgtaatactgtgttctgggttttctgttttctaggagttggcctgggccctgccctggagttttgtattgctgtcaaccccaggtaactcttttggtagtgtcttatgtgcttttatctttatgaatataccttctaaatgtagaccgtatacctgtagcccttaatctaatggtctttttttctaacagcatccttcccactgctttcatgggcacggcaatgatctttacctgcttcaccctcagtgcactctatgccaggcgccgtagctacctctttctgggaggtaagtgtgaactgggaaacagggaatgggggctcctttttagccagaattctcactagtactccttccttacccctaactcctttgcgactattgagttgagattaaccttcattctgggggaagttaaggaatggctttaatgggattgctttactttgccttggcttctctcaagacagctttttgctgtgtcttataggtatcttgatgtcagccctgagcttgttgcttttgtcttccctggggaatgttttctttggatccatttggcttttccaggtaagacttagcctggaactttccagcagccatttgcctcacacttctttctttccttttttttttttttttgcacttctttctgtactactttgggcagtgctctctaagccttcccattatccttcataggatggagccttctgccacaagtgaaaacaggctgcacaaggttgggcattgctaagagaaaatggtttgctcagacaccatttgtgtaaggccagtctggcagtggctgattgttaaaatgattgaaactcttccagtgaccagtgcagtattgtgcctagggaagtaaagtggtcttcaccctaggctgcagttctcgtgaatggtaatgttcatagggttcacatttgatgtactttcaagtgactatgagccagaaagtatggctggtttttttttctctgcaacttctgctgtatagtaacttcatctcttacatttgttaggcaaacctgtatgtgggactggtggtcatgtgtggcttcgtcctttttgatactcaactcattattgaaaaggccgaacatggagatcaagattatatctggtgagtgtgggaactagtctttaacaagcatgaaggttgaggcataccgttcagcagctgaacttaggttggcattggctgaacataggtggccaagctttgggagtgtatgtggtaggaaacccacggttttggaactgtgtaccataatcttcctcaattcctgaaagatttcagattttttaaaaatctgggctaataggccaggtgtggtggctcacacctataatcctagcactttgggaggctgaggccactggatcgcttgagctcagaagtttgagaccagcctgggcaacatggcgaaatcccatctctactaaaaatataaaaaaattagctgggcatggtggcacatgtatataatcccagctactcaggaggctaaggtataagaatcatttgaacctaggaggtggaggttgaagtgagccaagattgcaccactgcactccagcctggcaacagagcgagaccctgtctcaaaaaaaaaaaaaaaaaagtgtgggggccgggcacggtggctcacgcctgtaatcccagcactttgggaggtcggggcaggcggatcacgaggtcaggagatcgaaaccatcctggctaacacggtgaaaccctgtctctactaaaaatacaaaaaattagtcgggcgtggtggcgggcacctgtagtcccagctactcaggaggcggaggcaggagaatggtgtgaaccggggaggcggagcttgcagtgagcggagattgcaccactgcactccagcctggacgacagagcgagactccttctcaaaaaaaaaaaaaaaaaaagtgttggggggtggctatatatttacatatccatagtggctacctccaagcagaagtgagggaaagagatctttctccttttcctatttatacttctgtattttttaaacaatgagtagaagatacactctttttttagagacagggtctcgctctgttgcctaggcagtagtgtggtgccatgaacacagctcgctgcagcctgaatttactgtgctcaagcagtactcctgcctcagcctcttgagtagctgggacaacaggcacgtgcgaccatgccaggctaatttattttttgtagagatggggtcttaccatatgcccagattggtctcaagcagtcctcttgccttggtttcccaaagtgttgggattacaggcttaagccaccatgcccagccactttttttttttttttttttttttgagacagttttgctttgtcacccaggctggagtgcggtggcaacatctcagctcactgcaacctccgcctcctgggttcaagcgattcttgtgcctcagcctccctagtagctgggattacaggcactctccaccacgtccagctaatttctgtaattttagtagaacgaggttttgccacgttgccccgtgaggacatggtgtcgaactcttggcctcaagcaatctgccttcctcagcctcccaaagtggtgggattacagacatgggccaccatgcccagctcacttttttttttttgagacggagtttcgctcttgttgcccaggctggagtgcaacggtgtgatcttggctcaccgcagcctccgtctcccggcttcaggtgtttctcctgccttaacatcctgagtagctgggattacaggcatgcaccaccatgcccggctaattttgtatttttagtagagatggggtttctccatgttggtcaggctggtctcaaactcctgactcaggtgatgcccgcctcagccttccaaagtgctgggattacaggtgtgagccactgtgctcggcactttttttttaatgtagtgattctctcagtctcatgactaattagtggtagttaagggttcagacttggacctctgcagagttcagagcgcttgagacagggcttgctctgtcacccaagctgcagtaggagagtggcactgtcatggcttactgtagactcaagctccctgggctcaggtgttcctcccatctcagcctcctcagtagctgggattacaggcacatgccacaatgccctgctaatttttgtagagacgggattttgctatgttacccaggttggtctcgaactcctgggctcaagcagtccacctgcctcagcctcccaaaatgttgggattacaggcatgagccactgtgcctggcccagtctcttttctctatgctgcatgacttcgatgagtctaaaggatctcagacaccagagttttacttccttagttgggggtaaagtgtgggagaagctggctcgtgggggtaggggtggggtttatattctgcatctttgtgggcttgtggataaaaaagtctgaagtacagatcctaatctggttcttgcctttcaggcactgcattgatctcttcttagatttcattactgtcttcagaaaactcatgatgatcctggccatgaatgaaaaggttagttagcctacaacccaaagatgagacaataatggctcctgagcttggcatgtgtgtatacttcagatttgaaaacttgctcacacactgtgttaggtccagggtaactgtaaggcaggccactgagtaagaggtaagccagaagtcttcagttgttagaaaaaaagcagcaagtgaaaaaaaaatttttttaactaattcctgcgtttagtatgaaagggaaaaaagcttcagtggcagtaaacacaacctgctacatgaataatttaaaggctatatagttgtgactcagagaaaggtattgtggaggacgttgtaaatttcagaagtagactaattttatccatttgttaatttttttttccaaggaagcattctatatagggctaatgagtatctaacgtagttgagtcaagcagtgggggaaacaaatgaaatgagcttttctttatagaccttatggagcttagagatagcatagtggtagcgggagtagttgaccagataggattgctggctctgtctgggctatgccatggttggactgagcactaggcagatgtacaagtttcagaacaagcaactgaattttcattccttaatacattgggcttccatccaagattgaatgaagaattctgctggaccaaattatttctgaatgtcagtttatgccagagtcatgctcactttgcagggtggagcacttctcgcgcctaatggttggttggtggtcttggcctctagtttcactctttgaggatagagtgccatctgcagccttcactgttgggatctgagctgtagtggctgtgaatagcctagagtggtcaggcagcccacctcggcactcctggggtgggggtggggacagctgcttaacctttattcttggtcggtctgtcggcaactttgggaaccaccagtaggatgtggttaagattcagttcttgct

SEQ ID NO: 626 - DNA, 6000 bp, Homo sapiens
actctatgccaggcgccgtagctacctctttctgggaggtaagtgtgaactgggaaacagggaatgggggctcctttttagccagaattctcactagtactccttccttacccctaactcctttgcgactattgagttgagattaaccttcattctgggggaagttaaggaatggctttaatgggattgctttactttgccttggcttctctcaagacagctttttgctgtgtcttataggtatcttgatgtcagccctgagcttgttgcttttgtcttccctggggaatgttttctttggatccatttggcttttccaggtaagacttagcctggaactttccagcagccatttgcctcacacttctttctttccttttttttttttttttgcacttctttctgtactactttgggcagtgctctctaagccttcccattatccttcataggatggagccttctgccacaagtgaaaacaggctgcacaaggttgggcattgctaagagaaaatggtttgctcagacaccatttgtgtaaggccagtctggcagtggctgattgttaaaatgattgaaactcttccagtgaccagtgcagtattgtgcctagggaagtaaagtggtcttcaccctaggctgcagttctcgtgaatggtaatgttcatagggttcacatttgatgtactttcaagtgactatgagccagaaagtatggctggtttttttttctctgcaacttctgctgtatagtaacttcatctcttacatttgttaggcaaacctgtatgtgggactggtggtcatgtgtggcttcgtcctttttgatactcaactcattattgaaaaggccgaacatggagatcaagattatatctggtgagtgtgggaactagtctttaacaagcatgaaggttgaggcataccgttcagcagctgaacttaggttggcattggctgaacataggtggccaagctttgggagtgtatgtggtaggaaacccacggttttggaactgtgtaccataatcttcctcaattcctgaaagatttcagattttttaaaaatctgggctaataggccaggtgtggtggctcacacctataatcctagcactttgggaggctgaggccactggatcgcttgagctcagaagtttgagaccagcctgggcaacatggcgaaatcccatctctactaaaaatataaaaaaattagctgggcatggtggcacatgtatataatcccagctactcaggaggctaaggtataagaatcatttgaacctaggaggtggaggttgaagtgagccaagattgcaccactgcactccagcctggcaacagagcgagaccctgtctcaaaaaaaaaaaaaaaaaagtgtgggggccgggcacggtggctcacgcctgtaatcccagcactttgggaggtcggggcaggcggatcacgaggtcaggagatcgaaaccatcctggctaacacggtgaaaccctgtctctactaaaaatacaaaaaattagtcgggcgtggtggcgggcacctgtagtcccagctactcaggaggcggaggcaggagaatggtgtgaaccggggaggcggagcttgcagtgagcggagattgcaccactgcactccagcctggacgacagagcgagactccttctcaaaaaaaaaaaaaaaaaaagtgttggggggtggctatatatttacatatccatagtggctacctccaagcagaagtgagggaaagagatctttctccttttcctatttatacttctgtattttttaaacaatgagtagaagatacactctttttttagagacagggtctcgctctgttgcctaggcagtagtgtggtgccatgaacacagctcgctgcagcctgaatttactgtgctcaagcagtactcctgcctcagcctcttgagtagctgggacaacaggcacgtgcgaccatgccaggctaatttattttttgtagagatggggtcttaccatatgcccagattggtctcaagcagtcctcttgccttggtttcccaaagtgttgggattacaggcttaagccaccatgcccagccactttttttttttttttttttttttgagacagttttgctttgtcacccaggctggagtgcggtggcaacatctcagctcactgcaacctccgcctcctgggttcaagcgattcttgtgcctcagcctccctagtagctgggattacaggcactctccaccacgtccagctaatttctgtaattttagtagaacgaggttttgccacgttgccccgtgaggacatggtgtcgaactcttggcctcaagcaatctgccttcctcagcctcccaaagtggtgggattacagacatgggccaccatgcccagctcacttttttttttttgagacggagtttcgctcttgttgcccaggctggagtgcaacggtgtgatcttggctcaccgcagcctccgtctcccggcttcaggtgtttctcctgccttaacatcctgagtagctgggattacaggcatgcaccaccatgcccggctaattttgtatttttagtagagatggggtttctccatgttggtcaggctggtctcaaactcctgactcaggtgatgcccgcctcagccttccaaagtgctgggattacaggtgtgagccactgtgctcggcactttttttttaatgtagtgattctctcagtctcatgactaattagtggtagttaagggttcagacttggacctctgcagagttcagagcgcttgagacagggcttgctctgtcacccaagctgcagtaggagagtggcactgtcatggcttactgtagactcaagctccctgggctcaggtgttcctcccatctcagcctcctcagtagctgggattacaggcacatgccacaatgccctgctaatttttgtagagacgggattttgctatgttacccaggttggtctcgaactcctgggctcaagcagtccacctgcctcagcctcccaaaatgttgggattacaggcatgagccactgtgcctggcccagtctcttttctctatgctgcatgacttcgatgagtctaaaggatctcagacaccagagttttacttccttagttgggggtaaagtgtgggagaagctggctcgtgggggtaggggtggggtttatattctgcatctttgtgggcttgtggataaaaaagtctgaagtacagatcctaatctggttcttgcctttcaggcactgcattgatctcttcttagatttcattactgtcttcagaaaactcatgatgatcctggccatgaatgaaaaggttagttagcctacaacccaaagatgagacaataatggctcctgagcttggcatgtgtgtatacttcagatttgaaaacttgctcacacactgtgttaggtccagggtaactgtaaggcaggccactgagtaagaggtaagccagaagtcttcagttgttagaaaaaaagcagcaagtgaaaaaaaaatttttttaactaattcctgcgtttagtatgaaagggaaaaaagcttcagtggcagtaaacacaacctgctacatgaataatttaaaggctatatagttgtgactcagagaaaggtattgtggaggacgttgtaaatttcagaagtagactaattttatccatttgttaatttttttttccaaggaagcattctatatagggctaatgagtatctaacgtagttgagtcaagcagtgggggaaacaaatgaaatgagcttttctttatagaccttatggagcttagagatagcatagtggtagcgggagtagttgaccagataggattgctggctctgtctgggctatgccatggttggactgagcactaggcagatgtacaagtttcagaacaagcaactgaattttcattccttaatacattgggcttccatccaagattgaatgaagaattctgctggaccaaattatttctgaatgtcagtttatgccagagtcatgctcactttgcagggtggagcacttctcgcgcctaatggttggttggtggtcttggcctctagtttcactctttgaggatagagtgccatctgcagccttcactgttgggatctgagctgtagtggctgtgaatagcctagagtggtcaggcagcccacctcggcactcctggggtgggggtggggacagctgcttaacctttattcttggtcggtctgtcggcaactttgggaaccaccagtaggatgtggttaagattcagttcttgctgagctaaggaagcatttctcatttctttttaattgtctggctcacttctagtccctaactaaatgctcactcaagagttttagcttgaatgtcaaatgtcaaaaaattaattgggtgatttttctccatttctaggataagaagaaagagaagaaatgaagtgaccatccagcctttcccaattagacttcctctccttccacccctcatttcctttttgcacacattacaggtggtgtgttctgtgataatgaaaagcatcagaaaagcttttgtactttgtggtttcctctattttgaattttttgatcaaaaaactgattagcagaatatagtttggagtttggcttcatcttcctggggttcccctcactcccttttttgtcaaccccatctgtagcctcttcctctactcaggcagtcgacccgccacgatgagaagtgggaccagcagagggcgccaacttcaggagtccgctttcccaccaggcttcattcacccagtggacctgaactgtttggtagagccacccggcccttccttcctcattgttgtttggtatgcgcacagttcctgtgggactgggccgtgagttttccattggaaagaagttcagtggtcccattgttaactcagcctcaaatctcaactgtcaggccctacaaagaaaatggagagcctcttctggtggatgctttgctccctctgagctgcccatgctggtctggcaaacacacctttctgctttgccttcacaaaagtaatgtgttccctttcccaccccttgcctgaccctcagggagtcagcctgcttccatccatgggtgggaagacttcagcacaaaggaaagactaattcttgtcaggcatttttgaaaaggctgattatgtgtatcaaggtacagcatcgtagggttcccctaaacttgccctgtttttgtttttttagtttgttatccccttactgagcggcctctactaggtggctgtgattaaatgtcccaagcaaggatagggaaggggaatggttgagcctctggagatcattgtaaccaatcctgccagacctgtttggggcagtggggagcaaacctagataaggacctgtttggggcagcagggagcaaaatctcctttaacaaccaagcagttcctcattcacatcaacagagcgaggctgtgataacttaggaggcagcaatcctaatagtccttcagtgcattttagtctgtctccaactggacaccagtaggtagtgtcaagccagagattcggggcagtagataaatgttcattttactgatgcactttagtttttggtctgttacctgttttccagaaatttgtggccttttaggcgggagttaggcgaccaaaccagtgagagccccaatccctgcagttttgtggcttcaagtgtgggtggacagtcctaatggggatctccagctccttcctgtgggctgccacagacagctacccccagaagggtcaatgttgggagtggttgtggctctgagctgctctacagagcttcagtgtgagaggatcgagccattgaaagctcattaccagtaggacataatttttggctctccctattcacaaccagtgcacagtttgacacagtggcctcaggttcacagtgcaccatgtcactgtgctatcctacgaaatcatttgtttctaagttgtgtttattc

SEQ ID NO: 627 - DNA, 6000 bp, Homo sapiens
atctctactaaaaatataaaaaaattagctgggcatggtggcacatgtatataatcccagctactcaggaggctaaggtataagaatcatttgaacctaggaggtggaggttgaagtgagccaagattgcaccactgcactccagcctggcaacagagcgagaccctgtctcaaaaaaaaaaaaaaaaaagtgtgggggccgggcacggtggctcacgcctgtaatcccagcactttgggaggtcggggcaggcggatcacgaggtcaggagatcgaaaccatcctggctaacacggtgaaaccctgtctctactaaaaatacaaaaaattagtcgggcgtggtggcgggcacctgtagtcccagctactcaggaggcggaggcaggagaatggtgtgaaccggggaggcggagcttgcagtgagcggagattgcaccactgcactccagcctggacgacagagcgagactccttctcaaaaaaaaaaaaaaaaaaagtgttggggggtggctatatatttacatatccatagtggctacctccaagcagaagtgagggaaagagatctttctccttttcctatttatacttctgtattttttaaacaatgagtagaagatacactctttttttagagacagggtctcgctctgttgcctaggcagtagtgtggtgccatgaacacagctcgctgcagcctgaatttactgtgctcaagcagtactcctgcctcagcctcttgagtagctgggacaacaggcacgtgcgaccatgccaggctaatttattttttgtagagatggggtcttaccatatgcccagattggtctcaagcagtcctcttgccttggtttcccaaagtgttgggattacaggcttaagccaccatgcccagccactttttttttttttttttttttttgagacagttttgctttgtcacccaggctggagtgcggtggcaacatctcagctcactgcaacctccgcctcctgggttcaagcgattcttgtgcctcagcctccctagtagctgggattacaggcactctccaccacgtccagctaatttctgtaattttagtagaacgaggttttgccacgttgccccgtgaggacatggtgtcgaactcttggcctcaagcaatctgccttcctcagcctcccaaagtggtgggattacagacatgggccaccatgcccagctcacttttttttttttgagacggagtttcgctcttgttgcccaggctggagtgcaacggtgtgatcttggctcaccgcagcctccgtctcccggcttcaggtgtttctcctgccttaacatcctgagtagctgggattacaggcatgcaccaccatgcccggctaattttgtatttttagtagagatggggtttctccatgttggtcaggctggtctcaaactcctgactcaggtgatgcccgcctcagccttccaaagtgctgggattacaggtgtgagccactgtgctcggcactttttttttaatgtagtgattctctcagtctcatgactaattagtggtagttaagggttcagacttggacctctgcagagttcagagcgcttgagacagggcttgctctgtcacccaagctgcagtaggagagtggcactgtcatggcttactgtagactcaagctccctgggctcaggtgttcctcccatctcagcctcctcagtagctgggattacaggcacatgccacaatgccctgctaatttttgtagagacgggattttgctatgttacccaggttggtctcgaactcctgggctcaagcagtccacctgcctcagcctcccaaaatgttgggattacaggcatgagccactgtgcctggcccagtctcttttctctatgctgcatgacttcgatgagtctaaaggatctcagacaccagagttttacttccttagttgggggtaaagtgtgggagaagctggctcgtgggggtaggggtggggtttatattctgcatctttgtgggcttgtggataaaaaagtctgaagtacagatcctaatctggttcttgcctttcaggcactgcattgatctcttcttagatttcattactgtcttcagaaaactcatgatgatcctggccatgaatgaaaaggttagttagcctacaacccaaagatgagacaataatggctcctgagcttggcatgtgtgtatacttcagatttgaaaacttgctcacacactgtgttaggtccagggtaactgtaaggcaggccactgagtaagaggtaagccagaagtcttcagttgttagaaaaaaagcagcaagtgaaaaaaaaatttttttaactaattcctgcgtttagtatgaaagggaaaaaagcttcagtggcagtaaacacaacctgctacatgaataatttaaaggctatatagttgtgactcagagaaaggtattgtggaggacgttgtaaatttcagaagtagactaattttatccatttgttaatttttttttccaaggaagcattctatatagggctaatgagtatctaacgtagttgagtcaagcagtgggggaaacaaatgaaatgagcttttctttatagaccttatggagcttagagatagcatagtggtagcgggagtagttgaccagataggattgctggctctgtctgggctatgccatggttggactgagcactaggcagatgtacaagtttcagaacaagcaactgaattttcattccttaatacattgggcttccatccaagattgaatgaagaattctgctggaccaaattatttctgaatgtcagtttatgccagagtcatgctcactttgcagggtggagcacttctcgcgcctaatggttggttggtggtcttggcctctagtttcactctttgaggatagagtgccatctgcagccttcactgttgggatctgagctgtagtggctgtgaatagcctagagtggtcaggcagcccacctcggcactcctggggtgggggtggggacagctgcttaacctttattcttggtcggtctgtcggcaactttgggaaccaccagtaggatgtggttaagattcagttcttgctgagctaaggaagcatttctcatttctttttaattgtctggctcacttctagtccctaactaaatgctcactcaagagttttagcttgaatgtcaaatgtcaaaaaattaattgggtgatttttctccatttctaggataagaagaaagagaagaaatgaagtgaccatccagcctttcccaattagacttcctctccttccacccctcatttcctttttgcacacattacaggtggtgtgttctgtgataatgaaaagcatcagaaaagcttttgtactttgtggtttcctctattttgaattttttgatcaaaaaactgattagcagaatatagtttggagtttggcttcatcttcctggggttcccctcactcccttttttgtcaaccccatctgtagcctcttcctctactcaggcagtcgacccgccacgatgagaagtgggaccagcagagggcgccaacttcaggagtccgctttcccaccaggcttcattcacccagtggacctgaactgtttggtagagccacccggcccttccttcctcattgttgtttggtatgcgcacagttcctgtgggactgggccgtgagttttccattggaaagaagttcagtggtcccattgttaactcagcctcaaatctcaactgtcaggccctacaaagaaaatggagagcctcttctggtggatgctttgctccctctgagctgcccatgctggtctggcaaacacacctttctgctttgccttcacaaaagtaatgtgttccctttcccaccccttgcctgaccctcagggagtcagcctgcttccatccatgggtgggaagacttcagcacaaaggaaagactaattcttgtcaggcatttttgaaaaggctgattatgtgtatcaaggtacagcatcgtagggttcccctaaacttgccctgtttttgtttttttagtttgttatccccttactgagcggcctctactaggtggctgtgattaaatgtcccaagcaaggatagggaaggggaatggttgagcctctggagatcattgtaaccaatcctgccagacctgtttggggcagtggggagcaaacctagataaggacctgtttggggcagcagggagcaaaatctcctttaacaaccaagcagttcctcattcacatcaacagagcgaggctgtgataacttaggaggcagcaatcctaatagtccttcagtgcattttagtctgtctccaactggacaccagtaggtagtgtcaagccagagattcggggcagtagataaatgttcattttactgatgcactttagtttttggtctgttacctgttttccagaaatttgtggccttttaggcgggagttaggcgaccaaaccagtgagagccccaatccctgcagttttgtggcttcaagtgtgggtggacagtcctaatggggatctccagctccttcctgtgggctgccacagacagctacccccagaagggtcaatgttgggagtggttgtggctctgagctgctctacagagcttcagtgtgagaggatcgagccattgaaagctcattaccagtaggacataatttttggctctccctattcacaaccagtgcacagtttgacacagtggcctcaggttcacagtgcaccatgtcactgtgctatcctacgaaatcatttgtttctaagttgtgtttattcctggagtgacatgccaccccgaatggctcactttcactgaggatgctgtcctctgatttagctgctgcctccagcctctggcttgagaacttactaaaggcacttccttcctgttaaacccctgttaactctccataaatttggtgattctctgctaggcctaagattttgagttaacatctcttgaagccaaactccaccttctgtgctttttgcttgggataatggagtttttctttagaaacagtgccaagaatgacaagatattaaaaaaaaaaaagaaagaaaaaaaaaaaaacacctacttttaaagaaaatacctaacagatttttaatatagttatctctaccactttcttttctagtttcttgattttcagctcaggctgcattctaactcatactgtgaagacaaaggtgtttttgattcagaaatatatgaaatctgcatagtcttaatttgtaaaaaataaagaaaattccttaacctttcctggtgtttgtgttaaattcaagggtacagctggtcatggagcttgtgatactgccagggtttgctactgggggctgggagtgggacacgattgagttcgtgtcataagtatgaacagagacaaagacctcccactctgtagccccagcatgccacaaatgttgagaattttctctgtcaaatatgtaagccagttttttttccagtcctctccaccccctgccacctttgctatatgttgtttgtggtgatatgtgcagttggttcagatgtgcagccaagctttggagtttgaggatgcataatggaaaaaaggcaaatgatacccactcattctgcaagtatttttgttcacccactgctgcccggctgtattctaagtgcattagttaataaagatgtaaaagttggccaggcatggtggcttatgcctgtaatcccagcactttgggaggccaaggtgggcagatctcgaggtcaggagttcaagaccagtctggccaacatggtgaaaccccatctctactaaatacaccaaaaaaaaaaaaaaaaaaaaaaaattaggcaaagtggcaggcacttgtaatcccagctacttgggaggctgaggcaggagaattacttgaacctgagaggtgaaggttgcagtgagctgagatgcaccactgcattccagcccgggtgacagagaaaaaaag

SEQ ID NO: 628 - DNA, 6000 bp, Homo sapiens
acacattgcaaccccagctttttgtattcagtgcctgcctgcgggtggctctgagctggcctttccatggcatgcactgcccagagcccctcagcgtcacctctggggccacattcagggaggacaacggacataagcctgggccccagatatggcagggtcaggccaaatgtgtggctggggtccccggccaggtttagcactggccagtaaagtgaggcggggaagtttgcctttggcacctgtgccctctgcacatgctccctccctccctgcaagcccactcctcccctatctccaccagcataggagacggcactcgataagcagccatcagcaagtcactcagctctcagactcctttcctcatgtaagaccatgaggacgcccacctcccagggcaaatggggagagggagatgagatcaagtgttggtctggggaaggactcttcagatgtaagttaatagcgtccttgtcccagggggcctcctgccccatcccatgtgctcctcctgcagagtctcctgttcagctgaacactaactcaagtacctgccctccttttaggggtttgcagtcaattcggttgctagctctcagccaagatcctagctacccactaagatgttaactataaccaagatacctgctctcaaccaagacattagttaacaatgctttccatctccaaggagatagcagcagatgactttcccctgtaaatcaatgcactgccatgcagaatctctgatcatgtcttttgccctcattagactgtcagttctatgagggcaagttctctggaatatagtaggtgctcagcaaatattgttgggaataaatcgatgaaaagactttgtttgactcacaggcatcaggtggcagtgatgggtcatactggtcagtggggttgaaatttgaagcaggccatcccagagaacaccacatagataagcatctgtggctatggaccaagggctggggcagaaatcatttcattcctcttctctccaagagaaaagccagctggctgctctagggggtctcctgcgtgggtgcttctcagaagggccacccccagagctggacagatccaagccttccaagttaagagactccatttcattagctcacccaggggtgaccaggctctgggaaaccaaccaagcaagctactgattgaacagccagatcagcagtttatgaactgatgctggcagctgtgactgccaagtggcccaaagcatttgcactgggccttctgcttgctcattctctctgcagaaggaaaatgtgcttgggaatccaaatcaaacacagaaggagcagagcggaatggagagaaatcatactcaaaaatacaaatagtggatgccacatacactgtcataaatctaccctcaaaaccacaccgtggtgtgggcattgctactatcccactttgtagatgaggacactgaggtcaagtggatgacttggctactgagcaatggagccgggtctcaaacccaggcatttcaactcctgttcctgtctggagtgcccttccctcagtgccactgagctcaggagactgacgcaccccgtgcagggctcctctcagccctggccatggctccccattttcgctgtgttaaggccactcagctccccaaggaacagtgctgcctccctgatgagatgcaagagacacctgagtctcatcagtagcacgtgcatgtcctcaagagggcacctctccttctgcagataataacaatgaaaccacattaatataatagcaagcattcattaagtgcttactatgtgtcaggcaccacgccaggccccttgcatgcattatctcattctcacaacaacctcaggaggcaggcacgctcatctcccttttacacatagggactcacaggcctagagagattaaatgctctgcccaggtcctacagctaatgagtggtagagcagagcctgcagtccaagtggatctgactttcaagcctgtgctcataattgcccccacctcctcacctttgacggtggccctgcctcaatgtcccatgtgctggaattgctccctgttggagccctggcctcttgggcctgccggggggagcattgcaccagggctgggattcgactaggattctacagggctgcgtctatagcaactctaaagtctgggtcttgggagacaaggagtccatggcggaggtgaaggaaagggaactgggcatgacccctgtctaccaagcagagtgcaagctgcaagggcaagccccaatcccttcctcctctatccacttctcccatagttcctgcctcaccgagttccccactcttcacacaacaccagtcaggcctcccaggcttccctaggccttcccagctagcaaactcctacttaagcctcaggtgaaatgccacctctcctgggtcaccttcctctggcccaattagtagctccttccttcatagtcctaattgtgcatttcctgggttttcttgtaatgacctataagtgtcccccatgacgctgcgagcttccccaaggcaggcacggctttgtgtttctcgtctcttttgctcttagcaagtccctgtcatgcagctgttgccccatacatatttattgtatgatgaatgagtttcagaggacccagggaacatgcctttcatacacaagtgactgaagagcccagttaacaagaatgtgaatcaatgtaaaagaattctaatcccgggctgggcctggtggctcatgcctgtaaccccagcactttgagaggccgaggcgggcagatcacctgaggttgggagttcaggaccagcctgaccaacatggagaaaacccgtctctgctaaaaatacaaaattagctgggtgtggtggcacatgcctgtaatcctagctcctcgggaggctgaggcaggagaatcgcttgagcctgggaggtggaggttgcagtgagctgagatcacgccattgcactccgacctgggcaacaagagcgaaactctgtctcaaaaaaaaaaaaaagaaaagaaaagaaaagaaaaaaaattccaatcccacgtggatcagtgcttcatcacctttgagatactggtggactttttggcctctttctccagaaaagcgcaccacgcctgccaaatttcatatgctacttaagggttctgctctttaggcttggagcccagaggaaagctacatggcaaagggtaggagccactgtatacagtgggcaggcctggcaggggcaggggggtgacacagcgctgtctcagagggaatctgttcctagtccattaggccaagcagggccccagggaagagcctgtttcctgggaggaaaggcattaaccccgggtgctgttagcagcagggcagaatgtttacacctggggctccgaagccggcctgctcaggttgaaatcttggctttgccactttccagctgtgtaacctttagctaatatttaaggtctctgggcctcgcttcctgtaggaagaatcggattcttatttgatggggatgtcggtagcactgatgggctgtcagtacagcacaagtgcccgggccctgcttgtacctgaagcgtttgccttcctctgagagcagggtccggagggaatggcaagaagactaggcctcagcttgaaggtcccctctcccaggaagccttccctaacttcctgccacactcacataggtgaggctccttgttatcagccccactgctgcctggaaccttgttatactcatcatcctaacaattacttcctctagactctaagctctgtgaggacagggatcccggctgtcttgttctctgctgtatccctgtgcctagcacatagcaggtgctcagtaaatagctgctgaatagaattagggacagaaggtgtcacaggagggccactgggtagtcaggcagctggtgagggtaataaaattgggggtggggctgagggggacacctgggctgccatagtcagtgtcacactgcctgggcctctgacctctctctctctctcctcacttctcccagttcctggcacttgacacccagttgctgatgggtaaccgacgccactcgctgagccctgaggagtatatttttggagccctcaacatttacctagacatcatctatatcttcaccttcttcctgcagctttttggcactaaccgagaatgaggagccctccctgccccaccgtcctccagagaatgcgcccctcctggttccctgtccctcccctgcgctcctgcgagaccagatataaaactagctgccaacccagcctgtggccaggtcactgtctaccccagcccagcccagccctctgccgcttgtacatacgccatggggaccctgaggaactgaggccacgtcaatccctgtgccgccccattcgcccgttacatcttccaaactgggacggtcaaggctgaaggctcctctgggtttgagggtccaagggacaaggaggagaagcctagcaggatttcagatgcaggagagagacccaggaagcccggcagagccctgagccccactgcaattcctcctagggctgcacaatcatgtggccttagggcacactgtcctgcatccagtctgtgtcctcctgtctttctcatccaggtcaggcattgacactttgtaagaaagggggtaggggacacagctgggcaggtggagtgggtgggcaggatggctgtcccagtctgcccatcttctcttggctctgggaccagcggcttgttctagggatttggacctggaggccaagggcaataggagagggtctgaagcctgtgctgtctgctgcttgctgtgaatggccctcccgggtcatgacagagctcttttggggcaggaggtgagggcagggggccccgctccttggtaagggcctgccctggggctcccagggaagtgggagctggggagccaatccacccagacccgcgtccacctgggaggcatttggggttgcaggaccgagacccacatcctctcactcacttctccacccgccaggcagctgccacaggcctaaggctgagtgaggtgtgattgggccctccggctggatgttctgggggaggaggcaatcgctgtagctgccaggccagccccatctggaaggagtccctgctctgcctcagccctaacccgaggctgtgtgggagtcccttctgcacctcttatttcctaaacccttcctgtcagctgctgtttgctggctcgtccccagccaggcctcctgaggtcttcatagttggcacagtccacatctcttctagcttcactggccactcactcagcccagagtccctaagtgctcccccacttatctctgcatctctccaatttggaagccatccagctgatgctaacagccagggccagtccctccagctggtcccatgtaatgaggccagggctccttatcagcttccaggcggctgggatctcaggcagggtgtgcgtcagccctccaacccccagaggggcgcctgtggggagggaaccaggaggccacactgggggagcgtgcagccagcatgtgcagtggccaactccaggccagtggaaagttactgtgtggatacaggaaggctctgagtggctagcaggaccctcccttggcttcgccctcctcctcttctctctcccctgtgctgggagctccgtctgccttgggaagggagacgaggtgtgctgttccttcccagccccatccctccccacccttcctactcccagctttcaagaaacattgcagaagcatttgaagttttgttccatcttggatatttgaagagaaaaggagccaagaactggcgggtggtgtgtgtgcagcaaaggcattgggggcacgggtgagatgcccactgtgtgctggtctaaattaatccatcgcagtgatcctccagagacagcgctctgctcatgtccgtagcagagggaaaagccgaggtgct

SEQ ID NO: 629 - DNA, 6000 bp, Homo sapiens
ctggcgtggtggcttacgcctgtaatcccagcactttgggaggccaaggtgggtggatcacctgaggtcaggagttcgagaccagcctggcaaacatggtgaaaccccgtctctactaaaaatacaaaaattagctgggcatgatggtggtgactataatctcagctacttgagaggctgaggcaggagaatcgcttgaacccaggagacagaggttgcagtgagcggagatcgcaccactgcactccagcctgggtgagagagtgagactccacctcaaaaaaaaaaaaaaaagaaaaaaagagaaaacaatgtaatagcaaaaattactacagaggttggtctttcttatcttttttttttttttttttttttttgaggctgagtttcactcttattgctcagactagagtgcagcagtgcaatcttggctcactgcaacctctgcctcccaggttcaagcgattctcctgcctcagcctcccgagtagctgggattacaggcatgtgccaccacatccagctaatttttttttatttttagtagaaacggggtttcgccatgttgatcaggctggtctcgaactcctgacctcaggtgatccatccaccttggcttcccaaagtgctgggattacaagcatgagccactgcgcttggcctggttggtctttctgaagcatgactttaaacacgtcatttccatgttcaataaaaccttgaggccaggcacagtgacttactcctgtaatcccagcctttgggagagcgaggtaaaaggatcggttgagcccaggagttcgaggccagcctggacaacatagtgagatcttgtctgtacaaaaaataaaattaaccaggcatggtggtgcaggcctgtagtcccagctacttgggagggtaagatgggaagatcgcttgagcctgggaggttgaggctgacgtgagccatgattgtgccactgcattccagcctgggcgatagagtgagattctgtctcaaaaattaaataaataataaaataaaataaagcttgaaactccccattactttcccgccttgtacaaacagaataaagcctatcatggggtggagatttgaggatgttaccccaacaacctccccagctcccctggggagccccttactgtttctgactcccttgaggcactattctcccagccctcagccaccccagcactgcctgtcccctcctgcccgggggtgagtctgaagggatctcattcttcttgaagaatggcttctaccaaatgtgtcaacagggacagagaccacagacatgacaaatgaatgaacaaatgagtaactgtggaactgagctgccttatgtggtggaaattatttcattaaacaatatttgtggaacccttaaggctaacactaatagctaacaccaagagcttattgtgtgcttatagtcatcaaacatgcatagagcatgtgttagatgcctggttctgttctaagtgccttacaaatcctaactctcctcattctcacaactttcacaactcatctctcacaagctctcatacagcttttaaatagaggagccgggatctggagcaaagctgcttgactgtgtagccttggcttttgactaccacacctaactatcaccagatcccagaggaatgttacacgaatgtttaatatttgagtaatgtcagctgggcacggtggctcatgcctgtaatcccagcactttgggcggctgaggcgggcagatcacctgaggtcaggagttcgagaccagcctggccaacgtggtgaaattctgtctctaccaaaaataggaaaagtagccaggcgtggtggtgtgcgcctgtagtcccagctactcaggaagctgaggcaggagaatcgcttgaacctgggaggcggaggttgcagtgagctgagatcgtgccactgcactccagcctgggcaacaagagcaaaactacacctcaaaacaaaaatttttttgagtaatatccaaagaccacctcatgggaacatataccctagttacttgggaggctgaggcaggaggatgcttgagcccagaaattcagactgtaacaagccatgatcataccactgcactccagcttaggcaacacagcgagaccctgtctcaaaaaaaagttggggggacatatacacaatgtcaaggtaatagagtccaacatctgagaaacatcatagcactgacaatgtcaacatgtctgaggaatataaggattttgtataatgctgtactttactcaaccaaatacttatcaacccaccacatccatgtcagtcactattttaacccacaggtgtaaagcaatgacacaacacccccaaactcctcctcttctgtagctgacgttctaatgggagagagagagagaacaaaacaaaacaaaacaaaacatgtcagaggtgacaattgacatagaaaacataaagcttaatcagaaaaaagggactgtccaatttgctgggtgggggtatgcgggtggcactgctactttgtataagatcaggaagaccacccctgagataatgtctgagcagagtagtgaagttagtgagggagggagccacgcaatgatctgtagaatttccaaacaagacacagccagtgcaaagggcctcagctaagcgcatgctcagcccagtctaaggaatggccaagaggcctgtgtggctggagcagagtgaatgcgagagaaggaacaggagtgattcacaaacatgaaagtgctaaggctgatgaaagtcaggctctgcgtagtgccatgtctgggaaatattactagctacaattgatggagtgcattccacacacctggcactgcattcagtccagctcacaccaaaactgctacaggagcttagagtgtaacagggagtcagtcaaagaaacttcacagcgccacgtgacaggcgttacatcagggtgctagggaactacagaagaggagcatctaaccccaactagggggggaaggaggcttcctggaggaggtggcattcaagctgtcaagcaggagaaggaaaacacttccaggatgcagatgcagagaaggagggaaggccagaacctggaccagctggtcagagctccaggtgcagtgctggggaccagggcacagcttgctggaagaagagctcgggtttgtagggttgagagagcctctggacacggaggcccaggcttaagtgtgtttgtgcaaaattggtggttatggagtgggggacaaagggcaaaaaggggtgggataaagactttgataattaggccaggcacggtggctcacacctgtaatcccagcactttgggaggctgaggagggtggatcacttgaggtcaggagttggagaccagcctggccaacatggtgaaaccctgtctctactaaaaatacaaaattagccgggcgtggtggtgcgcgcctgtaatcccagctactcaggaggctgaggcaggagaatcacttgaacccggaagacagaggttgcagtgagccaagattgtgccactgcactccagcctgagcaacagaacaagattttctctgtaaaaaaaaaaaaaaaaaaaaaaaaaaagactttgataatttgtctgcctacctgggccctgctttctcagggactttaggtgggtccctgggcagtgagagggaagcagaaggtaagtggccacccccacctgtcccaggtcttagtttctcgtcccatcctagcaggttcagatacttcttttaggcagatttgtgggtgctcgctctggggcagcccaggacattctggtaggagactcctcagttaataatacctcacatacttccagcacttcttggtcttttatgtgcttttacggccataacctgtgcgtctgacagtcaatctaggatggacagagctctgttctaagcctctttttcgtaggagctgcagctcagagaggttaagggccttgccaaggccacgcggccagtgggtgactaaattgggacttgatcccagctcttgagattgcaaaccccatagtgacactgcagcagctacagaaaacggggcctgatgatggctgggtcccagtgacacgtctggggaagcggggagaacgagctctggcatgggaggaatggaaaaggggggaagatggagacggggtgatggaagctaagcgtggaggcaggaagagagctctggcaggggttgtagaggctttgagacagaactagcggtgtctccagaaagaccccgtgaaatgtcccagcagggctgaaagaaacagaagaggtgtcctcccaccccatgtctctgtgaaccaaggcagggagggacctactgtgtgcatttcacaggcgagaaaaaggagcaaggataggtggctattggcttgccccaggcccacaggagcgcagggcccaggggccctgttagaagcgggcagcacaggcgagacttccagaccttcccctctaccagggatgatgaaatagatgatgagaggggaggtggagatggagacagaaatcagggccgcatccaaagagggaggaggaaaaggcagaggcgcagctggagctgcagagaggtgcagagacagtggagatgaggccctgatgcccggctctggtttcacgcgggcagcgtcagctggtcggtgtcacggagttcccgcgtcctccgcccgctcagcccccgcggacccatccactggggttgctccgcagcgcgactctctctcatcccgggggagggctaagggcggcggtggggggcggggtgggggggaagcggcgggagggggcggtgcgccgccgccttaccccgggctcgcgaatccgcagcgtcctccgcagcatcttcccaggcccggccctctcctccccccgcgccgatggtacgcgccggctcgcctggcccggctgcagtggatgttgctagaacccacgcggaggaaggaagagacgcaggcaggctgcggttacccaagcggccacccgggcctcagggaccccttccccgagagacggcaccatgacccagggaaaggtaccggcatctccccagcctgcaccatcctccatcctccggctcccggctccctgtcatcctcagcaagccctctggaccacgaaagcatcctcccctggccctagtttgaaggtcctccgtggtccttgctgaagtcagaggaccgaaaggccggtgtcaaggaatggaccgaggcctcttcctgcccgcaggcgcgcctctcctcccctgtcaccctgccacccctgctttggcattacagcattacaaggctcctcacagatacccaggccccccgtgaggagtcagcccgggcgtctggtgtgactgtatgtgtgtgcatgggtatgtgtgtgccagggtgagccctgaggggcagtgcctatcgggcaaccccctctggcccaaccctccagtcccaaacccaaccactttatgctcatctttcccaccctccacggaaacaacccccaccctactccctgccattgttccacatctgggcgtcttggctccatccctgtgcttggggcttgctatgacaactctgcatcaagatgctctaattgttgttttggttttggccaggcatggatgggtccggatgaagcatctcttctccagttttaggcctgaattgtaggggaggggctggggcagagactcggctggcctagtaggcttatgtaacatcaatagcctgtggaattatacaaccactagggcctggggctaagggggagggtactcgggccctctgtttgggttgctaaggattgggcagagaaaacaggggaaggacctcccctacactcccccttcttctctttgagaggagcttcagagccaatgacatccttccctggaccctcagaccctcctctccctgtatgcaagctctttgggcctcaaatgatgtcactgggtgataccacctcccgccattggtcacacct

SEQ ID NO: 630 - DNA, 6000 bp, Homo sapiens
gcgcctcccaaagtgctgggattacaggcatgaaccaccgcgcctggccaaaaatttcaagtaagtctagcatttgcattttcaaattcagacactgaaaagtttatatgaattaaagttttcaattggattaatatcaattataagggaacttgctatttaaactaatattattgtattatttgttgtcttattgtactattttttactgatatggtattttgggacatgagttataactggtttacctattatgcgaatctctgttttcatgtattagatatgtttaagatgaggtgcacattttaattaatgtagattcttgttttcttttcctttttttgtgtggtgggaggacagagtttcacttttgtcgcccaggctggagtgcaatggcgcatatgacttctttggtgtttgtgctttcagtttgctgtggcactctttttctcagatttacacatactgttctctttttgttagtgtggaattagtcacaaagaggtgcctgtctctctagatctggaatataatataattaaatgtcaattagtgaagtagcataacaactttagggctaagtctacagataccttttcagaaaaacaaacacaatgccttagatttttattttaactctttttctctaagaatttcaacatattatatcctctgtcctatttattttcacctctctggggaatgtgttctcgtttatcttttggtggtaagaggtagttgatacagtatatattttggtgtcagataggcctgcattcaaatcccagatccttctcttcctggatatgactttggacagagtaatctttcaagcctcaattttatcatcttaaccctatgaattaagtattaaaaaggaggtaatacttaattcatagagttatttgagagttttaaagggattatgagtgtaaaacagtttatactgaatactatacacctgttcattagctcaataatctaaggatactactgactataagatcaccttcacacacagtcatagctgcaagaccaaagtataaaacacttcccagggccaggcgtggtggctcatgcctgtaatccttgcactttgggaggcaaaggcaggaggattgtttgaacccaggagtccaaggccagcctggggaacgtgagacccctctctctattagaaaagaaaaaaaaaggaagaaagaaaagaaaacactgctcgggtcatgatttttttcgttgttgttgttttttgttttagacagagtctcgttctgttgtccaggctggagttcagttgcgcaatctcggctcactgcaacctccgccttcctgggttcaagcgattctcatgcctcaaccttccaagtagctgggagtacaggctcgtgccatcattcccagctatttttagtagagatggggtttcgccatgttggctggactggtcttgaactcctggcatcaagtgatccacccaccttggcctccccaagtgctgggattacaggcctgagccaccgcacccagcctattatttttatttttagagacagagtctctgccgggtgtggtggctcaggcctgtaatcccagcacttggggaggctgaggctggtggattgcttgagcacaggagttcgtgaccagcctgggcaacacagggagaacccccatctctattttattattttttttaattaaaaaagagagggtcttgttctgtcactcaggctggagtgcagtggcatgaacacagctgtcactgcagcttgacctcctgtgctcaagtgattctcccacctcagcctcccaagtaactgggatcacaggtgcatgccactgcacctggctaatttttaaaaatttcttgtgagacagagtctccctccatgttgcccaggctggtctcaaactcctgggctcgagcaatcttccctcctcagcctcctaaagtgctgggattacaggtgtgagccaccatgcctggcccagatgatcttctgactgatcaagagcttattgccaaattgaattctgccgtcttctcaaaggatgtactaacattggtttggctatcttctagtttggtggcattaaccaattgaggttaatgcattgggcactggggctgatggtaccctgatgaatttccatgactgctggaacactggatgtgtaggcatatgagacacttttttagcatcctcaacatgggcatcaggctggttttttgttactcagcctactgattctatagagtggtctaggatagttttctcttcccttttgtcttctgtatgcacaggaagaatgggatcatgaaccaaaccttctacacaactgaatagaaagcttatgattaaaaatagctaacatttacacagcactgactgttgtaaacattttccaatatatcagctgtttaatcttcacaaaacccaatgagatagacatcgttattcctggcttgcaaatgaggaagctaaggcagaaaacttatgtcccttgcccggggtcatgccactagtaagtagaggaagtggggtttatattcaggcagtctggctccaggatcaatgctctcgatcactccaggatccatgctcttgatcactcattatattgcctctgaatttcagcaaagagagatgacaagtgcatgttaccaaaagattgcttttttctgatctactgcttttttattttgcagtgtagtgtcctagcttcttggagtctctgatgtcacctaggggagagaactgaaattcttagcatgttttcccaagccatccagcctctcacttctaaagctgagatggcttggtagctagtggatctggcttcatagtttcttggttgcagtgaaaaatgtaccaggttttggaaccagcctaacgtgagtttaaatcctgctgtccatccatctatccaataaatatctatcatactcttaaatgtcaactactaggctttgtactgtgtgttgaggatacagtaaacaaaacaattccttgctctcaccgaatttagtcaagtgagacaagacaaaaacaaatacgtggatgctaagaagaaatataaggcacagggatagaaactaaggagaagcaccattttagaaatatggttaggcatttgtgcccgggagtttgaggctgctgtgagccgtgattgcgccactgcactccagcctgggtgacagagtgaaatcctgtctcttaatgcagggaaaaagaaatatggttagggaagatctcggatatggggacattcgagcagatattatgtgagggagtaagtatgtggctagctggtggaagccagacaaaaggccctgaggtaagagaatgattgcccagttgaaggagctgcaatgaggccagtgtattcaagcagagtatggaagggggaaagtagaagcaaacaagatgacagaacaaaatgagggggcggggtgggggtcgggggacaagagaatgcagctcgagcttgccgagccttatagttcaagggaaagacaacaaagaagaaaccaaggctatgtgtccttggcaaatcacatacaacttttgacttcttaatcttggttttccccttttttttctttttctttttctttttttttttgagacggagtttcgctcttgttgaccgtgctggagggcaatggtgcagtcttggctcactgcaacctccgcctcccgggttcaagccattctcctgggtcggcctcccgaggagctgggattaaaggcacgtgctaccaccctcggctaatttttgtatttttagtagagacagggtttcaccatgttggtcaggctggtctcgaactcctgacctcatgacccgcccgcctcggcctcccaaagtgctgggattacaggcatgagccaccgcgcctggcgccctttcttaaaaataggttgcggaagggcgcggtggctcatgcgtataatcccagcactttgggaggccgaggcgggcggatcgcctgggcccaggagtgcaagaccagccggggcaacatggcgaaaaccccttttctatttaaataaataaattagtttgcaaagttgagaagatttttttttttttttttttgagacggagtctcgctctttcgcccagtctgcagtgcagtggcgcgatctcggctcactgcaagctccgcctcccgggttcacgccattctcctgcctcagcctcccgagtagctgggactacaggcgcccgccaccacgcccggctaatttttgtattttttagtagagacggggtttcaccttgttagccaggttggtctcgatctcctgacctcgtgatccgcccacctcggcctcccaaagtgctgggattacaggcgtgagccaccgcgcccggcagcaatttttttttttttaaagaaaacactcaaagcactccctcatataagtagataactcaagatattgcttgtattctttataacctgcgcaggctgcaataagtcatattgctgaagactaagaccccatgagcgaggagaaggggggatcatgttcctaatggcgtgtggtcaggacacgaaagaaaaagggagctttggaggagaattcgtttatttaagatctgtagctgagtctcctctcttcccccattaaaaggttgcagcagagctgccgcctcgggagccggtttgcgcgccggcttcggctttgcagcagttaccgcctacaactcccggcatgctgctgggtgtgggccggcccgtagactccatttcccagccagccccgggtctcggtcaggacgtgccggcgcctataagagccagtgcgctgcggccggatcctattgttagccggagccggggcggttctgggcgtctgctgccgggggcgcccgagttgccggagacgcccggccctctctgcctgccggctgggctgcccaccgccctccctccccgccctgccgccctgggagctccccggccgtcgccgcggggcccgggactcgctcgctcctccctccttcccaccgggctagggcggcggcggcagcgggggcggcagagaccatcacgggaggaggcagctgcggcggggccggtaatgggcctaggggtgcggggcggagggtgccgcctcgtcctttctcgggatcggccctcgggcggccgtggaggagtggtcaagcccagagccgtgcggatggaggggtcagaaatgagaggctcggacgggagcggtcggggggcggggaggtcgggtgccgttgggaaggaaccgagtcgggaagaggcgtgggagcgaggggcaccgaggacgctggcccggactgcgggggcagctcgcgggagaccgatgggcggcttggaagcctgcaggattgcagatgaggattgagttcggaatggagtggagaatgatgtaggatggaggaaagtgaaggaaggggagggggaacagaggaaaatgtgggaggagtggttgggaatttgtgagtagcaggcaggaagggatgcggaaggctgggtaggggctgcagaggattggaatgagcgggaaggttagcaggaatcagagggaagtgggccgagagctgaagggttcggcaggagtgttcattaaaaggaactggtgacttgacatgtcccttcgctccggttcctgatgtctcccatatttctggcgtcgtgtgggaaaatgaaagcatcaattgccctggttgctagcttgatcttttttcataggcccaattacgcagccaactgccacccgtcccttttagtgctgtggtcttgattcatccttttaaaggggttgagagtggcagtgtgacacacaaactgttcttcagaatgaaatgctagaagttatccccacaagacaacactgtccccttgtcctgcagttttcagttcaaggtaaattcatagttcagatttttttcttcactggctttctgtcttgcaaatccacaaagccaggatgttggttgtgccggtgttataaa

SEQ ID NO: 631 - DNA, 6000 bp, Homo sapiens
tggctcacgcctgtaatcccagcactttgggaggccaaggcaggtggatcacctgaggtcaggggtttgagagcagcctggccaatatagtgaaacaccgtctctactaaaaataccaaaactagccgggcgtggtggtgcatgcctgtagtcccactactcaggaggctgaggcagcagaataacttgatcccgggaggcggaggttgcagtaagctaagatcctgccacagcattccaggctgagtgacagagcgagactctgtctcaaaaaataaataataatttaaaaaaagatacagaacagttccatcaccacaaggatccctcgcattgctcttttatagcaattttatagcaattttctcctcccacaacccccttccccatctctagctcctggtaacacagatatattctctatttctaaaattttgtcatttgatatatctttttgtaaacatataattatacacacatatttctctaccacttatactttttcaaagtgctttcacatccttatagcaattctgcaaggtagccagggaaggctttcctatttcaggtcagaaaacagatttagaaatattaaatgacttaatgaaggtcacatgtttagcagtagaactagaactgggacccaagtctgatgttcagtcctagaccttttctacttgcccggtctgcctcttcacaagggaagacttgggttttagaatccagagaccttagaaggagcaaattggagaaggtgaggacatgatggcctttactaccggaagcaaaaagtgaatgtccagaggtgaagggacagagaagtaacaggacccatcagcatttcaggcaatttgcttcctttaccaggagggtctctgtcctcttacaacctgggaaaaaataagttgtgtcccaggttgtaagtttgctttacttaggcccaaaggaactaaagaatggatatcagaaatctcaccccaattgttttgtcttacaggcacagaataggttctagcctcagcattttcattaatgtagtgtttttattaacatctccattaacttgcttgcagcaatgagatggaattatgcctcccacaaggcctggggcaagatacttgcataggtgcccccttttgtttggacagtagaaacactgcctcccctgccatggtgttcaatccagttggcaggtgggccagcttcaaagtgcagaaggaactgggtgtggtggctcacccctgtaatcccagcactttgggaggcaggcggatcgcttgaactcaggagtttgagaccactctgggcaacacagtgaaaccctgtctctccaaaaatacaaaaaattagctgggcatggtggctgttgtctgtaatcccaacactttgggaggctgaggccagtggatctcttgagctaaggaggttaagaccagcctggtcaacatggcgaactccgtctctacaaaaaaatacgaaaattagctgggcgtagtagttcctgcctgtagtcctagctacttggaaggctgaggtggggaggatcgcttgagtccgggaggcagaggttgcagtgagcgaagatgatgccattgcactccagtctgggtgacagagcaagatcctgtctcacaaaaaaaaaaaaaaaaaaaaatgcagaaggtccagggcctggccaaggggatgatgccctgtagcactttgctttgcaggaagggaacaactgtgctgtgaataccaggatccaggagggagggagggtatatctgtgtcccccagctagggacaaggcttccttaaccttaggtcctcatgcttatattagttcttctccaacaaagtttgactttgagaagaagctggcacatggctgaaatgcactcacgcggttgggggaagagtgttcttccagtcctcctccccacagggcctcctgcttctcctaagtacctgtcatcaaaggagatgaagatgaatcccccttcagcccccacacctcaatgagttgtcaagtactctccctcccacttgaataggaagcaggagcagcaggccaggttgcaggttgaggaagtcagaagttaacttgagctgagtttgcagctctggagagattgaggagcagacttttctcttgtcactttggaaggagaggattgtgaggctgcccctttaaatagcattcccgtaggaggcagatcacatccatccgtcacctactgccaaagcatcatttttggtttctatcaaactcaaagcttgttggaaaggattgtggggttaggggagtgaggaggcagagcctcctaggggtagggggcagtttagaagctgaaaaggagaggaatgagaaggagcctgggaaaggtgggggatgaggacaagaggaaaagacagggagagaatagttgtcttttgagcctcagagtggaacaagtatacccaattcttatctgtttagagacgcagcaaggtagaaatgggattgtattgcaacaagaggaatgaggttgagactaaacaccaggactggtgactaaagaaagtgaaaggagccacagagtgaaaaaggctgatagacttggctctggttttatcacttactctctgtgagaccctataatttttctgggttagtttagttctcatttatttttatttttactttttccatcaaactgtgttgtctatgaagttttcccatttattaaatgaagggaattagagtggatgaactctaatgtctctttcacgaataactttgtgtgtgtgtgcgtgtgtgtgtgtgtgtgtgtgtgtgtgtgtgaattagccttaaaatgaatcaggagcagggggtcttgggagagcaggatgtgacactgtgttaacaagaaatgttgagagagccctctggatgtatgtcttgcctctttcccacctattctagtttaaagacctgcctaaatttggaaactccttagctctaatcctaatttactaattagagctctttagcaccatcctaatttgcaattcttttgtagtttccagcccatttcattttcagttgataaggaggagattgctcccaaattttcagaaatggactgtgtaggagtgtgactagggtctcagatgcagccatttcttggctgggtctggggaaaagccaagggatgtgtgctaaaggtagatggacagagggtgggaagtcccttattatttccacttttttctccatctctgactctgccatctctttctgcctctgtactttctgggagctggttctgctgatacttctgctgaatctaaatgctgacctaacttggcaattcttttatgttaggagtcttagctgtgacagttcatccgcttcttcgcccttccatttcacttcttttctccttctctgactgggagaggaggagcctccactcagtatttagaacagagtaaataccttctcctgatcactcctccttccaacctccagaattttttgaaattaaaattcacattctgggatcctggattagtggcctgttttggattcagtagttagtgaatatatctccactttctgttgacataggagtttccccaatgccaaagcaggtggtcattaagggagagaacaatatggagcaagagaggtggttcctgcaagagtcctaggtaggactcggttggatggaggaggctttgcccttttacaaggtcttgagttcaaattccagttcactccttccacaaatgtttattaaccagctaggctgttttgtgctgggcctttagctcctagatttctttctctgaagacagaacagaaaaaatgagctggaagtgcttcaggaggggttttgatatcaggaatgctttcctggctgtgtagagttattacctagtcaaagaagaagatgttaagctgggtgcggtggctcacacctgtaatcccaccactttgggaggccgacgtgggcggatcacgaggtcaggagttggagaccagcctggccaatatagtgaaaccccatctctactaaaaaatacaaaaattagccggcgtggtggcccgcgcctgtagtcccagctactccaggaggctgaggcaggagaatcgctggaactggggaggcagaggttgcagtgagccgagatcgcgccactgcactgcagcctgggcgacacagactccttctcaaaaaaaaaaaaaaaaaaaaaaaaaaaaaaaaagatgcctgctctggagagctttgaacttggaagaaattcctatctgctaggcgggcaggcagaagtaccatggagaaggccacagtcttggagacaggtggggaagatcaagctgagggacccgaggccaagtgtgggatgccatcacagctcagggcacaccctgaacttttccaagacaggagcacaggtggggtctggtccgactgggttccgagtccagatctagcagggaaagatgtgtgctcatcccctaccccgcactcagacatgggacacgcaggcagctaggcacacgtggatacatggaaccacaaccacatacacagaaactcaaaacacacggagagaacccacacaaccacccacaccgaagtccagcccgccgcctccgctgcactctgtaaacacgcactcacatccgccagtacagggcacacgcagccactcgtccccggcgcctgtgtgcgtgcgctcgcccttgggcgcttctgtctgtgtgtgcccccggcttccaatcgttcctttgggagggggaggagtggctgtgaggagtgagagactggcgggcaggctgaggagaagggagggagagcagagggaggggggaacccggccgggggaggaggagagaggcgaggaggcggctctggcagcgcgcggcggcggcggcggtagcggcagcagcagcggcggtgcggagagcttggactgggagcccaaagctcggctgggcagcgggagaggaggagccgcaggagctgcagctctgccagcttgggccgagcctagagacaccggcctggctggtccacgccagccgcaggtgggaagggcctgggatggggggtgagggtctctcggctggggctgaagctgagccgaggtgctgtctcctccttctgttccgtagaccgtggctgagcatggagctgtccccccgcagtcctccggagatgctggaggagtcggattgcccgtcacccctggagctgaagtcagcccccagcaagaagatgtggattaagcttcggtctctgtaagtccccggcccgggaatggggggaagggaccttagggagcctgagcgggaggaggaggggggataactggagcagggctgtgggctggtagattctctttggcacagatgttggcaggtgcgaggaagcacggccctgacacgcgtggccaggccacatgtgcaaggcatgtgcggagcaagctggccagttggagcgggcttaggagttgcaaaggtaacgatgtgcctgtgcctgtggaccccaggctgacacacgcagcgcctagaggcagcacagtatatgcagtgtggcagggctgcaggagggcagtagaggtgccaggctgactcacacatatccatgtgcagagttgtgcagatgtgagccacatgacatgtgtgtgcatgagtgagcgtgggtcacagaggtatgtggagtgattgcacacagctgtagatctactgcatgggaatacttgtgccaacctgtgggtcatatgtatctcagttgggattggtagtttctgcctcatgcacaggaagtggggtgggggttaccccatgcctgagctgctcatctcttggggcctggaaactcactctatgtattaatgatgaggggacccacgtggaatctggagggggggttggagcccccacctggaagctgaaggaggtgatgatggtgaagaaatattgattgacaaaggcaaggtaactggcttaatcagaggctttttgtttatatagggtcttcc

SEQ ID NO: 632 - DNA, 6000 bp, Homo sapiens
cagcactcagacctggcaaaggtgcactgagggagatgtgttggggttttggtagagaggaaggcttggtgggaaaagggtcaggttgtttttggggtaaggcctgggggcatagggcatggagaagagctagaaagggggtgcttcaggtggtgctgttggaaagagccagacttccaggtcagttgattccacagctgcagtgagaagtcagatttgcaaataattatggtggctacagtggggtgattaggctgccagctggtgttggcaccatttaggttgggaagggaacttggctggtggggggttgagggctgggggctgggggctgggggctggttgtagggagaggctgagtgattctctggcaggcaggacctggggaaagtttttccttttattcctatttgttggcttccctgctcccctgtttatcaactcctgcatatctgcttggcaccatgtccctagttctcttctctgtgcccaccttgtttggaaacttcttgtggcctggactgagtgaacacacaggccaacggaattgccaaacttcctaaaccatgagcatctctcttccaagcaattgctttagaaattccaatctggaagatgtataataaatcaaattgcactagacacctcaaagacttcttggtccctcctattctctccccttctgctcttctttgaaatgccaagaaaatttgctgttgttttttaaattgcagtgaaataaattgaagacagatatgcaggagaacttcctggaaagttcctggaggttagactgtggcctttctctgataaagaaaaaatctacccttctcctctaagcactgggttagagctgatttggggaagcagtgagccagtcagaaaggatgaactctggaactgggaaattgaggcccaagcatcctacttccccagtgtctccaacccagtccctgaatctgagaaccataaaggctacagaggaggaacagatccccagagatagttagtaaaatcggggcagtgctgggaccagacccaaatcctgctgatccataatctgatgctgccctcatcacacttgcagtcagactcttgctaagcttttaatttactttcccatcccagactaccttcaacatctgttaggccccatggaagcagggcatctgctgggaacagctgttaggatgtagtttggagggctggtggggtggtccatgtggaggtggttaatgagcaaaatcaaatggtgtagggagggagaagaggggtggagaaatgaaccagagaaagagttcttctggactgggtactgggagcctcctctttagtttgccttcctctgaccttctcacccacccctcccaattcctctctctctcaagggctgaagtctgatggaaaggtgactcatttgtgttcttggctgggagctgggacacctgggttcttattggtctgggctgaggctcaagctgcttagattattccctttctcgtgtgatctgagttgtgctgggctgttgctaggaacacctgttagaaacggcttctggtcagaaggcacaggcacaggaggagtctgaaagcagtctctcccacttcttcagtgtgttcccagcttctcgaatgcagcacctttcaaatctcctttcctttcctccctgcccccttaatacctcctaccccttttcctcatctcccttcaccctcctggtttctgtccttcccccactatcttccaatcttccctagggcctgccccattccctttcctcatcccacccccacccgtagctcctctgtccagtgctgagggctctctcaccactgctgccatgtcaacagtgcctcccaggatggcaacccagctttgccactggggggctatttttatctgtggagccacccccgccacaatgcccagccagctgccagaactggggctttctgtatagcaatggaagccagaagccaggggagtgggggagtgggaatgctcgggtgaggtggagagctggttgttcttggtttctggagctacatgctctacatactctgcagcctctgcctccactgcctccccagggcctctggaataagaagccagagagaagccctaaacgtccagagtggtggcgtcagggagactagagctttcccaccaatatccaggtgccatctgaggcctggatggaaagtcaggggtcctggctgtaagagtgggcatatgggactttgtttatgaatgactcaatgaatatttgctgaactaactaaagatttggactaaataattatccttcatattcatgtatcactttagggttcccaaggtgttctcataccatatctcattaggtccttgtgaaaattctgtgaagcatgtattatttacccattttacagaccaggaaactgaagctcagagtgactttcccaaggtcacacatagtaataaaatctaggcaaaagtttgtgatttctttttaaatttagttttttcttttcaactgagctagccagaaaagtctcctgattttataaacttacgccctctttctattggaattagatgatttccttggttctttcaatttctgagattttggagatttgaagtcagccagtgaatcccttcccgagcacccacccctttacccccacccacccccacccctttacccccacccacccccaccccttttctcttaccagaggcagagtctcccatcctttgtttcctacctcgaccttattcttcactgcaggctgggcaggcattagagttgggttcctttctatttttaaactacatttaagggctaaaggaaaatccatactggaccctttgttgaggtcatcacatttatgtcctgcctgccagccaggtgacagtctccttagaggtagagtgtggggtgtgtgtatatgtgtgtgtaagtgtctatgtgtgaaatttttcctcaggaagggatgatggttgatcattatccctccttattaggaagagtaaataataataacaggctagggcaaagtatgcagcatgcatacctgggctgaagtggtgagcagccattcgtccaaccagctttggttctaatgggtaagagaggagaggaatggacaagatatcctcttcgaggcttttctagtctaagaaatctttacttttcattaggagagttgaggttagcacttacttggctagagtggcagggtctggagtgagggtacaagacgaggcagggaagttggcctgggttggaggttattagtgtttcaggctgtgtgctgccatctgcccccactctcagccccatcctgcaacgcaagcatgtccacagaacatgccaaatgacctgtcctcatctcctgggtggcattcagggtctctgacactgggtctagtcctttctctctaaaaacactcatcagcttgtggtcattgtggggagggtggtggtgggacacagaaagagatggatacagagagagtgggtttcttccctcccaagatctgcagcagccctgcttcacggctaccaggtgttcactagagaacagccttaagatatttgacttccactcctcttgttgagatcgaagcccacttccacttgtcccagtactcagtggaactgagaaacagcaggttcccaaacttcatttatttctgattcttcaaggctttggcataatgacaaggtattttcatttcttcctgcttttgacgggttggggtaaagggaaaacttcctgttataaaatcctagctcttggcctgtgtcttctcttttccctttctgctgacatactcaaccccattagttccttttcctctttaccacatcacccgcagccatagacctacatctaagagattgcagatccctgaactcttttccccaatgcgttgggcttcacccgccagctcttctccttagccccgcccaactcctcagctggccaatcacggccccagcgtacatgtattggtggcgacatctcccagccaatcaggaggcgggctgggactgtgtgcgcacgtccacttggagctgcagaggctgggttcttccctccccaaccttggcgaaagcaaagtctgaaggcgggagaggggttcctggtcctcagaccccttctgggtgcctcttttggcccctcctgggccatctcatcgcttctccttacctctgagccgattgacctctctctggttaattcatggttattccccaatttccattttacaaatgagaaaactggggctgggggtgttaatttgcccaatcccttggtttctatgagcgagttctcttgactttccttctctgcttgcgggtggagggcccttccctccctgttgagcccggtctctggataaggatcccctgacacctagcttcaggaagcccctccctacagttttttatcctctgtgggaagttcatccccctgtcttgcttccattctgtgaggtgggttaaagctcgttttgaagaatggccccagaaaaagaccctgaaagggagctgaatctgcttagctccttttgggggttcttgcagggccccttcccctcccgctacagacctcctctctgtgacagattcaggatggttccctgtccctgcactcttaagcctcttgctaaccccctttttcccaaaagaggagccccacctcctcagagcaaggggctggcctgtgctatttctgtcctttctgggcttcttctgagaacagattcttgttttccgtctgattcagatgtgaaacttttcccgcagcctcccctctcacccagttccggtaggctgggtctctgcctccccactctcttcttcctgcagccaggcccctccccaaagttctctctggtcagttgctcagttctactgggacctggaggaggaaggcaggggccaaagaggaagttgtcccctcttgggggccctggggctcctggggtcaggattttgatactctgaagcaggaaactttgattcccatggcaaaccctgttcctgttcagaggagccacctccagggccccattctcaggtaggtgccagggatgagaagaggaagggggaggagggaaaggacaggttgctcatggatccaccagttgtagtttagtgaagtggagagatcaagacctggcagtcccccatatgttttgtgcgtgtgtgtgtgtgtgtgtgtgcgcgtgccaacttcaccttttactctgtccatcttgccctttaccttattctcctcccatttccatccccccccacctttgtaaaaattgcttcttcttgactatggtaggtgacttatcattgtttcttccttttctctccttcctgactgccaacatccttaggacctcacattccttcgaaatttcatcttgtcttaagaacccaaactggaaatagaattcttctcttgactcccatcccctatcttattctaaagtccttcagagttagaatctccccagacgcactcaaaatcttcacatcactgttcttctgcaggaagtccttctctggcttccctgtcctaagccccctacttatggtgatctttttgggaatgtgggtgctggaagcggaggcaggggactttggaaatccccagaacaccagccatggtgagccaaagaaatgaactgtagaagctggagaagctgagctcttctgaggtgttggggttataactgccagagtcttttcctcccaatggctgcctagagctaggagagactgtggacttccagaagttgggatctgaggcttttccaatcgtgcagggactgaaggtaaagcagaaagaagtggtggtggtgaaacgggcagggatggagttcgaaggaaagttgggggaagctgccagttttccttggggccagatgtggactggacggggttgagcatcctgttctacagggaaaggtacctttactgtgccagattccttgatggctgaaacaga

SEQ ID NO: 633 - DNA, 6000 bp, Homo sapiens
ataaatatttgatgttttggaaaatcactcagtagtttaaacagtgctattctgtgtgcatcttcaataattagttgaatgcctcatacattccaagcactgtcctaggcactgaagacacagtaggaaacaaaatagacataggacttctcttccatgagcgtatactgtaatggggaaggtagggaatcaaatagctggatgcaatagaatagagtggccactgtctctggactcaaaccagggcaccaatcctggctcctttgcataatatctgggtgactttaggcaagttaacctttttaggtctccttttatcatatgtaaagtggggataagaatggcacctagtgtggtcataaggattaaatgaaaaaatgtcagtaaatgcttagcccagtgcacagtacatgctaaatattaaataaatgctatttattattataataaaagtaactacaagtgtcgatgagtcttataaaagcataagtacagggttgtgtggaaccgtaaaacaggaagagctagtctagtcaggaggccttaaaaattataggaatcagctagagaagttagggtgggacagtagagtgttaagaatatcttggggacagagaatagtgttatgaaacaatgctggagggccttctaagtcaaagagtaattttgaaccttatccaccttatccaaaatggcaatggtaagccattaaaaggctgaattgtgggagctgattgttaacagaaaatctgtaagccagttgttaaacacagccattattaaaattaaactaatataaagttgcaattaaataaattaaaatgaaaggtaataaataccaaaacccccaaatttcctagtgattttactgttacctttactcttaaggttgtctgttgtatctgtatggtggaaatactaaaatagtgtgaaactgcacatctctttccaactccataatcagtgatgtcatattgatagcttgaaactagacttggtagtagtatttacatcatagaaggtggggaaacactacaaatcagggcttttccccctccctagagaacatttattaaatatttagcaacatactattgattacagaagagtgcctaggagtgcatggatggaagcagtgagccagttaagagcctactgtaataatctaatcaaggggtaatggtgagaagtcaagggaggaagacttccaagtttccagatgggtagatcttcatttactgagaagcagagtacaggaagtgggggtaagtttggggaagggcagtttgttaatatagataatgaatctgggtaactaaaaggagaccagagaaatactgagtagacacttggcctataggtctggaactcattagacagagatggactggagatactgatttgggaggcatcaacaagtagatgctgagaccacagaacagctgaaattattctgatacgaatgtgaagacctggcttaaggagtagagagaagagtagcaaaagagattgaagacaggccaaaaaagtcagaagataatcataaaattagtgtcatagagagtatttcatggaggaaatgatcacataccatgaaaaatgaatgtagagagacattaaggtcatgttagcaagagcaatttcagaagattactggggagacttaagacttgagttggctaagaggtaagaaagatagagacagtaagtttaggcaaaataacttgcacatagagatacagaagtctactaatggccaggcgtggtggcttacgcctgtaatcccaacactttgggaggccgaggcaggtggatcacaaggtcaggagttcgagaccagcctggccaatatggtgaaaccccatctcttctaaaaaatataaaaattagccaggcatgtgggcatgcctgtagtcccagctattcgggaggctgaggcaggagaattgctggaacccaggaggtggaggttgcagtgagcgaagatcacaccattgcactccagcctgggtgacagaatgagactctgtctcaaaaagaaaaagaaaaagaaaaaaaagtctactaatgtcccagtagaaaaggagtgaatcaattaatccttgtttgtatttacaaaataggaatgtatttttattataatgaatactattttaagacctaaatttctgaggttacacatgaaaatgttaaattcatagtaggcaaattttatgcatgttattgtaccaccatccatctctttttttttgttttgttttttgttttttcttgagacagggtctcactgtattgcccaggctggagtacagtggcatgattatggctcagtgcagccttaacttccccagttcaggtagtcctcccacctcagcctccggagtagctgggactacaggcatgcgtcaccagggccagctgatttttttgtatttttttgtagagacgaggtttcaccatgttgcctaggctggtctcaaactcctgggctcaagtgatcagcccgccctggcctctcgaagtgctgggattacaggtgtgagccaccacactgggttaaacattgttattggtgtctggactcccctctctcatctatccaatcaaattactaaattcagtagtttctccttgaacatttctccaatctgtcccctcctctccatttctactctaatatcaccctagtctagaaatttgggtggactttccttgttttatttactacagcttcctaactagtttttctctgtcagctcacacattccctaattcaatgctgattgtgccagcaactgagtaaagggtttagtttagttgacattgtagcaagatttccctgtgaaggaaaaaaataggtaaattaatattctgtaataagttcctttctcatcaagttcattcccgatgatgcttgaccagcactttcagtaacactacgattctctacactgcagccagaggacttttcaatatgcaaatctaatcgtgccattcttttttaaaccctccatggtttctcaagtactcttaggataaaacagaaaatacttaagtagcacacaggacccaatctgtcatcctttggtctcatttgaaatgtcacatcctttgaaaaagtgttctttgactttccaagactaagttaggtctctgaatgtttcttctgtggcacttaattatttatgtctttctccaccattaaattctaaattccaggagggttagaactttctggatccttagcacaatgtcaggtaattaggaactccgtacatatttgatggatgaatgaacaaagcactacatatgcatgaactagtttaaaaacagaaacatcacaagattttttttaagtggcagcttttaataaaagtacagttcgtaataggtagggaaaaaggtcaaggatataatttctacatactaacatatacgttgttaggtatataaaatatataaaatcaggactggtgtcacttaactttttaatgtgtcttttcttcgggcacgtggcaggcacttgcagagaaggtaaacatttacagagtacctgttattttccaggcattgttcaaagtgctttcaagagttctggtttgacagaactaaagaattttgatttttcttccagcaaacaaaagaaaacctaggttctttttattactctattctagtaagaacagaaaggttatcttttgcactttaattaacatcgcttaattccatggctatcaaagatgactcaattcctccgcagaattactatgtgactattagaaatctaaatgcctcccatgtcaattcatctagtgagaatttcctaattttaacgggaacacagcaggcttttacggtgattgctgattgggaagatctctttctcccttacggcgtcattcatgtcaaggcccggtctaacagaggaataaaacagtagaaaattacgatatcctcctgttacttttttttactaaggggtaatgaccaaacagtacttggatttcttttagaaaatgagtaaagcttccccgaaagcagagaacaattgggcagatttgagaaacacaaaggacatacgatgcttccctgctaccagctgggaaagttattagaattagcagaatcctcctgttccttccacacaagcgatagccacaataggaactccagtttccgtcacccccactccctgcccaggttacctgtggaagctgatgttaatgtgcttgttgtaggtagtggcacagcccgccgcagcgcaattggtcggcatttccctttcccactcattcagcgcccttaggtctctactgaggcgctggctgctaagctttcttctggcagaggctggacaatcgaggcaggcgtgccttaatcgtgagagcttagtcgtgagagcggagtgggaagaaggggtgtgtatgtgggggcggaggcgaaggacggtcagccttccctttctctttattaatatggccgactagagcccacagaactggccctcctggagctctagtcgccttcgcttgacttcaccaacatggcggacacaacccgttctttctccccgcccccaagagggagcggatctactgcgtttctttggcagcggtcctcagagcaattaaaaggaagaggtgttttcccctccgattactataaattacaagagttttacaataaaactctctcaaggctgcaacagcagctccacctacttctgcatgcacccaactgtaccaagccagaccctgcggtgggtgtgaccctaggaccggaagagtaaacccgaagaaagacgaaagactacaaatcctagtgagtatcgagttggtcttattatcgcgtgaactgggagcctttgtttcctgcgtgtcgcaggaagtgacgtttcgggtacagccgctaccagagtccctttctcgcgaggcggaagaaccccgatcgctgaggagcaagggggcgctaggaaagggaactgggttgcgacggtccggcgagagagagctggggtgctggggtgcggggaagttggggagcagaggccgcttggtgtccgagtagggtaagaccgcaccgacccagtccgttaggaaagaagggaaacgaggcaattgtcgggcggatccccggacggagggctaaggttgtgtggaaggcgctgctccccggatggcgaccgcagatactccggccccggcctccagtggcctctcgccgaaggaagaaggggagcttgaagatggggaaatcagtgacgacgataataacagccagatacggagtcggagcagcagcagcagcagcggcggcgggctgttaccctatccgcggcgaaggcctcctcactcggcccggggcggtggatctggcggaggcggtggctcttcctcgtcatcgtcctcttctcagcagcagctgaggaatttctcacgctcgcggcacgcgtctgagcggggccacctcaggggacccagcagctaccgacccaaagaaccgttccggtctcatccgccttctgtacggatgccttcgagctcactgtccgaaagcagtccccggccgtctttctgggagcggagccacctcgccttggaccgtttccgctttcgaggcaggccttaccggggtgggagtcgctggagtcgggggcgaggagtgggtgagcgaggaggcaagccggggtgcagacctcctctgggaggaggagcaggatccgggttcagcagcagtcagagctggcgagagccctctccacctcggaagagctgtatccttaacgtggcggtcggcgctgggtgtgtcactaaagttccctttagcgtcattactaggtctgtgagacgagtgtaactttgaatcatcagaaccgcttatttctccctgtgtcagtatactttaagttgttctttggtaattccccatgtgtcacactatagcgttattcttaagactgcttcattgggtatattaacgtgctgtggattgggttaagct

SEQ ID NO: 634 - DNA, 6000 bp, Homo sapiens
taagttctgtaattatctgcatttacatcttacttttcactggagccatttaaaggcacaactgcaattaaaaaaaaaagaaaagaaagggaaatgattaaatacactaacaaaaatgctaaatagaaaaataaggaaaagcaattgagttacaactataactgactaatctccttcaaggctaaagaaaatctatccctatctatacagaagcctaagatcaaaccaacacttaccagatttaattttaagcttgtcaagatacaatttctaactgaaccttggtttaaacaaaaagaagtgctattcaaccttttcagctgcagctgaaaatggaatgactttttactgatgagagacactagcctaattatgttagctctcctcagatttgaaagtttaaaagagtagtcattcaagggagacatgctaagatgtactgacaaagtgtctatcattaagaaaaattaagggtgaaaataagaactgcaattgaatctagtttattctatttctttaaagttgcaactagcatatcttagttattacagtgaaaggagttatggcaaaaatagaaataaaccctatactcaggctactttacttctaaattacagaaatatgccacagagtaacctgcattctttctttatacagtatttgtaaaataaaaaaggtattattataatcacatagtggaaatatgaattaaactgagtacaaccttgatattaaataaatttgaatgaagtgttgtaacaaatattttgtttgctcacattatataaaagtagctgggaactacgttttccttctcaaattcttaaaaagaacaccacctctaggatggattactgatacttcatagggaaaacaatgagcaggacatcaaaacaagcatccttttaagtgcagcatctgtgaaaagaaaaacaacaagatatcttatttatgacaagttactacggaaatcaaagtcacacaagcagactggatattttctggtacttttttttttttgcaacatcatatgccagtttactaataaaaacatgcaagcttaccaattaataaaggtctatggtagaggcccaaaatagtattgaataaacacgcagaaagaggacaaaagcagaaagcccactcacctcccccttttctaatacagaataaaaattttaagaaaaacctttgagctcccatagtacttttttatatacatacttcagtttcaactttttatactaaactgcaactacttattttcatttgtttccctaatacaaactacaggtttcatctttgtacctttaaaaaacacatataaactggtggctctcgcctataaatcccagcactttgggagtctaaggaaggaggatctcttgaagctacaagttcaagatcagcctgggcaacatagcaagacttcgtctccccaaaaaaaaatttttttaaataaatttaataaaaattttttttaattaaaaaaatttaaaaaccatccacattggctgggcacggtggctcatgcctgtaatcccagcactttgggaggccgaggtgggcggatcacggagtcaggagatcgagaccatcctggctaacatgatgaaaccctgtctctactaaaaatataaaaaattagccgggcgtggtggcgggcgcctgtagtcccagctactcgggagactgaggccgaatggcgtgaacccgggaggcggagcttgcagtgagccgagatcacaccactgcactccagcctgggcgacagagcgagactctgtctcaaaaataaataaataaataaataaaaaccatacacatatatatgcttaaatagcctttctggcttttggattcaaaatagaccacaaatccatggattaagaaacaccgtgggcagaggttttctaaccttcttggaagaaccatttgctggcttttaaaaagttaaatatctatataattttccttttttttttttttttgaaacggagtctcgctttaccgcccaggatggagtgcagtggtgcaatctctgctcactacaactctgcctcccgagttcaatcggttctcctgcctcagcctcccgggtagctggaaatacaagcacccaacaccacgcctggctaacttttttatttttagtagagacaaggtttcaccatgttggccaagctggtctggaactcctgatctcaagtgatccaccgcctcggcctctcaaagtgttgggattacaggcgtgagccaccacgcctggcgcctacatgattttctccgaaacaatcctgaaatactcctaacccaacttttggttgcagaagtaaggtttttcagggaactagcatcagaagctgctgtttctcacctaaatgtacattccttgccccttttacatcatgacatttgagaaagacctattctggacctaagtgttctataaaagtaattctgattgtcttccaaataactgtcattacttttaagtttcatatataataacgaaattaaaaatcatcacactatgtgaattacaaccagtaatgaaagtctttaaacaatttttgcaatgatcacagattaagtcaagatagtgttttacaaacccattataaaacaggaaaccttcggatgattgattcctctgtataaatgctgagtaaactcagtaatgtttaaaactgagaataaggttagaagtaggaaaaatctggaatgttactatttcctttctcaacttacccgtaatctccaccctcgcatacacattcctccactctaacgtattaaaataaaaatgctgataagtttatctttctctctctggccctcatttagtcagcacgaagttacacaatgtgcaaaagtgaacacagatagaaacgtaaaggaggtaaagtgttccaaaaagatcaaatgaatcaaaaagctctgaaacagacttggtaaagacaccagagttgttttttttttacccctcccccccccactttaaaaggcagcaaccggaataaatcaagataaaaacagaatcacaaaaatagtgcaggactgtgcagattaaaactttacaattttcaacgtcaaactgcaatatgataaagcaacaatattacttaaactgtttatgaatattttttctctaacaatccaagtcaacttcatataaaacacaaagtttctgtaccagcaaaaatacaaatgctaatgaaacttgggcttctaaggtattattacaaatcagacttaactgtcttagatttcataagcttaacccaatccacagcacgttaatatacccaatgaagcagtcttaagaataacgctatagtgtgacacatggggaattaccaaagaacaacttaaagtatactgacacagggagaaataagcggttctgatgattcaaagttacactcgtctcacagacctagtaatgacgctaaagggaactttagtgacacacccagcgccgaccgccacgttaaggatacagctcttccgaggtggagagggctctcgccagctctgactgctgctgaacccggatcctgctcctcctcccagaggaggtctgcaccccggcttgcctcctcgctcacccactcctcgcccccgactccagcgactcccaccccggtaaggcctgcctcgaaagcggaaacggtccaaggcgaggtggctccgctcccagaaagacggccggggactgctttcggacagtgagctcgaaggcatccgtacagaaggcggatgagaccggaacggttctttgggtcggtagctgctgggtcccctgaggtggccccgctcagacgcgtgccgcgagcgtgagaaattcctcagctgctgctgagaagaggacgatgacgaggaagagccaccgcctccgccagatccaccgccccgggccgagtgaggaggccttcgccgcggatagggtaacagcccgccgccgctgctgctgctgctgctccgactccgtatctggctgttattatcgtcgtcactgatttccccatcttcaagctccccttcttccttcggcgagaggccactggaggccggggccggagtatctgcggtcgccatccggggagcagcgccttccacacaaccttagccctccgtccggggatccgcccgacaattgcctcgtttcccttctttcctaacggactgggtcggtgcggtcttaccctactcggacaccaagcggcctctgctccccaacttccccgcaccccagcaccccagctctctctcgccggaccgtcgcaacccagttccctttcctagcgcccccttgctcctcagcgatcggggttcttccgcctcgcgagaaagggactctggtagcggctgtacccgaaacgtcacttcctgcgacacgcaggaaacaaaggctcccagttcacgcgataataagaccaactcgatactcactaggatttgtagtctttcgtctttcttcgggtttactcttccggtcctagggtcacacccaccgcagggtctggcttggtacagttgggtgcatgcagaagtaggtggagctgctgttgcagccttgagagagttttattgtaaaactcttgtaatttatagtaatcggaggggaaaacacctcttccttttaattgctctgaggaccgctgccaaagaaacgcagtagatccgctccctcttgggggcggggagaaagaacgggttgtgtccgccatgttggtgaagtcaagcgaaggcgactagagctccaggagggccagttctgtgggctctagtcggccatattaataaagagaaagggaaggctgaccgtccttcgcctccgcccccacatacacaccccttcttcccactccgctctcacgactaagctctcacgattaaggcacgcctgcctcgattgtccagcctctgccagaagaaagcttagcagccagcgcctcagtagagacctaagggcgctgaatgagtgggaaagggaaatgccgaccaattgcgctgcggcgggctgtgccactacctacaacaagcacattaacatcagcttccacaggtaacctgggcagggagtgggggtgacggaaactggagttcctattgtggctatcgcttgtgtggaaggaacaggaggattctgctaattctaataactttcccagctggtagcagggaagcatcgtatgtcctttgtgtttctcaaatctgcccaattgttctctgctttcggggaagctttactcattttctaaaagaaatccaagtactgtttggtcattaccccttagtaaaaaaaagtaacaggaggatatcgtaattttctactgttttattcctctgttagaccgggccttgacatgaatgacgccgtaagggagaaagagatcttcccaatcagcaatcaccgtaaaagcctgctgtgttcccgttaaaattaggaaattctcactagatgaattgacatgggaggcatttagatttctaatagtcacatagtaattctgcggaggaattgagtcatctttgatagccatggaattaagcgatgttaattaaagtgcaaaagataacctttctgttcttactagaatagagtaataaaaagaacctaggttttcttttgtttgctggaagaaaaatcaaaattctttagttctgtcaaaccagaactcttgaaagcactttgaacaatgcctggaaaataacaggtactctgtaaatgtttaccttctctgcaagtgcctgccacgtgcccgaagaaaagacacattaaaaagttaagtgacaccagtcctgattttatatattttatatacctaacaacgtatatgttagtatgtagaaattatatccttgacctttttccctacctattacgaactgtacttttattaaaagctgccacttaaaaaaaatcttgtgatgtttctgtttttaaactagttcatgcatatgtagtgctttgttcattcatccatcaaatat

SEQ ID NO: 635 - DNA, 6000 bp, Homo sapiens
cttttccgctgggtgtcactcgggggtggggaagatggcccattcaaaagcgccgcgagggggcccggccagtgcccttcagtgagcgctcgcaagaggacggcagaggcccggcagctcggagctccgggaccttgtggcgcatcaggacgcggctgtccctctgccgggacccagagccgccgccgccgctctgcctcctgcgtgttagcctcctctgcgcgctccgggcaggcggccgtgggagccgctggggcgaggacggcgcgaggctgctgctgctgcccccggcccgcgcggctggaaacggagaggccgagccaagcggcggcccctcttatgctgggaggatgctggagagtagcggctgcaaagcgctgaaggagggcgtgctggagaagcgcagcgacgggttgttgcagctctggaagaaaaagtgttgcatcctcaccgaggaagggctgctgcttatcccgcccaagcagctgcaacaccagcagcagcagcagcaacagcagcagcagcagcagcaacaacagcccgggcaggggccggccgagccgtcccaacccagtggccccgctgtcgccagcctcgagccgccggtcaagctcaaggaactgcacttctccaacatgaagaccgtggactgtgtggagcgcaagggcaagtacatgtacttcactgtggtgatggcagagggcaaggagatcgactttcggtgcccgcaagaccagggctggaacgccgagatcacgctgcagatggtgcagtacaagaatcgtcaggccatcctggcggtcaaatccacgcggcagaagcagcagcacctggtccagcagcagcccccctcgcagccgcagccgcagccgcagctccagccccaaccccagcctcagcctcagccgcaaccccagccccaatcacaaccccagcctcagccccaacccaagcctcagccccagcagctccacccgtatccgcatccacatccacatccacactctcatcctcactcgcacccacaccctcacccgcacccgcatccgcaccaaataccgcacccacacccacagccgcactcgcagccgcacgggcaccggcttctccgcagcacctccaactctgcctgaaaggggcagctcccgggcaagacaaggtaaggtcccggcactcgcgctcccgaggagtgggtctcgggggtagtgagttgggaggagtaggaagcttgttcacaggttcggctcctgtatggagaaatcaaaactcataccaagtttctggggcaatggaagaaacagaaacaagctggggccaggagagctgggcagagaggggaggctggggagatccgggccaggcagggggcctcgcggaccgcgcccgcgcccgcgcccatcacgaccgtccttgtcccgtggtgcgtcccccagccccacttgactatatgtttgggcagttgagggaaacaccacggtgtctttctgagcccgctttgtcaggcggactggcccgaacagaactggtctcggagggttcttagccacctacttcactcggtgtcatttctttccaggttttgaggacttgaggaagtgggacgagcacatttctattgtcttcacttggatcaaaagcaaaacagtctctccgccccgcaccagatcaagtagtttggacatcaccctactgaaaacttgcgattcttcttagttttctgcatacttttcatcacgatgcaggaaacgatttcgagtcaagaagacttttatttatgaacctttgaaaggatcgtcttgtatggtgaattttctaggagcgatgatgtactgtaattttattttaatgtattttgatttatgattatttattagtttttttttaaatgcttgttctaagacatttctgaatgtagaccattttccaaaaaggaaactttattttcaaaaacctaatccgtagtaattcctaatcttggagaataaaaaagggcggtggaggggaaaacattaagaatttattcattatttctcgagtactttcagaaagtctgacactttcattgttgtgccagctggttgaaattaaaactctgatattactttttttgaggatttttatttttgtttttgcttaaacatatagtttgtctagaagtttaaaaagctaaaagttaaaaatggtgtaattatgaaaatctaacactcaagatagtttctaaaaggaaatcagtagttaaggatacctgatttcaaaatatttaaagcataacctaactgatggtaggatgattgtatcttgaatatgtggtagggccacatctattgtaggaaaaccttgcttttatcatctgtgtgtaaagggcttaataaggagaagaggccttttgactgatttgtgagtataaatgcatttgctgtttcatttcaaaaatgttgtggaggaaaagagtacatttaacttgtataagagaatatttgtactcctgtccaggctgcaggacctttcttcgagagctttgcacacttgacttgaaccacattttctgatccctttactttgttttagaagcacactgaaaaatctcgttgtttaaagtacaatttgtaaatatttcaaaggtctaggagtcataacttttgttttcatactgaaaatgatgttgatcagagaaaccaactgttttgcttttcattgctctgtgagaaatttgaggattctgttttgctgttaggtaagctaaactcagaaattgaaaaggaaaagactggataaacacaggattttcagtaagaaaacaaccccagtcttgtcttagaagccacttgttgaggagtctgttgggggaaaaaagaggatatgcttttaaaggtagaacaaaccttcttctgtgttaaatcaaaaggatgttcaaaatccaccaggacagatgctacttgggtttaaatggagccatagatgatacaaagtcctcttggggctgaaaatcacttcctatttgcatggctttactaactggtttctgttttccattatctttttcacagaaagtcttggtcagtatttttccagcatttaaattgaaacggtcagtattagaccactgctaggttatgtagtcaagaaataaaaatagaattacatgctacagatgtctttattctccttccatctagaaaggagttccaaggtcaaattactttttagtgcaatagttaaatgacattttgagatcataactcatatccaaaaagttgcagggaaaattaaaatagctttcccctattaagctaatggcaaacaaaacttaagtggacccccacttccagtggttgtttaggttgcagttgtgaaaatatgctgccaacatttaaaaacttgtttcatatgtatatatgtatacacatatatgaatatgtatgtatatatacatatatgagaacatgtgtgtacacatatatgaatatgtatatatgtgtatgtatgtatatatgtatatgaaatgagagccacatctaaagatttcttaaatcaagtttggttcagcttccttagaactgtggctgtactttttgaggagtacctcatagtactatatttttaatgcatgcaaatcataatagctccaaatgaaccacagttttttcccaatggaggatttttttttaattcttgtactaaaaaaaaaaaatccataccaaatatttttacaaattaagattgatgtaggttttaaaaaaggcatttgtatgttgttagcttacatatggggctaggtaatttcattgcttaaaaagatgcgcctaggctccctcttggtggctggatttctttttcttcgcccgtggtggccatggttcttaatagggccaccggaatcatggtttctttttttttttttttttttgagatggagtctcgccctgtgacccaggctggagtgcagtggcacgatctcggctcactgcaacctctgcctcctgggttcacgccattctcctgtctcagcctcctgagtagctgggactacaggtgaatgccaccacgcccggctgatttttgtatttttagtagagatggggtttcaccatagtggtcaggctgttctcgaactcctgacctcaggtgatccacctgccttggcctcccaaagtgctaggattacaggtgtgagccaccacacccggccccagaataatggtttcttgactttctgtagcccttgttccttagtctgctgtgatatttatgttgacctttatcattttctattctgaacccctcttagcatttaatgtgaaatctaagaaattagaagtagaatggcttttattgttttgacacctttgaaattattattaataatttttccagagcaaaaaagcaaacacgctcaataagactaaacaaaacaaaatataaatgtacatcatttaatgtcccagtggctctattctacctgtaagaaaatgatacaaaaccacctaagatattttgaagcctgacaaatcagcttcatggaaaaaggtaaaaaatgcatttttcaaccgaaagggcagatccaatagaagacccgctccttaaataaacataaaatgtaaaaagttggaaaattaagagtaatgttccatctggaaactgaacttttgtccttgaacttgtgttggcaccaagcctcatacacagtgagctcaataactgttgggacaaaggaaggaaggacaaaatgtgtaacttcccagcatctgggagatgctgtctcttgcctcactgagtgttccttttctttgctctcatgtcattccctgagaacaatgaattctgggacaggctaaacatcatgatgaagtttcttaaacagactttcttagtggaaatccatttagatctgggtgtgctctatggggagtgctgacgtcaaagagcaaatgtctataaggggcccttttaaaatgaacattttcctcattgagcaagctgggattctctaatgtagaaatcaagccatctttataatttcacttcagatgtttatgtttttgttttttttgtctccaatgatggtaaaaataaaaactacgcattacttaaaggagtttccctcacatgtaaacactgttaggaagtctggattaagttgaaagtcctgttttaactttttttctctcatataccaaacactctgtatttctcttaaagaagccctttaagagaaagccctaattttatatctgacagtaaagtttgctgcaagtgtatgagttcaaacacatcccttgttttctgtccctaggggaaaagtcatgtagttttagcttggctccagtgttaatattatattcagtagcagccttagaagagtggtctaagacttgaacctggagcaattttatagcacagaatcctacgaagataggactgtgaacatttgttttctttttcgtgtgtgtcaaactaactggtttttgctttaccaataaaatgtcctcggcagagtaaattttaaacgtgaaaattatagatcttgatattgaatccatcagtgattcaagagatacacctatttgcctaaaacaacctaagatgtattggttatggaatcatgtgttggataggttcttaagacctgtttcctcaaatcttgacacagttttcaagggtggcttattgacttgcacggttgggcagataatccagatttacctaagattgggtaaaaaagtcatctgtgactttgctggcagggcatttgctaagtggagtacaggatctaaaagggttttcttagaaagggcaatattgtccaatgaagtaagcagaaggactctgggttagaagcatctgcacaaaaactggtgagacctactctccactgctctgcagctggatggctgatggcaggctgagcagtggggaagcaggttttaacaacagggagtccttccaggtcactgtatattgagaagaaacataaaactattgtctgttacattccgaggt

SEQ ID NO: 636 - DNA, 6000 bp, Homo sapiens
ttgctcttgccacacaactagcagatgaactaatctatctgttccaacgtgggcacagtagcagccgtaactcttaccttggcccactctgacttgtccagccctggttgaattcttcgtatccccgtgagggtccgcacgtagttggggctgtttactaaacggatgaacttccctaccgggaggctaggtctcggttatgccttacttcccaggaagcggcttctataggcattgtttaaatgtaggagtaggagggagctgggggtattgcattccccaggtcacagataaatgagattccaaaaccaagatctggctaggccttggaaagagggacctgcgaggccgaccagacgtttggaactgcgccttgcagtgtgggatctcagcaccggatattaccccggtttgtagagagttgagttactgttttaagagacgttgcaaaccgtacgggtcaagaagaaagccgaagacgggttagcgcctgcggtcggggtcgagaaaagcaggcgagatgcgacctgacgtgggtccgcctctctccacccgtggcaagcccgacagtcgcactattgctttaacaatcgccctctttccaagaagagctacttagtgaccgtgagcgaatatgcgtgggaagacacgatgtcctctcggcctctgtgcgctcagttgtttacctaggcgtccgggggaggcacactcgcgggactcgcgggactcggccccggcctcccagctcgcccaggacacgacgctggttctgcgggctctcggagcccagcgcgaatcccccgggctaattcccaagaaccgagaggcagcactgcctggaggctgcccccgcctccgcgcccccgtcctcactttctgaggctgttagcagagagtcccgcgggccggggagaagcgggacgcgggggatggcctcgcagcgccctgtgagcgtcggcagtagtcaggcagccagggctccttgggcgatcgccctgggtagaggagaggagtttccggggctcgggtccgggtcgccttccaggggaacgagcgcggaagcaagtgggcggcgagaggcggagcaagagacgctggagggcgtggacgcagcgggctttggaaaggccccaagttaatgaggcgtgcgccggctgccgagcgcctcttggagctgggctttcccccgcggtgcgggcgccaggagccgccttttccgctgggtgtcactcgggggtggggaagatggcccattcaaaagcgccgcgagggggcccggccagtgcccttcagtgagcgctcgcaagaggacggcagaggcccggcagctcggagctccgggaccttgtggcgcatcaggacgcggctgtccctctgccgggacccagagccgccgccgccgctctgcctcctgcgtgttagcctcctctgcgcgctccgggcaggcggccgtgggagccgctggggcgaggacggcgcgaggctgctgctgctgcccccggcccgcgcggctggaaacggagaggccgagccaagcggcggcccctcttatgctgggaggatgctggagagtagcggctgcaaagcgctgaaggagggcgtgctggagaagcgcagcgacgggttgttgcagctctggaagaaaaagtgttgcatcctcaccgaggaagggctgctgcttatcccgcccaagcagctgcaacaccagcagcagcagcagcaacagcagcagcagcagcagcaacaacagcccgggcaggggccggccgagccgtcccaacccagtggccccgctgtcgccagcctcgagccgccggtcaagctcaaggaactgcacttctccaacatgaagaccgtggactgtgtggagcgcaagggcaagtacatgtacttcactgtggtgatggcagagggcaaggagatcgactttcggtgcccgcaagaccagggctggaacgccgagatcacgctgcagatggtgcagtacaagaatcgtcaggccatcctggcggtcaaatccacgcggcagaagcagcagcacctggtccagcagcagcccccctcgcagccgcagccgcagccgcagctccagccccaaccccagcctcagcctcagccgcaaccccagccccaatcacaaccccagcctcagccccaacccaagcctcagccccagcagctccacccgtatccgcatccacatccacatccacactctcatcctcactcgcacccacaccctcacccgcacccgcatccgcaccaaataccgcacccacacccacagccgcactcgcagccgcacgggcaccggcttctccgcagcacctccaactctgcctgaaaggggcagctcccgggcaagacaaggtaaggtcccggcactcgcgctcccgaggagtgggtctcgggggtagtgagttgggaggagtaggaagcttgttcacaggttcggctcctgtatggagaaatcaaaactcataccaagtttctggggcaatggaagaaacagaaacaagctggggccaggagagctgggcagagaggggaggctggggagatccgggccaggcagggggcctcgcggaccgcgcccgcgcccgcgcccatcacgaccgtccttgtcccgtggtgcgtcccccagccccacttgactatatgtttgggcagttgagggaaacaccacggtgtctttctgagcccgctttgtcaggcggactggcccgaacagaactggtctcggagggttcttagccacctacttcactcggtgtcatttctttccaggttttgaggacttgaggaagtgggacgagcacatttctattgtcttcacttggatcaaaagcaaaacagtctctccgccccgcaccagatcaagtagtttggacatcaccctactgaaaacttgcgattcttcttagttttctgcatacttttcatcacgatgcaggaaacgatttcgagtcaagaagacttttatttatgaacctttgaaaggatcgtcttgtatggtgaattttctaggagcgatgatgtactgtaattttattttaatgtattttgatttatgattatttattagtttttttttaaatgcttgttctaagacatttctgaatgtagaccattttccaaaaaggaaactttattttcaaaaacctaatccgtagtaattcctaatcttggagaataaaaaagggcggtggaggggaaaacattaagaatttattcattatttctcgagtactttcagaaagtctgacactttcattgttgtgccagctggttgaaattaaaactctgatattactttttttgaggatttttatttttgtttttgcttaaacatatagtttgtctagaagtttaaaaagctaaaagttaaaaatggtgtaattatgaaaatctaacactcaagatagtttctaaaaggaaatcagtagttaaggatacctgatttcaaaatatttaaagcataacctaactgatggtaggatgattgtatcttgaatatgtggtagggccacatctattgtaggaaaaccttgcttttatcatctgtgtgtaaagggcttaataaggagaagaggccttttgactgatttgtgagtataaatgcatttgctgtttcatttcaaaaatgttgtggaggaaaagagtacatttaacttgtataagagaatatttgtactcctgtccaggctgcaggacctttcttcgagagctttgcacacttgacttgaaccacattttctgatccctttactttgttttagaagcacactgaaaaatctcgttgtttaaagtacaatttgtaaatatttcaaaggtctaggagtcataacttttgttttcatactgaaaatgatgttgatcagagaaaccaactgttttgcttttcattgctctgtgagaaatttgaggattctgttttgctgttaggtaagctaaactcagaaattgaaaaggaaaagactggataaacacaggattttcagtaagaaaacaaccccagtcttgtcttagaagccacttgttgaggagtctgttgggggaaaaaagaggatatgcttttaaaggtagaacaaaccttcttctgtgttaaatcaaaaggatgttcaaaatccaccaggacagatgctacttgggtttaaatggagccatagatgatacaaagtcctcttggggctgaaaatcacttcctatttgcatggctttactaactggtttctgttttccattatctttttcacagaaagtcttggtcagtatttttccagcatttaaattgaaacggtcagtattagaccactgctaggttatgtagtcaagaaataaaaatagaattacatgctacagatgtctttattctccttccatctagaaaggagttccaaggtcaaattactttttagtgcaatagttaaatgacattttgagatcataactcatatccaaaaagttgcagggaaaattaaaatagctttcccctattaagctaatggcaaacaaaacttaagtggacccccacttccagtggttgtttaggttgcagttgtgaaaatatgctgccaacatttaaaaacttgtttcatatgtatatatgtatacacatatatgaatatgtatgtatatatacatatatgagaacatgtgtgtacacatatatgaatatgtatatatgtgtatgtatgtatatatgtatatgaaatgagagccacatctaaagatttcttaaatcaagtttggttcagcttccttagaactgtggctgtactttttgaggagtacctcatagtactatatttttaatgcatgcaaatcataatagctccaaatgaaccacagttttttcccaatggaggatttttttttaattcttgtactaaaaaaaaaaaatccataccaaatatttttacaaattaagattgatgtaggttttaaaaaaggcatttgtatgttgttagcttacatatggggctaggtaatttcattgcttaaaaagatgcgcctaggctccctcttggtggctggatttctttttcttcgcccgtggtggccatggttcttaatagggccaccggaatcatggtttctttttttttttttttttttgagatggagtctcgccctgtgacccaggctggagtgcagtggcacgatctcggctcactgcaacctctgcctcctgggttcacgccattctcctgtctcagcctcctgagtagctgggactacaggtgaatgccaccacgcccggctgatttttgtatttttagtagagatggggtttcaccatagtggtcaggctgttctcgaactcctgacctcaggtgatccacctgccttggcctcccaaagtgctaggattacaggtgtgagccaccacacccggccccagaataatggtttcttgactttctgtagcccttgttccttagtctgctgtgatatttatgttgacctttatcattttctattctgaacccctcttagcatttaatgtgaaatctaagaaattagaagtagaatggcttttattgttttgacacctttgaaattattattaataatttttccagagcaaaaaagcaaacacgctcaataagactaaacaaaacaaaatataaatgtacatcatttaatgtcccagtggctctattctacctgtaagaaaatgatacaaaaccacctaagatattttgaagcctgacaaatcagcttcatggaaaaaggtaaaaaatgcatttttcaaccgaaagggcagatccaatagaagacccgctccttaaataaacataaaatgtaaaaagttggaaaattaagagtaatgttccatctggaaactgaacttttgtccttgaacttgtgttggcaccaagcctcatacacagtgagctcaataactgttgggacaaaggaaggaaggacaaaatgtgtaacttcccagcatctgggagatgctgtctcttgcctcactgagtgttccttttcttt

SEQ ID NO: 637 - DNA, 6000 bp, Homo sapiens
agatgagctgaagaatgtcatcctcttaaaagaatgaacagctggtcatgtagaaattctctggaatgctcacttgtcctacaaaggcaggggagcagaaaacatgtagtttttttgttattggtatacataattgtaaatcttcgagataattttactagaagtccacataattttaataattgcctttctcctgaaaagattgctaataaattaacaatgtgaaggctagaaagctggccaagcataatccggtgggactcaggattgctggctggattgtcccgtttgatcagacattgtttcttagatgaatattcaggacgccctcgtgtataaaagttgtcctttgttctgactaccttggtattaagttcgaatttcttaccatgacacacaaaggattcgattcttgcttagctctctaagctcctctcactttctcttcccctcttgaattctttgctcttgccacacaactagcagatgaactaatctatctgttccaacgtgggcacagtagcagccgtaactcttaccttggcccactctgacttgtccagccctggttgaattcttcgtatccccgtgagggtccgcacgtagttggggctgtttactaaacggatgaacttccctaccgggaggctaggtctcggttatgccttacttcccaggaagcggcttctataggcattgtttaaatgtaggagtaggagggagctgggggtattgcattccccaggtcacagataaatgagattccaaaaccaagatctggctaggccttggaaagagggacctgcgaggccgaccagacgtttggaactgcgccttgcagtgtgggatctcagcaccggatattaccccggtttgtagagagttgagttactgttttaagagacgttgcaaaccgtacgggtcaagaagaaagccgaagacgggttagcgcctgcggtcggggtcgagaaaagcaggcgagatgcgacctgacgtgggtccgcctctctccacccgtggcaagcccgacagtcgcactattgctttaacaatcgccctctttccaagaagagctacttagtgaccgtgagcgaatatgcgtgggaagacacgatgtcctctcggcctctgtgcgctcagttgtttacctaggcgtccgggggaggcacactcgcgggactcgcgggactcggccccggcctcccagctcgcccaggacacgacgctggttctgcgggctctcggagcccagcgcgaatcccccgggctaattcccaagaaccgagaggcagcactgcctggaggctgcccccgcctccgcgcccccgtcctcactttctgaggctgttagcagagagtcccgcgggccggggagaagcgggacgcgggggatggcctcgcagcgccctgtgagcgtcggcagtagtcaggcagccagggctccttgggcgatcgccctgggtagaggagaggagtttccggggctcgggtccgggtcgccttccaggggaacgagcgcggaagcaagtgggcggcgagaggcggagcaagagacgctggagggcgtggacgcagcgggctttggaaaggccccaagttaatgaggcgtgcgccggctgccgagcgcctcttggagctgggctttcccccgcggtgcgggcgccaggagccgccttttccgctgggtgtcactcgggggtggggaagatggcccattcaaaagcgccgcgagggggcccggccagtgcccttcagtgagcgctcgcaagaggacggcagaggcccggcagctcggagctccgggaccttgtggcgcatcaggacgcggctgtccctctgccgggacccagagccgccgccgccgctctgcctcctgcgtgttagcctcctctgcgcgctccgggcaggcggccgtgggagccgctggggcgaggacggcgcgaggctgctgctgctgcccccggcccgcgcggctggaaacggagaggccgagccaagcggcggcccctcttatgctgggaggatgctggagagtagcggctgcaaagcgctgaaggagggcgtgctggagaagcgcagcgacgggttgttgcagctctggaagaaaaagtgttgcatcctcaccgaggaagggctgctgcttatcccgcccaagcagctgcaacaccagcagcagcagcagcaacagcagcagcagcagcagcaacaacagcccgggcaggggccggccgagccgtcccaacccagtggccccgctgtcgccagcctcgagccgccggtcaagctcaaggaactgcacttctccaacatgaagaccgtggactgtgtggagcgcaagggcaagtacatgtacttcactgtggtgatggcagagggcaaggagatcgactttcggtgcccgcaagaccagggctggaacgccgagatcacgctgcagatggtgcagtacaagaatcgtcaggccatcctggcggtcaaatccacgcggcagaagcagcagcacctggtccagcagcagcccccctcgcagccgcagccgcagccgcagctccagccccaaccccagcctcagcctcagccgcaaccccagccccaatcacaaccccagcctcagccccaacccaagcctcagccccagcagctccacccgtatccgcatccacatccacatccacactctcatcctcactcgcacccacaccctcacccgcacccgcatccgcaccaaataccgcacccacacccacagccgcactcgcagccgcacgggcaccggcttctccgcagcacctccaactctgcctgaaaggggcagctcccgggcaagacaaggtaaggtcccggcactcgcgctcccgaggagtgggtctcgggggtagtgagttgggaggagtaggaagcttgttcacaggttcggctcctgtatggagaaatcaaaactcataccaagtttctggggcaatggaagaaacagaaacaagctggggccaggagagctgggcagagaggggaggctggggagatccgggccaggcagggggcctcgcggaccgcgcccgcgcccgcgcccatcacgaccgtccttgtcccgtggtgcgtcccccagccccacttgactatatgtttgggcagttgagggaaacaccacggtgtctttctgagcccgctttgtcaggcggactggcccgaacagaactggtctcggagggttcttagccacctacttcactcggtgtcatttctttccaggttttgaggacttgaggaagtgggacgagcacatttctattgtcttcacttggatcaaaagcaaaacagtctctccgccccgcaccagatcaagtagtttggacatcaccctactgaaaacttgcgattcttcttagttttctgcatacttttcatcacgatgcaggaaacgatttcgagtcaagaagacttttatttatgaacctttgaaaggatcgtcttgtatggtgaattttctaggagcgatgatgtactgtaattttattttaatgtattttgatttatgattatttattagtttttttttaaatgcttgttctaagacatttctgaatgtagaccattttccaaaaaggaaactttattttcaaaaacctaatccgtagtaattcctaatcttggagaataaaaaagggcggtggaggggaaaacattaagaatttattcattatttctcgagtactttcagaaagtctgacactttcattgttgtgccagctggttgaaattaaaactctgatattactttttttgaggatttttatttttgtttttgcttaaacatatagtttgtctagaagtttaaaaagctaaaagttaaaaatggtgtaattatgaaaatctaacactcaagatagtttctaaaaggaaatcagtagttaaggatacctgatttcaaaatatttaaagcataacctaactgatggtaggatgattgtatcttgaatatgtggtagggccacatctattgtaggaaaaccttgcttttatcatctgtgtgtaaagggcttaataaggagaagaggccttttgactgatttgtgagtataaatgcatttgctgtttcatttcaaaaatgttgtggaggaaaagagtacatttaacttgtataagagaatatttgtactcctgtccaggctgcaggacctttcttcgagagctttgcacacttgacttgaaccacattttctgatccctttactttgttttagaagcacactgaaaaatctcgttgtttaaagtacaatttgtaaatatttcaaaggtctaggagtcataacttttgttttcatactgaaaatgatgttgatcagagaaaccaactgttttgcttttcattgctctgtgagaaatttgaggattctgttttgctgttaggtaagctaaactcagaaattgaaaaggaaaagactggataaacacaggattttcagtaagaaaacaaccccagtcttgtcttagaagccacttgttgaggagtctgttgggggaaaaaagaggatatgcttttaaaggtagaacaaaccttcttctgtgttaaatcaaaaggatgttcaaaatccaccaggacagatgctacttgggtttaaatggagccatagatgatacaaagtcctcttggggctgaaaatcacttcctatttgcatggctttactaactggtttctgttttccattatctttttcacagaaagtcttggtcagtatttttccagcatttaaattgaaacggtcagtattagaccactgctaggttatgtagtcaagaaataaaaatagaattacatgctacagatgtctttattctccttccatctagaaaggagttccaaggtcaaattactttttagtgcaatagttaaatgacattttgagatcataactcatatccaaaaagttgcagggaaaattaaaatagctttcccctattaagctaatggcaaacaaaacttaagtggacccccacttccagtggttgtttaggttgcagttgtgaaaatatgctgccaacatttaaaaacttgtttcatatgtatatatgtatacacatatatgaatatgtatgtatatatacatatatgagaacatgtgtgtacacatatatgaatatgtatatatgtgtatgtatgtatatatgtatatgaaatgagagccacatctaaagatttcttaaatcaagtttggttcagcttccttagaactgtggctgtactttttgaggagtacctcatagtactatatttttaatgcatgcaaatcataatagctccaaatgaaccacagttttttcccaatggaggatttttttttaattcttgtactaaaaaaaaaaaatccataccaaatatttttacaaattaagattgatgtaggttttaaaaaaggcatttgtatgttgttagcttacatatggggctaggtaatttcattgcttaaaaagatgcgcctaggctccctcttggtggctggatttctttttcttcgcccgtggtggccatggttcttaatagggccaccggaatcatggtttctttttttttttttttttttgagatggagtctcgccctgtgacccaggctggagtgcagtggcacgatctcggctcactgcaacctctgcctcctgggttcacgccattctcctgtctcagcctcctgagtagctgggactacaggtgaatgccaccacgcccggctgatttttgtatttttagtagagatggggtttcaccatagtggtcaggctgttctcgaactcctgacctcaggtgatccacctgccttggcctcccaaagtgctaggattacaggtgtgagccaccacacccggccccagaataatggtttcttgactttctgtagcccttgttccttagtctgctgtgatatttatgttgacctttatcattttctattctgaacccctcttagcatttaatgtgaaatctaagaaattagaagtagaatggc

SEQ ID NO: 638 - DNA, 6000 bp, Homo sapiens
ggtgtatctcttgaatcactgatggattcaatatcaagatctataattttcacgtttaaaatttactctgccgaggacattttattggtaaagcaaaaaccagttagtttgacacacacgaaaaagaaaacaaatgttcacagtcctatcttcgtaggattctgtgctataaaattgctccaggttcaagtcttagaccactcttctaaggctgctactgaatataatattaacactggagccaagctaaaactacatgacttttcccctagggacagaaaacaagggatgtgtttgaactcatacacttgcagcaaactttactgtcagatataaaattagggctttctcttaaagggcttctttaagagaaatacagagtgtttggtatatgagagaaaaaaagttaaaacaggactttcaacttaatccagacttcctaacagtgtttacatgtgagggaaactcctttaagtaatgcgtagtttttatttttaccatcattggagacaaaaaaaacaaaaacataaacatctgaagtgaaattataaagatggcttgatttctacattagagaatcccagcttgctcaatgaggaaaatgttcattttaaaagggccccttatagacatttgctctttgacgtcagcactccccatagagcacacccagatctaaatggatttccactaagaaagtctgtttaagaaacttcatcatgatgtttagcctgtcccagaattcattgttctcagggaatgacatgagagcaaagaaaaggaacactcagtgaggcaagagacagcatctcccagatgctgggaagttacacattttgtccttccttcctttgtcccaacagttattgagctcactgtgtatgaggcttggtgccaacacaagttcaaggacaaaagttcagtttccagatggaacattactcttaattttccaactttttacattttatgtttatttaaggagcgggtcttctattggatctgccctttcggttgaaaaatgcattttttacctttttccatgaagctgatttgtcaggcttcaaaatatcttaggtggttttgtatcattttcttacaggtagaatagagccactgggacattaaatgatgtacatttatattttgttttgtttagtcttattgagcgtgtttgcttttttgctctggaaaaattattaataataatttcaaaggtgtcaaaacaataaaagccattctacttctaatttcttagatttcacattaaatgctaagaggggttcagaatagaaaatgataaaggtcaacataaatatcacagcagactaaggaacaagggctacagaaagtcaagaaaccattattctggggccgggtgtggtggctcacacctgtaatcctagcactttgggaggccaaggcaggtggatcacctgaggtcaggagttcgagaacagcctgaccactatggtgaaaccccatctctactaaaaatacaaaaatcagccgggcgtggtggcattcacctgtagtcccagctactcaggaggctgagacaggagaatggcgtgaacccaggaggcagaggttgcagtgagccgagatcgtgccactgcactccagcctgggtcacagggcgagactccatctcaaaaaaaaaaaaaaaaaaagaaaccatgattccggtggccctattaagaaccatggccaccacgggcgaagaaaaagaaatccagccaccaagagggagcctaggcgcatctttttaagcaatgaaattacctagccccatatgtaagctaacaacatacaaatgccttttttaaaacctacatcaatcttaatttgtaaaaatatttggtatggattttttttttttagtacaagaattaaaaaaaaatcctccattgggaaaaaactgtggttcatttggagctattatgatttgcatgcattaaaaatatagtactatgaggtactcctcaaaaagtacagccacagttctaaggaagctgaaccaaacttgatttaagaaatctttagatgtggctctcatttcatatacatatatacatacatacacatatatacatattcatatatgtgtacacacatgttctcatatatgtatatatacatacatattcatatatgtgtatacatatatacatatgaaacaagtttttaaatgttggcagcatattttcacaactgcaacctaaacaaccactggaagtgggggtccacttaagttttgtttgccattagcttaataggggaaagctattttaattttccctgcaactttttggatatgagttatgatctcaaaatgtcatttaactattgcactaaaaagtaatttgaccttggaactcctttctagatggaaggagaataaagacatctgtagcatgtaattctatttttatttcttgactacataacctagcagtggtctaatactgaccgtttcaatttaaatgctggaaaaatactgaccaagactttctgtgaaaaagataatggaaaacagaaaccagttagtaaagccatgcaaataggaagtgattttcagccccaagaggactttgtatcatctatggctccatttaaacccaagtagcatctgtcctggtggattttgaacatccttttgatttaacacagaagaaggtttgttctacctttaaaagcatatcctcttttttcccccaacagactcctcaacaagtggcttctaagacaagactggggttgttttcttactgaaaatcctgtgtttatccagtcttttccttttcaatttctgagtttagcttacctaacagcaaaacagaatcctcaaatttctcacagagcaatgaaaagcaaaacagttggtttctctgatcaacatcattttcagtatgaaaacaaaagttatgactcctagacctttgaaatatttacaaattgtactttaaacaacgagatttttcagtgtgcttctaaaacaaagtaaagggatcagaaaatgtggttcaagtcaagtgtgcaaagctctcgaagaaaggtcctgcagcctggacaggagtacaaatattctcttatacaagttaaatgtactcttttcctccacaacatttttgaaatgaaacagcaaatgcatttatactcacaaatcagtcaaaaggcctcttctccttattaagccctttacacacagatgataaaagcaaggttttcctacaatagatgtggccctaccacatattcaagatacaatcatcctaccatcagttaggttatgctttaaatattttgaaatcaggtatccttaactactgatttccttttagaaactatcttgagtgttagattttcataattacaccatttttaacttttagctttttaaacttctagacaaactatatgtttaagcaaaaacaaaaataaaaatcctcaaaaaaagtaatatcagagttttaatttcaaccagctggcacaacaatgaaagtgtcagactttctgaaagtactcgagaaataatgaataaattcttaatgttttcccctccaccgcccttttttattctccaagattaggaattactacggattaggtttttgaaaataaagtttcctttttggaaaatggtctacattcagaaatgtcttagaacaagcatttaaaaaaaaactaataaataatcataaatcaaaatacattaaaataaaattacagtacatcatcgctcctagaaaattcaccatacaagacgatcctttcaaaggttcataaataaaagtcttcttgactcgaaatcgtttcctgcatcgtgatgaaaagtatgcagaaaactaagaagaatcgcaagttttcagtagggtgatgtccaaactacttgatctggtgcggggcggagagactgttttgcttttgatccaagtgaagacaatagaaatgtgctcgtcccacttcctcaagtcctcaaaacctggaaagaaatgacaccgagtgaagtaggtggctaagaaccctccgagaccagttctgttcgggccagtccgcctgacaaagcgggctcagaaagacaccgtggtgtttccctcaactgcccaaacatatagtcaagtggggctgggggacgcaccacgggacaaggacggtcgtgatgggcgcgggcgcgggcgcggtccgcgaggccccctgcctggcccggatctccccagcctcccctctctgcccagctctcctggccccagcttgtttctgtttcttccattgccccagaaacttggtatgagttttgatttctccatacaggagccgaacctgtgaacaagcttcctactcctcccaactcactacccccgagacccactcctcgggagcgcgagtgccgggaccttaccttgtcttgcccgggagctgcccctttcaggcagagttggaggtgctgcggagaagccggtgcccgtgcggctgcgagtgcggctgtgggtgtgggtgcggtatttggtgcggatgcgggtgcgggtgagggtgtgggtgcgagtgaggatgagagtgtggatgtggatgtggatgcggatacgggtggagctgctggggctgaggcttgggttggggctgaggctggggttgtgattggggctggggttgcggctgaggctgaggctggggttggggctggagctgcggctgcggctgcggctgcgaggggggctgctgctggaccaggtgctgctgcttctgccgcgtggatttgaccgccaggatggcctgacgattcttgtactgcaccatctgcagcgtgatctcggcgttccagccctggtcttgcgggcaccgaaagtcgatctccttgccctctgccatcaccacagtgaagtacatgtacttgcccttgcgctccacacagtccacggtcttcatgttggagaagtgcagttccttgagcttgaccggcggctcgaggctggcgacagcggggccactgggttgggacggctcggccggcccctgcccgggctgttgttgctgctgctgctgctgctgttgctgctgctgctgctggtgttgcagctgcttgggcgggataagcagcagcccttcctcggtgaggatgcaacactttttcttccagagctgcaacaacccgtcgctgcgcttctccagcacgccctccttcagcgctttgcagccgctactctccagcatcctcccagcataagaggggccgccgcttggctcggcctctccgtttccagccgcgcgggccgggggcagcagcagcagcctcgcgccgtcctcgccccagcggctcccacggccgcctgcccggagcgcgcagaggaggctaacacgcaggaggcagagcggcggcggcggctctgggtcccggcagagggacagccgcgtcctgatgcgccacaaggtcccggagctccgagctgccgggcctctgccgtcctcttgcgagcgctcactgaagggcactggccgggccccctcgcggcgcttttgaatgggccatcttccccacccccgagtgacacccagcggaaaaggcggctcctggcgcccgcaccgcgggggaaagcccagctccaagaggcgctcggcagccggcgcacgcctcattaacttggggcctttccaaagcccgctgcgtccacgccctccagcgtctcttgctccgcctctcgccgcccacttgcttccgcgctcgttcccctggaaggcgacccggacccgagccccggaaactcctctcctctacccagggcgatcgcccaaggagccctggctgcctgactactgccgacgctcacagggcgctgcgaggccatcccccgcgtcccgcttctccccggcccgcgggactctctgctaacagcctcagaaagtgaggacgggggcgcggaggcgggggcagcctccaggcagtgctgcctctcggttcttgggaattagcccgggggattcgcgctgggctccgagagcccg

SEQ ID NO: 639 - DNA, 6000 bp, Homo sapiens
atgttgcttgggaaaaggtttgtgggatttattttagatgtctgactataaaagcatttaagattcagagaggcctagcatgtagttatccatttaaaaagtataccagagatatgtttgtagggcaaatttcaagtccttacatctcaagttttaaaaagtaggatgcatcatgaaaaatctgtcaaaagcatttgaaaaaattgatattctttttatgatgggtatggacttctaattcaattcaagatttctacctatgttgagcatctacttggtatcaagactttttctaggtgattgggacacatcagaaacaatggtccttgccctcttgaatagcttgcatactattctagtgggaaggggaacagaaataagcaataggtacaataaattattgagtagcatgttagaagataatatatgctatgggaaaaattaaggggaattgagtggctaccatttgagagtgatcaggataggcctgttgagccaagacttgaagaaagtgatggagataactttgggtgctatgctgaaaatagataacaaggatagaatcagggagacaagttaggaggccatcatagtaatccagtggggggatatgatggtgatttggatcagggtggtaatgaaggaagtggacagaatccagatgtagttgaaggcctaaccagtaggatttcctgactaaatgtgtagattaaatattgggagagaaaaaaattactacaaggcaggcatgattctacacacttgaaggcctggggcaagagtacaatggagataccgtatgtttaaatatttaaaagtactgtttaatgaaaatatgcccaatgtgcctgtcttgacaaactttcattagaactgggaagccaggtttgtatttatgccagaatataacttgcgggcagagctgaccctcagcccatgagccaccttccttttcttcccaccccggctctgaactgtatggcaaggggcctcctgcacatttacttggatgccataaccagtatattcgaactgccctatccccctaacacatcagtgcatgcaatgatgatgtaatgcatttcctggaacagctggggctattctgggcagggtatttggggtcttgagtacctagagtgtagtgcagaatgagtatgctctctagattgacatgtcatcttgactctaaagcactcaatcctaaagctcagggccttggataagggcctttcctggcctggtgtaagggcagtactgatctacggtttttagtttgagcatctgtacagaggattgctgtcaactgagaaagggggctgcaggtagagtaggttagagtgaggaaaatagtttgggagctcattcacatgtttgatttcttagactacacaagccgtactgtagagaagtgtaaatggagaattttcaacttatagtagcactcactggcctggaattgataaaaactgaaggctgtttttcactatagttaattctaacctataaactggagcagttccatgtaggaatttgttaaaacctattgtgtatgaattacagactcctctgaccatccgagtgttctttttcagtttttttttttttttcctatgacctaaaatcccctcagacttaaacctttagtgaactactcagtaaatggctttactagtaagtgttcccttgcctggtatgtttattattttttaacttcagtgttttattcttcggcagtaagcagttggatataagttgggggtataaatttgggactctggcatatagatgttattaaaagtgatgagactggatatcaacaagggaatgagtgtagataaagaagagagccaaagacaaagacttggggcattccaacattaaaagtttggagagaagagaaagcacctcatagaggagacactggagatgtaaaggaaaactgagtgatgtccttgaagccaagtgataaactttatccaagagaagaaaatgaactgtccagtgctgctgatagataactttatattgccagctgtaaaatgtactttcaattagccatttcaaatttgtttaccaaagcaatgattttgttggctagttttctaaacttcagtaacttttcagtgacttgtaggttttcattgcatatacagctgaatttttttttttttttaaacagggtcttgctgccacccaggcttgtatagtggtgcgatcctagctcctgcaaccttgaacttctgggctcaaacagtcctccacctcagcctcccaagtagctggggctacatggcgcatgccaccacacctggctaattttttttttacatttgtagagggaggccttgccatgtagcccaggttggtttcaaactcctgggctcaagggatcctctcacctcagcctcctagagtgttggtattacaggtgtgaaccaccatgcctggcccaaaagttgttttttttttttttaagttattttctgtaatgcattttctgtgaatttattgtcttaaaaattggcaaatatggccattttgacatatttgccaaatatgagcatatggcaactatgctcttaatttgttaagtcaccaactgttggtggtaactgttgaaataacaagagcaaagttatcaccaatctacgggatccttacactactgatattttcaataatgcaccgtagtcagacattgtagacttaacctctgagctgctcacaaaattactaaatcattctgaaatacgtaactgcaaattctgggctttaaagtctctagttaaatgggtgattttgaaaattggtggctgttcagacattttcaaatgagaatagaatgcatttgtttcagactgataaactgcagaaggttagataacaccaaacacatttgagtttctcctaagaaaatgacttgggcctccagattacatctcattttttttttttttaccctatcaagtttgtttttccatatgaaatgtctttcccaactacacctgcccttggagactgtgaataacagacttaaaggaagtatcctttccagatgagctgaagaatgtcatcctcttaaaagaatgaacagctggtcatgtagaaattctctggaatgctcacttgtcctacaaaggcaggggagcagaaaacatgtagtttttttgttattggtatacataattgtaaatcttcgagataattttactagaagtccacataattttaataattgcctttctcctgaaaagattgctaataaattaacaatgtgaaggctagaaagctggccaagcataatccggtgggactcaggattgctggctggattgtcccgtttgatcagacattgtttcttagatgaatattcaggacgccctcgtgtataaaagttgtcctttgttctgactaccttggtattaagttcgaatttcttaccatgacacacaaaggattcgattcttgcttagctctctaagctcctctcactttctcttcccctcttgaattctttgctcttgccacacaactagcagatgaactaatctatctgttccaacgtgggcacagtagcagccgtaactcttaccttggcccactctgacttgtccagccctggttgaattcttcgtatccccgtgagggtccgcacgtagttggggctgtttactaaacggatgaacttccctaccgggaggctaggtctcggttatgccttacttcccaggaagcggcttctataggcattgtttaaatgtaggagtaggagggagctgggggtattgcattccccaggtcacagataaatgagattccaaaaccaagatctggctaggccttggaaagagggacctgcgaggccgaccagacgtttggaactgcgccttgcagtgtgggatctcagcaccggatattaccccggtttgtagagagttgagttactgttttaagagacgttgcaaaccgtacgggtcaagaagaaagccgaagacgggttagcgcctgcggtcggggtcgagaaaagcaggcgagatgcgacctgacgtgggtccgcctctctccacccgtggcaagcccgacagtcgcactattgctttaacaatcgccctctttccaagaagagctacttagtgaccgtgagcgaatatgcgtgggaagacacgatgtcctctcggcctctgtgcgctcagttgtttacctaggcgtccgggggaggcacactcgcgggactcgcgggactcggccccggcctcccagctcgcccaggacacgacgctggttctgcgggctctcggagcccagcgcgaatcccccgggctaattcccaagaaccgagaggcagcactgcctggaggctgcccccgcctccgcgcccccgtcctcactttctgaggctgttagcagagagtcccgcgggccggggagaagcgggacgcgggggatggcctcgcagcgccctgtgagcgtcggcagtagtcaggcagccagggctccttgggcgatcgccctgggtagaggagaggagtttccggggctcgggtccgggtcgccttccaggggaacgagcgcggaagcaagtgggcggcgagaggcggagcaagagacgctggagggcgtggacgcagcgggctttggaaaggccccaagttaatgaggcgtgcgccggctgccgagcgcctcttggagctgggctttcccccgcggtgcgggcgccaggagccgccttttccgctgggtgtcactcgggggtggggaagatggcccattcaaaagcgccgcgagggggcccggccagtgcccttcagtgagcgctcgcaagaggacggcagaggcccggcagctcggagctccgggaccttgtggcgcatcaggacgcggctgtccctctgccgggacccagagccgccgccgccgctctgcctcctgcgtgttagcctcctctgcgcgctccgggcaggcggccgtgggagccgctggggcgaggacggcgcgaggctgctgctgctgcccccggcccgcgcggctggaaacggagaggccgagccaagcggcggcccctcttatgctgggaggatgctggagagtagcggctgcaaagcgctgaaggagggcgtgctggagaagcgcagcgacgggttgttgcagctctggaagaaaaagtgttgcatcctcaccgaggaagggctgctgcttatcccgcccaagcagctgcaacaccagcagcagcagcagcaacagcagcagcagcagcagcaacaacagcccgggcaggggccggccgagccgtcccaacccagtggccccgctgtcgccagcctcgagccgccggtcaagctcaaggaactgcacttctccaacatgaagaccgtggactgtgtggagcgcaagggcaagtacatgtacttcactgtggtgatggcagagggcaaggagatcgactttcggtgcccgcaagaccagggctggaacgccgagatcacgctgcagatggtgcagtacaagaatcgtcaggccatcctggcggtcaaatccacgcggcagaagcagcagcacctggtccagcagcagcccccctcgcagccgcagccgcagccgcagctccagccccaaccccagcctcagcctcagccgcaaccccagccccaatcacaaccccagcctcagccccaacccaagcctcagccccagcagctccacccgtatccgcatccacatccacatccacactctcatcctcactcgcacccacaccctcacccgcacccgcatccgcaccaaataccgcacccacacccacagccgcactcgcagccgcacgggcaccggcttctccgcagcacctccaactctgcctgaaaggggcagctcccgggcaagacaaggtaaggtcccggcactcgcgctcccgaggagtgggtctcgggggtagtgagttgggaggagtaggaagcttgttcacaggttcggctcctgtatggagaaatcaaaactcat

SEQ ID NO: 640 - DNA, 6000 bp, Homo sapiens
gatgtttagcctgtcccagaattcattgttctcagggaatgacatgagagcaaagaaaaggaacactcagtgaggcaagagacagcatctcccagatgctgggaagttacacattttgtccttccttcctttgtcccaacagttattgagctcactgtgtatgaggcttggtgccaacacaagttcaaggacaaaagttcagtttccagatggaacattactcttaattttccaactttttacattttatgtttatttaaggagcgggtcttctattggatctgccctttcggttgaaaaatgcattttttacctttttccatgaagctgatttgtcaggcttcaaaatatcttaggtggttttgtatcattttcttacaggtagaatagagccactgggacattaaatgatgtacatttatattttgttttgtttagtcttattgagcgtgtttgcttttttgctctggaaaaattattaataataatttcaaaggtgtcaaaacaataaaagccattctacttctaatttcttagatttcacattaaatgctaagaggggttcagaatagaaaatgataaaggtcaacataaatatcacagcagactaaggaacaagggctacagaaagtcaagaaaccattattctggggccgggtgtggtggctcacacctgtaatcctagcactttgggaggccaaggcaggtggatcacctgaggtcaggagttcgagaacagcctgaccactatggtgaaaccccatctctactaaaaatacaaaaatcagccgggcgtggtggcattcacctgtagtcccagctactcaggaggctgagacaggagaatggcgtgaacccaggaggcagaggttgcagtgagccgagatcgtgccactgcactccagcctgggtcacagggcgagactccatctcaaaaaaaaaaaaaaaaaaagaaaccatgattccggtggccctattaagaaccatggccaccacgggcgaagaaaaagaaatccagccaccaagagggagcctaggcgcatctttttaagcaatgaaattacctagccccatatgtaagctaacaacatacaaatgccttttttaaaacctacatcaatcttaatttgtaaaaatatttggtatggattttttttttttagtacaagaattaaaaaaaaatcctccattgggaaaaaactgtggttcatttggagctattatgatttgcatgcattaaaaatatagtactatgaggtactcctcaaaaagtacagccacagttctaaggaagctgaaccaaacttgatttaagaaatctttagatgtggctctcatttcatatacatatatacatacatacacatatatacatattcatatatgtgtacacacatgttctcatatatgtatatatacatacatattcatatatgtgtatacatatatacatatgaaacaagtttttaaatgttggcagcatattttcacaactgcaacctaaacaaccactggaagtgggggtccacttaagttttgtttgccattagcttaataggggaaagctattttaattttccctgcaactttttggatatgagttatgatctcaaaatgtcatttaactattgcactaaaaagtaatttgaccttggaactcctttctagatggaaggagaataaagacatctgtagcatgtaattctatttttatttcttgactacataacctagcagtggtctaatactgaccgtttcaatttaaatgctggaaaaatactgaccaagactttctgtgaaaaagataatggaaaacagaaaccagttagtaaagccatgcaaataggaagtgattttcagccccaagaggactttgtatcatctatggctccatttaaacccaagtagcatctgtcctggtggattttgaacatccttttgatttaacacagaagaaggtttgttctacctttaaaagcatatcctcttttttcccccaacagactcctcaacaagtggcttctaagacaagactggggttgttttcttactgaaaatcctgtgtttatccagtcttttccttttcaatttctgagtttagcttacctaacagcaaaacagaatcctcaaatttctcacagagcaatgaaaagcaaaacagttggtttctctgatcaacatcattttcagtatgaaaacaaaagttatgactcctagacctttgaaatatttacaaattgtactttaaacaacgagatttttcagtgtgcttctaaaacaaagtaaagggatcagaaaatgtggttcaagtcaagtgtgcaaagctctcgaagaaaggtcctgcagcctggacaggagtacaaatattctcttatacaagttaaatgtactcttttcctccacaacatttttgaaatgaaacagcaaatgcatttatactcacaaatcagtcaaaaggcctcttctccttattaagccctttacacacagatgataaaagcaaggttttcctacaatagatgtggccctaccacatattcaagatacaatcatcctaccatcagttaggttatgctttaaatattttgaaatcaggtatccttaactactgatttccttttagaaactatcttgagtgttagattttcataattacaccatttttaacttttagctttttaaacttctagacaaactatatgtttaagcaaaaacaaaaataaaaatcctcaaaaaaagtaatatcagagttttaatttcaaccagctggcacaacaatgaaagtgtcagactttctgaaagtactcgagaaataatgaataaattcttaatgttttcccctccaccgcccttttttattctccaagattaggaattactacggattaggtttttgaaaataaagtttcctttttggaaaatggtctacattcagaaatgtcttagaacaagcatttaaaaaaaaactaataaataatcataaatcaaaatacattaaaataaaattacagtacatcatcgctcctagaaaattcaccatacaagacgatcctttcaaaggttcataaataaaagtcttcttgactcgaaatcgtttcctgcatcgtgatgaaaagtatgcagaaaactaagaagaatcgcaagttttcagtagggtgatgtccaaactacttgatctggtgcggggcggagagactgttttgcttttgatccaagtgaagacaatagaaatgtgctcgtcccacttcctcaagtcctcaaaacctggaaagaaatgacaccgagtgaagtaggtggctaagaaccctccgagaccagttctgttcgggccagtccgcctgacaaagcgggctcagaaagacaccgtggtgtttccctcaactgcccaaacatatagtcaagtggggctgggggacgcaccacgggacaaggacggtcgtgatgggcgcgggcgcgggcgcggtccgcgaggccccctgcctggcccggatctccccagcctcccctctctgcccagctctcctggccccagcttgtttctgtttcttccattgccccagaaacttggtatgagttttgatttctccatacaggagccgaacctgtgaacaagcttcctactcctcccaactcactacccccgagacccactcctcgggagcgcgagtgccgggaccttaccttgtcttgcccgggagctgcccctttcaggcagagttggaggtgctgcggagaagccggtgcccgtgcggctgcgagtgcggctgtgggtgtgggtgcggtatttggtgcggatgcgggtgcgggtgagggtgtgggtgcgagtgaggatgagagtgtggatgtggatgtggatgcggatacgggtggagctgctggggctgaggcttgggttggggctgaggctggggttgtgattggggctggggttgcggctgaggctgaggctggggttggggctggagctgcggctgcggctgcggctgcgaggggggctgctgctggaccaggtgctgctgcttctgccgcgtggatttgaccgccaggatggcctgacgattcttgtactgcaccatctgcagcgtgatctcggcgttccagccctggtcttgcgggcaccgaaagtcgatctccttgccctctgccatcaccacagtgaagtacatgtacttgcccttgcgctccacacagtccacggtcttcatgttggagaagtgcagttccttgagcttgaccggcggctcgaggctggcgacagcggggccactgggttgggacggctcggccggcccctgcccgggctgttgttgctgctgctgctgctgctgttgctgctgctgctgctggtgttgcagctgcttgggcgggataagcagcagcccttcctcggtgaggatgcaacactttttcttccagagctgcaacaacccgtcgctgcgcttctccagcacgccctccttcagcgctttgcagccgctactctccagcatcctcccagcataagaggggccgccgcttggctcggcctctccgtttccagccgcgcgggccgggggcagcagcagcagcctcgcgccgtcctcgccccagcggctcccacggccgcctgcccggagcgcgcagaggaggctaacacgcaggaggcagagcggcggcggcggctctgggtcccggcagagggacagccgcgtcctgatgcgccacaaggtcccggagctccgagctgccgggcctctgccgtcctcttgcgagcgctcactgaagggcactggccgggccccctcgcggcgcttttgaatgggccatcttccccacccccgagtgacacccagcggaaaaggcggctcctggcgcccgcaccgcgggggaaagcccagctccaagaggcgctcggcagccggcgcacgcctcattaacttggggcctttccaaagcccgctgcgtccacgccctccagcgtctcttgctccgcctctcgccgcccacttgcttccgcgctcgttcccctggaaggcgacccggacccgagccccggaaactcctctcctctacccagggcgatcgcccaaggagccctggctgcctgactactgccgacgctcacagggcgctgcgaggccatcccccgcgtcccgcttctccccggcccgcgggactctctgctaacagcctcagaaagtgaggacgggggcgcggaggcgggggcagcctccaggcagtgctgcctctcggttcttgggaattagcccgggggattcgcgctgggctccgagagcccgcagaaccagcgtcgtgtcctgggcgagctgggaggccggggccgagtcccgcgagtcccgcgagtgtgcctcccccggacgcctaggtaaacaactgagcgcacagaggccgagaggacatcgtgtcttcccacgcatattcgctcacggtcactaagtagctcttcttggaaagagggcgattgttaaagcaatagtgcgactgtcgggcttgccacgggtggagagaggcggacccacgtcaggtcgcatctcgcctgcttttctcgaccccgaccgcaggcgctaacccgtcttcggctttcttcttgacccgtacggtttgcaacgtctcttaaaacagtaactcaactctctacaaaccggggtaatatccggtgctgagatcccacactgcaaggcgcagttccaaacgtctggtcggcctcgcaggtccctctttccaaggcctagccagatcttggttttggaatctcatttatctgtgacctggggaatgcaatacccccagctccctcctactcctacatttaaacaatgcctatagaagccgcttcctgggaagtaaggcataaccgagacctagcctcccggtagggaagttcatccgtttagtaaacagccccaactacgtgcggaccctcacggggatacgaagaattcaaccagggctggacaagtcagagtgggccaaggtaagagttacggctgctactgtgcc

SEQ ID NO: 641 - DNA, 6000 bp, Homo sapiens
acaaaaaattagctgggcgtggtggcatgtgcctgtattcccagctactctggaggctgatgcaggagaattgcttgaacccaggaggcggaggttgcagtgagccaagactgcgccactgcactacagcctcaccaacagagcgagactccgtctccaaacaaacaaacaaaatcaatccatattaaagcaggggatggagggctccagaacagatgtttccaaaaagagaatagaactgatagcttacccaatgtgattaacgtcattgagaggaggaaaatttgagtatatacttgtgactggtatataaaaaaataagccgatgattaaagaaaaaaaaagaggcaagttttaactgcagaaaaatggtaaagacaaaaggtatagttgtgcaacaaggaaaaacagttgtaaaaaaaaagaaatgcaatcatatacaccacatgactcagctatgaacagtatttgtatagtcataatactacgggcgtgtaggagtatgaaaagtatatgtgtggccgggcatggtggctcatgcctgtaatcccagaactttgggaggccgaggcgggtggatcacgaggtcaggagatcgagatcatcctggctaacacagtgaaaccccgtctctactaaaaatgcaaaaaaaaaaaaaaaaaaaaaaaaaaattagccgggcgtggtggcagccacctgtagtcccagctactcaggaggctgaggcaggagaatggcgtgaacccgggaggcggagcttgcagtgagccgagatcgcgccactgcactccagcctgggagacagagcgagactccatctcaaaaaaaaagaaaaaaaaaagaaaaagaaaagaaaagtatatgtgttattagtgtattagagctaaatcctcttctatatctaaaaatggaaaaatcaagatgtacaatagcagatatgcacataaaaaataaatatgaagatctctattaatggaaacagttaaaaagttcaaagttttgggtagggttttcagaatggataaggtagagaggggattgctgttttttgttataatccttgtagaactaaagtatgtaatttttttatcctatgcacatataatattttgatgttagaggatgaattgcatatgttccagaaatacctgcattgaaggcaaaatggctacttcccaatacactagctatccatacatataataatacacttcctcaaaatcattaagactaacatctaggtttcactctgacatatttaaatgaatctgtttttgtcagcattatcatcatatttcattttattattaagggcaagtgagtcgctaaaaattggttattttaggctaactcagaggtgctcaaccggggaagaattttatcccagggaccatgtggcaatgtcacaatacaggtgggggtttcttattggtatctaataggtagaagccaacgatgctgctaaacaacctacaatgggcaggacagcaaagaattatccagccccaaatgtaacagtgctgaggttgagaaaccaagctccaagtctttgaggattatttcatcagaacgctatacataaagattgatgatatgcaaacatcttgcaatttaggactgactcagctaaatacctcggtgcaatgttggaagcagtctggctgtgaaatatatcttcgggaatattgagaatggtaaagacaaaaggtataataaatgataataataacaaaacacagagctttgtacctcaataatctctttcatccatggttcctagggcactttatagactaataatacctactctggtactcacataccaccttttatctaaggactgcaggcactttcacaacactctcacgatgcaggaagtattattatccccattttatatgtaagtaaacagaggcacaaaagttaagcaacttgcccaaagccacacaagtcagtagcagccaaaattcctgactcagaacctattaacactaagagaactggtctaagccatgcagtgataaatttatgtggggtgttatcctagttcattcaaagtctatcgtttttaggctgatattgtatattcaataccccatctgttataatttcctcttctcccatacacttcttagagaccaaggactttaagcccctagaagggactatgtttactgagtgccttcctcgaatcaagcacattttatgtgcagtgtcagttcttaagacagcttaaatataatgtaattgggaggctgagagcaggagaattgcttgaactcaggaggcggaggttgcagtgagctgagatcccgccactgcactccagcctggcgacagagcgagactccgcctcaaaaaaaaaaaaaatgtaatttttgctgattttatagtacagaaagctgagtaccagataatgtaaacatgcccaagatctctcagctagctgactataccctctttccactatatcctgcagcccttccaggagaaaagtcctctgataagttacaaagcatatgaatgtgaatacgtttaatgtcccagcctcccttactctccttaaaactcagaaaacaaactaatgaatatgtaattgagaaacttcaggtggcacactggggttggtactagcttaggtaaacagccgctcagccttttagacctattcccaacaaaagcttttaattttctaaggatttttccagagctctcgccatacgtttcccacaacagccagaccaaagaccaaaactgtctttccctgagaaatatagagcatgtgaatcactttcttctgttcccagttctgtggcaggcaaacactgattgctcactcatcatgtgctacctgggcaaaacaggaatattaagtaggaagaaaggtttatgttaggtaagagcgtgacttagggctctcctacttttttacaaaatggagacctggcatttgtagcctcccacaatgatgtgccctgacattacttggatatagaaaggtcagtcttaggtgcgtcagtgacagcccaccccgctctgatccagaaatttcagatgacttgcatcagaggataagcctctggcatgttaataatgaaaaaatagagacaatcactgccccagctcatctcaaattagcatcagtgcagcgttagtactttggtagggagctttgctgctaaattcattctctgtaaagaggagaggcagagacagggttaaggggaaaactccaagactggaatcgccaatacaataaactgtcgaactgagttttttctcccgcaaccctaagatactagtaagtccttcctcttagccaacccttttcaccagggcaccgcagttttcttagaaggagggtgctgggtttgtctcaggtctttctattctcctgcccgctgccctagtacatctgaaaagggagcagcgactaggaaaagagacacgtgggtattttcccatcctgtctagtcattccctgaatcatcacaagttatcgcacttttccccttagccagcagcgttcgagactttctctcaaataatacggtcttgtacttaaaaggaagagtggtgggagaagagagaggcggagaagacaagcaagaagggcgtggagtgccgttcccgccccggagtcggaggcgccgggaggccggacgccgcgaagctgctagcccaggaatgtgccgtctaactcgcaggccgcgggcggagcgcggcgggcgcgctgtggtctgcggcgggagcggggcagaggacggctggcgcagggcaggctgcagcggcgggccggacgcgacgccgcgcacctgagcgccgggggcggggcgtcagcggccacgacccttcccaccgcgcgccgcgcccctcgcgcgccgcctcggccttttccgctcgtgcttcggcgccgctcggctcccttcccgcccctggctccctccctccctccctccctccttcttctccctccctcctgtcctgggattgcctggagctccgcaccgcgagtttgccgcggcactttccgcgcggcggaagagcgcgcgccagcttcggcacacctgggagccggatcccagccctacgcctcgtcccctacaagctcctccaaggtaaggcgctcgctcacacccggtcctttccacgctcggcgggacagctgggtccccgcctcctctgcgaaccggctaggagctccgcgcctcgccttgggagtggggttgtagctgacggggacctcggaccggcggtggctagagcgcggagcaggcgatacgacgagccgacaggtggcgggtctagccctagtatctcgaccgccgccggcgcggaccttggtggggatggggcgggcgggccgacttgggggtggggtcagtcctctctcctcccttctaggggcggcgatcgtcggggtccgtactgtaggtgcgtgggagaaactttgcagggtggggacccggcggctgctggccggtagtgactggtgggcgcgctcgaggactccaaggggcgcagcccgggggcagacccttgggtcgggcggggatcttacgcttcccttacccgcccccttttgtctttcacctcagccccgccggctgctgtgggagcggcggccgtccctctcctggaggtcgtctcctggcatcctcggggccgcaggaaggaagaggaggcagcggccggagccctggtgggcggcctgaggtgagagcccgaccggcccctttgggaatatggcgaccggtggctaccggaccagcagcggcctcggcggcagcaccacagacttcctggaggagtggaaggcgaaacgcgagaagatgcgcgccaagcagaaccccccgggcccggcccccccgggagggggcagcagcgacgccgctgggaagccccccgcgggggctctgggcaccccggcggccgccgctgccaacgagctcaacaacaacctcccgggcggcgcgccggccgcacctgccgtccccggtcccgggggcgtgaactgcgcggtcggctccgccatgctgacgcgggcggcccccggcccgcggcggtcggaggacgagcccccagccgcctctgcctcggctgcaccgccgccccagcgtgacgaggaggagccggacggcgtcccagagaagggcaagagctcgggccccagtgccaggaaaggcaaggggcagatcgagaagaggaagctgcgggagaagcggcgctccaccggcgtggtcaacatccctgccgcagaggtgagccgggcgggggccgcagccggaccgggccggggcgggcagctgcctcccggtgtcttcctcctgggagctacccggggcgcagagtttacctcccctggctcgtacttgtcccttcaccgagttaggcaggcagggggtgatggagttttactctgaacaaatgcttcctgggaagttccccaaactcagagtaggacacgtgcttttcaggcttcctggccaggtctcagatccaggatccttttttaccgtggtagaaagacaacttatggctccaggacttgcccacctggacttggctgacttggccacctggacttggctgtttatgcttgatcagttagaaaaattgattaatggtgacgacattctctagggtctcacgtgcccatgtgaagttaccagtttatttctcctttcttaccaatgtttaataacatctgtaaagaaaatgttgccttagcaatatccaagacagctttatcttacagtgagctcaagatgagtatatccaaatgaatacgtgcactattttatatataaatcagctgtttataagttgtgctcctaaacacacagtgtttttctgagtgatacttaggacaatagggatgatttagtaacccacaattctgttcgctaagacgatctctttttgagtactgtgtctgaaaaacatgtggtagggtttttgtttgttttgggttgtttgcagtttggagcattttcgaaa

SEQ ID NO: 642 - DNA, 6000 bp, Homo sapiens
aggccaggcacggtggctcacgcctctaatcccagcattttgggaggctgaggcaggtggatcatgaggtcaggagttcaagaccaacctgaccaacatggtgaagccccgtctctactaaaaatacaaaaattaaccaggcgtgtgtgcctgtaatcccagctactcaggaggctgaggcaggagaatcgcttgaacccgaaaggtgaaggttgctgtgagcctagatcaggccactgcactctgacctgggcgacagagcgagactccatgtcaaagaaaaagaaagaggataagaaaatttcctaactggaaggcagatagctgattaaaagggtccactgactgcataacataataatgataaaagaccaaatcagagcatatcttcaagatatttcagaggatctaagtaagaagatccaaaaattttgagacagaaaatacaatgcaatcagaatgccactggtcttctaaacagcaactctggaaactagatgataataaagcaatgccttcaaaattatgaaggaaaatgctttctaacctagagttctatgctccaccaaactattaatcaagtatgaagataaatttaaaacattttccaatatgcaaggtctctaagaatgagttatactatcttcagaatatactgaggatatactctgctaaaatgaaggggagaaacaaaaagagaaaagtatgcaattcaggaaacaagaagtctacagagaaaatgattctcaaggtgttagaggagcataatcccaggatgaccacaagcaacgagccttaaaatcagtccagattaggccaggtgcggtggctcacacctgtaatcccagcactttgggaggccaaagcaggctggttgcctgagctcagaagttcgagaccagtctgggcaacatggtgaaacccccgtctctactaaaatacaaaaaattagctgggcgtggtggcatgtgcctgtattcccagctactctggaggctgatgcaggagaattgcttgaacccaggaggcggaggttgcagtgagccaagactgcgccactgcactacagcctcaccaacagagcgagactccgtctccaaacaaacaaacaaaatcaatccatattaaagcaggggatggagggctccagaacagatgtttccaaaaagagaatagaactgatagcttacccaatgtgattaacgtcattgagaggaggaaaatttgagtatatacttgtgactggtatataaaaaaataagccgatgattaaagaaaaaaaaagaggcaagttttaactgcagaaaaatggtaaagacaaaaggtatagttgtgcaacaaggaaaaacagttgtaaaaaaaaagaaatgcaatcatatacaccacatgactcagctatgaacagtatttgtatagtcataatactacgggcgtgtaggagtatgaaaagtatatgtgtggccgggcatggtggctcatgcctgtaatcccagaactttgggaggccgaggcgggtggatcacgaggtcaggagatcgagatcatcctggctaacacagtgaaaccccgtctctactaaaaatgcaaaaaaaaaaaaaaaaaaaaaaaaaaattagccgggcgtggtggcagccacctgtagtcccagctactcaggaggctgaggcaggagaatggcgtgaacccgggaggcggagcttgcagtgagccgagatcgcgccactgcactccagcctgggagacagagcgagactccatctcaaaaaaaaagaaaaaaaaaagaaaaagaaaagaaaagtatatgtgttattagtgtattagagctaaatcctcttctatatctaaaaatggaaaaatcaagatgtacaatagcagatatgcacataaaaaataaatatgaagatctctattaatggaaacagttaaaaagttcaaagttttgggtagggttttcagaatggataaggtagagaggggattgctgttttttgttataatccttgtagaactaaagtatgtaatttttttatcctatgcacatataatattttgatgttagaggatgaattgcatatgttccagaaatacctgcattgaaggcaaaatggctacttcccaatacactagctatccatacatataataatacacttcctcaaaatcattaagactaacatctaggtttcactctgacatatttaaatgaatctgtttttgtcagcattatcatcatatttcattttattattaagggcaagtgagtcgctaaaaattggttattttaggctaactcagaggtgctcaaccggggaagaattttatcccagggaccatgtggcaatgtcacaatacaggtgggggtttcttattggtatctaataggtagaagccaacgatgctgctaaacaacctacaatgggcaggacagcaaagaattatccagccccaaatgtaacagtgctgaggttgagaaaccaagctccaagtctttgaggattatttcatcagaacgctatacataaagattgatgatatgcaaacatcttgcaatttaggactgactcagctaaatacctcggtgcaatgttggaagcagtctggctgtgaaatatatcttcgggaatattgagaatggtaaagacaaaaggtataataaatgataataataacaaaacacagagctttgtacctcaataatctctttcatccatggttcctagggcactttatagactaataatacctactctggtactcacataccaccttttatctaaggactgcaggcactttcacaacactctcacgatgcaggaagtattattatccccattttatatgtaagtaaacagaggcacaaaagttaagcaacttgcccaaagccacacaagtcagtagcagccaaaattcctgactcagaacctattaacactaagagaactggtctaagccatgcagtgataaatttatgtggggtgttatcctagttcattcaaagtctatcgtttttaggctgatattgtatattcaataccccatctgttataatttcctcttctcccatacacttcttagagaccaaggactttaagcccctagaagggactatgtttactgagtgccttcctcgaatcaagcacattttatgtgcagtgtcagttcttaagacagcttaaatataatgtaattgggaggctgagagcaggagaattgcttgaactcaggaggcggaggttgcagtgagctgagatcccgccactgcactccagcctggcgacagagcgagactccgcctcaaaaaaaaaaaaaatgtaatttttgctgattttatagtacagaaagctgagtaccagataatgtaaacatgcccaagatctctcagctagctgactataccctctttccactatatcctgcagcccttccaggagaaaagtcctctgataagttacaaagcatatgaatgtgaatacgtttaatgtcccagcctcccttactctccttaaaactcagaaaacaaactaatgaatatgtaattgagaaacttcaggtggcacactggggttggtactagcttaggtaaacagccgctcagccttttagacctattcccaacaaaagcttttaattttctaaggatttttccagagctctcgccatacgtttcccacaacagccagaccaaagaccaaaactgtctttccctgagaaatatagagcatgtgaatcactttcttctgttcccagttctgtggcaggcaaacactgattgctcactcatcatgtgctacctgggcaaaacaggaatattaagtaggaagaaaggtttatgttaggtaagagcgtgacttagggctctcctacttttttacaaaatggagacctggcatttgtagcctcccacaatgatgtgccctgacattacttggatatagaaaggtcagtcttaggtgcgtcagtgacagcccaccccgctctgatccagaaatttcagatgacttgcatcagaggataagcctctggcatgttaataatgaaaaaatagagacaatcactgccccagctcatctcaaattagcatcagtgcagcgttagtactttggtagggagctttgctgctaaattcattctctgtaaagaggagaggcagagacagggttaaggggaaaactccaagactggaatcgccaatacaataaactgtcgaactgagttttttctcccgcaaccctaagatactagtaagtccttcctcttagccaacccttttcaccagggcaccgcagttttcttagaaggagggtgctgggtttgtctcaggtctttctattctcctgcccgctgccctagtacatctgaaaagggagcagcgactaggaaaagagacacgtgggtattttcccatcctgtctagtcattccctgaatcatcacaagttatcgcacttttccccttagccagcagcgttcgagactttctctcaaataatacggtcttgtacttaaaaggaagagtggtgggagaagagagaggcggagaagacaagcaagaagggcgtggagtgccgttcccgccccggagtcggaggcgccgggaggccggacgccgcgaagctgctagcccaggaatgtgccgtctaactcgcaggccgcgggcggagcgcggcgggcgcgctgtggtctgcggcgggagcggggcagaggacggctggcgcagggcaggctgcagcggcgggccggacgcgacgccgcgcacctgagcgccgggggcggggcgtcagcggccacgacccttcccaccgcgcgccgcgcccctcgcgcgccgcctcggccttttccgctcgtgcttcggcgccgctcggctcccttcccgcccctggctccctccctccctccctccctccttcttctccctccctcctgtcctgggattgcctggagctccgcaccgcgagtttgccgcggcactttccgcgcggcggaagagcgcgcgccagcttcggcacacctgggagccggatcccagccctacgcctcgtcccctacaagctcctccaaggtaaggcgctcgctcacacccggtcctttccacgctcggcgggacagctgggtccccgcctcctctgcgaaccggctaggagctccgcgcctcgccttgggagtggggttgtagctgacggggacctcggaccggcggtggctagagcgcggagcaggcgatacgacgagccgacaggtggcgggtctagccctagtatctcgaccgccgccggcgcggaccttggtggggatggggcgggcgggccgacttgggggtggggtcagtcctctctcctcccttctaggggcggcgatcgtcggggtccgtactgtaggtgcgtgggagaaactttgcagggtggggacccggcggctgctggccggtagtgactggtgggcgcgctcgaggactccaaggggcgcagcccgggggcagacccttgggtcgggcggggatcttacgcttcccttacccgcccccttttgtctttcacctcagccccgccggctgctgtgggagcggcggccgtccctctcctggaggtcgtctcctggcatcctcggggccgcaggaaggaagaggaggcagcggccggagccctggtgggcggcctgaggtgagagcccgaccggcccctttgggaatatggcgaccggtggctaccggaccagcagcggcctcggcggcagcaccacagacttcctggaggagtggaaggcgaaacgcgagaagatgcgcgccaagcagaaccccccgggcccggcccccccgggagggggcagcagcgacgccgctgggaagccccccgcgggggctctgggcaccccggcggccgccgctgccaacgagctcaacaacaacctcccgggcggcgcgccggccgcacctgccgtccccggtcccgggggcgtgaactgcgcggtcggctccgccatgctgacgcgggcggcccccggcccg

SEQ ID NO: 643 - DNA, 6000 bp, Homo sapiens
tgtccgcatccagtaaggtttccactcttctctccgttgactgctgaagttactgaaacagcaaccacaaatggccttactaacctacttattttgcaattaaacttttaaaagatatccccctactcctcccctagggtggaacagaaatggctccgcggcgttggcagctcgtctgcgaggggaccctggctccccgaggctgcagtcctttttcttggacagaacgccccgcaggaccgttccctccactttcccccgcactaaggcagcgcaccgccagcacacacagcgctggcgcccgcatcgcgccgcaccacacgcgtctccggcttgaggagccagtcaccgagacccggagcgggaacgagatgtaaacacggagtggggacatgcagcccgatctgagaaggcggcgtgaagagtagacacagcctgcgccaggcggttcttatttacccagcacttacactccagggcaagcgggcccaggcagcgcactcttggagaaggatgcactggcgcagagcctggacctgctgaagcgggaaggaggagctagggctgggggcggagctttcacacgcgcaccctctgttccctccctccctccctcgacacaagcaactgggtctccagccgccactccgggtttatttgtttacaagcggattacgtcagctcctccctctcttccctatctctggacccgcctcctgaactcttttcccgcccctttcggctccgaaccggcttgcgtcacaatggtgcgatattcggattggctggagtcggccatcacgctccagctacgccacttccttttcgtggcactataaagggtgctgcacggcgcttgcatctcttcgcctctcggagctggaaatgcagctattgagatcttcgaatgctgcggagctggaggcggaggcagctggggaggtccgagcgatgtgaccaggccgccatcgctcgtctcttcctctctcctgccgcctcctgtctcgaaaataacttttttagtctaaagaaagaaagacaaaagtagtcgtccgcccctcacgccctctcttcctctcagccttccgcccggtgaggaagcccggggtggctgctccgccgtcggggccgcgccgccgagccccagccgccccgggccgcccccgcacgccgcccccatgcatcccttctacacccgggccgccaccatgataggcgagatcgccgccgccgtgtccttcatctccaagtttctccgcaccaaggggctcacgagcgagcgacagctgcagaccttcagccagagcctgcaggagctgctggcaggtgagcagggcgagggcgtcggagggacgcgggccccacatccctgggtcagagtccggccgtcggggctgcgggaacctcggcagcgccccggggccggtcgcgcttgggccccgccgcgggaccggtgtggttgcgctgggtggccgctaacagcggttccccgcgaggctttaggggctggacggagggcgcccccttccccccagctggcaaaacggagaggagaagacaacacgcacaacaaagaaacttaagcccaccgaggcgggagctgcggtccgaggaccgtcggcggatttggggacaaaggagccgtggggctggggtgggttcgacgtcccctttcctcagccccctccaaccgttgcgtggtcggcggcccagccccggggtgggaagctgcgccgctgccccggagccagctcagaacggacgtgccgtctccccgcgcctcctgcccctgcccattaatcatcggatttgtcaccggcacaattaacagccctgcccagagcgtggtttagggttgcttgtttttcttcccttcggggttaacagtccggtggcgcttctcatctccaaagccatcaactccattgtgtgcatctggggtggggtggagaaagtaaacagtttctcgcctggccataggtgccagtggcttcccgactggccgaggctgcgcgcctgattcctgttttggcggctcaaccggttggttcctggagattgttttgtccggtactactgtgttatttctaaaaccctgcccgctttttccatccccgcacatgcacaacaacggatgcaatcctggacattttaaaaagttgatagttttcattttcgctcctcaaaggagcctggggtaggaggaatccgcagtgggagctaacgatcctaagcgttgtttctctgttcttcttttcttctatagaacattataaacatcactggttcccagaaaagccatgcaagggatcgggttaccgttgtattcgcatcaaccataaaatggatcctctgattggacaggcagcacagcggattggactgagcagtcaggagctgttcaggcttctcccaagtgaactcacactctgggttgacccctatgaagtgtcctacagaattggagaggatggctccatctgtgtgctgtatgaagcctcaccagcaggaggtagcactcaaaacagcaccaacgtgcaaatggtagacagccgaatcagctgtaaggaggaacttctcttgggcagaacgagcccttccaaaaactacaatatgatgactgtatcaggttaagatatagtctgtggatggatcatctgatgatgatggataaatttgatttttgctttgggtgggctcctcttggggatggattatggaatttaaaccatgtcacagctgtgaagatctggcacaagatagaatggtaaaaaaaaaaaaaattttaagtgacagtgccatagtttggacagtacctttcaatgattaattttaatagcctgtgagtccaagtaaatgatcactttatttgctagggagggaagtcctagggtggtttcagtttctcccagacatacctaaatttttacatcaatccttttaaagaaaatctgtatttcaaagaatctttctctgcagtaaatctcgcaggggaatttgcactattacacttgaaagttgttattgttaaccttttcggcagcttttaataggaaagttaaacgttttaaacatggtagtactggaaattttacaagacttttacctagcacttaaatatgtataaatgtacataaagacaaactagtaagcatgacctggggaaatggtcagaccttgtattgtgtttttggccttgaaagtagcaagtgaccagaatctgccatggcaacaggctttaaaaaagacccttaaaaagacactgtctcaactgtggtgttagcaccagccagctctctgtacatttgctagcttgtagttttctaagactgagtaaacttcttatttttagaaagtggaggtctggtttgtaactttccttgtacttaattgggtaaaagtcttttccacaaaccaccatctattttgtgaactttgttagtcatcttttatttggtaaattatgaactggtgtaaatttgtacagttcatgtatattgattgtggcaaagttgtacagatttctatattttggatgagaaatttttcttctctctataataaatcgtttcttatcttggcattttaatcaatctcttgtcatgattatagaggtttagctaaaagtattttttcttagaagacaggttctataaactgaatctctgttgcacactggtcatgctggaaaaacatttgatgaggaatgaagatgctctgtatatacatgtttaggttttacaggaaacacaggagtagcatgttttaaaaatttctaaagtcaaaacatggacacattcacaggctaatgatctcatgaaataaggataagagaccacggtagcatctaccaaaaatgtgatactcaaaggattacatttcattgcttccctgttgaagtgaagatataaatgttccattctgacccacctttgaaaaacaattactttgccccatggattctttgttcaattagaaatttccccggggcaggtgacccatagtcttaaagaacaggctaaacaccacagagagattggttgctttttgcttttcatcacctgcaagatgtacataaaaatcacataagctggaattcaacaaaaggtatgtttatgaacttttattctcaaaagttgaaatgctgactttctcgattcctcattttcagacttttatttcagataaatactaaaaacctaagtgaaccttgataatgctgtagtgtagattacttcactaccccatataatagaaggacttgctgtttagttgtagaggataacagcgtttttcagtggaaattgaaagtggaaaaattgaattttgctctacacagttaacatatagtggcctttttttggtatatatgtaaacatgttgacactggaaatacgcagtctgaaataaaattagtaattacttgaaattagtaatctcaaataacttttaagaagttatttctacacccaggaataaattattctgattttgtagacaacacaggaataggccactgaatatgcaggtatttagagtacaaatgtctgtggatattattggcacaccattctcgagagttagaattcgtagacccgcaacacatggactacccttgccaattgttatggttttatttttaaacctattctgtgaaaaagctcctcggtatttcaaacttgaattacaataaaaacaccaggtagggttgtttttaaatgggtctcaccccagtgctgactactgttgtttaccaactacatttcatctggtaactccattgaaactaagtacctcaaccattttttttttttatcataaagccttttttcaaatggaaagttgtttttgaagatcttgacatcagactttttcaatctttgaaaatgatggaaacagttaataaaaatgtttattttagaattcaggtgatgtctggcttgtgaggagctgtttataagtttgtctttgaaaaaggcttgcacacatcactctgagaccagctgtttcctgtgactttaaccttaccttccccagacaattgagctgaacctgtatctgcggtacagtagctgtttgtgatgtatttcttgttcactgtttctggggaatgttttgaaatattttattataaatccttttaagataggatgactactttcaaaattattgttgcctttggcaccaggaattcatagttgtgattggcagtaagtttgaggagtgttactttctaagttttaacaggtagttttgaaattatttccttttttccaaatttaagtagtgcctccctctgtaatgttgaaacaaggcttcaagtggattgtatagcaagagttaccctggttcatgcaggataatgcggctgttatctttgtcatctggaatgggaatctcatgtctttatccttatgtgcaatatttctataataatagactggaaaggccaccagaaagtggctttcaggtacattgcacaaatagtttccttaagtcattataactcacacattgcaagtaattaattttgttttgtataggtgttgcagtttatgaaattggccttcaagttaaaaggaaggaagccgtattcccgatggctagtgtttaatgactacaggtttccaggctccctttaatcttgggagcaaataaatctactattggacttctccctgcgtgacttttaacatttctgatactctctcttcttcctctttacagaagagaggtatgataactgaagttgtactttgcatattgaagtttaaagatacttcctctccccttttcacccctatttcaaatgatgtgataaaatcctcttgataggctatatggagaacatttgtcaatagttttatctatgcatggaagtcttcaaaaagtatatcttggattgtctaaaactgaatagatttcttatttatctgaaggtatacagactgccaacattttagacttatctctcagtctctgccactgaacttttatata

SEQ ID NO: 644 - DNA, 6000 bp, Homo sapiens
gttggagaccaggtttagaagagaaaaactttcacttgactcctaatttgtactcagtgacacattaacgacaatgtaagtgaaagcagggaactaagggtgggtcaggttaggtgggagaccaggagttgttattctagtgttatggtaatttcatgaatttacttttgcttctcgatcttctttttgagtagtaaaagaggtttcatgcctccagtgaaattactatttttaagcagagttctatctgaaaagttctataagaaaaaaaaaaaccactctttaattttttcacatgtaactacttagttatgtgtactaatgaaaaaataatctagaagttattttttcaaatcgagttttacatattttttaaacaataaaacgttttctcctgttttataatgtcattatttttgcttcatttctatatcctttagctcagtattaaaaagaaaaaaaaaacactcaaagtggtgtgttttgcaatattgatgatcaactaaggtcgggatatttatttccatctggtagagttcaacttctgcctcctgtttgctttctccatctgcctgcctcccttcatctttctttttttcttttcccccttctccttaatggagttggggttaaccctgtcttaggcctaatcgttttagcaggctcccgccttcctgttacactggtttttaaggttgtttttttttttttttggtagggtttcaaataaacttgaatgtctacacttaatactttcacaagcttcaaattctttttattttatttttataaagagcaggactcaggctaggacggcatttggactaggtaaaaaagaaaatcttcagttttgtgcacacaagttttaaaatacattgtacagattttttttttttggatacacaccactctttacaggatccgcgttatatctgctttcagtaactggctctcctgtccgcatccagtaaggtttccactcttctctccgttgactgctgaagttactgaaacagcaaccacaaatggccttactaacctacttattttgcaattaaacttttaaaagatatccccctactcctcccctagggtggaacagaaatggctccgcggcgttggcagctcgtctgcgaggggaccctggctccccgaggctgcagtcctttttcttggacagaacgccccgcaggaccgttccctccactttcccccgcactaaggcagcgcaccgccagcacacacagcgctggcgcccgcatcgcgccgcaccacacgcgtctccggcttgaggagccagtcaccgagacccggagcgggaacgagatgtaaacacggagtggggacatgcagcccgatctgagaaggcggcgtgaagagtagacacagcctgcgccaggcggttcttatttacccagcacttacactccagggcaagcgggcccaggcagcgcactcttggagaaggatgcactggcgcagagcctggacctgctgaagcgggaaggaggagctagggctgggggcggagctttcacacgcgcaccctctgttccctccctccctccctcgacacaagcaactgggtctccagccgccactccgggtttatttgtttacaagcggattacgtcagctcctccctctcttccctatctctggacccgcctcctgaactcttttcccgcccctttcggctccgaaccggcttgcgtcacaatggtgcgatattcggattggctggagtcggccatcacgctccagctacgccacttccttttcgtggcactataaagggtgctgcacggcgcttgcatctcttcgcctctcggagctggaaatgcagctattgagatcttcgaatgctgcggagctggaggcggaggcagctggggaggtccgagcgatgtgaccaggccgccatcgctcgtctcttcctctctcctgccgcctcctgtctcgaaaataacttttttagtctaaagaaagaaagacaaaagtagtcgtccgcccctcacgccctctcttcctctcagccttccgcccggtgaggaagcccggggtggctgctccgccgtcggggccgcgccgccgagccccagccgccccgggccgcccccgcacgccgcccccatgcatcccttctacacccgggccgccaccatgataggcgagatcgccgccgccgtgtccttcatctccaagtttctccgcaccaaggggctcacgagcgagcgacagctgcagaccttcagccagagcctgcaggagctgctggcaggtgagcagggcgagggcgtcggagggacgcgggccccacatccctgggtcagagtccggccgtcggggctgcgggaacctcggcagcgccccggggccggtcgcgcttgggccccgccgcgggaccggtgtggttgcgctgggtggccgctaacagcggttccccgcgaggctttaggggctggacggagggcgcccccttccccccagctggcaaaacggagaggagaagacaacacgcacaacaaagaaacttaagcccaccgaggcgggagctgcggtccgaggaccgtcggcggatttggggacaaaggagccgtggggctggggtgggttcgacgtcccctttcctcagccccctccaaccgttgcgtggtcggcggcccagccccggggtgggaagctgcgccgctgccccggagccagctcagaacggacgtgccgtctccccgcgcctcctgcccctgcccattaatcatcggatttgtcaccggcacaattaacagccctgcccagagcgtggtttagggttgcttgtttttcttcccttcggggttaacagtccggtggcgcttctcatctccaaagccatcaactccattgtgtgcatctggggtggggtggagaaagtaaacagtttctcgcctggccataggtgccagtggcttcccgactggccgaggctgcgcgcctgattcctgttttggcggctcaaccggttggttcctggagattgttttgtccggtactactgtgttatttctaaaaccctgcccgctttttccatccccgcacatgcacaacaacggatgcaatcctggacattttaaaaagttgatagttttcattttcgctcctcaaaggagcctggggtaggaggaatccgcagtgggagctaacgatcctaagcgttgtttctctgttcttcttttcttctatagaacattataaacatcactggttcccagaaaagccatgcaagggatcgggttaccgttgtattcgcatcaaccataaaatggatcctctgattggacaggcagcacagcggattggactgagcagtcaggagctgttcaggcttctcccaagtgaactcacactctgggttgacccctatgaagtgtcctacagaattggagaggatggctccatctgtgtgctgtatgaagcctcaccagcaggaggtagcactcaaaacagcaccaacgtgcaaatggtagacagccgaatcagctgtaaggaggaacttctcttgggcagaacgagcccttccaaaaactacaatatgatgactgtatcaggttaagatatagtctgtggatggatcatctgatgatgatggataaatttgatttttgctttgggtgggctcctcttggggatggattatggaatttaaaccatgtcacagctgtgaagatctggcacaagatagaatggtaaaaaaaaaaaaaattttaagtgacagtgccatagtttggacagtacctttcaatgattaattttaatagcctgtgagtccaagtaaatgatcactttatttgctagggagggaagtcctagggtggtttcagtttctcccagacatacctaaatttttacatcaatccttttaaagaaaatctgtatttcaaagaatctttctctgcagtaaatctcgcaggggaatttgcactattacacttgaaagttgttattgttaaccttttcggcagcttttaataggaaagttaaacgttttaaacatggtagtactggaaattttacaagacttttacctagcacttaaatatgtataaatgtacataaagacaaactagtaagcatgacctggggaaatggtcagaccttgtattgtgtttttggccttgaaagtagcaagtgaccagaatctgccatggcaacaggctttaaaaaagacccttaaaaagacactgtctcaactgtggtgttagcaccagccagctctctgtacatttgctagcttgtagttttctaagactgagtaaacttcttatttttagaaagtggaggtctggtttgtaactttccttgtacttaattgggtaaaagtcttttccacaaaccaccatctattttgtgaactttgttagtcatcttttatttggtaaattatgaactggtgtaaatttgtacagttcatgtatattgattgtggcaaagttgtacagatttctatattttggatgagaaatttttcttctctctataataaatcgtttcttatcttggcattttaatcaatctcttgtcatgattatagaggtttagctaaaagtattttttcttagaagacaggttctataaactgaatctctgttgcacactggtcatgctggaaaaacatttgatgaggaatgaagatgctctgtatatacatgtttaggttttacaggaaacacaggagtagcatgttttaaaaatttctaaagtcaaaacatggacacattcacaggctaatgatctcatgaaataaggataagagaccacggtagcatctaccaaaaatgtgatactcaaaggattacatttcattgcttccctgttgaagtgaagatataaatgttccattctgacccacctttgaaaaacaattactttgccccatggattctttgttcaattagaaatttccccggggcaggtgacccatagtcttaaagaacaggctaaacaccacagagagattggttgctttttgcttttcatcacctgcaagatgtacataaaaatcacataagctggaattcaacaaaaggtatgtttatgaacttttattctcaaaagttgaaatgctgactttctcgattcctcattttcagacttttatttcagataaatactaaaaacctaagtgaaccttgataatgctgtagtgtagattacttcactaccccatataatagaaggacttgctgtttagttgtagaggataacagcgtttttcagtggaaattgaaagtggaaaaattgaattttgctctacacagttaacatatagtggcctttttttggtatatatgtaaacatgttgacactggaaatacgcagtctgaaataaaattagtaattacttgaaattagtaatctcaaataacttttaagaagttatttctacacccaggaataaattattctgattttgtagacaacacaggaataggccactgaatatgcaggtatttagagtacaaatgtctgtggatattattggcacaccattctcgagagttagaattcgtagacccgcaacacatggactacccttgccaattgttatggttttatttttaaacctattctgtgaaaaagctcctcggtatttcaaacttgaattacaataaaaacaccaggtagggttgtttttaaatgggtctcaccccagtgctgactactgttgtttaccaactacatttcatctggtaactccattgaaactaagtacctcaaccattttttttttttatcataaagccttttttcaaatggaaagttgtttttgaagatcttgacatcagactttttcaatctttgaaaatgatggaaacagttaataaaaatgtttattttagaattcaggtgatgtctggcttgtgaggagctgtttataagtttgtctttgaaaaaggcttgcacacatcactctgagaccagctgtttcctgtgactttaaccttaccttccccagacaattga

SEQ ID NO: 645 - DNA, 6000 bp, Homo sapiens
atatagacggtgagagctttaaaaagagataggccaggaggttctggcaccaggaaggagaaggtttggggaggagcccagctttgagaaatggccctgcagctatgcagtagaaagttgagtgagaattcccggaggccactgatcagattcaacagtgacctggacacaaaaccatccctccttgctgccctcccacctcccccaccgaaccctccagggcccgcctcagttgctgggcaagagagattgtggaactgaccaggcccctggttccttttgtcaatttaggccaaaggggaaatgaaaagtttaaatggtcttaaatagaaagcacttttgctactttctcttatctgtacctagggataattttcattccagttaaattatttggcagattaacattttaatatgttccttgtttcattttccagtgggccttttaataaatgtagctgtatcttacagattatgtcagctatgagatgtcccctcagctgccttgagttttgattttttttttcctactactatctctactcatctccagatggtcttctaactttatcaggttttatttctcaaggtcctttttaggaaaggtaatatcaggagctcccttgaaaaccctaccaggtatttagagctcaaattttgtagtccatgacttgagagttcaaatctggctgtaaaaccttgggtaaattacttattttctttaagactgtattcttatatgttaaatgctgtcaactatactcactcgattgggtttcttagagaattaaatgggaaagcatggctgggtgcggtggctcatgcctgcaattccagcactttgggaggctgaggtgagtgaatcgcttgagcccaggagttcaaaaccagcctgggcaacatggtgaaaccccgtctctaccaaaaaattcaaaaattagccaggcgtggtggaacgtgcctgaagtcccagctattcaggaagctgagtggaaagataagcttgagcccaggaggcggaggttgcagtgagctgtgatcgcaccgccacactccagcctgggcaacagagtgagtctcaaaaaaaaaaataaataaataaataaataaaaagagagagatagaaagcatgtaaaacacttagcactgatgcattgttaatgataaaatgataataacctgcattattacttttgttgttaagcgatgcttcactcctttttcctcccactctccaaacaatctgaatagcttccaccagaagaaactgagttttgtctaaaatcattatgtgtcaccctctgactgaaagttcttttgtgttttgtgaatcgcagtagatctaaacccagtgcaaatgtcttagcttgtgtccttggattcttattcaagcagagcaagtcagggtgctagcagggaggcaactaaaagtggtcttctcctttctgcgggtaacaaaaaaatagataaataagaggcataggtatctagttgaagacataagcccacaagaaaagctaacttatttaaagataaatctgatcatataatctgtctgctaaaaacactctcaagagtactctcaagtaccctatgcctgcctccatctaccagttttttcaacaatacttatcctccttggtttatgcctttgagatactccaagatcaagcccgttcctttcctccaaggagaactaatcttgggtcactttcattggcttagctgagatcattcacttttggggttttcttattttccctctgccccgcaacacacaaataaataagtgccctgtctctatttgccattaacactctctcaagaactctcacttgactctgtacttattggttaagttgtgagttttctagacacctagcactctatctggaagtaggtgcgtaataagcacaactttagtgactgcagctagctgactagcaacaggcaggttgcctctggctcagtctggaaggccctggccctaatgtgccttcagggaaagggcgggtccaactggggaaacaatatctaatatttgtgcttttatttgtcaacttattttaaaacccaggttcattttttgaatttgttttgacagcattcctaagatttttaatactttgattagaaatgttctaagttttagaaattaattagacaggccaggcgtggtggcccacgcctgtaatccctaaactttgagaggccgaggcgggtggatcacctgagatcaggagtttgagaccagcctggccaacatggtgaaaccccatctctactaaaaatacaaaatttagccaggcgtggtggtgcatgcctgtaatcccagctactcgggaggctgaggcaggagaatcacttaaacctgggagtcggtggctgcagtgagccaagatcgcgccactgcactccagcctgggtgactgagcgagactctatctcaaaaaaaaaaaaaaaaaatttcataaattactatcaaattgcatgataataataaagtacttgggagagccttggtaaacttagcacaacaacacagaaagcacctttgtaattcaaaagctgtccagaaatacctgcttgtttcccagatgggaagggcctgactaaacttccagaaaatgtgactaaacatatatatgtcaggaattgaaaactattagcaatgaacattatgtaccatctaaggcttacgtttaagactaatgtttatttccagtttttttctgagtactctgtagattcccaagttaaaaattactgtagtttctcaaatcagtttgtctcctaatgggatgatttaaggtgggaaacacacatatataatttgaaaaactcagtgcgggaagtaactctccctgagtctatgggttaaactttctgttaaccctgttcaactggttttataaggctttcagaaggggtcctgctgctgctagtgcaggcagttaaaaatagtatggagaacaagggcttgggggaagtctgagtccaatcctagcattttgttgatttaatatttctgttttttagatgagacaatttaagcacatgaccgagaggccaagttggagaccaggtttagaagagaaaaactttcacttgactcctaatttgtactcagtgacacattaacgacaatgtaagtgaaagcagggaactaagggtgggtcaggttaggtgggagaccaggagttgttattctagtgttatggtaatttcatgaatttacttttgcttctcgatcttctttttgagtagtaaaagaggtttcatgcctccagtgaaattactatttttaagcagagttctatctgaaaagttctataagaaaaaaaaaaaccactctttaattttttcacatgtaactacttagttatgtgtactaatgaaaaaataatctagaagttattttttcaaatcgagttttacatattttttaaacaataaaacgttttctcctgttttataatgtcattatttttgcttcatttctatatcctttagctcagtattaaaaagaaaaaaaaaacactcaaagtggtgtgttttgcaatattgatgatcaactaaggtcgggatatttatttccatctggtagagttcaacttctgcctcctgtttgctttctccatctgcctgcctcccttcatctttctttttttcttttcccccttctccttaatggagttggggttaaccctgtcttaggcctaatcgttttagcaggctcccgccttcctgttacactggtttttaaggttgtttttttttttttttggtagggtttcaaataaacttgaatgtctacacttaatactttcacaagcttcaaattctttttattttatttttataaagagcaggactcaggctaggacggcatttggactaggtaaaaaagaaaatcttcagttttgtgcacacaagttttaaaatacattgtacagattttttttttttggatacacaccactctttacaggatccgcgttatatctgctttcagtaactggctctcctgtccgcatccagtaaggtttccactcttctctccgttgactgctgaagttactgaaacagcaaccacaaatggccttactaacctacttattttgcaattaaacttttaaaagatatccccctactcctcccctagggtggaacagaaatggctccgcggcgttggcagctcgtctgcgaggggaccctggctccccgaggctgcagtcctttttcttggacagaacgccccgcaggaccgttccctccactttcccccgcactaaggcagcgcaccgccagcacacacagcgctggcgcccgcatcgcgccgcaccacacgcgtctccggcttgaggagccagtcaccgagacccggagcgggaacgagatgtaaacacggagtggggacatgcagcccgatctgagaaggcggcgtgaagagtagacacagcctgcgccaggcggttcttatttacccagcacttacactccagggcaagcgggcccaggcagcgcactcttggagaaggatgcactggcgcagagcctggacctgctgaagcgggaaggaggagctagggctgggggcggagctttcacacgcgcaccctctgttccctccctccctccctcgacacaagcaactgggtctccagccgccactccgggtttatttgtttacaagcggattacgtcagctcctccctctcttccctatctctggacccgcctcctgaactcttttcccgcccctttcggctccgaaccggcttgcgtcacaatggtgcgatattcggattggctggagtcggccatcacgctccagctacgccacttccttttcgtggcactataaagggtgctgcacggcgcttgcatctcttcgcctctcggagctggaaatgcagctattgagatcttcgaatgctgcggagctggaggcggaggcagctggggaggtccgagcgatgtgaccaggccgccatcgctcgtctcttcctctctcctgccgcctcctgtctcgaaaataacttttttagtctaaagaaagaaagacaaaagtagtcgtccgcccctcacgccctctcttcctctcagccttccgcccggtgaggaagcccggggtggctgctccgccgtcggggccgcgccgccgagccccagccgccccgggccgcccccgcacgccgcccccatgcatcccttctacacccgggccgccaccatgataggcgagatcgccgccgccgtgtccttcatctccaagtttctccgcaccaaggggctcacgagcgagcgacagctgcagaccttcagccagagcctgcaggagctgctggcaggtgagcagggcgagggcgtcggagggacgcgggccccacatccctgggtcagagtccggccgtcggggctgcgggaacctcggcagcgccccggggccggtcgcgcttgggccccgccgcgggaccggtgtggttgcgctgggtggccgctaacagcggttccccgcgaggctttaggggctggacggagggcgcccccttccccccagctggcaaaacggagaggagaagacaacacgcacaacaaagaaacttaagcccaccgaggcgggagctgcggtccgaggaccgtcggcggatttggggacaaaggagccgtggggctggggtgggttcgacgtcccctttcctcagccccctccaaccgttgcgtggtcggcggcccagccccggggtgggaagctgcgccgctgccccggagccagctcagaacggacgtgccgtctccccgcgcctcctgcccctgcccattaatcatcggatttgtcaccggcacaattaacagccctgcccagagcgtggtttagggttgcttgtttttcttcccttcggggttaacagtccggtggcgcttctcatctccaaagccatcaactccattgtgtgcatctggggtggggtggagaaagtaaacagtttctcgcct

SEQ ID NO: 646 - DNA, 6000 bp, Homo sapiens
taaactgcaacacctatacaaaacaaaattaattacttgcaatgtgtgagttataatgacttaaggaaactatttgtgcaatgtacctgaaagccactttctggtggcctttccagtctattattatagaaatattgcacataaggataaagacatgagattcccattccagatgacaaagataacagccgcattatcctgcatgaaccagggtaactcttgctatacaatccacttgaagccttgtttcaacattacagagggaggcactacttaaatttggaaaaaaggaaataatttcaaaactacctgttaaaacttagaaagtaacactcctcaaacttactgccaatcacaactatgaattcctggtgccaaaggcaacaataattttgaaagtagtcatcctatcttaaaaggatttataataaaatatttcaaaacattccccagaaacagtgaacaagaaatacatcacaaacagctactgtaccgcagatacaggttcagctcaattgtctggggaaggtaaggttaaagtcacaggaaacagctggtctcagagtgatgtgtgcaagcctttttcaaagacaaacttataaacagctcctcacaagccagacatcacctgaattctaaaataaacatttttattaactgtttccatcattttcaaagattgaaaaagtctgatgtcaagatcttcaaaaacaactttccatttgaaaaaaggctttatgataaaaaaaaaaaatggttgaggtacttagtttcaatggagttaccagatgaaatgtagttggtaaacaacagtagtcagcactggggtgagacccatttaaaaacaaccctacctggtgtttttattgtaattcaagtttgaaataccgaggagctttttcacagaataggtttaaaaataaaaccataacaattggcaagggtagtccatgtgttgcgggtctacgaattctaactctcgagaatggtgtgccaataatatccacagacatttgtactctaaatacctgcatattcagtggcctattcctgtgttgtctacaaaatcagaataatttattcctgggtgtagaaataacttcttaaaagttatttgagattactaatttcaagtaattactaattttatttcagactgcgtatttccagtgtcaacatgtttacatatataccaaaaaaaggccactatatgttaactgtgtagagcaaaattcaatttttccactttcaatttccactgaaaaacgctgttatcctctacaactaaacagcaagtccttctattatatggggtagtgaagtaatctacactacagcattatcaaggttcacttaggtttttagtatttatctgaaataaaagtctgaaaatgaggaatcgagaaagtcagcatttcaacttttgagaataaaagttcataaacataccttttgttgaattccagcttatgtgatttttatgtacatcttgcaggtgatgaaaagcaaaaagcaaccaatctctctgtggtgtttagcctgttctttaagactatgggtcacctgccccggggaaatttctaattgaacaaagaatccatggggcaaagtaattgtttttcaaaggtgggtcagaatggaacatttatatcttcacttcaacagggaagcaatgaaatgtaatcctttgagtatcacatttttggtagatgctaccgtggtctcttatccttatttcatgagatcattagcctgtgaatgtgtccatgttttgactttagaaatttttaaaacatgctactcctgtgtttcctgtaaaacctaaacatgtatatacagagcatcttcattcctcatcaaatgtttttccagcatgaccagtgtgcaacagagattcagtttatagaacctgtcttctaagaaaaaatacttttagctaaacctctataatcatgacaagagattgattaaaatgccaagataagaaacgatttattatagagagaagaaaaatttctcatccaaaatatagaaatctgtacaactttgccacaatcaatatacatgaactgtacaaatttacaccagttcataatttaccaaataaaagatgactaacaaagttcacaaaatagatggtggtttgtggaaaagacttttacccaattaagtacaaggaaagttacaaaccagacctccactttctaaaaataagaagtttactcagtcttagaaaactacaagctagcaaatgtacagagagctggctggtgctaacaccacagttgagacagtgtctttttaagggtcttttttaaagcctgttgccatggcagattctggtcacttgctactttcaaggccaaaaacacaatacaaggtctgaccatttccccaggtcatgcttactagtttgtctttatgtacatttatacatatttaagtgctaggtaaaagtcttgtaaaatttccagtactaccatgtttaaaacgtttaactttcctattaaaagctgccgaaaaggttaacaataacaactttcaagtgtaatagtgcaaattcccctgcgagatttactgcagagaaagattctttgaaatacagattttctttaaaaggattgatgtaaaaatttaggtatgtctgggagaaactgaaaccaccctaggacttccctccctagcaaataaagtgatcatttacttggactcacaggctattaaaattaatcattgaaaggtactgtccaaactatggcactgtcacttaaaattttttttttttttaccattctatcttgtgccagatcttcacagctgtgacatggtttaaattccataatccatccccaagaggagcccacccaaagcaaaaatcaaatttatccatcatcatcagatgatccatccacagactatatcttaacctgatacagtcatcatattgtagtttttggaagggctcgttctgcccaagagaagttcctccttacagctgattcggctgtctaccatttgcacgttggtgctgttttgagtgctacctcctgctggtgaggcttcatacagcacacagatggagccatcctctccaattctgtaggacacttcataggggtcaacccagagtgtgagttcacttgggagaagcctgaacagctcctgactgctcagtccaatccgctgtgctgcctgtccaatcagaggatccattttatggttgatgcgaatacaacggtaacccgatcccttgcatggcttttctgggaaccagtgatgtttataatgttctatagaagaaaagaagaacagagaaacaacgcttaggatcgttagctcccactgcggattcctcctaccccaggctcctttgaggagcgaaaatgaaaactatcaactttttaaaatgtccaggattgcatccgttgttgtgcatgtgcggggatggaaaaagcgggcagggttttagaaataacacagtagtaccggacaaaacaatctccaggaaccaaccggttgagccgccaaaacaggaatcaggcgcgcagcctcggccagtcgggaagccactggcacctatggccaggcgagaaactgtttactttctccaccccaccccagatgcacacaatggagttgatggctttggagatgagaagcgccaccggactgttaaccccgaagggaagaaaaacaagcaaccctaaaccacgctctgggcagggctgttaattgtgccggtgacaaatccgatgattaatgggcaggggcaggaggcgcggggagacggcacgtccgttctgagctggctccggggcagcggcgcagcttcccaccccggggctgggccgccgaccacgcaacggttggagggggctgaggaaaggggacgtcgaacccaccccagccccacggctcctttgtccccaaatccgccgacggtcctcggaccgcagctcccgcctcggtgggcttaagtttctttgttgtgcgtgttgtcttctcctctccgttttgccagctggggggaagggggcgccctccgtccagcccctaaagcctcgcggggaaccgctgttagcggccacccagcgcaaccacaccggtcccgcggcggggcccaagcgcgaccggccccggggcgctgccgaggttcccgcagccccgacggccggactctgacccagggatgtggggcccgcgtccctccgacgccctcgccctgctcacctgccagcagctcctgcaggctctggctgaaggtctgcagctgtcgctcgctcgtgagccccttggtgcggagaaacttggagatgaaggacacggcggcggcgatctcgcctatcatggtggcggcccgggtgtagaagggatgcatgggggcggcgtgcgggggcggcccggggcggctggggctcggcggcgcggccccgacggcggagcagccaccccgggcttcctcaccgggcggaaggctgagaggaagagagggcgtgaggggcggacgactacttttgtctttctttctttagactaaaaaagttattttcgagacaggaggcggcaggagagaggaagagacgagcgatggcggcctggtcacatcgctcggacctccccagctgcctccgcctccagctccgcagcattcgaagatctcaatagctgcatttccagctccgagaggcgaagagatgcaagcgccgtgcagcaccctttatagtgccacgaaaaggaagtggcgtagctggagcgtgatggccgactccagccaatccgaatatcgcaccattgtgacgcaagccggttcggagccgaaaggggcgggaaaagagttcaggaggcgggtccagagatagggaagagagggaggagctgacgtaatccgcttgtaaacaaataaacccggagtggcggctggagacccagttgcttgtgtcgagggagggagggagggaacagagggtgcgcgtgtgaaagctccgcccccagccctagctcctccttcccgcttcagcaggtccaggctctgcgccagtgcatccttctccaagagtgcgctgcctgggcccgcttgccctggagtgtaagtgctgggtaaataagaaccgcctggcgcaggctgtgtctactcttcacgccgccttctcagatcgggctgcatgtccccactccgtgtttacatctcgttcccgctccgggtctcggtgactggctcctcaagccggagacgcgtgtggtgcggcgcgatgcgggcgccagcgctgtgtgtgctggcggtgcgctgccttagtgcgggggaaagtggagggaacggtcctgcggggcgttctgtccaagaaaaaggactgcagcctcggggagccagggtcccctcgcagacgagctgccaacgccgcggagccatttctgttccaccctaggggaggagtagggggatatcttttaaaagtttaattgcaaaataagtaggttagtaaggccatttgtggttgctgtttcagtaacttcagcagtcaacggagagaagagtggaaaccttactggatgcggacaggagagccagttactgaaagcagatataacgcggatcctgtaaagagtggtgtgtatccaaaaaaaaaaaatctgtacaatgtattttaaaacttgtgtgcacaaaactgaagattttcttttttacctagtccaaatgccgtcctagcctgagtcctgctctttataaaaataaaataaaaagaatttgaagcttgtgaaagtattaagtgtagacattcaagtttatttgaaaccctaccaaaaaaaaaaaaaaacaaccttaaaaaccagtgtaacaggaaggcgggagcctgctaaaacgattaggcctaagacagggttaaccccaactccattaaggagaagggggaaaagaaaaaaagaaagatgaagggaggcaggcagatggagaaagcaaacaggaggcagaagttgaactctaccagatggaaataaatatcc

SEQ ID NO: 647 - DNA, 6000 bp, Homo sapiens
ggagaaaacctaaatgtcagtcagaaggggaatggataggtcagatgtggtgtctcatgcctgtaatcccagcactttgggaggctgaggtgggaggattgcttgaggccaggggtttgagaccagcctgggcaacatagcaagacccccacctctaaaaaaaaatgtgggttggggaggggaatggataaattatggtacatctgaactgtgactgtcatgtagctgttactgacatggaaagatctccaaatagaaacaaaaaaagcatgtcagaaccacatctatatatatctatcatatgatcttatttgtatgtttaaaagatgatccatcatatgcatgtgtgcatatgcataaatgcagaggtaaaaggtctggaccaaacagtggttatctgtgtagcccactcttgggatttggctgagggcaggagtaagggactggtcaagggtaactttctcttgttcgattacatgtattacttttttagtatttctctcttttttttttttttaacggagtctggctctgtcgcccaggctggagtgcagtggcgtgattacttttttagtatttcttaaaatgtgcgaataaagggtaaattcacagtcccatcttccaaagataatcattgttaatattttggtggattgtcattgtgttttttctatgtacctagccatttttaaaaaaatgaaatgtaatttctgcctttcttttctaaagaactgtatatagttagtattttctcgaaagcttgttaatacatgtttgacagtcaaagcatggacccaaataagtaaatagagtattaaagtcttttttctcagccaactgtgctttctttttccttttcctgtctgtaaacagagtttatagctcttataaacagctcttataggaagctttccatttctaaagtagacatgtatagaaggcaacagtaggtttgcctttttatattaaactatgtgagccaactttttatttttattttttattttagattcgggcgtacatgtgcaggtttgttacgtggatgtattacatatactgaggtttgggcttcaactgaacccgtcacccaaatagtgaacatagtacccaataggtagtttttcaactcttccctccatccctccattctgttttgagtccccagtgtttattgttcccatctttgtgtccatatgtacccaatgtttacctcctacttgtaagttagaacatgtagtatttggctgtttttgcattaattcacttaggataatggcctccagctgcatctgtgttgctgtaaaggacatgattttatttgttttaatgtctgtgtaataatccatggtatgcatatacaccacatattcttccagtccaccattgatgggcttgtttccatgtcttcgctattgtgaatagtgctctgataaacatgcaagtgcagctgactttttaaatacaactctgcttgaccttgacctttgtctcttctttcttatttcctatttaccaccatttgtaattgaaagtttgcttattgaattagggagaaaagagctatttgaagaatggagtataagtaaagtaataaataggcaatttgttatgcttgagacgaggaaaatattttactcagtaaacacctttgttgaatagaatgctcaaaagtttgccagatcctactctattttattttattttattttttgagactggatcttgctcccaggctggagtgcagaggcatgatcttggcacactgcaacttctgcctcccaggttcaagtgattctcctgcctcagcctcccgagtagctgggattataggcacctaccaccaggcctggttaatatttgtatttttagtagaggtaaagtttcaccatgttggccaggctggtctcgaactcccaaccttaaatgatcctcctgccttggcctcccgaagtgctgagattacaggtgtgagccattgcgcctggcctaatttttgtatttttagcaggggaggggtttcaccatgttggccaaaactggtctcaaactcctgacctcaagtgatctgcccacctcagcctccgagagtgctgggattataggcatgagccaccgcacctggccaccaaatcctgctcttataggaagctttccatccctgcttccttgcttgccccactctcccattttttagggccctaaacatagaaacatttattacattatattcaaagtaaaatcaacttagaattcagtaaatagaacaggacattgcttaagagactttggatataaaccaaaataagtcacaacaaaactgcaatcagcttttgattatctaggagcatttttgttgttgagaattgggagaaagacccttactcttacttcttagattcctctttgccttgcaggaacccagctcctaggctaatgagaagtcacatccaatcagtttttacatagactatgttttgaaacaattagtcctcacacaggcccatcagaaaaccagttaatgtgtccctgaataattgaaaattatttatatatctttttccccactggatttcccactaagtttgtactggatctaattcattttggtgtccctggggcctctcattcatgataggagatctatcagtgtttgttcaagtaatctgaatggtttagagttaactctcaaaatatctagttaactaagaattaggttaccctagaaaatcattccattatcagttatcctaatactcagtgacctaacttcttatatccgaaaagtcccttatactgcaaagttcctgttgctactattattgaaagtaaagggctgggcagggtggctcacacctgtaataccagcactttggcaggctgaagcaggctctgaagtttgagaccaggctgggcaacataggaaacctcatttctacaaaagttacaaaaattagctgggcgaggtggtacacgcctgtggtcccaggagggagccagcttactcaggaggctgaggtaggaagattgcttgagcccaggagttcgaggctgtgattgtgccattgtactccagcctgggagacagagtgagaccctgtctcaaaaataaaaaattaaaattaaagaaagtttcattactgttattattgatgtttaataaaaaagggaaggacagtaagattggaggcaaagcgaaatcatgattaaggaagaaagttcagtgagcaaaaataaaaagccttccttatattctagaaggaatattttaaaatttcccaaatggtcagtcagcccgggagtgtagaacacttcacagttttcaaagcatgttaagccatttgatccttataacagctttgattttggtagcccatgtagtattatcctctttatgaaggtaaagaaacttgagttctgtggccctcataagttcacccagggtcacatatttggtaaacaaaaactgtgaccaaaatctggatctcccaccttactttgtcctgtatactttctactgtacttccttttctgtagcaaggtaaaatactgagcatttgaagatgggacaacttttagctttcatagctctttcaaaatgcaattaaatatatatatgtaacaagaataactcataaattacagaaattattgttaattgaaattcttttggcacattgagcttaattgctgttaactttggcattggtcctaattatatatttagagcttctgctacttctatatccagaattacttccattggtaaaatatcaggtaatgaatgtttccttatttttttttcaaggtgaagtctcactctgttgcccaggctggagtgcagtggtgcagtcttggcccactgcagcttcgacctccctgggctcaggtgatcctgctatctcagtctcccaagtaagcaagactacagatgtgtactaccatgtctggttatttatttatttatttatttttgagatggagtttcactcttgttgcccaggctggagtgcaatggcatgatcttggcccactgcaacctccgcctcccagattcaagtgattttcctgcctcagcctcccaagtagctgggattataggcatgtaccaccatgcccggctaattttgtatttttagtagagatggggttccaccatgttgatcaggctggtctcgatctcctgacctcaggtgatctacccacctcagcctcccaaagtgctgggattacagacgtgagccactacgcttggcctatgttttgtatttctttgtagagatggagttttgccatgttgcccaggctggtcttgaactcctgggttcaagtgatccacctgcctcagcctcccaaagttctggtattacaggcgtgagccaccatgcccagtccttatgaatttttcaaacatcagttatgcagaaacatttgagaggcagttcggcaatcactttttaatgtgtaggcactataggggacacagtaatgaacaaggtacagttcctggccttaaggaacttatttagacttgtaggtgaaacagacatctagcaacactaagaatgcccagaatatgaggcagaatgtgataagtgtgtcatgagggcacaaacaaatgtctgtgtaaacacagagtagaaattttactgagtttcttgttaactaaaatactgttgtcttgagttttcttgtctgcatatttcagaacacttaattctgtcacccagtcatgtttctttcagtgaaaatgtatatcatctagttggtttatattcagagatacaaaattgtttttttttaatttatattttttattattaatttttttttaatagagatggggtctcactatatgacccaactatgttgcccaggctggtcttgaactgctggatcaagcgatcctgctgccttggcctcgcaaagcgctgagattacaggagtgagccaccacaccccaccagttttaatttttttagaaacgattttgctctgttgcccaggctagaattcagtggcacaatcatagttcattgcagcctcaccctcctaggttcaagtgatccttcagcttcagccacctgagtagctgggattataggtgcatgccaccatgcccagttaatttttaaaaatagtttttaaagataatatctcactgtgttgcccaggctggtctcaaactcctggccttgagcagtgttggcctcccaaagtgttgagattacaggcgtgagctaccatgcctagctttataaacttcttttaatattaacccaatccatgcataattaggaaggtcccagtgatgtcaaacaagaaaataaaatatggccaggtgcagtggctcacactggtaatcccagcactttgggaggccaaggcgggctgggctgatcacccaaggtcaggagttcaggaccagcctggccaatatagtgaaaccctgtctctaccaaaaatacaaaaattagccggacatggtgggcgcctgtaatctcagctactcgagggactgaggtaggagaattgcttgaacatgggaggcggaggttgcaatgagctgagatagacaactctttcttctgtgaagaaccttgggggcagggagagtaaaaaggatttcatggaagaagagtgtttgacctttttttttttgagatgaagtctcactctcgcccaggctggagtgcaatggcacgatcttgtctcacggcaacttctgcctcccgggttcaagtgattctcctgtcttagcctcccgagtagctgggattacaggcatgcaccaccacacccggctaattttttgtatttttaatagagagggggtttcaccatgttggccaggctggtcttgaactcctgacctcaagtgatccacctgccctggcctcccaaagtgctgggattacaggcatgagccactgcgcctggcgaatatttgacttttaaggatgaggggtatttgaacaaaatggggctggaattccatactga

SEQ ID NO: 648 - DNA, 6000 bp, Homo sapiens
agacatgaatggagtgagggagcagcgacatgggactactggggaaagagcatttcaaagagaacaacaggtacaaaggccctgaggcaggattgttgtgtttgggaaataaggaagccagaaggttagagcaccatggctctaacgagtaaaatagtgtccttcccagcaccaaagtcttattgattgatgatcctctgactatacaaaccaattccaataaagagagtcccagccaggtgcagtggctcacgcttgtaatcctaacactttgggaagctgaggtgggaggatcacttgagcgggggagtttgacaccaacctgagcaataaaaggagatcctgtctctacaaaagtacaaaaattagccaggtgttgtggtgcacacctgtggtcccagcaactagggaggctgaagtgggaaaactgcttgagcccaggagtttgaggttgcaatgagccgagattgtgccactgcaccccagcctgggtgacagagacagtgtctcaaaataaaaacaaacaaacaaacaaaaaagagtcccatacaatgctcaaggcagacttttatttctcagggttatcttaataaagaccttccactcccttagaacaagtgttctcacctgaggtcaacagacccatgcggatttagagtgaggtgtcaggttgtcaatcaagcccccaaatctgtgcatctagaacatttttctgcagagaaagtcttaggtgtagcctgccaataaatgcctgcagagctaggtgggaatatagaagaatgaaatacatcaggtgtgagaacccagtctcttaaacacagaggaatattattttcttccacagagaaatatgccttctcccttttattctgacatattcagccttctgggtctgtcttttatttcgtcacttctggtagagacttgggtccaaataaatatctctccaccataagaaacagtaatgcaagggtgatgacaaaaggcaagcaatgctcagtgttggggagaccttggggcgggtgaggattgggcaaacgggagggcacatgccttctaaggcaggcactcactcctctgcttcagttgatcactgccttgaggaaatgggacccagtattgacagaccttatggctgattaagagaaagcagaaatctggttctctttggagatgaaatctcaatttagttcacattttctttagagaatcctggcataccaaccagaacactctgagtgagtcaaatatggtcccgataggcaggtggtttgtgacctctggtctctagattctaccggaatttctgattgattcatgtcttaaataagattgatgactgctgtcctagaacatgtttcccctccattctgtgggcggaaagacagacggcatggacatttaccatgttcttgggtcccagaagtccaggagaaagccatctgcctcactgctccctgccccatcctgggcccagagcactaatgccagtggcatcagctctgctcctctccctcttcctttgtctaccagtgagtgtcctccattatggggatggagcaagcagtatattgtaaaagggacttagtgctgagaagcaccagaggaaaagtaggagatgctcattaaagtggaaggcagctctcttcttccccttctcaattctgcattctgctctctcccctaaatgccccccacccaacccccaaactcttgagaatgcccaaatccaaccaggtcaggaaaaaataaactcactggctcctgtattgagaagtccaagtgtggtgcggcttccggcatgtgggattcaagcactcaggaatttctccctctcacccaacctcagctctgctctcttctctgttgcctttgttctttgacaggctccctccaagtggtggaaaagttgacctgtatggtcattatcactcatcatttcagaaggggagagcctgcttctcttgtagcatttccatcaaatcctgaaaataaaaataatctggttggttctactggacttgtgatactggacaaacctctatgtccaagagctcgagtcattcccattggctcacctgggccacacactcttcgttgagtgcatcccaggatcacagggagtcttgagggtgctgtgtgtggtggtggtggtggtacggagatggcaaactctaaaaggaagagatggtggatacttaaagcctaccttctgcccacaggtgtgtcagacacaatctccaaaggccatcctattgttaccctatcccccaaacaaacactgaaaaactctcctggcaatttggcagtagctcagtgtggagcatttgttaattccagtactagaacgtctgcattgcaaaaccagaaatgtccagttctggtttggcacacagaagagattttcaagccttggcaactcctcagtgcaggcagtggaggaaatgctccagctttgtgaaaatcttctcccttcgctcctcatggagaataaccgttcatcactgcagccatgaatctgccacactgaatagatatggtctgaaaatctaggaacaaatggaatcactttggaaacctgtaaattttaaagccgaaagggcgctccagggaaccaactacatgaagttctctggaagccacaggatgggaggtttggtgggggtggaggtgaccattgaattttacataggcaaatgtaagacaatcttatccatagacagaaaaatccaaactcaccgagagtaaaaggatgacagttgaaataacagctaattgttattaagtatttgctaagttccaaagcacttttcatagattagctcaattaattctcacaacagccctgtaaggtagggaccatgatcatctccagaagaggctaaataaattgccaaagatcacatatgtagcaagtggtggcagagtgaggattcatacctggacagcttaactttaaagccatggtgctaatgcattcattcattcatccatccattcattcatccatccattcattcaatgattatattggatgcctactacatgctaagaactatgttcaaggtgctgaactacagctgtgaacaatgcaagtacaaatacatgaagcagagttggggagaaagtaagctggagaaataagacataaactaggttagatggtgaacatgattaaggaaaaaactagagcagggaggaaagagaaatgtgcagggggaaggtcaattctgagtgagccaacaggcaaggtctcactaagaaagcggcattaaataaagatttgaggaagtgagggagtaaaccttgcagctatctaaaaggagagcatgagaggtagaggagacagcaaatacaaagaccctgaagcaggggcaaggctaatgagttctagaattagcaaggagtccagtgtaacttgaacagagtgatcaaagaacagagcaggaggaaatgaggtcagagaggtaaacaggctggagtgcagtggcaccgtctcggctcactgcaacctccacctcccgggttcaagcgattctcctgcctcagtctccctagtagctgggattacaggcatgcaccaccacacccggctaatttttgtatttttagtaaagacggtgtttcaccatgttggccaggctggtcttgaactcctgacctcaagtgatccacccgcctcaacctcccaaagtgctgggattacaggcgtgagccaccgcgcccggccaggattcttttaatcaagtatgatgcagccatcagggttggagcattctaggaagagggaacagcatgcaccaaggcaacaggaaagcacataaaaaaggagttgctggaagattcatttcaacccactatcaagtaaatattaaacttactgtataaaaatgttagggccaggaggggtggctcacgcctgtaaacccggcactttgagaggccgaggcaggaggatcggttgaacccaggagttcgagaccagcctgaccaacagggcgaaaccccgtctctactaaaaatacaaaaactagccgggcgtggtggtgggcgcctgtaatcccagcttctcgggaggctgaggcaggagaattgcttgaacctgggaggcggaggttgcagtgagctgagatcacgccctgcactccagcctgggcgacagagggagacttggtcatgctccctccccgccctccgtcagttttaggaataaatacctttttatttaagctaaagtgtgggtacacccttcctctaggattctccatcaaggaataagaagccatattaggacaatttagagggcagttaaccctagtagacatagtggttcttaaaaggcttggggcctcagactgtacacaggcttcacatggaatctgatttgttcctttatcccagtccctcacccagaacccgaatctagcccttcatgttataaaaagggccagaggtccaaagagggtaagtgccttgtgcaaaattattcaactactttgtagaggattttaactagggttcagttagctccgcccacactataaaaggctctttctaaaaaacgaaacatgattaagggcacacggctccagcgttaacaaagctctttgttagctgggaaatgcccccctccccgactcatctgcttatcatctgcatagaattatgtactcaaaagcaggaaaattattgagaaaaccattggtccccggctgcagaccccaaggttgggagctggttcccgtttcctcccagagccggcagggggggcaccaggcaaagtttgcaagacgcgcctccctcccacccctcccccttcctcgcccaacttcccatagccgcggcctcaactaaaagtggccattgacctttcaagctttcgagcagtgatgcaatagaatagtatttcaaagaaaaatgcttatcgaaattttggatccggttttcccgtgattgttaagggtttcttttaaaaagtaggtcacatttcaagtaggtcatatttcgggggcgggtgcgcagacaaggagatgagtttccactaaggccagggggcctccaacggggttggaggtgagaatcccaggtagggtagaggtgccgagatccttccgaatcccagccctggggcgtcagccctgcagggaatggcagagacactctccggactgagggaaccgaggccagtcaccaagccccttccgggcgcgcaggtaagggcgcccccttagcagccggcgcaggtgacccgggcgggccgccgggtctaccggagacgttggagcagaggggaggaggaagggaggagccgggtgggtgcgggtgacaaggagccggagcgccagggggaggggactaaggacggccggcgccgcttaaggaggcgctgctctcccgctcgctgccttccaggacctgatcaaggggaccgcctccggtccccggccgtgggcaccgggacgagcacggcgtccccacgccatcgatgtgtcttagagccggagagtctggtttccgaggacccacagtcgctcctgcacgcccaccccccgcaaaagtgcggccaggagggtcgcatcgagggggcgccgccgggatgtttagaggaacccacccccgtggcaggccaagggccaaggatcgctatccttccctgaacccgggcgctcagctggcccgggtagggggcaggctccggccgccgaaacggggttggctgtagccggtggccggggagatctctagcttgcgcccgagcaccccggggtgtggggccagaggcaggccgaccccggcgtgcacaccgcccgccctgcacccgagcgctctcacccggtcttccctgaagcctgtgtattgcgaccgagcctctttaaagcagtagcggggcccgcggtcacgtgaggccgattcctggaaagttcctggaaagccgcctccgcagcagccgggcggggcgcgagcggagcgctgactggggagggaggcggggagcaaggg

SEQ ID NO: 649 - DNA, 6000 bp, Homo sapiens
ctgaagtgggaaaactgcttgagcccaggagtttgaggttgcaatgagccgagattgtgccactgcaccccagcctgggtgacagagacagtgtctcaaaataaaaacaaacaaacaaacaaaaaagagtcccatacaatgctcaaggcagacttttatttctcagggttatcttaataaagaccttccactcccttagaacaagtgttctcacctgaggtcaacagacccatgcggatttagagtgaggtgtcaggttgtcaatcaagcccccaaatctgtgcatctagaacatttttctgcagagaaagtcttaggtgtagcctgccaataaatgcctgcagagctaggtgggaatatagaagaatgaaatacatcaggtgtgagaacccagtctcttaaacacagaggaatattattttcttccacagagaaatatgccttctcccttttattctgacatattcagccttctgggtctgtcttttatttcgtcacttctggtagagacttgggtccaaataaatatctctccaccataagaaacagtaatgcaagggtgatgacaaaaggcaagcaatgctcagtgttggggagaccttggggcgggtgaggattgggcaaacgggagggcacatgccttctaaggcaggcactcactcctctgcttcagttgatcactgccttgaggaaatgggacccagtattgacagaccttatggctgattaagagaaagcagaaatctggttctctttggagatgaaatctcaatttagttcacattttctttagagaatcctggcataccaaccagaacactctgagtgagtcaaatatggtcccgataggcaggtggtttgtgacctctggtctctagattctaccggaatttctgattgattcatgtcttaaataagattgatgactgctgtcctagaacatgtttcccctccattctgtgggcggaaagacagacggcatggacatttaccatgttcttgggtcccagaagtccaggagaaagccatctgcctcactgctccctgccccatcctgggcccagagcactaatgccagtggcatcagctctgctcctctccctcttcctttgtctaccagtgagtgtcctccattatggggatggagcaagcagtatattgtaaaagggacttagtgctgagaagcaccagaggaaaagtaggagatgctcattaaagtggaaggcagctctcttcttccccttctcaattctgcattctgctctctcccctaaatgccccccacccaacccccaaactcttgagaatgcccaaatccaaccaggtcaggaaaaaataaactcactggctcctgtattgagaagtccaagtgtggtgcggcttccggcatgtgggattcaagcactcaggaatttctccctctcacccaacctcagctctgctctcttctctgttgcctttgttctttgacaggctccctccaagtggtggaaaagttgacctgtatggtcattatcactcatcatttcagaaggggagagcctgcttctcttgtagcatttccatcaaatcctgaaaataaaaataatctggttggttctactggacttgtgatactggacaaacctctatgtccaagagctcgagtcattcccattggctcacctgggccacacactcttcgttgagtgcatcccaggatcacagggagtcttgagggtgctgtgtgtggtggtggtggtggtacggagatggcaaactctaaaaggaagagatggtggatacttaaagcctaccttctgcccacaggtgtgtcagacacaatctccaaaggccatcctattgttaccctatcccccaaacaaacactgaaaaactctcctggcaatttggcagtagctcagtgtggagcatttgttaattccagtactagaacgtctgcattgcaaaaccagaaatgtccagttctggtttggcacacagaagagattttcaagccttggcaactcctcagtgcaggcagtggaggaaatgctccagctttgtgaaaatcttctcccttcgctcctcatggagaataaccgttcatcactgcagccatgaatctgccacactgaatagatatggtctgaaaatctaggaacaaatggaatcactttggaaacctgtaaattttaaagccgaaagggcgctccagggaaccaactacatgaagttctctggaagccacaggatgggaggtttggtgggggtggaggtgaccattgaattttacataggcaaatgtaagacaatcttatccatagacagaaaaatccaaactcaccgagagtaaaaggatgacagttgaaataacagctaattgttattaagtatttgctaagttccaaagcacttttcatagattagctcaattaattctcacaacagccctgtaaggtagggaccatgatcatctccagaagaggctaaataaattgccaaagatcacatatgtagcaagtggtggcagagtgaggattcatacctggacagcttaactttaaagccatggtgctaatgcattcattcattcatccatccattcattcatccatccattcattcaatgattatattggatgcctactacatgctaagaactatgttcaaggtgctgaactacagctgtgaacaatgcaagtacaaatacatgaagcagagttggggagaaagtaagctggagaaataagacataaactaggttagatggtgaacatgattaaggaaaaaactagagcagggaggaaagagaaatgtgcagggggaaggtcaattctgagtgagccaacaggcaaggtctcactaagaaagcggcattaaataaagatttgaggaagtgagggagtaaaccttgcagctatctaaaaggagagcatgagaggtagaggagacagcaaatacaaagaccctgaagcaggggcaaggctaatgagttctagaattagcaaggagtccagtgtaacttgaacagagtgatcaaagaacagagcaggaggaaatgaggtcagagaggtaaacaggctggagtgcagtggcaccgtctcggctcactgcaacctccacctcccgggttcaagcgattctcctgcctcagtctccctagtagctgggattacaggcatgcaccaccacacccggctaatttttgtatttttagtaaagacggtgtttcaccatgttggccaggctggtcttgaactcctgacctcaagtgatccacccgcctcaacctcccaaagtgctgggattacaggcgtgagccaccgcgcccggccaggattcttttaatcaagtatgatgcagccatcagggttggagcattctaggaagagggaacagcatgcaccaaggcaacaggaaagcacataaaaaaggagttgctggaagattcatttcaacccactatcaagtaaatattaaacttactgtataaaaatgttagggccaggaggggtggctcacgcctgtaaacccggcactttgagaggccgaggcaggaggatcggttgaacccaggagttcgagaccagcctgaccaacagggcgaaaccccgtctctactaaaaatacaaaaactagccgggcgtggtggtgggcgcctgtaatcccagcttctcgggaggctgaggcaggagaattgcttgaacctgggaggcggaggttgcagtgagctgagatcacgccctgcactccagcctgggcgacagagggagacttggtcatgctccctccccgccctccgtcagttttaggaataaatacctttttatttaagctaaagtgtgggtacacccttcctctaggattctccatcaaggaataagaagccatattaggacaatttagagggcagttaaccctagtagacatagtggttcttaaaaggcttggggcctcagactgtacacaggcttcacatggaatctgatttgttcctttatcccagtccctcacccagaacccgaatctagcccttcatgttataaaaagggccagaggtccaaagagggtaagtgccttgtgcaaaattattcaactactttgtagaggattttaactagggttcagttagctccgcccacactataaaaggctctttctaaaaaacgaaacatgattaagggcacacggctccagcgttaacaaagctctttgttagctgggaaatgcccccctccccgactcatctgcttatcatctgcatagaattatgtactcaaaagcaggaaaattattgagaaaaccattggtccccggctgcagaccccaaggttgggagctggttcccgtttcctcccagagccggcagggggggcaccaggcaaagtttgcaagacgcgcctccctcccacccctcccccttcctcgcccaacttcccatagccgcggcctcaactaaaagtggccattgacctttcaagctttcgagcagtgatgcaatagaatagtatttcaaagaaaaatgcttatcgaaattttggatccggttttcccgtgattgttaagggtttcttttaaaaagtaggtcacatttcaagtaggtcatatttcgggggcgggtgcgcagacaaggagatgagtttccactaaggccagggggcctccaacggggttggaggtgagaatcccaggtagggtagaggtgccgagatccttccgaatcccagccctggggcgtcagccctgcagggaatggcagagacactctccggactgagggaaccgaggccagtcaccaagccccttccgggcgcgcaggtaagggcgcccccttagcagccggcgcaggtgacccgggcgggccgccgggtctaccggagacgttggagcagaggggaggaggaagggaggagccgggtgggtgcgggtgacaaggagccggagcgccagggggaggggactaaggacggccggcgccgcttaaggaggcgctgctctcccgctcgctgccttccaggacctgatcaaggggaccgcctccggtccccggccgtgggcaccgggacgagcacggcgtccccacgccatcgatgtgtcttagagccggagagtctggtttccgaggacccacagtcgctcctgcacgcccaccccccgcaaaagtgcggccaggagggtcgcatcgagggggcgccgccgggatgtttagaggaacccacccccgtggcaggccaagggccaaggatcgctatccttccctgaacccgggcgctcagctggcccgggtagggggcaggctccggccgccgaaacggggttggctgtagccggtggccggggagatctctagcttgcgcccgagcaccccggggtgtggggccagaggcaggccgaccccggcgtgcacaccgcccgccctgcacccgagcgctctcacccggtcttccctgaagcctgtgtattgcgaccgagcctctttaaagcagtagcggggcccgcggtcacgtgaggccgattcctggaaagttcctggaaagccgcctccgcagcagccgggcggggcgcgagcggagcgctgactggggagggaggcggggagcaagggaggcgcgtcggtctgggaagtcgcgcgcactcgctgctcctgggaccgacgtttaactcttgccaagtctcgtcgcagccgccgcggctggcgggccttgggcttcccctgaagcatgagccctctcgcccgcagccaccctcaccgcgtggcccgcggacagtgcgcgccggggtcccgggtgcacagcctcaggataccccgtgcccgcagctcgggcgcccgcggcaggtaccggtagtgggggaagcccgaaggctccgccccgaggagagttaccggggagggcggcgaggcgcggccgcgtgcgccggggagcggcggacggcctgggcttccgcagctcggagcgccggggaagagagagtccgaaccgcggctctgccccgcggcctagcgttgctgcctgcttt

SEQ ID NO: 650 - DNA, 6000 bp, Homo sapiens
ctgaaataaggctcccatagaatggattactacagtactcattcacatgagagttcctacatgtagtaaaaagacaaatacaggacttcatggtcactttttttggttgatttggttaattgcataaaatgggataaatactcacatacatcatctgtttaacaaaactcctaggtacatcagaatgcaaaatataaaatgcccaagagactctgatcagcaggcatatcaaattgcagtgaggcctgtgtcagcttggttccttcccacttcttcagtattcctatgaggagttctttctctcctactggagcctggacctttgacataatggaaaagaacctaagaaggcaaggcattctgataaaacgcgacttcagcctttacatgcgacattttatttttaatctaaaaggatcaacaggtcttggtcagccttaggaagggaagcatcactcaggtaaaagtatctggaggaactttaaacacctagctacctcttcaagctgttaaatttaaattagattagcttcagctgttcttagaaagcattccatatagttatccagagcactcaagttttggttctcttttacatagctgcattcggagatactctatgtgagacatgtttaaaaaaagagaaacatttatacctggaatttatattcttccaagtaatcttttagtcttgttggtaaaggcagtccccagatggcaccggtacatttgttaatggtgagcctacagagatgctgcagagatggtgctgacgtgtagagcggtttggtcagataaaggtgaacagtgccgttccggggggcttctggacctgtccgcttatccttgcacatctgaacatagtagtcgatcagatgaaccacactgtcaaattgtttaagcttggatttgacacatatgatagagtccaatctgaattttccgtcttggtattcgattcgaagattagttggtccagctgatgttttaacagatattgttagtaggtagtctgaatgcgagctatctctaatcaagaaagttccttctggtgcctcttttaatttctctttggcttcattaacagtcatacttccccagtaccatcctggggtttttgttcaaaaagaaaaagaaaagagggtaaaacagttattataagaattcttagaacagagcaagtaattggcaataatttttttagctctaaaaaagaaaaaaaaaaaaggtggtgtgtgagcgaaagtttaccgggccaccacaaatactttcagtaggaatttaataaaaatttgggtccattttatgaacacaaacggcgagccagttttctttcttttttaaaaaatcaactttctgaagctcttcttaagattttcttctaatgaaccaaaagaacatctgcagcatgacacactggctgatgaagcatgacacttttaacattatttaagtaaaataaagatttaggtaaattagaaaaaaatcagaagttagaaataaaagccatgccctttaaaaagtggaaaacccaactcctgtaattgaactacagtaaaaacagaagcaacttttttggatggttggtgtgccccccaccaaaaaaaaaaaaaaaaaaaaaaaaagaatctgcaaagcctgctatgaacagccttctatgtagaaagcactgctatgtacttgttgtaaaagcacagctctagtacaatagcttctgttcgctgctttatgactaccttaccagtcactaagaaatgggaattcccaagtgataattactacttcaagtttacaatcttccctaaactcttttgaactttgccctaatccaaacccaatcacaaccatccatctcccctgcattcttgatttcatctgcctgcaccatctccccggcccactctgctttctaagaaggctcagagaccgtccgtatttaagaagtctgaacatttgtgctccccccacccccacaattaccgggatacttgcaatctgccggtgcctccccgggagggaaagcccgtggcccacacggaaagaccggaatcgcaagcgagagaacttttccctctccctccccctgttgctaccaaaatttcaactgtgccacaactgtaagcttttaggatacggatttggaaagccagaatgatttgccagatactttactttttttcttttttcttttttcagatgcctagagacagcgtgccgcgcgaattgcctgactgtacttgaaagcggcagtaccctgggcgcgccgaccatggaagccgcgctcggcgggggcttcgcagcctactctcgacgcccgggcagccgccctcgcggcagtgtcagtccctgaacttggccgccaagatcctgggctgcagccgcagctccgcccgggagccagatgctgctgggcctgcggggcccgcggcaccgacttgctgattgcaccccgtgcaaagggaggcgcccgacgctttccccggccggggttcgagcccgggagcctaaccctgagcagctgcggaaaacagtaaatcttccagcgtgctaagaagctatttccaagaagctcttcccgcgctctgcgctccgccaggcctgagtccctggagaaccactttccttacgcattcccaaggacccaggaccctgcgagcgtgctctccgcggtcccttggaagcaagggacgtatttccatcttattctttgcttcccacctcgaccccgcttcctagctgcttccttggggaggcgctccctcccgcacgcgtcgcggccgatcggctccctacctgtctgaccgagctcccgcagggccttcgccagacgcgccgcctgcggggatggctcctccgccgaccccgcggtcccccactggctccgcgtcccttccccgccattcccggagggctcaaggcaccgcagggtcatgagagaagggtcaccgcggcaaagacaggtggccgcccgagctggggtcagagaagggttcgcgtccttccttgaagtcagtgcgaatcccaaaacgagtccctgcggggtgtccgaaatggtggcagagagagaagggatggggctctttctccccagatcctggaggacggatgacaaagtccctcgcagccgcggtcacccactgatcgcctacaaagagaaagcgggaggttgggtcagtccaaactggacccctgcggctggggtgggggtggggaaatagacgtggaaaatcccagggactcctccgcctctacgttcctgcaccatttaaccccaagcttccagttagcgccctggcccagctctagagaaaagataaagagagcagagatccaagataaagttggctgaagaggtggggggcggaggtcaggaggagggtgaacagggtgtcttcccgcccagggtcactagctgaaatcaaagactggcgacctaggaagagcaaatagtcacctgcagatccagtgggaataggcccttgtcaaggacaagtagaaaaaattaaaaaggaaagaacaggagagattccccaaattggcattccggtctcacacctggcgcagcccgagggcccccaggaagaagcacccacacaaacttggttctccgccctaaagcgctgcggggccccgaggcaccaacccggggtgcggaggtgcgggagctgccgcatctccgcccgggaggctcctcgctcccctccccccgcttcctggtgcccgctctggcggggttgggggtgccgcggcggtcgctcccggaccaggatggctgcggtggttctcgccgccgcgggcgctgtcgaggaatcggcccgagcgcgcagccctcgcggggctccgaggcgaggccggggccgagcgggcggtcgcgagcgctgcggaaaatgcaaaccaccaacgccgcgctcttacctcgacctcggccgcggccgccgccgccgcctccgcaccaggcagcctcctcagcggacatggggcgggggggtggggggaaaaggggaggtgggaggggcccgggagaggaggggcgtctgcccttgtttcccccgttaacgtttaatttgggaacgagatgcccggggatgcaaccagccccgcgctcggaggcggcggtcggagttccgtgcgcagagggcacacaaaagcctcgaggatcattgcctcgaccccatcccccaccgcgcggcgacgccccctacgggctgggacacctccactctcggactgctgccgggtttccctccggctgcgaccctggaggtgggaaggagagagggagggagggaggaaggagcgagggcgggaggcaggccggtggggaggagcgggagatcaggttattaggaggattattaatttgaatggcagtttaggggaaataaaaaaaagaaactccagacacttccagacgccgagaaggggctggagaaagcaggcagcaacgctaggccgcggggcagagccgcggttcggactctctcttccccggcgctccgagctgcggaagcccaggccgtccgccgctccccggcgcacgcggccgcgcctcgccgccctccccggtaactctcctcggggcggagccttcgggcttcccccactaccggtacctgccgcgggcgcccgagctgcgggcacggggtatcctgaggctgtgcacccgggaccccggcgcgcactgtccgcgggccacgcggtgagggtggctgcgggcgagagggctcatgcttcaggggaagcccaaggcccgccagccgcggcggctgcgacgagacttggcaagagttaaacgtcggtcccaggagcagcgagtgcgcgcgacttcccagaccgacgcgcctcccttgctccccgcctccctccccagtcagcgctccgctcgcgccccgcccggctgctgcggaggcggctttccaggaactttccaggaatcggcctcacgtgaccgcgggccccgctactgctttaaagaggctcggtcgcaatacacaggcttcagggaagaccgggtgagagcgctcgggtgcagggcgggcggtgtgcacgccggggtcggcctgcctctggccccacaccccggggtgctcgggcgcaagctagagatctccccggccaccggctacagccaaccccgtttcggcggccggagcctgccccctacccgggccagctgagcgcccgggttcagggaaggatagcgatccttggcccttggcctgccacgggggtgggttcctctaaacatcccggcggcgccccctcgatgcgaccctcctggccgcacttttgcggggggtgggcgtgcaggagcgactgtgggtcctcggaaaccagactctccggctctaagacacatcgatggcgtggggacgccgtgctcgtcccggtgcccacggccggggaccggaggcggtccccttgatcaggtcctggaaggcagcgagcgggagagcagcgcctccttaagcggcgccggccgtccttagtcccctccccctggcgctccggctccttgtcacccgcacccacccggctcctcccttcctcctcccctctgctccaacgtctccggtagacccggcggcccgcccgggtcacctgcgccggctgctaagggggcgcccttacctgcgcgcccggaaggggcttggtgactggcctcggttccctcagtccggagagtgtctctgccattccctgcagggctgacgccccagggctgggattcggaaggatctcggcacctctaccctacctgggattctcacctccaaccccgttggaggccccctggccttagtggaaactcatctccttgtctgcgcacccgcccccgaaatatgacctacttgaaatgtgacctactttttaaaagaaacccttaacaatcacgggaaaaccggatccaaaatttcgataagcatttttctttgaaatactattctattgcatcactgctcgaaagcttgaaaggtcaatggccacttttagttgagg

SEQ ID NO: 651 - DNA, 6000 bp, Homo sapiens
gattgatgactgctgtcctagaacatgtttcccctccattctgtgggcggaaagacagacggcatggacatttaccatgttcttgggtcccagaagtccaggagaaagccatctgcctcactgctccctgccccatcctgggcccagagcactaatgccagtggcatcagctctgctcctctccctcttcctttgtctaccagtgagtgtcctccattatggggatggagcaagcagtatattgtaaaagggacttagtgctgagaagcaccagaggaaaagtaggagatgctcattaaagtggaaggcagctctcttcttccccttctcaattctgcattctgctctctcccctaaatgccccccacccaacccccaaactcttgagaatgcccaaatccaaccaggtcaggaaaaaataaactcactggctcctgtattgagaagtccaagtgtggtgcggcttccggcatgtgggattcaagcactcaggaatttctccctctcacccaacctcagctctgctctcttctctgttgcctttgttctttgacaggctccctccaagtggtggaaaagttgacctgtatggtcattatcactcatcatttcagaaggggagagcctgcttctcttgtagcatttccatcaaatcctgaaaataaaaataatctggttggttctactggacttgtgatactggacaaacctctatgtccaagagctcgagtcattcccattggctcacctgggccacacactcttcgttgagtgcatcccaggatcacagggagtcttgagggtgctgtgtgtggtggtggtggtggtacggagatggcaaactctaaaaggaagagatggtggatacttaaagcctaccttctgcccacaggtgtgtcagacacaatctccaaaggccatcctattgttaccctatcccccaaacaaacactgaaaaactctcctggcaatttggcagtagctcagtgtggagcatttgttaattccagtactagaacgtctgcattgcaaaaccagaaatgtccagttctggtttggcacacagaagagattttcaagccttggcaactcctcagtgcaggcagtggaggaaatgctccagctttgtgaaaatcttctcccttcgctcctcatggagaataaccgttcatcactgcagccatgaatctgccacactgaatagatatggtctgaaaatctaggaacaaatggaatcactttggaaacctgtaaattttaaagccgaaagggcgctccagggaaccaactacatgaagttctctggaagccacaggatgggaggtttggtgggggtggaggtgaccattgaattttacataggcaaatgtaagacaatcttatccatagacagaaaaatccaaactcaccgagagtaaaaggatgacagttgaaataacagctaattgttattaagtatttgctaagttccaaagcacttttcatagattagctcaattaattctcacaacagccctgtaaggtagggaccatgatcatctccagaagaggctaaataaattgccaaagatcacatatgtagcaagtggtggcagagtgaggattcatacctggacagcttaactttaaagccatggtgctaatgcattcattcattcatccatccattcattcatccatccattcattcaatgattatattggatgcctactacatgctaagaactatgttcaaggtgctgaactacagctgtgaacaatgcaagtacaaatacatgaagcagagttggggagaaagtaagctggagaaataagacataaactaggttagatggtgaacatgattaaggaaaaaactagagcagggaggaaagagaaatgtgcagggggaaggtcaattctgagtgagccaacaggcaaggtctcactaagaaagcggcattaaataaagatttgaggaagtgagggagtaaaccttgcagctatctaaaaggagagcatgagaggtagaggagacagcaaatacaaagaccctgaagcaggggcaaggctaatgagttctagaattagcaaggagtccagtgtaacttgaacagagtgatcaaagaacagagcaggaggaaatgaggtcagagaggtaaacaggctggagtgcagtggcaccgtctcggctcactgcaacctccacctcccgggttcaagcgattctcctgcctcagtctccctagtagctgggattacaggcatgcaccaccacacccggctaatttttgtatttttagtaaagacggtgtttcaccatgttggccaggctggtcttgaactcctgacctcaagtgatccacccgcctcaacctcccaaagtgctgggattacaggcgtgagccaccgcgcccggccaggattcttttaatcaagtatgatgcagccatcagggttggagcattctaggaagagggaacagcatgcaccaaggcaacaggaaagcacataaaaaaggagttgctggaagattcatttcaacccactatcaagtaaatattaaacttactgtataaaaatgttagggccaggaggggtggctcacgcctgtaaacccggcactttgagaggccgaggcaggaggatcggttgaacccaggagttcgagaccagcctgaccaacagggcgaaaccccgtctctactaaaaatacaaaaactagccgggcgtggtggtgggcgcctgtaatcccagcttctcgggaggctgaggcaggagaattgcttgaacctgggaggcggaggttgcagtgagctgagatcacgccctgcactccagcctgggcgacagagggagacttggtcatgctccctccccgccctccgtcagttttaggaataaatacctttttatttaagctaaagtgtgggtacacccttcctctaggattctccatcaaggaataagaagccatattaggacaatttagagggcagttaaccctagtagacatagtggttcttaaaaggcttggggcctcagactgtacacaggcttcacatggaatctgatttgttcctttatcccagtccctcacccagaacccgaatctagcccttcatgttataaaaagggccagaggtccaaagagggtaagtgccttgtgcaaaattattcaactactttgtagaggattttaactagggttcagttagctccgcccacactataaaaggctctttctaaaaaacgaaacatgattaagggcacacggctccagcgttaacaaagctctttgttagctgggaaatgcccccctccccgactcatctgcttatcatctgcatagaattatgtactcaaaagcaggaaaattattgagaaaaccattggtccccggctgcagaccccaaggttgggagctggttcccgtttcctcccagagccggcagggggggcaccaggcaaagtttgcaagacgcgcctccctcccacccctcccccttcctcgcccaacttcccatagccgcggcctcaactaaaagtggccattgacctttcaagctttcgagcagtgatgcaatagaatagtatttcaaagaaaaatgcttatcgaaattttggatccggttttcccgtgattgttaagggtttcttttaaaaagtaggtcacatttcaagtaggtcatatttcgggggcgggtgcgcagacaaggagatgagtttccactaaggccagggggcctccaacggggttggaggtgagaatcccaggtagggtagaggtgccgagatccttccgaatcccagccctggggcgtcagccctgcagggaatggcagagacactctccggactgagggaaccgaggccagtcaccaagccccttccgggcgcgcaggtaagggcgcccccttagcagccggcgcaggtgacccgggcgggccgccgggtctaccggagacgttggagcagaggggaggaggaagggaggagccgggtgggtgcgggtgacaaggagccggagcgccagggggaggggactaaggacggccggcgccgcttaaggaggcgctgctctcccgctcgctgccttccaggacctgatcaaggggaccgcctccggtccccggccgtgggcaccgggacgagcacggcgtccccacgccatcgatgtgtcttagagccggagagtctggtttccgaggacccacagtcgctcctgcacgcccaccccccgcaaaagtgcggccaggagggtcgcatcgagggggcgccgccgggatgtttagaggaacccacccccgtggcaggccaagggccaaggatcgctatccttccctgaacccgggcgctcagctggcccgggtagggggcaggctccggccgccgaaacggggttggctgtagccggtggccggggagatctctagcttgcgcccgagcaccccggggtgtggggccagaggcaggccgaccccggcgtgcacaccgcccgccctgcacccgagcgctctcacccggtcttccctgaagcctgtgtattgcgaccgagcctctttaaagcagtagcggggcccgcggtcacgtgaggccgattcctggaaagttcctggaaagccgcctccgcagcagccgggcggggcgcgagcggagcgctgactggggagggaggcggggagcaagggaggcgcgtcggtctgggaagtcgcgcgcactcgctgctcctgggaccgacgtttaactcttgccaagtctcgtcgcagccgccgcggctggcgggccttgggcttcccctgaagcatgagccctctcgcccgcagccaccctcaccgcgtggcccgcggacagtgcgcgccggggtcccgggtgcacagcctcaggataccccgtgcccgcagctcgggcgcccgcggcaggtaccggtagtgggggaagcccgaaggctccgccccgaggagagttaccggggagggcggcgaggcgcggccgcgtgcgccggggagcggcggacggcctgggcttccgcagctcggagcgccggggaagagagagtccgaaccgcggctctgccccgcggcctagcgttgctgcctgctttctccagccccttctcggcgtctggaagtgtctggagtttcttttttttatttcccctaaactgccattcaaattaataatcctcctaataacctgatctcccgctcctccccaccggcctgcctcccgccctcgctccttcctccctccctccctctctccttcccacctccagggtcgcagccggagggaaacccggcagcagtccgagagtggaggtgtcccagcccgtagggggcgtcgccgcgcggtgggggatggggtcgaggcaatgatcctcgaggcttttgtgtgccctctgcgcacggaactccgaccgccgcctccgagcgcggggctggttgcatccccgggcatctcgttcccaaattaaacgttaacgggggaaacaagggcagacgcccctcctctcccgggcccctcccacctccccttttccccccacccccccgccccatgtccgctgaggaggctgcctggtgcggaggcggcggcggcggccgcggccgaggtcgaggtaagagcgcggcgttggtggtttgcattttccgcagcgctcgcgaccgcccgctcggccccggcctcgcctcggagccccgcgagggctgcgcgctcgggccgattcctcgacagcgcccgcggcggcgagaaccaccgcagccatcctggtccgggagcgaccgccgcggcacccccaaccccgccagagcgggcaccaggaagcggggggaggggagcgaggagcctcccgggcggagatgcggcagctcccgcacctccgcaccccgggttggtgcctcggggccccgcagcgctttagggcggagaaccaagtttgtgtgggtgcttcttcctgggggccctcgggctgcgccaggtgtgagaccggaatgccaatttggggaatctctcctgttc

SEQ ID NO: 652 - DNA, 6000 bp, Homo sapiens
aaaagttgacctgtatggtcattatcactcatcatttcagaaggggagagcctgcttctcttgtagcatttccatcaaatcctgaaaataaaaataatctggttggttctactggacttgtgatactggacaaacctctatgtccaagagctcgagtcattcccattggctcacctgggccacacactcttcgttgagtgcatcccaggatcacagggagtcttgagggtgctgtgtgtggtggtggtggtggtacggagatggcaaactctaaaaggaagagatggtggatacttaaagcctaccttctgcccacaggtgtgtcagacacaatctccaaaggccatcctattgttaccctatcccccaaacaaacactgaaaaactctcctggcaatttggcagtagctcagtgtggagcatttgttaattccagtactagaacgtctgcattgcaaaaccagaaatgtccagttctggtttggcacacagaagagattttcaagccttggcaactcctcagtgcaggcagtggaggaaatgctccagctttgtgaaaatcttctcccttcgctcctcatggagaataaccgttcatcactgcagccatgaatctgccacactgaatagatatggtctgaaaatctaggaacaaatggaatcactttggaaacctgtaaattttaaagccgaaagggcgctccagggaaccaactacatgaagttctctggaagccacaggatgggaggtttggtgggggtggaggtgaccattgaattttacataggcaaatgtaagacaatcttatccatagacagaaaaatccaaactcaccgagagtaaaaggatgacagttgaaataacagctaattgttattaagtatttgctaagttccaaagcacttttcatagattagctcaattaattctcacaacagccctgtaaggtagggaccatgatcatctccagaagaggctaaataaattgccaaagatcacatatgtagcaagtggtggcagagtgaggattcatacctggacagcttaactttaaagccatggtgctaatgcattcattcattcatccatccattcattcatccatccattcattcaatgattatattggatgcctactacatgctaagaactatgttcaaggtgctgaactacagctgtgaacaatgcaagtacaaatacatgaagcagagttggggagaaagtaagctggagaaataagacataaactaggttagatggtgaacatgattaaggaaaaaactagagcagggaggaaagagaaatgtgcagggggaaggtcaattctgagtgagccaacaggcaaggtctcactaagaaagcggcattaaataaagatttgaggaagtgagggagtaaaccttgcagctatctaaaaggagagcatgagaggtagaggagacagcaaatacaaagaccctgaagcaggggcaaggctaatgagttctagaattagcaaggagtccagtgtaacttgaacagagtgatcaaagaacagagcaggaggaaatgaggtcagagaggtaaacaggctggagtgcagtggcaccgtctcggctcactgcaacctccacctcccgggttcaagcgattctcctgcctcagtctccctagtagctgggattacaggcatgcaccaccacacccggctaatttttgtatttttagtaaagacggtgtttcaccatgttggccaggctggtcttgaactcctgacctcaagtgatccacccgcctcaacctcccaaagtgctgggattacaggcgtgagccaccgcgcccggccaggattcttttaatcaagtatgatgcagccatcagggttggagcattctaggaagagggaacagcatgcaccaaggcaacaggaaagcacataaaaaaggagttgctggaagattcatttcaacccactatcaagtaaatattaaacttactgtataaaaatgttagggccaggaggggtggctcacgcctgtaaacccggcactttgagaggccgaggcaggaggatcggttgaacccaggagttcgagaccagcctgaccaacagggcgaaaccccgtctctactaaaaatacaaaaactagccgggcgtggtggtgggcgcctgtaatcccagcttctcgggaggctgaggcaggagaattgcttgaacctgggaggcggaggttgcagtgagctgagatcacgccctgcactccagcctgggcgacagagggagacttggtcatgctccctccccgccctccgtcagttttaggaataaatacctttttatttaagctaaagtgtgggtacacccttcctctaggattctccatcaaggaataagaagccatattaggacaatttagagggcagttaaccctagtagacatagtggttcttaaaaggcttggggcctcagactgtacacaggcttcacatggaatctgatttgttcctttatcccagtccctcacccagaacccgaatctagcccttcatgttataaaaagggccagaggtccaaagagggtaagtgccttgtgcaaaattattcaactactttgtagaggattttaactagggttcagttagctccgcccacactataaaaggctctttctaaaaaacgaaacatgattaagggcacacggctccagcgttaacaaagctctttgttagctgggaaatgcccccctccccgactcatctgcttatcatctgcatagaattatgtactcaaaagcaggaaaattattgagaaaaccattggtccccggctgcagaccccaaggttgggagctggttcccgtttcctcccagagccggcagggggggcaccaggcaaagtttgcaagacgcgcctccctcccacccctcccccttcctcgcccaacttcccatagccgcggcctcaactaaaagtggccattgacctttcaagctttcgagcagtgatgcaatagaatagtatttcaaagaaaaatgcttatcgaaattttggatccggttttcccgtgattgttaagggtttcttttaaaaagtaggtcacatttcaagtaggtcatatttcgggggcgggtgcgcagacaaggagatgagtttccactaaggccagggggcctccaacggggttggaggtgagaatcccaggtagggtagaggtgccgagatccttccgaatcccagccctggggcgtcagccctgcagggaatggcagagacactctccggactgagggaaccgaggccagtcaccaagccccttccgggcgcgcaggtaagggcgcccccttagcagccggcgcaggtgacccgggcgggccgccgggtctaccggagacgttggagcagaggggaggaggaagggaggagccgggtgggtgcgggtgacaaggagccggagcgccagggggaggggactaaggacggccggcgccgcttaaggaggcgctgctctcccgctcgctgccttccaggacctgatcaaggggaccgcctccggtccccggccgtgggcaccgggacgagcacggcgtccccacgccatcgatgtgtcttagagccggagagtctggtttccgaggacccacagtcgctcctgcacgcccaccccccgcaaaagtgcggccaggagggtcgcatcgagggggcgccgccgggatgtttagaggaacccacccccgtggcaggccaagggccaaggatcgctatccttccctgaacccgggcgctcagctggcccgggtagggggcaggctccggccgccgaaacggggttggctgtagccggtggccggggagatctctagcttgcgcccgagcaccccggggtgtggggccagaggcaggccgaccccggcgtgcacaccgcccgccctgcacccgagcgctctcacccggtcttccctgaagcctgtgtattgcgaccgagcctctttaaagcagtagcggggcccgcggtcacgtgaggccgattcctggaaagttcctggaaagccgcctccgcagcagccgggcggggcgcgagcggagcgctgactggggagggaggcggggagcaagggaggcgcgtcggtctgggaagtcgcgcgcactcgctgctcctgggaccgacgtttaactcttgccaagtctcgtcgcagccgccgcggctggcgggccttgggcttcccctgaagcatgagccctctcgcccgcagccaccctcaccgcgtggcccgcggacagtgcgcgccggggtcccgggtgcacagcctcaggataccccgtgcccgcagctcgggcgcccgcggcaggtaccggtagtgggggaagcccgaaggctccgccccgaggagagttaccggggagggcggcgaggcgcggccgcgtgcgccggggagcggcggacggcctgggcttccgcagctcggagcgccggggaagagagagtccgaaccgcggctctgccccgcggcctagcgttgctgcctgctttctccagccccttctcggcgtctggaagtgtctggagtttcttttttttatttcccctaaactgccattcaaattaataatcctcctaataacctgatctcccgctcctccccaccggcctgcctcccgccctcgctccttcctccctccctccctctctccttcccacctccagggtcgcagccggagggaaacccggcagcagtccgagagtggaggtgtcccagcccgtagggggcgtcgccgcgcggtgggggatggggtcgaggcaatgatcctcgaggcttttgtgtgccctctgcgcacggaactccgaccgccgcctccgagcgcggggctggttgcatccccgggcatctcgttcccaaattaaacgttaacgggggaaacaagggcagacgcccctcctctcccgggcccctcccacctccccttttccccccacccccccgccccatgtccgctgaggaggctgcctggtgcggaggcggcggcggcggccgcggccgaggtcgaggtaagagcgcggcgttggtggtttgcattttccgcagcgctcgcgaccgcccgctcggccccggcctcgcctcggagccccgcgagggctgcgcgctcgggccgattcctcgacagcgcccgcggcggcgagaaccaccgcagccatcctggtccgggagcgaccgccgcggcacccccaaccccgccagagcgggcaccaggaagcggggggaggggagcgaggagcctcccgggcggagatgcggcagctcccgcacctccgcaccccgggttggtgcctcggggccccgcagcgctttagggcggagaaccaagtttgtgtgggtgcttcttcctgggggccctcgggctgcgccaggtgtgagaccggaatgccaatttggggaatctctcctgttctttcctttttaattttttctacttgtccttgacaagggcctattcccactggatctgcaggtgactatttgctcttcctaggtcgccagtctttgatttcagctagtgaccctgggcgggaagacaccctgttcaccctcctcctgacctccgccccccacctcttcagccaactttatcttggatctctgctctctttatcttttctctagagctgggccagggcgctaactggaagcttggggttaaatggtgcaggaacgtagaggcggaggagtccctgggattttccacgtctatttccccacccccaccccagccgcaggggtccagtttggactgacccaacctcccgctttctctttgtaggcgatcagtgggtgaccgcggctgcgagggactttgtcatccgtcctccaggatctggggagaaagagccccatcccttctctctctgccaccatttcggacaccccgcagggactcgttttgggattcgcactgacttcaaggaaggacgcgaacccttctctgaccccagctcgggcggccacctgtctttgccgcggtgacc

SEQ ID NO: 653 - DNA, 6000 bp, Homo sapiens
atccagtaagcaggttttattacaatttataactgaattttctcattcacacagggtccacctttatggtgacacaccacaggattgtagctatgcaggaaaattttaaagccataaaataaataatgtctggactctagaaaagatggtacatttataacagttatgcagactaacatagcaaaaaataagtggccacaaaactttgtatttttctttagtattatgcctactcaacttgtaaaagactggccatgtcataatgtttgtagtttctaaaccatgtttttggaaacacagaggacatcagtgttatgcctattcaaattataaaagacccggccacttgacaatgcctgtagtttctaaaccatgctttccaaattgcaaagggggcaggtacagcccataactttacagaatggcaagtaatgttctaccttttgttgaataattggcttatttcacttgacgtaagtttttatggcaatcctctattaccatgaaagtgtacgttctctagaactcaataagtgcaacttgtagaaatcaggttttttttatttaatacattctaatcaaatagtaacagcagtaaataaacactttgaaaaacaggcaggtatccccctgtatctggaagaaaattaagtcaaagtattctacacagtagaagggagacaactgtttatgtccatggttagacaattcaaggacaacttggatatttctaaagccatttccaaaaaatcaatggcaacaggttgggacacagctatttcaaagggtagaatgcctatacctacattggtttttattaacggggattgagttgcacctgtatagcatgatattcttgtctttagctttaaaggaaaagagaaagtcttttccatttgcaccagtttgaaatatttctgaaataaggctcccatagaatggattactacagtactcattcacatgagagttcctacatgtagtaaaaagacaaatacaggacttcatggtcactttttttggttgatttggttaattgcataaaatgggataaatactcacatacatcatctgtttaacaaaactcctaggtacatcagaatgcaaaatataaaatgcccaagagactctgatcagcaggcatatcaaattgcagtgaggcctgtgtcagcttggttccttcccacttcttcagtattcctatgaggagttctttctctcctactggagcctggacctttgacataatggaaaagaacctaagaaggcaaggcattctgataaaacgcgacttcagcctttacatgcgacattttatttttaatctaaaaggatcaacaggtcttggtcagccttaggaagggaagcatcactcaggtaaaagtatctggaggaactttaaacacctagctacctcttcaagctgttaaatttaaattagattagcttcagctgttcttagaaagcattccatatagttatccagagcactcaagttttggttctcttttacatagctgcattcggagatactctatgtgagacatgtttaaaaaaagagaaacatttatacctggaatttatattcttccaagtaatcttttagtcttgttggtaaaggcagtccccagatggcaccggtacatttgttaatggtgagcctacagagatgctgcagagatggtgctgacgtgtagagcggtttggtcagataaaggtgaacagtgccgttccggggggcttctggacctgtccgcttatccttgcacatctgaacatagtagtcgatcagatgaaccacactgtcaaattgtttaagcttggatttgacacatatgatagagtccaatctgaattttccgtcttggtattcgattcgaagattagttggtccagctgatgttttaacagatattgttagtaggtagtctgaatgcgagctatctctaatcaagaaagttccttctggtgcctcttttaatttctctttggcttcattaacagtcatacttccccagtaccatcctggggtttttgttcaaaaagaaaaagaaaagagggtaaaacagttattataagaattcttagaacagagcaagtaattggcaataatttttttagctctaaaaaagaaaaaaaaaaaaggtggtgtgtgagcgaaagtttaccgggccaccacaaatactttcagtaggaatttaataaaaatttgggtccattttatgaacacaaacggcgagccagttttctttcttttttaaaaaatcaactttctgaagctcttcttaagattttcttctaatgaaccaaaagaacatctgcagcatgacacactggctgatgaagcatgacacttttaacattatttaagtaaaataaagatttaggtaaattagaaaaaaatcagaagttagaaataaaagccatgccctttaaaaagtggaaaacccaactcctgtaattgaactacagtaaaaacagaagcaacttttttggatggttggtgtgccccccaccaaaaaaaaaaaaaaaaaaaaaaaaagaatctgcaaagcctgctatgaacagccttctatgtagaaagcactgctatgtacttgttgtaaaagcacagctctagtacaatagcttctgttcgctgctttatgactaccttaccagtcactaagaaatgggaattcccaagtgataattactacttcaagtttacaatcttccctaaactcttttgaactttgccctaatccaaacccaatcacaaccatccatctcccctgcattcttgatttcatctgcctgcaccatctccccggcccactctgctttctaagaaggctcagagaccgtccgtatttaagaagtctgaacatttgtgctccccccacccccacaattaccgggatacttgcaatctgccggtgcctccccgggagggaaagcccgtggcccacacggaaagaccggaatcgcaagcgagagaacttttccctctccctccccctgttgctaccaaaatttcaactgtgccacaactgtaagcttttaggatacggatttggaaagccagaatgatttgccagatactttactttttttcttttttcttttttcagatgcctagagacagcgtgccgcgcgaattgcctgactgtacttgaaagcggcagtaccctgggcgcgccgaccatggaagccgcgctcggcgggggcttcgcagcctactctcgacgcccgggcagccgccctcgcggcagtgtcagtccctgaacttggccgccaagatcctgggctgcagccgcagctccgcccgggagccagatgctgctgggcctgcggggcccgcggcaccgacttgctgattgcaccccgtgcaaagggaggcgcccgacgctttccccggccggggttcgagcccgggagcctaaccctgagcagctgcggaaaacagtaaatcttccagcgtgctaagaagctatttccaagaagctcttcccgcgctctgcgctccgccaggcctgagtccctggagaaccactttccttacgcattcccaaggacccaggaccctgcgagcgtgctctccgcggtcccttggaagcaagggacgtatttccatcttattctttgcttcccacctcgaccccgcttcctagctgcttccttggggaggcgctccctcccgcacgcgtcgcggccgatcggctccctacctgtctgaccgagctcccgcagggccttcgccagacgcgccgcctgcggggatggctcctccgccgaccccgcggtcccccactggctccgcgtcccttccccgccattcccggagggctcaaggcaccgcagggtcatgagagaagggtcaccgcggcaaagacaggtggccgcccgagctggggtcagagaagggttcgcgtccttccttgaagtcagtgcgaatcccaaaacgagtccctgcggggtgtccgaaatggtggcagagagagaagggatggggctctttctccccagatcctggaggacggatgacaaagtccctcgcagccgcggtcacccactgatcgcctacaaagagaaagcgggaggttgggtcagtccaaactggacccctgcggctggggtgggggtggggaaatagacgtggaaaatcccagggactcctccgcctctacgttcctgcaccatttaaccccaagcttccagttagcgccctggcccagctctagagaaaagataaagagagcagagatccaagataaagttggctgaagaggtggggggcggaggtcaggaggagggtgaacagggtgtcttcccgcccagggtcactagctgaaatcaaagactggcgacctaggaagagcaaatagtcacctgcagatccagtgggaataggcccttgtcaaggacaagtagaaaaaattaaaaaggaaagaacaggagagattccccaaattggcattccggtctcacacctggcgcagcccgagggcccccaggaagaagcacccacacaaacttggttctccgccctaaagcgctgcggggccccgaggcaccaacccggggtgcggaggtgcgggagctgccgcatctccgcccgggaggctcctcgctcccctccccccgcttcctggtgcccgctctggcggggttgggggtgccgcggcggtcgctcccggaccaggatggctgcggtggttctcgccgccgcgggcgctgtcgaggaatcggcccgagcgcgcagccctcgcggggctccgaggcgaggccggggccgagcgggcggtcgcgagcgctgcggaaaatgcaaaccaccaacgccgcgctcttacctcgacctcggccgcggccgccgccgccgcctccgcaccaggcagcctcctcagcggacatggggcgggggggtggggggaaaaggggaggtgggaggggcccgggagaggaggggcgtctgcccttgtttcccccgttaacgtttaatttgggaacgagatgcccggggatgcaaccagccccgcgctcggaggcggcggtcggagttccgtgcgcagagggcacacaaaagcctcgaggatcattgcctcgaccccatcccccaccgcgcggcgacgccccctacgggctgggacacctccactctcggactgctgccgggtttccctccggctgcgaccctggaggtgggaaggagagagggagggagggaggaaggagcgagggcgggaggcaggccggtggggaggagcgggagatcaggttattaggaggattattaatttgaatggcagtttaggggaaataaaaaaaagaaactccagacacttccagacgccgagaaggggctggagaaagcaggcagcaacgctaggccgcggggcagagccgcggttcggactctctcttccccggcgctccgagctgcggaagcccaggccgtccgccgctccccggcgcacgcggccgcgcctcgccgccctccccggtaactctcctcggggcggagccttcgggcttcccccactaccggtacctgccgcgggcgcccgagctgcgggcacggggtatcctgaggctgtgcacccgggaccccggcgcgcactgtccgcgggccacgcggtgagggtggctgcgggcgagagggctcatgcttcaggggaagcccaaggcccgccagccgcggcggctgcgacgagacttggcaagagttaaacgtcggtcccaggagcagcgagtgcgcgcgacttcccagaccgacgcgcctcccttgctccccgcctccctccccagtcagcgctccgctcgcgccccgcccggctgctgcggaggcggctttccaggaactttccaggaatcggcctcacgtgaccgcgggccccgctactgctttaaagaggctcggtcgcaatacacaggcttcagggaagaccgggtgagagcgctcgggtgcagggcgggcggtgtgcacgccggggtcggcctgcctctggccccacaccccgg

SEQ ID NO: 654 - DNA, 6000 bp, Homo sapiens
agaggctaaataaattgccaaagatcacatatgtagcaagtggtggcagagtgaggattcatacctggacagcttaactttaaagccatggtgctaatgcattcattcattcatccatccattcattcatccatccattcattcaatgattatattggatgcctactacatgctaagaactatgttcaaggtgctgaactacagctgtgaacaatgcaagtacaaatacatgaagcagagttggggagaaagtaagctggagaaataagacataaactaggttagatggtgaacatgattaaggaaaaaactagagcagggaggaaagagaaatgtgcagggggaaggtcaattctgagtgagccaacaggcaaggtctcactaagaaagcggcattaaataaagatttgaggaagtgagggagtaaaccttgcagctatctaaaaggagagcatgagaggtagaggagacagcaaatacaaagaccctgaagcaggggcaaggctaatgagttctagaattagcaaggagtccagtgtaacttgaacagagtgatcaaagaacagagcaggaggaaatgaggtcagagaggtaaacaggctggagtgcagtggcaccgtctcggctcactgcaacctccacctcccgggttcaagcgattctcctgcctcagtctccctagtagctgggattacaggcatgcaccaccacacccggctaatttttgtatttttagtaaagacggtgtttcaccatgttggccaggctggtcttgaactcctgacctcaagtgatccacccgcctcaacctcccaaagtgctgggattacaggcgtgagccaccgcgcccggccaggattcttttaatcaagtatgatgcagccatcagggttggagcattctaggaagagggaacagcatgcaccaaggcaacaggaaagcacataaaaaaggagttgctggaagattcatttcaacccactatcaagtaaatattaaacttactgtataaaaatgttagggccaggaggggtggctcacgcctgtaaacccggcactttgagaggccgaggcaggaggatcggttgaacccaggagttcgagaccagcctgaccaacagggcgaaaccccgtctctactaaaaatacaaaaactagccgggcgtggtggtgggcgcctgtaatcccagcttctcgggaggctgaggcaggagaattgcttgaacctgggaggcggaggttgcagtgagctgagatcacgccctgcactccagcctgggcgacagagggagacttggtcatgctccctccccgccctccgtcagttttaggaataaatacctttttatttaagctaaagtgtgggtacacccttcctctaggattctccatcaaggaataagaagccatattaggacaatttagagggcagttaaccctagtagacatagtggttcttaaaaggcttggggcctcagactgtacacaggcttcacatggaatctgatttgttcctttatcccagtccctcacccagaacccgaatctagcccttcatgttataaaaagggccagaggtccaaagagggtaagtgccttgtgcaaaattattcaactactttgtagaggattttaactagggttcagttagctccgcccacactataaaaggctctttctaaaaaacgaaacatgattaagggcacacggctccagcgttaacaaagctctttgttagctgggaaatgcccccctccccgactcatctgcttatcatctgcatagaattatgtactcaaaagcaggaaaattattgagaaaaccattggtccccggctgcagaccccaaggttgggagctggttcccgtttcctcccagagccggcagggggggcaccaggcaaagtttgcaagacgcgcctccctcccacccctcccccttcctcgcccaacttcccatagccgcggcctcaactaaaagtggccattgacctttcaagctttcgagcagtgatgcaatagaatagtatttcaaagaaaaatgcttatcgaaattttggatccggttttcccgtgattgttaagggtttcttttaaaaagtaggtcacatttcaagtaggtcatatttcgggggcgggtgcgcagacaaggagatgagtttccactaaggccagggggcctccaacggggttggaggtgagaatcccaggtagggtagaggtgccgagatccttccgaatcccagccctggggcgtcagccctgcagggaatggcagagacactctccggactgagggaaccgaggccagtcaccaagccccttccgggcgcgcaggtaagggcgcccccttagcagccggcgcaggtgacccgggcgggccgccgggtctaccggagacgttggagcagaggggaggaggaagggaggagccgggtgggtgcgggtgacaaggagccggagcgccagggggaggggactaaggacggccggcgccgcttaaggaggcgctgctctcccgctcgctgccttccaggacctgatcaaggggaccgcctccggtccccggccgtgggcaccgggacgagcacggcgtccccacgccatcgatgtgtcttagagccggagagtctggtttccgaggacccacagtcgctcctgcacgcccaccccccgcaaaagtgcggccaggagggtcgcatcgagggggcgccgccgggatgtttagaggaacccacccccgtggcaggccaagggccaaggatcgctatccttccctgaacccgggcgctcagctggcccgggtagggggcaggctccggccgccgaaacggggttggctgtagccggtggccggggagatctctagcttgcgcccgagcaccccggggtgtggggccagaggcaggccgaccccggcgtgcacaccgcccgccctgcacccgagcgctctcacccggtcttccctgaagcctgtgtattgcgaccgagcctctttaaagcagtagcggggcccgcggtcacgtgaggccgattcctggaaagttcctggaaagccgcctccgcagcagccgggcggggcgcgagcggagcgctgactggggagggaggcggggagcaagggaggcgcgtcggtctgggaagtcgcgcgcactcgctgctcctgggaccgacgtttaactcttgccaagtctcgtcgcagccgccgcggctggcgggccttgggcttcccctgaagcatgagccctctcgcccgcagccaccctcaccgcgtggcccgcggacagtgcgcgccggggtcccgggtgcacagcctcaggataccccgtgcccgcagctcgggcgcccgcggcaggtaccggtagtgggggaagcccgaaggctccgccccgaggagagttaccggggagggcggcgaggcgcggccgcgtgcgccggggagcggcggacggcctgggcttccgcagctcggagcgccggggaagagagagtccgaaccgcggctctgccccgcggcctagcgttgctgcctgctttctccagccccttctcggcgtctggaagtgtctggagtttcttttttttatttcccctaaactgccattcaaattaataatcctcctaataacctgatctcccgctcctccccaccggcctgcctcccgccctcgctccttcctccctccctccctctctccttcccacctccagggtcgcagccggagggaaacccggcagcagtccgagagtggaggtgtcccagcccgtagggggcgtcgccgcgcggtgggggatggggtcgaggcaatgatcctcgaggcttttgtgtgccctctgcgcacggaactccgaccgccgcctccgagcgcggggctggttgcatccccgggcatctcgttcccaaattaaacgttaacgggggaaacaagggcagacgcccctcctctcccgggcccctcccacctccccttttccccccacccccccgccccatgtccgctgaggaggctgcctggtgcggaggcggcggcggcggccgcggccgaggtcgaggtaagagcgcggcgttggtggtttgcattttccgcagcgctcgcgaccgcccgctcggccccggcctcgcctcggagccccgcgagggctgcgcgctcgggccgattcctcgacagcgcccgcggcggcgagaaccaccgcagccatcctggtccgggagcgaccgccgcggcacccccaaccccgccagagcgggcaccaggaagcggggggaggggagcgaggagcctcccgggcggagatgcggcagctcccgcacctccgcaccccgggttggtgcctcggggccccgcagcgctttagggcggagaaccaagtttgtgtgggtgcttcttcctgggggccctcgggctgcgccaggtgtgagaccggaatgccaatttggggaatctctcctgttctttcctttttaattttttctacttgtccttgacaagggcctattcccactggatctgcaggtgactatttgctcttcctaggtcgccagtctttgatttcagctagtgaccctgggcgggaagacaccctgttcaccctcctcctgacctccgccccccacctcttcagccaactttatcttggatctctgctctctttatcttttctctagagctgggccagggcgctaactggaagcttggggttaaatggtgcaggaacgtagaggcggaggagtccctgggattttccacgtctatttccccacccccaccccagccgcaggggtccagtttggactgacccaacctcccgctttctctttgtaggcgatcagtgggtgaccgcggctgcgagggactttgtcatccgtcctccaggatctggggagaaagagccccatcccttctctctctgccaccatttcggacaccccgcagggactcgttttgggattcgcactgacttcaaggaaggacgcgaacccttctctgaccccagctcgggcggccacctgtctttgccgcggtgacccttctctcatgaccctgcggtgccttgagccctccgggaatggcggggaagggacgcggagccagtgggggaccgcggggtcggcggaggagccatccccgcaggcggcgcgtctggcgaaggccctgcgggagctcggtcagacaggtagggagccgatcggccgcgacgcgtgcgggagggagcgcctccccaaggaagcagctaggaagcggggtcgaggtgggaagcaaagaataagatggaaatacgtcccttgcttccaagggaccgcggagagcacgctcgcagggtcctgggtccttgggaatgcgtaaggaaagtggttctccagggactcaggcctggcggagcgcagagcgcgggaagagcttcttggaaatagcttcttagcacgctggaagatttactgttttccgcagctgctcagggttaggctcccgggctcgaaccccggccggggaaagcgtcgggcgcctccctttgcacggggtgcaatcagcaagtcggtgccgcgggccccgcaggcccagcagcatctggctcccgggcggagctgcggctgcagcccaggatcttggcggccaagttcagggactgacactgccgcgagggcggctgcccgggcgtcgagagtaggctgcgaagcccccgccgagcgcggcttccatggtcggcgcgcccagggtactgccgctttcaagtacagtcaggcaattcgcgcggcacgctgtctctaggcatctgaaaaaagaaaaaagaaaaaaagtaaagtatctggcaaatcattctggctttccaaatccgtatcctaaaagcttacagttgtggcacagttgaaattttggtagcaacagggggagggagagggaaaagttctctcgcttgcgattccggtctttccgtgtgggccacgggctttccctcccggggaggcaccggcagattgcaagtatcccggtaattgtgggg

SEQ ID NO: 655 - DNA, 6000 bp, Homo sapiens
aaaaggtttttgtaaatagtctcaggatttttacaacaaacagtaattaagatgaaaattagatagcaaagaattgaatgaatcattggaattcataacttagtaaaataataatttattagtgcagatgatattatctacagcatatcttaatcaaaagttatacagaaagaggcaacacttgcatatttcaagtgagttttttttttttttaaggatttacagttacagggatagatgtctgtatttcttttgacaaattcttatttcatctctttttggggagcgttggtccaggaaatagagaccatatgaaattctatgctgcatgtcaagaaaatagctaagataaaatggggactaggaatttggtcccagaagttttcatttctccctgactatgagcaagtcctttatggagttccttttctccttctttctcttctgatcctccctctcttgctccttccctgcctcaagttgtcacacctccttgtcttcttcaatctgtaacaatttctcagtctttcatgaccttgacacttttgaaagtacttgtcagatattttgtagtggcaaaaaccacaattagttttgcaacaacctaacagaatatctctcagtttgagtttgtctgatgttttcttacaaaaacactgaggttctgaattttaaaggagaatattgcaaaggagatatgcctttcttgtcacatcgtattggagcacatgatatctccatgactaattactggggaggtttaaccttgatcacttggttaaggcgatgtttgccaggtttctctactatcacgtttttctttttctttctttctttctatgttttattagttatacaggtgtgacttttttttaaacccaagggtttaagaattgttttatttagtttccaaatttatgggatttatggaagctatccttttgtcaaaatatctaattttattgtataattatagagtacatagtttgtatgctagtgattttcaggaatttattaatgcttctttgtgacctgatttatgatctattttaataaatgtttcaagtatgcttgaaaagactctggttttccccatgacttaatttctacatcaatgaaacaggaagaaccaaaacatccaattccttttatttattttttgaaggctgcaaaaccaaagaccaaaccgaaagagaaaaatactgcatttgttctttttgactctttattttgcaaactcacaatagggatatcttgacacaagtaaacatactaggggagagagaaaaatgaaaatatctgtccttcctgtggattcgttaccactgggtaacaggtgcttaatcctccgtgggggcacaatttcagattacagagggtctggccagagcggaggagtaaccacctgtgataatgattctgatctgtgttccattccttagaagccctctggccttagctaatctgtctaagtaaagttgggtctttggtgtactgccatgaagtatcgctgtatgctgaggtggggtggctgatggcagtgggctagtcgttcagcctagttgcttaagagacagcatggatcctcatctgtatttgccatgggaagaggcattcgatgattaaagacttcacgctgcagatttaagtcagatctttaatggccaccctttcaggttgtttaccataggacgccatgcccctcggctgctgccctgacactctcctgctgtctctggctgcttctcttctgtgaaccctcacggatcctattgttggttccccacctcctcctgggcatcatcatcaaggctcaccttctagcttctaggagatctcaagcctttccaaatatgatgagtcatcaagaaatatgaaactttatatgggcgtttattgcgctatttgtttcaactttcctatatgtttgaaatttatcgaagttcacagttagaaaaaaatccacttgcttttcctctctaaaaaagttagtataggttgatgatcccttacccaacatgcttgggaccagaagtgttttggattttggattttttgggattttggaatatttgcatatacataatgaggtaacttggggatgggacccaagtttaagcacaaaacttatgtttcatatatactttttatacacatagcctgaaagtaactttatacaatattttaaataattttgcacatgaaacaaaggtttgtgttttgactgagacccatcacataaggtcaggtgtggaattttccacttgtggcgtcatgttgacacccaaaaagcttcaggttttggagcatttctttttctttctttttttttttttttctgagacagggtctctctctgtcgcccaggccggagtgcagtggcatgatcttgtttcactgcaaactccacctcccgggttcaattgattctccacctcagcctcctgagaagctgggactacaggcgtacacaagcatggctggctaattttttgtattttttgtagagatgggatttccctatgttgcccaggctggccctgaactcctgggctcaaacgatctgcctgccttggcttcccaaaatgctgagattacaggtgtcagccaccactctcaggcaggttttggaggattctggatttcaaatttttgtattagggatgtttaacctgtaaacttcaacgcttggcagtgttgcaagtggtctgcactttatctggatgaagacaaagaatggtgctaacatttgtctatgaacagatgggaaatcttgctgaggaaaggacaatgattctcaagcaaaaggggaaaagggagagagaaaagagagcacctggaactcaagagtatcaagaatgggaggtggcaacaggatgatttgcaaataatatttggctatcattagaacaataaactcttcactatacaaggttgtatggtgtattggaaagagcatgaaatcagagaaacttcattagacttcaagttttgctctatattagctgtgagattttgcctaagacaattgaccattctgattccacagtctttatacatgcaaatgctaaaacagttgtaacagtggagatacattgtgaaaaatgtgtcattgtgcaaacaaaataggatgtacttatgcaaacctagatggtatagcctactacatacttaggccatatagcatagcctattgctctgaccaccatcatatatgcagtctgtcattgacccaaatattgttatgcaatgcatgactgtaataataataatacttgccacataggtaaaaatactgtcattaacggtgtagtaaaatggtaactggcatagtaatgctgtaaattgaatacaatttttagaaggttttgaggagggaggttcagaactgttctccattgatttgcttaacaaagatattttcattttccaccaaagggtttggctgtgaaaacctttgcagaaataatattttaggagttttttccccctgtactgtcaactgatttttagtaagcatatgactttctgtatgtatcatccaattgatttaaaaatgaatcaatgaatgtatttattgatcgcctgcctcgcttcacaaaggaatgtgaggaaggacacccaatttggcattgctgtgtttctctgtatttgggtcatgcattttttcttgctttccacattgaaaatgtggtggatgcagtagattggctttaagtgtcaggccttccctcatttactatacctttttgtgtttcacaagctggaaagctaccaactacatgctctagacatccttgctgctaatattctgcatgtcagattggtctcaccaatggcacgcagcaaagcaagatttgcaggtgctgttttcttgctgctggcaaatgcagccgtggagaccaccgttttttgcagcactgttccagtgtcctgttaattgttctgtcggtgttgagaggaggttggggaccaggcatggcaacttcctgacgccatcttcctgattgtgggcagcagccacaatcagcaatcttatctaggtagtcatccatggatgttcagctcagcccttctccagcctttccaatgatttcgaatgtccccaattccccctaacgaatccctttctgactaggagtaactagctgagtgctgcaatgaaatcctgactgacagatttgtaaactctttgcgggcaggaacccttgatataaataaatgaccttgcattttaatggagggaagcagaaggataaacaaatgaataagtgaaaagttttaataagatggtgatgcgtaaaaaataaagctggttaatggggagtgcaggaaatgagcgcagctgtcttgccgttttaatcagataggtcagagaaggcttctctactagggtggcttttgacctgcctctctgttaggtcaattgtgtgcgaggccctgatggagttactgtgttaaaatgcaatgattcaattactccattacttagataccctttaagtgacactacggttgtccatctccccgctattgaattgtttacccacagtaagcatggcgggaagagcttcgatccgacccttgaacgctcaataaaaatggcgacagcacttcctgtacttgccctcaacaaagatggtgtcaacacttcctgtttagggttttcgccattaacaaagatggtgcttatggggcaggttccctaacagtcaggattccggttgcagtttttctcccccgccccaaagatacgtggttgcagacgtaagtaacaggaatccatctttctttgaaagtcctgcattgtagcgtctgcgacctgggccctgcgggggcttccccgccccgctaacttgctccgcatttccgatccgggccaaggctgggtggctgcggcagtgccggaggcccgctctccccttggtccgctctttagttcattcccagcactccctctttagcgggtcaagttgccgcagaaaccgcccgtagtcttcctgtttgatacaagggtttcagcggccgaagcagagcctttttaaatagttcccaatgggcgctcacggccaaacgtgaacacctcccctcctcacctgtcacctcctgaactttacagggttgcgagggggagtgtgggatcgggtgtcgcctagccgtggtcgtactgcccgggtgtgtctgaagccccatctgtcatccctgcctgccttcccggtcacttaaccttcactgccttacacacaaccaagccacagcacactggtgcaggggtggtggaactgcaccttcaaatcgtgcctggctactgaccagtgctggggtgtgtgctttttttgaaagaaaaaaatcccataaaatgtcccatgcatgtgcggccacgacagtgttgtgctggagattcggaattcttagtgggaaggaatggagtctgtgactgtatattgtgtaaagtttattgtagactgggcacaaacaacaattttcttaaaggtgatcgtgtagaggacttttagcgaaaagagccttaaattctgaacctgctgatttctgtcctgcactcctattactgatcaggttttgcaaatacttgtgatcaaaaaaaggggacctgcgtccaccttggcagtttctgccttggtggtggtggtgcaggtctgatgagggcaatgtgaaaataaaaccaccatttcttctccagcgtgttaaaattagtgctgctctgtaatcttcagataaaaattgcttgttcagaagggtctctgacccactttttttttttctttttccaaatttctttattgaacgaggaattgagctgggaccccattgtgtgaaaagcagaaacagaaaagatgattcatcttcattgttgttcattatgttaggaaacattcaaaattaacctggcttggcttaatcagtgaattaaataccatgacctggcagtctgctatggtttaaagatgtgcttgacctgaaggaacttacattgcagtg

SEQ ID NO: 656 - DNA, 6000 bp, Homo sapiens
accttctaaaagggaatgatctctaacagcttctgcagctaatacagacttcccacagcctgccattccatgtatggtgacccatcctggttcacctttcaatttggagagcttctgctgaattgcattcaccagcttcttccttgtgacaaaaacaactggcctctgtggtactccaccttcacacaggactgtccttactaaaatccaaaacaaaacaagcatgaatgaatagaactttggaataattactgaagtaataccataaaaaacaaagagcaaagctgaggcttagcctgaaaatttccaagagaagttaagaaaatgtggctagcatattaacttcaattttctgatttctcagacaacagagagcaaagacaaacatatatccttcaagatgactaaagaaaatggaagtttctatctatatctgctttactcacccaattatttcctgacttttcattccctctcatattgaagactgggaaggcaagtgtaaaaggaagaacatttatggaatacctttcaagaacatatatttctaaagattcttattttttcctataaactctataaacacatagaactggaaaataaacaagggcctataaattgtcttattgtctctaaaaattagggtagacatattattatctcagcagtacagttcactgggcaagaagaaaagttgagagttaatgtggatgcaaataaaaaatatttaaattgaaaacatcactacaatttttttaacatgcagttttcagtgaactggtcacactctcttcaaaagattacatctacaataagacaaacccaaagcaattttgatagcaaagtgatagaaggtataatggatacaaaccatacgaagttattccactaactgaatctttaccactggaagaagagacaacaggaatgccatcatggagaagggcagcaagatctttatatccttcatgtagtagagcattgtagaatgatacgtaggaatcattatcttttttaagtatcattttaatcagcatagctgctctttgctgttgagtgggctaaaaaaaattaagtagtttagtatacaacaatgaatatgtatgcaacataaagtagtggagaccagtacaagttctgaaattctaaaaatttttaaggaagtgtggactgcttcagagagctttacctcatttcttactttttcctcttctgatattgttaaaaatccatcactaatcatgtgatccatgatgtaggatgtcttgatgtccttttccagagcttctctatgttgaagcaaacaatttcgagcttttgcatccatcttccctcagatctttctctctctgagctgtcaaccatgagctacagccaaaacaccaaaatatttgtcaggccaataaaaatatgaaaagatacataatctcactaataaacaagaaacgtaaaaagaacaaaactgattttttttccttggcaaaaatttttaaatggacaaaacccagtgcttggaaaggtatgagaaaatggccattcttatgcactaattggggaaactagaaaatgaatgcaatttttctggaaagcagtaagatatggaattgtttaaaataagctttctctctaacccagaaatcccatttctaaggatttacttcaaggagacattcaaatacatatgtaaaaatatccacaaggagaattaatgagtttccaatcaggtgtggtagctcaagcctataatcccagcacattgggaggctagagtaaaaaataaaaagaaaaaagaattaatggaggatgtttcagtgatgaacgcaacctaaatgtccatcattctgaatatagattttaaaaattagggtatgtatataaaatggaatattatgcagccattcaaaattatgacacatatctccatgtattgacatggaaagatgttcataatactgttgctgaaaaaaaaaaaaaaaaaaaacagaaacatgatcccacatacaacacataacgtgggggccgggcgcagtggctcatgcctgtaatcccagcactttgggaggccgaggcgggtggatcacgaggtcaggaattcaagaccagcctggccaagatggtgaaaccctgtctctactaaaaatacaaaattagccagatgcagtggcaggtgcctgtaatcccagctgctcgggaggctgaagcaagagaactgcttgaaccagggcggcagaggttgcagtgagccgagaccactctactgtactccagcctgggcgacagactgagactctgtctcaaaaaaaaaaacaagtgttggtatcatatgaatatatatagacgtttagaagtttattcatcgaaatgtttgagttacttctgagtagcaaaatttgggatttctcccccaccttgtcttattttttttttttttttagtacagacggggtttcaccatgttgaccaggctggtcttgaattcctgacctcaggtgatccacccgccacagcctccgaaagtgctgggattacacttgtgagccccaccatgcccggcctctactgtcaattttttttagcacacattatcatttcttacaataaaatacttccttttttaattaagattgtataaaatagtgattacattgaagtcctaatattaagagacttcttgttttccttatcaaacataagagtgaatagagcattgttactattgagtattagttctcgttcaaggaggatgtcagctctaggtcctccttgctaaacacatttcccacaaagcaacaggaaacactttctgatgtgatttctcagaccaggaggacatgaggaaagaataacagcctttatagtaaaatacttgacgtttctagcaactttatttcaaatataatgcaaatttttccatgggcataaaacccagttcacaatatctgcaagttttcaaaacattaacagaactttacacaatgtatagagtgaaagagtctaaacgggtttatcaattcattcattcaatacacatttgtgcccctccctatatgtcagacaccaagactacagaaaagattgagtcatttgcctgaaataattcacagtctactcaaagaagaaaaagagagagagagtgggaatgtgaatgcccgaagtgcaaaaacagagcacaagtaacttggagctcacagaagggggcaataattatcaagcttcaatgactgtttttgaagtcaccaaatgtagcacttggaaaaacagggacggacgtagggcatttgcctatgcttgtcaaggcttacaaaatgcccagcaggggcacaaaactgataaaaagttattgattcgaatcaaaactctcattttttaaaatgttaataacgtttttgtcctcttaaacataaaatgttccttaatttatagtaatgaaattcgatgtgaaaaaacaagaatgaatgaattttttaggtgatgtccaatagctaagcaaataagacactctggttttctgaaactaatttccaatttcacctagtcctgttaaactaaaatatgcaaatcttaaatacgttttaaaactgcacaacttatctgaactaagtctcaaaaccttttgtaacccacaacaaaatggaaagccaaaactcttcatggacgtaaaacagaaaacagcgcacgtttatccacgaaaaccccaagtttactacttcctcattacagaatttctcttcctggtacaggagcaggatggttatcaaatattccatgtcctcaaattctcagtccctgaaatcagctaccaagcctccaaagaacctggctcggggagaaaagcgaggaggtcaacttacccaagcctttgcgcctaggtcttagtggggagggcggcactgccgggacaagactgggagactccaggccggtggagggaaacggcaacaggagttttccaccgggaattaggggtgcagggctctgtctcgccacatacccttcgccccggggcaggtccgggcctcacaggcgcctcccctggatctctgcagccccggggcgcacgaagacccccagggacctccgaaggttggcgaggtgggcgtccacccaacgcagcctgaccccacagtcccggagcgccgcggtgaggcccggcccacgggccgccctccggtggaccccactactggacacaaagggaggaggtcttcccggcctgtggcgcccttcccccgacggcggctgcaccccggagggagcccggcgctactccggatgccgctgcggcacctcaagtcttcgcgggtcgccgactgcccagactccccacctctggttctatcccttttgcccgggatagagcagtcacgtccactcgctacctcttcttctccgcctctggacagcggagcagtcaaatcccgccggatccacccagcccggacggcgcgcgcccgcttatgcaaataaacacaccccaagccccaaggggcggccaccgctgccgccgcgcactcctgccacggctcatgcccgcgcgcgtagaagtgcccgcctaccccgcggacggggcgtggctaagcctcagggacgcgccgcgttcccaccaatgccggactcgggcagcggcggcgcgcccgacgtggcgcgcgcgaccccttcgtcctgcccctcctcctcgggtcccgtcggcctgcgcgcgcccgggagtttgaatttcctcggatttggagcaatatcgcagtggaaggcgctgtgggttgaggtcgccgcccacctctcctaggggaactatggagctggcagctgaaagactcagtgaagcaacgaggatgccggggagagggaaggggctgggctctgggcggtgccaagtctgtgagggggcgcggtcaccgcccagggttcccacgaacgccaaggcggccacgtcctgctccccctggtgaagaagctgccctgggcttgtcgtcctagggtctccagacatgtctgaggtgaagagccggaagaagtcggggcccaagggagcccctgctgcggagcccgggaagcggagcgagggcgggaagacccccgtggcccggagcagcggaggcgggggctgggcagacccccgaacgtgcctgagcctgctgtcgctggggacgtgcctgggcctggcctggtaagtggacgcgaggctgcctgggccggcctcctgtgggccccctgctgtttgggctcccacccggctcaacatccagccggaggtgatccaacctcccagacctgggccttctgtgcctctgtcttgaccccaaaggaaggaaacagcccagccttgtttttccctttcgggcgtttcttgtatctcatttccccccgtgctggtagcatgcccctatcgctcagaaggagttgaggctaaggtttgggaacgagccatttgttaagagctgcagattcggccacgctttctgaagctcccgctacacgtcagaagcgttcacgttgttataaaccgttacttcctgtccgctgtgccccattccgggacacatctgccccaccctactcaccccataaatacctaatggaaatacttgcaaccttaaaacagatcattatgtttggagaccgaggcaggtggatcacttgaggtcaggagttcgagactagcctggccaacatggtgaaaccccatctctaccaaaaatacgaataatcagccgggcgtggtggcgggcgcctgtagtcccagttcctccggaggctgaggcaggagaatcgcttgaacccgggaggcggaggttgctatgagccaagatcgcatcactgcactccagcctgggcgaccgagcgagactccgtctcaaaaaaaaaaaaaaaagaaaaccatatcattatgctcccaaaggagcaaacgttatagtagcagagcttggaggagtgctcatattttgatcaccgtgcatgcattatgaatttaaggtcttttattaagtaagttacagattgaat

SEQ ID NO: 657 - DNA, 6000 bp, Homo sapiens
ggcgcacacctgtaatcccagctactcgggaggctgaggcaggagaattgcttgaacctgggaggtggaggtggaggttgcggtgagctgagattgcgccactgcactccagcctgggcaacaagagcaaaactccatctctcaaaacaaaacaaaacaaaacaaaacaaaacaaaacaaaaaagcaattaaaaaatctattgaagtttccataagaaacaaaattttcacaatggaaattccagctgattaaatttctatgtaattaaataagcatgagtgacaggttttgtgtcttgtttagtaatttaacaactttttaactttctgaaagtagaatcacctcaattcttacctgaaaaatttctataagagtttagaaaagagctatgcaaactgacactcaagccatatgggtttgggcaacttatctccagtgtttattgtcaagatgacataggatatatcaggcctttttttttttgcagggtctcactttgtcacccaggctgagtgctgtggtgcaatcaaagctcactgaaacctcaaattccggggctcaagcaatcctccaacctcaaccccccaagtagctgggactacaggcatgcgccaccatgcctggctaattttttgtattttttgtagagacagggttttaccatgttgcccaggctggtcttgaactcctgagctcaagatccgcccaactcggcctcccaaagtgctgggattacaggtgggagccaccacacctggcctatcaggcctttatttagcagagagaagatattaaagcaacacacttttaagtttcttatgtattatttctcttttctttccacataggaaatggtctgaagacaatgatatagtgtgattccttgaaatccttcttgggcagtggaagggttcagattttttccctccaacttaatcagatgaagagtgagagtaagcagtatttaagagtacacagacaggcacacatatgcacttgtattttaaccaccagggccgtgtcagtacggaaagcatttaataaagatttgatagaccgacttttagatgctgaattacgtgttttagtggtaaagatctcaatggctttgtcaaaattctagtgagcttttaagtattttaagatgccaaatacttgctttttatctggaaaatgtttacaaatgtcttatggggatatatttttatttcaaaatttactatgaataaatattttgcaataaacagcaaccaaagtacatttgcttcaatttttgcagcaaaagatttcacaagagcaactaagaggcaactatttaaataataattatagaatctgcccataaaaaacacatataatacatacattttagagagacagggtcttgctctgtctctcaggctggagcacagtggtataatcatgggttactgcagctttgacttcccagactcaagctatcttctcacctcagcctcccaagtacctgggactacagcgaatgccaccacacttggctaatatttaaaaatttttcgtagacacggtctcactatgtttcccaggctggtttcaaactcctgacctcaagcaattctctcgcctcagtttcccaaagtgttgggattataggcatgaaccactgggtctggcccccaaaattatttttgatatagcattgtgttatcattttgcaaacatagttcaaattaaatcttcctaatgaatgtaatacattcattacaatgtaatacaggaatcactaacagcaaattcctgatgtgagggaaattttattcccataaagtttagttttctattaaagcttatcccaggatagtaactaactttcccaaaacacaaaaggttacttatttatttaggcgaagtctcgctctgttatccaggctggagtgcagtagcagatcttggctcactgcaacctccacctcccaggttcaagtgattctcctgcctcaacctctgagtagctgggattacaccaggcccagctaatttttgtgtttttggtagagatagggtttcaccatgttggacaggctggtctcaaattcctgacctcaagtgattcgcctgcctcggcctcccaaagtgctaggattacaggcgcaagccactgcacctggcccaaaaaggtttttttttcaatttacttaaaggaggtcaagcattttaaggcataagagccgtttatttaaaacagtaaattcagtacatttattcctttcagatcaaaattaacatattccgtattagtaaaataaataatgctatctgctttttttttttttttttttgagaaggagttttgctccatcctgcaggctggagtgcagtggcacgatttcggctcactgcaacctccgcctcttgggttcaagtgattttcctgcctcagcctcctgagtagctgggattacaggagcatgccaccatgcctggcttttttgtatttttagtagacacagggttttgctatgttggccaggctggtctcaaactcctgacctcaggtgatccacccaccttggcctcccaaagtgctgggagtacaggcatgagccactgccggcaggctgacaattctattgtttttgaagagggcgtttaatcactttattgtgacaaaattttgtttgtttgttttttgagatggagtctcgctctgttgcccaggctggagtgcaatggcacgatcccagctcactgcaacctccacctccccatttcgagtgattctcctgcctcagcctcctgaatagctgggattgcaggtttgtgccaccaagcctggctaatttttgtattttttgtagagacagggtttcaccatgttggccagcctggtcttgaactcctgacctcatgatctgcccacctcggcctcccaaagtgctgggattacaggtgtgagccaccgcgcccagccgtaacaaatcttttaactctgaaaaatacactatttgggatgagtcaccagtaaagtataattccatatgtagtagcataaaaaatgtctagatgtccagggtctcttctaaaattctatcactctggaagattaacaacagtcttactaaataactttacacatgaatgaaaaatggagaaaaattctattaagatgccaatcttattaaaatgaaatgggctattccctcctcccgccagaaaaaaaaaggctgggaaaataaaattcacaagttggtttttttcttttttctttttttacgagttggttttaaggttatttctaatattcatttttcctaatgacaccaatatatcgccatttacctgattttaaaactgcaactggttagttttaagtgaacacaagtgctatgtttttgtagctttaccatattcaatctgtaacttacttaataaaagaccttaaattcataatgcatgcacggtgatcaaaatatgagcactcctccaagctctgctactataacgtttgctcctttgggagcataatgatatggttttcttttttttttttttttgagacggagtctcgctcggtcgcccaggctggagtgcagtgatgcgatcttggctcatagcaacctccgcctcccgggttcaagcgattctcctgcctcagcctccggaggaactgggactacaggcgcccgccaccacgcccggctgattattcgtatttttggtagagatggggtttcaccatgttggccaggctagtctcgaactcctgacctcaagtgatccacctgcctcggtctccaaacataatgatctgttttaaggttgcaagtatttccattaggtatttatggggtgagtagggtggggcagatgtgtcccggaatggggcacagcggacaggaagtaacggtttataacaacgtgaacgcttctgacgtgtagcgggagcttcagaaagcgtggccgaatctgcagctcttaacaaatggctcgttcccaaaccttagcctcaactccttctgagcgataggggcatgctaccagcacggggggaaatgagatacaagaaacgcccgaaagggaaaaacaaggctgggctgtttccttcctttggggtcaagacagaggcacagaaggcccaggtctgggaggttggatcacctccggctggatgttgagccgggtgggagcccaaacagcagggggcccacaggaggccggcccaggcagcctcgcgtccacttaccaggccaggcccaggcacgtccccagcgacagcaggctcaggcacgttcgggggtctgcccagcccccgcctccgctgctccgggccacgggggtcttcccgccctcgctccgcttcccgggctccgcagcaggggctcccttgggccccgacttcttccggctcttcacctcagacatgtctggagaccctaggacgacaagcccagggcagcttcttcaccagggggagcaggacgtggccgccttggcgttcgtgggaaccctgggcggtgaccgcgccccctcacagacttggcaccgcccagagcccagccccttccctctccccggcatcctcgttgcttcactgagtctttcagctgccagctccatagttcccctaggagaggtgggcggcgacctcaacccacagcgccttccactgcgatattgctccaaatccgaggaaattcaaactcccgggcgcgcgcaggccgacgggacccgaggaggaggggcaggacgaaggggtcgcgcgcgccacgtcgggcgcgccgccgctgcccgagtccggcattggtgggaacgcggcgcgtccctgaggcttagccacgccccgtccgcggggtaggcgggcacttctacgcgcgcgggcatgagccgtggcaggagtgcgcggcggcagcggtggccgccccttggggcttggggtgtgtttatttgcataagcgggcgcgcgccgtccgggctgggtggatccggcgggatttgactgctccgctgtccagaggcggagaagaagaggtagcgagtggacgtgactgctctatcccgggcaaaagggatagaaccagaggtggggagtctgggcagtcggcgacccgcgaagacttgaggtgccgcagcggcatccggagtagcgccgggctccctccggggtgcagccgccgtcgggggaagggcgccacaggccgggaagacctcctccctttgtgtccagtagtggggtccaccggagggcggcccgtgggccgggcctcaccgcggcgctccgggactgtggggtcaggctgcgttgggtggacgcccacctcgccaaccttcggaggtccctgggggtcttcgtgcgccccggggctgcagagatccaggggaggcgcctgtgaggcccggacctgccccggggcgaagggtatgtggcgagacagagccctgcacccctaattcccggtggaaaactcctgttgccgtttccctccaccggcctggagtctcccagtcttgtcccggcagtgccgccctccccactaagacctaggcgcaaaggcttgggtaagttgacctcctcgcttttctccccgagccaggttctttggaggcttggtagctgatttcagggactgagaatttgaggacatggaatatttgataaccatcctgctcctgtaccaggaagagaaattctgtaatgaggaagtagtaaacttggggttttcgtggataaacgtgcgctgttttctgttttacgtccatgaagagttttggctttccattttgttgtgggttacaaaaggttttgagacttagttcagataagttgtgcagttttaaaacgtatttaagatttgcatattttagtttaacaggactaggtgaaattggaaattagtttcagaaaaccagagtgtcttatttgcttagctattggacatcacctaaaaaattcattcattcttgttttttcacatcgaatttcattactataaattaaggaacattttatgtttaagaggaca

SEQ ID NO: 658 - DNA, 6000 bp, Homo sapiens
taaaattctatcactctggaagattaacaacagtcttactaaataactttacacatgaatgaaaaatggagaaaaattctattaagatgccaatcttattaaaatgaaatgggctattccctcctcccgccagaaaaaaaaaggctgggaaaataaaattcacaagttggtttttttcttttttctttttttacgagttggttttaaggttatttctaatattcatttttcctaatgacaccaatatatcgccatttacctgattttaaaactgcaactggttagttttaagtgaacacaagtgctatgtttttgtagctttaccatattcaatctgtaacttacttaataaaagaccttaaattcataatgcatgcacggtgatcaaaatatgagcactcctccaagctctgctactataacgtttgctcctttgggagcataatgatatggttttcttttttttttttttttgagacggagtctcgctcggtcgcccaggctggagtgcagtgatgcgatcttggctcatagcaacctccgcctcccgggttcaagcgattctcctgcctcagcctccggaggaactgggactacaggcgcccgccaccacgcccggctgattattcgtatttttggtagagatggggtttcaccatgttggccaggctagtctcgaactcctgacctcaagtgatccacctgcctcggtctccaaacataatgatctgttttaaggttgcaagtatttccattaggtatttatggggtgagtagggtggggcagatgtgtcccggaatggggcacagcggacaggaagtaacggtttataacaacgtgaacgcttctgacgtgtagcgggagcttcagaaagcgtggccgaatctgcagctcttaacaaatggctcgttcccaaaccttagcctcaactccttctgagcgataggggcatgctaccagcacggggggaaatgagatacaagaaacgcccgaaagggaaaaacaaggctgggctgtttccttcctttggggtcaagacagaggcacagaaggcccaggtctgggaggttggatcacctccggctggatgttgagccgggtgggagcccaaacagcagggggcccacaggaggccggcccaggcagcctcgcgtccacttaccaggccaggcccaggcacgtccccagcgacagcaggctcaggcacgttcgggggtctgcccagcccccgcctccgctgctccgggccacgggggtcttcccgccctcgctccgcttcccgggctccgcagcaggggctcccttgggccccgacttcttccggctcttcacctcagacatgtctggagaccctaggacgacaagcccagggcagcttcttcaccagggggagcaggacgtggccgccttggcgttcgtgggaaccctgggcggtgaccgcgccccctcacagacttggcaccgcccagagcccagccccttccctctccccggcatcctcgttgcttcactgagtctttcagctgccagctccatagttcccctaggagaggtgggcggcgacctcaacccacagcgccttccactgcgatattgctccaaatccgaggaaattcaaactcccgggcgcgcgcaggccgacgggacccgaggaggaggggcaggacgaaggggtcgcgcgcgccacgtcgggcgcgccgccgctgcccgagtccggcattggtgggaacgcggcgcgtccctgaggcttagccacgccccgtccgcggggtaggcgggcacttctacgcgcgcgggcatgagccgtggcaggagtgcgcggcggcagcggtggccgccccttggggcttggggtgtgtttatttgcataagcgggcgcgcgccgtccgggctgggtggatccggcgggatttgactgctccgctgtccagaggcggagaagaagaggtagcgagtggacgtgactgctctatcccgggcaaaagggatagaaccagaggtggggagtctgggcagtcggcgacccgcgaagacttgaggtgccgcagcggcatccggagtagcgccgggctccctccggggtgcagccgccgtcgggggaagggcgccacaggccgggaagacctcctccctttgtgtccagtagtggggtccaccggagggcggcccgtgggccgggcctcaccgcggcgctccgggactgtggggtcaggctgcgttgggtggacgcccacctcgccaaccttcggaggtccctgggggtcttcgtgcgccccggggctgcagagatccaggggaggcgcctgtgaggcccggacctgccccggggcgaagggtatgtggcgagacagagccctgcacccctaattcccggtggaaaactcctgttgccgtttccctccaccggcctggagtctcccagtcttgtcccggcagtgccgccctccccactaagacctaggcgcaaaggcttgggtaagttgacctcctcgcttttctccccgagccaggttctttggaggcttggtagctgatttcagggactgagaatttgaggacatggaatatttgataaccatcctgctcctgtaccaggaagagaaattctgtaatgaggaagtagtaaacttggggttttcgtggataaacgtgcgctgttttctgttttacgtccatgaagagttttggctttccattttgttgtgggttacaaaaggttttgagacttagttcagataagttgtgcagttttaaaacgtatttaagatttgcatattttagtttaacaggactaggtgaaattggaaattagtttcagaaaaccagagtgtcttatttgcttagctattggacatcacctaaaaaattcattcattcttgttttttcacatcgaatttcattactataaattaaggaacattttatgtttaagaggacaaaaacgttattaacattttaaaaaatgagagttttgattcgaatcaataactttttatcagttttgtgcccctgctgggcattttgtaagccttgacaagcataggcaaatgccctacgtccgtccctgtttttccaagtgctacatttggtgacttcaaaaacagtcattgaagcttgataattattgcccccttctgtgagctccaagttacttgtgctctgtttttgcacttcgggcattcacattcccactctctctctctttttcttctttgagtagactgtgaattatttcaggcaaatgactcaatcttttctgtagtcttggtgtctgacatatagggaggggcacaaatgtgtattgaatgaatgaattgataaacccgtttagactctttcactctatacattgtgtaaagttctgttaatgttttgaaaacttgcagatattgtgaactgggttttatgcccatggaaaaatttgcattatatttgaaataaagttgctagaaacgtcaagtattttactataaaggctgttattctttcctcatgtcctcctggtctgagaaatcacatcagaaagtgtttcctgttgctttgtgggaaatgtgtttagcaaggaggacctagagctgacatcctccttgaacgagaactaatactcaatagtaacaatgctctattcactcttatgtttgataaggaaaacaagaagtctcttaatattaggacttcaatgtaatcactattttatacaatcttaattaaaaaaggaagtattttattgtaagaaatgataatgtgtgctaaaaaaaattgacagtagaggccgggcatggtggggctcacaagtgtaatcccagcactttcggaggctgtggcgggtggatcacctgaggtcaggaattcaagaccagcctggtcaacatggtgaaaccccgtctgtactaaaaaaaaaaaaaaaataagacaaggtgggggagaaatcccaaattttgctactcagaagtaactcaaacatttcgatgaataaacttctaaacgtctatatatattcatatgataccaacacttgtttttttttttgagacagagtctcagtctgtcgcccaggctggagtacagtagagtggtctcggctcactgcaacctctgccgccctggttcaagcagttctcttgcttcagcctcccgagcagctgggattacaggcacctgccactgcatctggctaattttgtatttttagtagagacagggtttcaccatcttggccaggctggtcttgaattcctgacctcgtgatccacccgcctcggcctcccaaagtgctgggattacaggcatgagccactgcgcccggcccccacgttatgtgttgtatgtgggatcatgtttctgttttttttttttttttttttcagcaacagtattatgaacatctttccatgtcaatacatggagatatgtgtcataattttgaatggctgcataatattccattttatatacataccctaatttttaaaatctatattcagaatgatggacatttaggttgcgttcatcactgaaacatcctccattaattcttttttctttttattttttactctagcctcccaatgtgctgggattataggcttgagctaccacacctgattggaaactcattaattctccttgtggatatttttacatatgtatttgaatgtctccttgaagtaaatccttagaaatgggatttctgggttagagagaaagcttattttaaacaattccatatcttactgctttccagaaaaattgcattcattttctagtttccccaattagtgcataagaatggccattttctcatacctttccaagcactgggttttgtccatttaaaaatttttgccaaggaaaaaaaatcagttttgttctttttacgtttcttgtttattagtgagattatgtatcttttcatatttttattggcctgacaaatattttggtgttttggctgtagctcatggttgacagctcagagagagaaagatctgagggaagatggatgcaaaagctcgaaattgtttgcttcaacatagagaagctctggaaaaggacatcaagacatcctacatcatggatcacatgattagtgatggatttttaacaatatcagaagaggaaaaagtaagaaatgaggtaaagctctctgaagcagtccacacttccttaaaaatttttagaatttcagaacttgtactggtctccactactttatgttgcatacatattcattgttgtatactaaactacttaattttttttagcccactcaacagcaaagagcagctatgctgattaaaatgatacttaaaaaagataatgattcctacgtatcattctacaatgctctactacatgaaggatataaagatcttgctgcccttctccatgatggcattcctgttgtctcttcttccagtggtaaagattcagttagtggaataacttcgtatggtttgtatccattataccttctatcactttgctatcaaaattgctttgggtttgtcttattgtagatgtaatcttttgaagagagtgtgaccagttcactgaaaactgcatgttaaaaaaattgtagtgatgttttcaatttaaatattttttatttgcatccacattaactctcaacttttcttcttgcccagtgaactgtactgctgagataataatatgtctaccctaatttttagagacaataagacaatttataggcccttgtttattttccagttctatgtgtttatagagtttataggaaaaaataagaatctttagaaatatatgttcttgaaaggtattccataaatgttcttccttttacacttgccttcccagtcttcaatatgagagggaatgaaaagtcaggaaataattgggtgagtaaagcagatatagatagaaacttccattttctttagtcatcttgaaggatatatgtttgtctttgctctctgttgtctgagaaatcagaaaattgaagttaatatgctagcca

SEQ ID NO: 659 - DNA, 6000 bp, Homo sapiens
cacaccaccttgagaatcttaaaaagttcatcacattctggctgggcacggtagctcatgcttgtaatcccagcactttgggaggccgaggtgggtggatcacgtgaggtcgggagttcgagaccagcctggccaacatggagacaccccatctctactaaaaatacaaaattagctgggcgtggtggcacatgcctgtaatcccagctacttgggaggctgaggcaggagaattgcttgaacccaggaagcggaggttgtggtgagccaagattgtgccattgcactccagcctgggcaacaagagtgagactccgtctcaaaataaataaataaataaaagttcatcacattctatccataactgccaccgaaaagaactctgttcatctagtgagcatgctatgcctccatgcctttattcaggatgctccacagacaaattactcttctaacctgggaaactgaccaagcagtgcctcctctgtgggtacccaagaagccttctcccttggggaagctgctgctatttcctactttataccctccatgtacaacagcaatcacaaacctttgtgcctggccctttgcaggtcctcaaacatttcttcaagtgacaacagttctgtttcctcattttataaggcaggaaaattaaggcccagaataagtcatttgctcagagaatagaactggagagtcaagatcctcaccatgactattaattcttataaggaattggtcatactcacgtaattgtcgttccccgtcctagagtgtttcctcttgggtcagcaattacagaaaattcattggagtcagactcccagatgtgctgggtatcgttgttgtgttttgaagtgacaataaccttatctgctacaaggaaggcggaatagaaaccgacaccaaactggccaatcaattcagaagttgactggccatcttcctgtgcttcagtcattttgtttaaaaactcgcttgtcccagatttggctatggtaccaaggtttttaaccaactcttctctggtcattcctacaccggtgtctgtgacatgcagcaggttcttctccttatcacactaaatgcaagacaagaaccagatagttgtatttaatatttacattatgccaaacaaatattgaggaactaaccagctttgggtcccatcaattccaatacagaaaactaaactgagatattttcctccacatagttttttatggccttttctgaaagtgtacatcttaaagtaatttatgtatttgagaaagtattaatatcaaatgggcagactggcctaaatgtcaaaggttagaggctgacctaaataaaacaagttacctttgaaggaaaacaattcaagaaaaataaaattttatgtcttgcctatttctttactagaatacaaaacaacttgaatgattcctctatttggaatctgtgatggatcattaatattcttcactcaatattcctggctgtctgccttccagaaacttaggagtactctactttccatttaagaatggctaaggccatgtgactagttttggccaatgagttataaatggccaatgagttgtaaaggagagctctgttttcaggctgagcctttaattataatagtatgagaccctctaagcttgctctgcaccatggcaaccggctacacactccaggtggctgcccacgcctctgtcccagcctgaggatgaggcagagcaaagaccacaggcagcctgtgatcaatgatttaagccaggggctggcaaactttttctgtaaagggccacacagtaaatattttaggctttgggagatttatgttctctgttaaaacaacttgactctgctgttgaagcacagaagcagtcacagataataaacaaatgggcatggctgcattccaataaaactacttagaaaaacaagtcaagttagatttggccatagtttgatgactttcaagccactgagacttggggtttttttgccactgcaaaataatctagcctatcttgactgatagggatcctctacctttaaggattccttttcctttaaaagaaagaaaaactgccttacacttaccttaattttgactgttagttcctcatttccagaaagagcattttcatcagtcagtgatattagccttatcttatctaaagcatcagaagcatttgaaatcagttctctcaggaaaatctaaatggaagccagagggaatacacttagactatcctcaagatgcattaagatattcgattttatgccaaacccatttatttcttctctgtaccttataaaagcactcttattcacctaacagtgatcttcaggtatgcaatgcaagaagtttagtttatgtgactgcccttagactcacaactattatcaggccgtgaacctatttagaggtaaaggaaaaggaaaatgtctgacactccctttcttcccagatatctggtagcaattcttggacatattaggtatttaaaggttgttacctacttacttggatactacattacttttgcagtaaattaagcaaatttaagtaaacaagtatgccaccatacagagataaaatattctaaccacatgttgcttacctctttatttttatacaatgaattgatgataagtttcatcattctgttaacttcggcttggaaggcaaacttttccgacttctctctaagttctcttatttgtgatgcatttaatccatccaactgaatagcttcttcctctctaaggaaatcagttaggtaagcaaatattgcatggcatagttcccttcaaaactagaggaattatgatgaaagcacaggggcctctgaatattgtcttgggggttaaaatggaaacctttataaaatataactgatataccgtctcattatgttagcacagcagtaggctacctttaacattacactggaaatactcggttcttaaaattgccagaaaaaaaaaaatcccaactttcctctactaaaaagcaaagtcatactcatttatgctccacagtgaggacttcaaaactgtcaataagtcccaagaggccaaattttaaaatattgttcaactgacagaaatcccatttttaaacttactcggtgtacacagttaatgaatacaaatccaactgaaagtatcttctataaagtcttacaaagtttatggtgctagtattctgcaatatagttttcaaaggaattcactcagttttcatcactcctagggacaagttaggaggtatgtatgcacacaactcaccgggtatttaaatacagggtgttagactttatctggacctttggagaagagatacataagaagtgaccgtaactcacaaggttcacacggcttatctgtatacgtaagttcaaatgaacacaaacctctgtactacttcatcatccgtccttgatccttctctacttttacccagatcctcttctactgtaccatccacatcaacttcatcgtcagctctgaccgaccctgaagatttaacacgggcaaactcttcaacatcacacttctccaaggaggatgatcaaatagggaagggtaggggttgcaaaattcagttggtaactaagggaggtggggatgaaagagtgcattccctggtttaaataccaaaggtaaagccaagacagaacatctatttaagttcagatgctgaagtctccagtagatcctgaaatacggaggcagtcaccacttctaaacagtgtgtctccgatcatttataaataacgttaagcagactgataccaggcctcttctacacccacacgtgttgcgcgcaggccgagccaaggcctcccaactgatcaagccaaaacttcggccttcgttagcacaggtcagaatgcaaataggatttatgcaacctctggcgaggggaactgaaattgagcccagaggcatgagaagggggagaaatgttaagaaccgaactccagcaaaactgaatcaaacacgctgacactgccattccgctggccccaggcctcacgctcccgaggccagcatctaagaagggacacgggcttgcgaggagtcggagtctggggaattaggggacgggaaagctgggatggccgaaggttgcggtggccgaaaaagtcctccgggcggggaggggggagggactcgcacagctcccgggggagccagagcctcagagaggccccaccccgaggtcgctgagacctccgggcgagatactattagatctgtagggcagttagatgatgttgctctctttttttatttccagaggaagaagagaataaacgtaattcccttgccctctttcgaggaatggtgacgtcccttggcccaccgcaggccccgggatcccccctcccacgttcaacgcccccaggaccttcgagaagcggccgcgtgtgtggaggggggacgtctgctcctccagaatcactcaccgaaggtcagcaggacgcagcagaggcccagcacccacagggccctcatggcgtgcggccggtgagtctcaagtccccttcgatcgcaggagccgcctccaccccccacccctgggttcggatcctcacacctccagccgcgcggtccgcccactacaccgcaagcaggtcgggccgcttttcacccccacttcccgcgggcgggggacgggaaacatgaacccaccaatcgcgccgcaccacgcacccacggcacccaatgaggattcgtgagggggggcggaagtccaccaatcggagctgtccaggtgcggtgaccgatgcccgaagcgtggctccttccgattggtcagggtttgcagcttttctccaatcaaatggctccgcgggcccctcacacgtgggaccgcccctttgcctgggcggccttggcctctaagggaaaacgtccaatgaatgtaagcagagaacacatccatccttttagagaggtcgcggcggaactacttccggatcctagagagcgtttattccgtgaccggggaaacggtagccatggcaacgtgttcttcaccctttcccatctatgcctggggtttcgttggaagtgattccagcacgactttcgcggccagctttctcgtgtggcggcgcttctcggaaagaagaaacacacgagagaggttgcaaatcccctagaaccctttcagatggcgggggggcgggggggtggcggtggtgagaaactacagctcccggcatgcaacgtcctaggggttcactgcattgaatgctgggggtcgtagtctttggtctctgaggaccagctgcgtagttttggccctttctttcacgttcccccagcgtgtctttgccagagccctgccctgcgtcttagatgttacatctcgttctgattacagtagagatatgtgcctattccaggagtctccattgtacacagcttttagaagcgggcctagaaagccttcatgcctcgggcaaggccgcccggttctggggggtcggtctgagtctgggggctccgcctccggctcaagagcacgagtttccgaatccgcctacaagtgcgtcacttgggcagccggagcgttcacctcctctgtgcctttccgcggccggaatccccaggccttccttatctggtttacagaagaacgtggttgggaccttcccgaccaccttagggaaatcgcgagcagcgctgaggccttcgactccccaataaagtacaaaggcggcggtgacctgacggtcgtagaaccctttctgtgaatcaggtggagagcgtggtcgtaaaagcgggtctagcacagaaaaggaaaacccttagtttaacgagtgcaggaggatgcacctgcagatatttgaaagcaaaacctgtggtgctgcacatgagaacgggattgcagctttgtaacttcatagaaataccctgtctgtgctcagaaggacatataaaacaccaggtgtctttcctgtgagggaagtccctcatgctaaa

SEQ ID NO: 660 - DNA, 6000 bp, Homo sapiens
ttatgagtcattgtgcctcctgctttgttctctgtcttggatcactcactccaggggaggccagctgccatgctgtgagcacacttaagcagccctatggagaggtccatgtgatgatgaactgaggccccagccaacagccatgtgaaggagccatcgtggaagcagatcctccagctcctcttgagcctccagatgatttcagcctcagccaacatcttgactgcaagctcatgagagacccgagccagaactacccagttaggtgcttctggattcctgacctacagatactgtatgagagaataaatgtttactattttaagctgctaaatttaggggtagtttgttatacaacaatagataatataagggttatgggacctgacccaagttcttcatttgttttatattcctcaatattttatagttttcttcatgttgcaactatgtctttcttaagtttatttctaagtattttatggtttttgtctctgagtgacactttttaaaattttcacttcgatgtgttttttaaaagattagagcaaaactagtgatttttatatatttatctgatagccaataatttaccagattctcatattattctatactttttttttaaggggctgggcagtggctcaactcgaggcagatcacccacccacttccaagatccaactataagctttttaactgcagcaacttaagtatacgctactagaactggaattaatcattctatacttaaaacaaaaaaccctagggtctcctggatttctgggacatgcaattgtcatcagtaagaaggaatttcaaaataaaggactccaccttttctaaaatttatgccaattacttgatttccttgtcttgttaaatcctcctaaattgtgtgggacattactaaccacagcaagcatctgtgtctggttcttgatttttagtgaaatggcttttagtgttttgttgtttagaatgatagttgctgttagttttctttagttgaggtatacataataaaatttaaccttttaaagtgtacagtttgatgagttttaacaactactgatatcaagatcaagagcatttctgtcaccccaaaaagttccctggtactcctttgcagacattcttttatatctttacttcagtttaaataagatacttgcacttatgctgtaactccattgttaatatttgcacaaggctgggcacaggggctcacgcctgtcatcccagcactttgggaggcggaggcaggcttgagcccaggagtttgagaacagcctggacaacatagggagaccccatctttacaaaagaaaaaaacctcaactttgttcataataagctcaaagtatcccttttttttttcttttttttttttctgagaccgagtctcgctgtcacccaggctggagtgcagtggtgtgatctcggttcactgcaacttccacctccagagttcaagtgattctcctgcctcagcctcctgtgcagctggaattacaggtgcttaccaccacacctggctaacttttgtattttttaagtagagatggtgtttcaccatgttggccaagctggtctcaaactcctgacctcaagtgatcagcccacctcggtctcccaaagtgctgggattacatgccactgtgccaggcctacaaaaaaaagttttaagttagccagatgttggtggcacatgcctgcggtccagctactcaagaggctgagatgggaggactgcttgagcccagaaggtcgggcctacagtaagccatgatcctgccactgcattccagcctgggtaacagagcaagaccctggctcaaaaaaatatatttttaaaatttaaatttaaaaattaaaaaaaacacatttgcacaagttctatataaacagaaaccatatctatattactcacccctgtatttctagcacctagcataattcctggcacatactaggccctcaacatttgctgaaatgatgagttaattaatgaataaaccaatcaaccaaccaaccaattcaccttggagcttggctctattccttaatgttccctgatgccaattgctttcttgccttggtctccccagtctgccttccccctgactccccactgctggactacacctgcctactagagagctatccagtgcccttaactgcattcctttacctattggtttttccttccgagtttaactacaaagtggggtgctatctagtggggttagctttgctcaaggagaagcttaacaacaacaacaacaacagtagctgtttccagcaatacatagagaaaagctaaaattaggacaagggaatccgatacaaaggcaggaaacttaataactatctggagtgttagttctggaggagctaggccaagatgggaactaggtcaaaagtcagaagaggtgaagagaccacagcgagaaacaacaaagctgggaattaactaagcggcctattctctttacaaggtactcagccggagagccaatctttttttttttttttttgagatggaatttttgctcttgttacccaggctggagtgcagtggcgtgatctgggctcactgcaaccgccgcctcctgggttcaagcgattctccagcctcagcctccagagtagctgggattaccggcatgcggcaccacgcccagctaatttttgtgtttttagtagagacggggtttcgccatgttggccaggctggtattgaacccctgacctcaggtgatccgcccacctcagcctcccaaagtgctgggattacaggcatgagccaccgctcccagcccagagagccaatcttcaagggacagagttgatcagacaacggcccgccatcttatgccagcctaccatcttgtgctctgtctgcctcatgaattcccatcatcatctgcagaaacgtctacccacaagcagtggctctgttttgaaggatatgtctctgtctcagttctctccaggtgcagcaccaactccccaccactcactagttaaggtggcatttgcagtttcagaactggttgcttacttattcagaattggaggaaaaggtcaagaagttgagctgtgaaatgcagaaaaaaaagtgaagaaactcagttttctctcaaaacaaaaaataaaggagttaaaatatacaaaaatgcaactgaaatctctgaatgtaattcacactctagtatgctcttttaaaaaaagatgaaagcacagaagcatacataaagcattctttgtaagctactctttgcttactaataacaaatgtaggtaaattgggcagatgtaaataaggcaccaccacaacacgtgagcgccaaccacagagccaagatccgcacactaaatacgggaagttgtaaaagactgtgacagactgtcactaaaaaacttgtcttcaggaattcggacgattatctgaaaagatattcaaagttcaattttgttggaggaagcaataaggaagtggggtgtctatgtcagagacgggcgcgggtatgcgagggggtaacgtatagagtaggttaaagagacgtagaaaatatttccaaaggcacaagtttagcatgagggacttccctcacaggaaagacacctggtgttttatatgtccttctgagcacagacagggtatttctatgaagttacaaagctgcaatcccgttctcatgtgcagcaccacaggttttgctttcaaatatctgcaggtgcatcctcctgcactcgttaaactaagggttttccttttctgtgctagacccgcttttacgaccacgctctccacctgattcacagaaagggttctacgaccgtcaggtcaccgccgcctttgtactttattggggagtcgaaggcctcagcgctgctcgcgatttccctaaggtggtcgggaaggtcccaaccacgttcttctgtaaaccagataaggaaggcctggggattccggccgcggaaaggcacagaggaggtgaacgctccggctgcccaagtgacgcacttgtaggcggattcggaaactcgtgctcttgagccggaggcggagcccccagactcagaccgaccccccagaaccgggcggccttgcccgaggcatgaaggctttctaggcccgcttctaaaagctgtgtacaatggagactcctggaataggcacatatctctactgtaatcagaacgagatgtaacatctaagacgcagggcagggctctggcaaagacacgctgggggaacgtgaaagaaagggccaaaactacgcagctggtcctcagagaccaaagactacgacccccagcattcaatgcagtgaacccctaggacgttgcatgccgggagctgtagtttctcaccaccgccacccccccgcccccccgccatctgaaagggttctaggggatttgcaacctctctcgtgtgtttcttctttccgagaagcgccgccacacgagaaagctggccgcgaaagtcgtgctggaatcacttccaacgaaaccccaggcatagatgggaaagggtgaagaacacgttgccatggctaccgtttccccggtcacggaataaacgctctctaggatccggaagtagttccgccgcgacctctctaaaaggatggatgtgttctctgcttacattcattggacgttttcccttagaggccaaggccgcccaggcaaaggggcggtcccacgtgtgaggggcccgcggagccatttgattggagaaaagctgcaaaccctgaccaatcggaaggagccacgcttcgggcatcggtcaccgcacctggacagctccgattggtggacttccgccccccctcacgaatcctcattgggtgccgtgggtgcgtggtgcggcgcgattggtgggttcatgtttcccgtcccccgcccgcgggaagtgggggtgaaaagcggcccgacctgcttgcggtgtagtgggcggaccgcgcggctggaggtgtgaggatccgaacccaggggtggggggtggaggcggctcctgcgatcgaaggggacttgagactcaccggccgcacgccatgagggccctgtgggtgctgggcctctgctgcgtcctgctgaccttcggtgagtgattctggaggagcagacgtcccccctccacacacgcggccgcttctcgaaggtcctgggggcgttgaacgtgggaggggggatcccggggcctgcggtgggccaagggacgtcaccattcctcgaaagagggcaagggaattacgtttattctcttcttcctctggaaataaaaaaagagagcaacatcatctaactgccctacagatctaatagtatctcgcccggaggtctcagcgacctcggggtggggcctctctgaggctctggctcccccgggagctgtgcgagtccctcccccctccccgcccggaggactttttcggccaccgcaaccttcggccatcccagctttcccgtcccctaattccccagactccgactcctcgcaagcccgtgtcccttcttagatgctggcctcgggagcgtgaggcctggggccagcggaatggcagtgtcagcgtgtttgattcagttttgctggagttcggttcttaacatttctcccccttctcatgcctctgggctcaatttcagttcccctcgccagaggttgcataaatcctatttgcattctgacctgtgctaacgaaggccgaagttttggcttgatcagttgggaggccttggctcggcctgcgcgcaacacgtgtgggtgtagaagaggcctggtatcagtctgcttaacgttatttataaatgatcggagacacactgtttagaagtggtgactgcctccgtatttcaggatctactggagacttcagcatctgaacttaaatagatgttctgtcttggctttacctttggtatttaaaccagggaatgcactctttcatccccacctcccttagttaccaactgaattttgca

SEQ ID NO: 661 - DNA, 6000 bp, Homo sapiens
ttacttcagtttaaataagatacttgcacttatgctgtaactccattgttaatatttgcacaaggctgggcacaggggctcacgcctgtcatcccagcactttgggaggcggaggcaggcttgagcccaggagtttgagaacagcctggacaacatagggagaccccatctttacaaaagaaaaaaacctcaactttgttcataataagctcaaagtatcccttttttttttcttttttttttttctgagaccgagtctcgctgtcacccaggctggagtgcagtggtgtgatctcggttcactgcaacttccacctccagagttcaagtgattctcctgcctcagcctcctgtgcagctggaattacaggtgcttaccaccacacctggctaacttttgtattttttaagtagagatggtgtttcaccatgttggccaagctggtctcaaactcctgacctcaagtgatcagcccacctcggtctcccaaagtgctgggattacatgccactgtgccaggcctacaaaaaaaagttttaagttagccagatgttggtggcacatgcctgcggtccagctactcaagaggctgagatgggaggactgcttgagcccagaaggtcgggcctacagtaagccatgatcctgccactgcattccagcctgggtaacagagcaagaccctggctcaaaaaaatatatttttaaaatttaaatttaaaaattaaaaaaaacacatttgcacaagttctatataaacagaaaccatatctatattactcacccctgtatttctagcacctagcataattcctggcacatactaggccctcaacatttgctgaaatgatgagttaattaatgaataaaccaatcaaccaaccaaccaattcaccttggagcttggctctattccttaatgttccctgatgccaattgctttcttgccttggtctccccagtctgccttccccctgactccccactgctggactacacctgcctactagagagctatccagtgcccttaactgcattcctttacctattggtttttccttccgagtttaactacaaagtggggtgctatctagtggggttagctttgctcaaggagaagcttaacaacaacaacaacaacagtagctgtttccagcaatacatagagaaaagctaaaattaggacaagggaatccgatacaaaggcaggaaacttaataactatctggagtgttagttctggaggagctaggccaagatgggaactaggtcaaaagtcagaagaggtgaagagaccacagcgagaaacaacaaagctgggaattaactaagcggcctattctctttacaaggtactcagccggagagccaatctttttttttttttttttgagatggaatttttgctcttgttacccaggctggagtgcagtggcgtgatctgggctcactgcaaccgccgcctcctgggttcaagcgattctccagcctcagcctccagagtagctgggattaccggcatgcggcaccacgcccagctaatttttgtgtttttagtagagacggggtttcgccatgttggccaggctggtattgaacccctgacctcaggtgatccgcccacctcagcctcccaaagtgctgggattacaggcatgagccaccgctcccagcccagagagccaatcttcaagggacagagttgatcagacaacggcccgccatcttatgccagcctaccatcttgtgctctgtctgcctcatgaattcccatcatcatctgcagaaacgtctacccacaagcagtggctctgttttgaaggatatgtctctgtctcagttctctccaggtgcagcaccaactccccaccactcactagttaaggtggcatttgcagtttcagaactggttgcttacttattcagaattggaggaaaaggtcaagaagttgagctgtgaaatgcagaaaaaaaagtgaagaaactcagttttctctcaaaacaaaaaataaaggagttaaaatatacaaaaatgcaactgaaatctctgaatgtaattcacactctagtatgctcttttaaaaaaagatgaaagcacagaagcatacataaagcattctttgtaagctactctttgcttactaataacaaatgtaggtaaattgggcagatgtaaataaggcaccaccacaacacgtgagcgccaaccacagagccaagatccgcacactaaatacgggaagttgtaaaagactgtgacagactgtcactaaaaaacttgtcttcaggaattcggacgattatctgaaaagatattcaaagttcaattttgttggaggaagcaataaggaagtggggtgtctatgtcagagacgggcgcgggtatgcgagggggtaacgtatagagtaggttaaagagacgtagaaaatatttccaaaggcacaagtttagcatgagggacttccctcacaggaaagacacctggtgttttatatgtccttctgagcacagacagggtatttctatgaagttacaaagctgcaatcccgttctcatgtgcagcaccacaggttttgctttcaaatatctgcaggtgcatcctcctgcactcgttaaactaagggttttccttttctgtgctagacccgcttttacgaccacgctctccacctgattcacagaaagggttctacgaccgtcaggtcaccgccgcctttgtactttattggggagtcgaaggcctcagcgctgctcgcgatttccctaaggtggtcgggaaggtcccaaccacgttcttctgtaaaccagataaggaaggcctggggattccggccgcggaaaggcacagaggaggtgaacgctccggctgcccaagtgacgcacttgtaggcggattcggaaactcgtgctcttgagccggaggcggagcccccagactcagaccgaccccccagaaccgggcggccttgcccgaggcatgaaggctttctaggcccgcttctaaaagctgtgtacaatggagactcctggaataggcacatatctctactgtaatcagaacgagatgtaacatctaagacgcagggcagggctctggcaaagacacgctgggggaacgtgaaagaaagggccaaaactacgcagctggtcctcagagaccaaagactacgacccccagcattcaatgcagtgaacccctaggacgttgcatgccgggagctgtagtttctcaccaccgccacccccccgcccccccgccatctgaaagggttctaggggatttgcaacctctctcgtgtgtttcttctttccgagaagcgccgccacacgagaaagctggccgcgaaagtcgtgctggaatcacttccaacgaaaccccaggcatagatgggaaagggtgaagaacacgttgccatggctaccgtttccccggtcacggaataaacgctctctaggatccggaagtagttccgccgcgacctctctaaaaggatggatgtgttctctgcttacattcattggacgttttcccttagaggccaaggccgcccaggcaaaggggcggtcccacgtgtgaggggcccgcggagccatttgattggagaaaagctgcaaaccctgaccaatcggaaggagccacgcttcgggcatcggtcaccgcacctggacagctccgattggtggacttccgccccccctcacgaatcctcattgggtgccgtgggtgcgtggtgcggcgcgattggtgggttcatgtttcccgtcccccgcccgcgggaagtgggggtgaaaagcggcccgacctgcttgcggtgtagtgggcggaccgcgcggctggaggtgtgaggatccgaacccaggggtggggggtggaggcggctcctgcgatcgaaggggacttgagactcaccggccgcacgccatgagggccctgtgggtgctgggcctctgctgcgtcctgctgaccttcggtgagtgattctggaggagcagacgtcccccctccacacacgcggccgcttctcgaaggtcctgggggcgttgaacgtgggaggggggatcccggggcctgcggtgggccaagggacgtcaccattcctcgaaagagggcaagggaattacgtttattctcttcttcctctggaaataaaaaaagagagcaacatcatctaactgccctacagatctaatagtatctcgcccggaggtctcagcgacctcggggtggggcctctctgaggctctggctcccccgggagctgtgcgagtccctcccccctccccgcccggaggactttttcggccaccgcaaccttcggccatcccagctttcccgtcccctaattccccagactccgactcctcgcaagcccgtgtcccttcttagatgctggcctcgggagcgtgaggcctggggccagcggaatggcagtgtcagcgtgtttgattcagttttgctggagttcggttcttaacatttctcccccttctcatgcctctgggctcaatttcagttcccctcgccagaggttgcataaatcctatttgcattctgacctgtgctaacgaaggccgaagttttggcttgatcagttgggaggccttggctcggcctgcgcgcaacacgtgtgggtgtagaagaggcctggtatcagtctgcttaacgttatttataaatgatcggagacacactgtttagaagtggtgactgcctccgtatttcaggatctactggagacttcagcatctgaacttaaatagatgttctgtcttggctttacctttggtatttaaaccagggaatgcactctttcatccccacctcccttagttaccaactgaattttgcaacccctacccttccctatttgatcatcctccttggagaagtgtgatgttgaagagtttgcccgtgttaaatcttcagggtcggtcagagctgacgatgaagttgatgtggatggtacagtagaagaggatctgggtaaaagtagagaaggatcaaggacggatgatgaagtagtacagaggtttgtgttcatttgaacttacgtatacagataagccgtgtgaaccttgtgagttacggtcacttcttatgtatctcttctccaaaggtccagataaagtctaacaccctgtatttaaatacccggtgagttgtgtgcatacatacctcctaacttgtccctaggagtgatgaaaactgagtgaattcctttgaaaactatattgcagaatactagcaccataaactttgtaagactttatagaagatactttcagttggatttgtattcattaactgtgtacaccgagtaagtttaaaaatgggatttctgtcagttgaacaatattttaaaatttggcctcttgggacttattgacagttttgaagtcctcactgtggagcataaatgagtatgactttgctttttagtagaggaaagttgggatttttttttttctggcaattttaagaaccgagtatttccagtgtaatgttaaaggtagcctactgctgtgctaacataatgagacggtatatcagttatattttataaaggtttccattttaacccccaagacaatattcagaggcccctgtgctttcatcataattcctctagttttgaagggaactatgccatgcaatatttgcttacctaactgatttccttagagaggaagaagctattcagttggatggattaaatgcatcacaaataagagaacttagagagaagtcggaaaagtttgccttccaagccgaagttaacagaatgatgaaacttatcatcaattcattgtataaaaataaagaggtaagcaacatgtggttagaatattttatctctgtatggtggcatacttgtttacttaaatttgcttaatttactgcaaaagtaatgtagtatccaagtaagtaggtaacaacctttaaatacctaatatgtccaagaattgctaccagatatctgggaagaaagggagtgtc

SEQ ID NO: 662 - DNA, 6000 bp, Homo sapiens
agcacctagcataattcctggcacatactaggccctcaacatttgctgaaatgatgagttaattaatgaataaaccaatcaaccaaccaaccaattcaccttggagcttggctctattccttaatgttccctgatgccaattgctttcttgccttggtctccccagtctgccttccccctgactccccactgctggactacacctgcctactagagagctatccagtgcccttaactgcattcctttacctattggtttttccttccgagtttaactacaaagtggggtgctatctagtggggttagctttgctcaaggagaagcttaacaacaacaacaacaacagtagctgtttccagcaatacatagagaaaagctaaaattaggacaagggaatccgatacaaaggcaggaaacttaataactatctggagtgttagttctggaggagctaggccaagatgggaactaggtcaaaagtcagaagaggtgaagagaccacagcgagaaacaacaaagctgggaattaactaagcggcctattctctttacaaggtactcagccggagagccaatctttttttttttttttttgagatggaatttttgctcttgttacccaggctggagtgcagtggcgtgatctgggctcactgcaaccgccgcctcctgggttcaagcgattctccagcctcagcctccagagtagctgggattaccggcatgcggcaccacgcccagctaatttttgtgtttttagtagagacggggtttcgccatgttggccaggctggtattgaacccctgacctcaggtgatccgcccacctcagcctcccaaagtgctgggattacaggcatgagccaccgctcccagcccagagagccaatcttcaagggacagagttgatcagacaacggcccgccatcttatgccagcctaccatcttgtgctctgtctgcctcatgaattcccatcatcatctgcagaaacgtctacccacaagcagtggctctgttttgaaggatatgtctctgtctcagttctctccaggtgcagcaccaactccccaccactcactagttaaggtggcatttgcagtttcagaactggttgcttacttattcagaattggaggaaaaggtcaagaagttgagctgtgaaatgcagaaaaaaaagtgaagaaactcagttttctctcaaaacaaaaaataaaggagttaaaatatacaaaaatgcaactgaaatctctgaatgtaattcacactctagtatgctcttttaaaaaaagatgaaagcacagaagcatacataaagcattctttgtaagctactctttgcttactaataacaaatgtaggtaaattgggcagatgtaaataaggcaccaccacaacacgtgagcgccaaccacagagccaagatccgcacactaaatacgggaagttgtaaaagactgtgacagactgtcactaaaaaacttgtcttcaggaattcggacgattatctgaaaagatattcaaagttcaattttgttggaggaagcaataaggaagtggggtgtctatgtcagagacgggcgcgggtatgcgagggggtaacgtatagagtaggttaaagagacgtagaaaatatttccaaaggcacaagtttagcatgagggacttccctcacaggaaagacacctggtgttttatatgtccttctgagcacagacagggtatttctatgaagttacaaagctgcaatcccgttctcatgtgcagcaccacaggttttgctttcaaatatctgcaggtgcatcctcctgcactcgttaaactaagggttttccttttctgtgctagacccgcttttacgaccacgctctccacctgattcacagaaagggttctacgaccgtcaggtcaccgccgcctttgtactttattggggagtcgaaggcctcagcgctgctcgcgatttccctaaggtggtcgggaaggtcccaaccacgttcttctgtaaaccagataaggaaggcctggggattccggccgcggaaaggcacagaggaggtgaacgctccggctgcccaagtgacgcacttgtaggcggattcggaaactcgtgctcttgagccggaggcggagcccccagactcagaccgaccccccagaaccgggcggccttgcccgaggcatgaaggctttctaggcccgcttctaaaagctgtgtacaatggagactcctggaataggcacatatctctactgtaatcagaacgagatgtaacatctaagacgcagggcagggctctggcaaagacacgctgggggaacgtgaaagaaagggccaaaactacgcagctggtcctcagagaccaaagactacgacccccagcattcaatgcagtgaacccctaggacgttgcatgccgggagctgtagtttctcaccaccgccacccccccgcccccccgccatctgaaagggttctaggggatttgcaacctctctcgtgtgtttcttctttccgagaagcgccgccacacgagaaagctggccgcgaaagtcgtgctggaatcacttccaacgaaaccccaggcatagatgggaaagggtgaagaacacgttgccatggctaccgtttccccggtcacggaataaacgctctctaggatccggaagtagttccgccgcgacctctctaaaaggatggatgtgttctctgcttacattcattggacgttttcccttagaggccaaggccgcccaggcaaaggggcggtcccacgtgtgaggggcccgcggagccatttgattggagaaaagctgcaaaccctgaccaatcggaaggagccacgcttcgggcatcggtcaccgcacctggacagctccgattggtggacttccgccccccctcacgaatcctcattgggtgccgtgggtgcgtggtgcggcgcgattggtgggttcatgtttcccgtcccccgcccgcgggaagtgggggtgaaaagcggcccgacctgcttgcggtgtagtgggcggaccgcgcggctggaggtgtgaggatccgaacccaggggtggggggtggaggcggctcctgcgatcgaaggggacttgagactcaccggccgcacgccatgagggccctgtgggtgctgggcctctgctgcgtcctgctgaccttcggtgagtgattctggaggagcagacgtcccccctccacacacgcggccgcttctcgaaggtcctgggggcgttgaacgtgggaggggggatcccggggcctgcggtgggccaagggacgtcaccattcctcgaaagagggcaagggaattacgtttattctcttcttcctctggaaataaaaaaagagagcaacatcatctaactgccctacagatctaatagtatctcgcccggaggtctcagcgacctcggggtggggcctctctgaggctctggctcccccgggagctgtgcgagtccctcccccctccccgcccggaggactttttcggccaccgcaaccttcggccatcccagctttcccgtcccctaattccccagactccgactcctcgcaagcccgtgtcccttcttagatgctggcctcgggagcgtgaggcctggggccagcggaatggcagtgtcagcgtgtttgattcagttttgctggagttcggttcttaacatttctcccccttctcatgcctctgggctcaatttcagttcccctcgccagaggttgcataaatcctatttgcattctgacctgtgctaacgaaggccgaagttttggcttgatcagttgggaggccttggctcggcctgcgcgcaacacgtgtgggtgtagaagaggcctggtatcagtctgcttaacgttatttataaatgatcggagacacactgtttagaagtggtgactgcctccgtatttcaggatctactggagacttcagcatctgaacttaaatagatgttctgtcttggctttacctttggtatttaaaccagggaatgcactctttcatccccacctcccttagttaccaactgaattttgcaacccctacccttccctatttgatcatcctccttggagaagtgtgatgttgaagagtttgcccgtgttaaatcttcagggtcggtcagagctgacgatgaagttgatgtggatggtacagtagaagaggatctgggtaaaagtagagaaggatcaaggacggatgatgaagtagtacagaggtttgtgttcatttgaacttacgtatacagataagccgtgtgaaccttgtgagttacggtcacttcttatgtatctcttctccaaaggtccagataaagtctaacaccctgtatttaaatacccggtgagttgtgtgcatacatacctcctaacttgtccctaggagtgatgaaaactgagtgaattcctttgaaaactatattgcagaatactagcaccataaactttgtaagactttatagaagatactttcagttggatttgtattcattaactgtgtacaccgagtaagtttaaaaatgggatttctgtcagttgaacaatattttaaaatttggcctcttgggacttattgacagttttgaagtcctcactgtggagcataaatgagtatgactttgctttttagtagaggaaagttgggatttttttttttctggcaattttaagaaccgagtatttccagtgtaatgttaaaggtagcctactgctgtgctaacataatgagacggtatatcagttatattttataaaggtttccattttaacccccaagacaatattcagaggcccctgtgctttcatcataattcctctagttttgaagggaactatgccatgcaatatttgcttacctaactgatttccttagagaggaagaagctattcagttggatggattaaatgcatcacaaataagagaacttagagagaagtcggaaaagtttgccttccaagccgaagttaacagaatgatgaaacttatcatcaattcattgtataaaaataaagaggtaagcaacatgtggttagaatattttatctctgtatggtggcatacttgtttacttaaatttgcttaatttactgcaaaagtaatgtagtatccaagtaagtaggtaacaacctttaaatacctaatatgtccaagaattgctaccagatatctgggaagaaagggagtgtcagacattttccttttcctttacctctaaataggttcacggcctgataatagttgtgagtctaagggcagtcacataaactaaacttcttgcattgcatacctgaagatcactgttaggtgaataagagtgcttttataaggtacagagaagaaataaatgggtttggcataaaatcgaatatcttaatgcatcttgaggatagtctaagtgtattccctctggcttccatttagattttcctgagagaactgatttcaaatgcttctgatgctttagataagataaggctaatatcactgactgatgaaaatgctctttctggaaatgaggaactaacagtcaaaattaaggtaagtgtaaggcagtttttctttcttttaaaggaaaaggaatccttaaaggtagaggatccctatcagtcaagataggctagattattttgcagtggcaaaaaaaccccaagtctcagtggcttgaaagtcatcaaactatggccaaatctaacttgacttgtttttctaagtagttttattggaatgcagccatgcccatttgtttattatctgtgactgcttctgtgcttcaacagcagagtcaagttgttttaacagagaacataaatctcccaaagcctaaaatatttactgtgtggccctttacagaaaaagtttgccagcccctggcttaaatcattgatcacaggctgcctgtggtctttgctctgcctcatcctcaggctgggacagaggcgtgggcagccacctggagtgtgtagccggttgccatggtgcagagc

SEQ ID NO: 663 - DNA, 6000 bp, Homo sapiens
gcgagaaacaacaaagctgggaattaactaagcggcctattctctttacaaggtactcagccggagagccaatctttttttttttttttttgagatggaatttttgctcttgttacccaggctggagtgcagtggcgtgatctgggctcactgcaaccgccgcctcctgggttcaagcgattctccagcctcagcctccagagtagctgggattaccggcatgcggcaccacgcccagctaatttttgtgtttttagtagagacggggtttcgccatgttggccaggctggtattgaacccctgacctcaggtgatccgcccacctcagcctcccaaagtgctgggattacaggcatgagccaccgctcccagcccagagagccaatcttcaagggacagagttgatcagacaacggcccgccatcttatgccagcctaccatcttgtgctctgtctgcctcatgaattcccatcatcatctgcagaaacgtctacccacaagcagtggctctgttttgaaggatatgtctctgtctcagttctctccaggtgcagcaccaactccccaccactcactagttaaggtggcatttgcagtttcagaactggttgcttacttattcagaattggaggaaaaggtcaagaagttgagctgtgaaatgcagaaaaaaaagtgaagaaactcagttttctctcaaaacaaaaaataaaggagttaaaatatacaaaaatgcaactgaaatctctgaatgtaattcacactctagtatgctcttttaaaaaaagatgaaagcacagaagcatacataaagcattctttgtaagctactctttgcttactaataacaaatgtaggtaaattgggcagatgtaaataaggcaccaccacaacacgtgagcgccaaccacagagccaagatccgcacactaaatacgggaagttgtaaaagactgtgacagactgtcactaaaaaacttgtcttcaggaattcggacgattatctgaaaagatattcaaagttcaattttgttggaggaagcaataaggaagtggggtgtctatgtcagagacgggcgcgggtatgcgagggggtaacgtatagagtaggttaaagagacgtagaaaatatttccaaaggcacaagtttagcatgagggacttccctcacaggaaagacacctggtgttttatatgtccttctgagcacagacagggtatttctatgaagttacaaagctgcaatcccgttctcatgtgcagcaccacaggttttgctttcaaatatctgcaggtgcatcctcctgcactcgttaaactaagggttttccttttctgtgctagacccgcttttacgaccacgctctccacctgattcacagaaagggttctacgaccgtcaggtcaccgccgcctttgtactttattggggagtcgaaggcctcagcgctgctcgcgatttccctaaggtggtcgggaaggtcccaaccacgttcttctgtaaaccagataaggaaggcctggggattccggccgcggaaaggcacagaggaggtgaacgctccggctgcccaagtgacgcacttgtaggcggattcggaaactcgtgctcttgagccggaggcggagcccccagactcagaccgaccccccagaaccgggcggccttgcccgaggcatgaaggctttctaggcccgcttctaaaagctgtgtacaatggagactcctggaataggcacatatctctactgtaatcagaacgagatgtaacatctaagacgcagggcagggctctggcaaagacacgctgggggaacgtgaaagaaagggccaaaactacgcagctggtcctcagagaccaaagactacgacccccagcattcaatgcagtgaacccctaggacgttgcatgccgggagctgtagtttctcaccaccgccacccccccgcccccccgccatctgaaagggttctaggggatttgcaacctctctcgtgtgtttcttctttccgagaagcgccgccacacgagaaagctggccgcgaaagtcgtgctggaatcacttccaacgaaaccccaggcatagatgggaaagggtgaagaacacgttgccatggctaccgtttccccggtcacggaataaacgctctctaggatccggaagtagttccgccgcgacctctctaaaaggatggatgtgttctctgcttacattcattggacgttttcccttagaggccaaggccgcccaggcaaaggggcggtcccacgtgtgaggggcccgcggagccatttgattggagaaaagctgcaaaccctgaccaatcggaaggagccacgcttcgggcatcggtcaccgcacctggacagctccgattggtggacttccgccccccctcacgaatcctcattgggtgccgtgggtgcgtggtgcggcgcgattggtgggttcatgtttcccgtcccccgcccgcgggaagtgggggtgaaaagcggcccgacctgcttgcggtgtagtgggcggaccgcgcggctggaggtgtgaggatccgaacccaggggtggggggtggaggcggctcctgcgatcgaaggggacttgagactcaccggccgcacgccatgagggccctgtgggtgctgggcctctgctgcgtcctgctgaccttcggtgagtgattctggaggagcagacgtcccccctccacacacgcggccgcttctcgaaggtcctgggggcgttgaacgtgggaggggggatcccggggcctgcggtgggccaagggacgtcaccattcctcgaaagagggcaagggaattacgtttattctcttcttcctctggaaataaaaaaagagagcaacatcatctaactgccctacagatctaatagtatctcgcccggaggtctcagcgacctcggggtggggcctctctgaggctctggctcccccgggagctgtgcgagtccctcccccctccccgcccggaggactttttcggccaccgcaaccttcggccatcccagctttcccgtcccctaattccccagactccgactcctcgcaagcccgtgtcccttcttagatgctggcctcgggagcgtgaggcctggggccagcggaatggcagtgtcagcgtgtttgattcagttttgctggagttcggttcttaacatttctcccccttctcatgcctctgggctcaatttcagttcccctcgccagaggttgcataaatcctatttgcattctgacctgtgctaacgaaggccgaagttttggcttgatcagttgggaggccttggctcggcctgcgcgcaacacgtgtgggtgtagaagaggcctggtatcagtctgcttaacgttatttataaatgatcggagacacactgtttagaagtggtgactgcctccgtatttcaggatctactggagacttcagcatctgaacttaaatagatgttctgtcttggctttacctttggtatttaaaccagggaatgcactctttcatccccacctcccttagttaccaactgaattttgcaacccctacccttccctatttgatcatcctccttggagaagtgtgatgttgaagagtttgcccgtgttaaatcttcagggtcggtcagagctgacgatgaagttgatgtggatggtacagtagaagaggatctgggtaaaagtagagaaggatcaaggacggatgatgaagtagtacagaggtttgtgttcatttgaacttacgtatacagataagccgtgtgaaccttgtgagttacggtcacttcttatgtatctcttctccaaaggtccagataaagtctaacaccctgtatttaaatacccggtgagttgtgtgcatacatacctcctaacttgtccctaggagtgatgaaaactgagtgaattcctttgaaaactatattgcagaatactagcaccataaactttgtaagactttatagaagatactttcagttggatttgtattcattaactgtgtacaccgagtaagtttaaaaatgggatttctgtcagttgaacaatattttaaaatttggcctcttgggacttattgacagttttgaagtcctcactgtggagcataaatgagtatgactttgctttttagtagaggaaagttgggatttttttttttctggcaattttaagaaccgagtatttccagtgtaatgttaaaggtagcctactgctgtgctaacataatgagacggtatatcagttatattttataaaggtttccattttaacccccaagacaatattcagaggcccctgtgctttcatcataattcctctagttttgaagggaactatgccatgcaatatttgcttacctaactgatttccttagagaggaagaagctattcagttggatggattaaatgcatcacaaataagagaacttagagagaagtcggaaaagtttgccttccaagccgaagttaacagaatgatgaaacttatcatcaattcattgtataaaaataaagaggtaagcaacatgtggttagaatattttatctctgtatggtggcatacttgtttacttaaatttgcttaatttactgcaaaagtaatgtagtatccaagtaagtaggtaacaacctttaaatacctaatatgtccaagaattgctaccagatatctgggaagaaagggagtgtcagacattttccttttcctttacctctaaataggttcacggcctgataatagttgtgagtctaagggcagtcacataaactaaacttcttgcattgcatacctgaagatcactgttaggtgaataagagtgcttttataaggtacagagaagaaataaatgggtttggcataaaatcgaatatcttaatgcatcttgaggatagtctaagtgtattccctctggcttccatttagattttcctgagagaactgatttcaaatgcttctgatgctttagataagataaggctaatatcactgactgatgaaaatgctctttctggaaatgaggaactaacagtcaaaattaaggtaagtgtaaggcagtttttctttcttttaaaggaaaaggaatccttaaaggtagaggatccctatcagtcaagataggctagattattttgcagtggcaaaaaaaccccaagtctcagtggcttgaaagtcatcaaactatggccaaatctaacttgacttgtttttctaagtagttttattggaatgcagccatgcccatttgtttattatctgtgactgcttctgtgcttcaacagcagagtcaagttgttttaacagagaacataaatctcccaaagcctaaaatatttactgtgtggccctttacagaaaaagtttgccagcccctggcttaaatcattgatcacaggctgcctgtggtctttgctctgcctcatcctcaggctgggacagaggcgtgggcagccacctggagtgtgtagccggttgccatggtgcagagcaagcttagagggtctcatactattataattaaaggctcagcctgaaaacagagctctcctttacaactcattggccatttataactcattggccaaaactagtcacatggccttagccattcttaaatggaaagtagagtactcctaagtttctggaaggcagacagccaggaatattgagtgaagaatattaatgatccatcacagattccaaatagaggaatcattcaagttgttttgtattctagtaaagaaataggcaagacataaaattttatttttcttgaattgttttccttcaaaggtaacttgttttatttaggtcagcctctaacctttgacatttaggccagtctgcccatttgatattaatactttctcaaatacataaattactttaagatgtacactttcagaaaaggccataaaaaactatgtggaggaaaatatctcagtttagttttctgtattggaattgatgggacccaaagctggttagttcct

SEQ ID NO: 664 - DNA, 6000 bp, Homo sapiens
ctgattcacagaaagggttctacgaccgtcaggtcaccgccgcctttgtactttattggggagtcgaaggcctcagcgctgctcgcgatttccctaaggtggtcgggaaggtcccaaccacgttcttctgtaaaccagataaggaaggcctggggattccggccgcggaaaggcacagaggaggtgaacgctccggctgcccaagtgacgcacttgtaggcggattcggaaactcgtgctcttgagccggaggcggagcccccagactcagaccgaccccccagaaccgggcggccttgcccgaggcatgaaggctttctaggcccgcttctaaaagctgtgtacaatggagactcctggaataggcacatatctctactgtaatcagaacgagatgtaacatctaagacgcagggcagggctctggcaaagacacgctgggggaacgtgaaagaaagggccaaaactacgcagctggtcctcagagaccaaagactacgacccccagcattcaatgcagtgaacccctaggacgttgcatgccgggagctgtagtttctcaccaccgccacccccccgcccccccgccatctgaaagggttctaggggatttgcaacctctctcgtgtgtttcttctttccgagaagcgccgccacacgagaaagctggccgcgaaagtcgtgctggaatcacttccaacgaaaccccaggcatagatgggaaagggtgaagaacacgttgccatggctaccgtttccccggtcacggaataaacgctctctaggatccggaagtagttccgccgcgacctctctaaaaggatggatgtgttctctgcttacattcattggacgttttcccttagaggccaaggccgcccaggcaaaggggcggtcccacgtgtgaggggcccgcggagccatttgattggagaaaagctgcaaaccctgaccaatcggaaggagccacgcttcgggcatcggtcaccgcacctggacagctccgattggtggacttccgccccccctcacgaatcctcattgggtgccgtgggtgcgtggtgcggcgcgattggtgggttcatgtttcccgtcccccgcccgcgggaagtgggggtgaaaagcggcccgacctgcttgcggtgtagtgggcggaccgcgcggctggaggtgtgaggatccgaacccaggggtggggggtggaggcggctcctgcgatcgaaggggacttgagactcaccggccgcacgccatgagggccctgtgggtgctgggcctctgctgcgtcctgctgaccttcggtgagtgattctggaggagcagacgtcccccctccacacacgcggccgcttctcgaaggtcctgggggcgttgaacgtgggaggggggatcccggggcctgcggtgggccaagggacgtcaccattcctcgaaagagggcaagggaattacgtttattctcttcttcctctggaaataaaaaaagagagcaacatcatctaactgccctacagatctaatagtatctcgcccggaggtctcagcgacctcggggtggggcctctctgaggctctggctcccccgggagctgtgcgagtccctcccccctccccgcccggaggactttttcggccaccgcaaccttcggccatcccagctttcccgtcccctaattccccagactccgactcctcgcaagcccgtgtcccttcttagatgctggcctcgggagcgtgaggcctggggccagcggaatggcagtgtcagcgtgtttgattcagttttgctggagttcggttcttaacatttctcccccttctcatgcctctgggctcaatttcagttcccctcgccagaggttgcataaatcctatttgcattctgacctgtgctaacgaaggccgaagttttggcttgatcagttgggaggccttggctcggcctgcgcgcaacacgtgtgggtgtagaagaggcctggtatcagtctgcttaacgttatttataaatgatcggagacacactgtttagaagtggtgactgcctccgtatttcaggatctactggagacttcagcatctgaacttaaatagatgttctgtcttggctttacctttggtatttaaaccagggaatgcactctttcatccccacctcccttagttaccaactgaattttgcaacccctacccttccctatttgatcatcctccttggagaagtgtgatgttgaagagtttgcccgtgttaaatcttcagggtcggtcagagctgacgatgaagttgatgtggatggtacagtagaagaggatctgggtaaaagtagagaaggatcaaggacggatgatgaagtagtacagaggtttgtgttcatttgaacttacgtatacagataagccgtgtgaaccttgtgagttacggtcacttcttatgtatctcttctccaaaggtccagataaagtctaacaccctgtatttaaatacccggtgagttgtgtgcatacatacctcctaacttgtccctaggagtgatgaaaactgagtgaattcctttgaaaactatattgcagaatactagcaccataaactttgtaagactttatagaagatactttcagttggatttgtattcattaactgtgtacaccgagtaagtttaaaaatgggatttctgtcagttgaacaatattttaaaatttggcctcttgggacttattgacagttttgaagtcctcactgtggagcataaatgagtatgactttgctttttagtagaggaaagttgggatttttttttttctggcaattttaagaaccgagtatttccagtgtaatgttaaaggtagcctactgctgtgctaacataatgagacggtatatcagttatattttataaaggtttccattttaacccccaagacaatattcagaggcccctgtgctttcatcataattcctctagttttgaagggaactatgccatgcaatatttgcttacctaactgatttccttagagaggaagaagctattcagttggatggattaaatgcatcacaaataagagaacttagagagaagtcggaaaagtttgccttccaagccgaagttaacagaatgatgaaacttatcatcaattcattgtataaaaataaagaggtaagcaacatgtggttagaatattttatctctgtatggtggcatacttgtttacttaaatttgcttaatttactgcaaaagtaatgtagtatccaagtaagtaggtaacaacctttaaatacctaatatgtccaagaattgctaccagatatctgggaagaaagggagtgtcagacattttccttttcctttacctctaaataggttcacggcctgataatagttgtgagtctaagggcagtcacataaactaaacttcttgcattgcatacctgaagatcactgttaggtgaataagagtgcttttataaggtacagagaagaaataaatgggtttggcataaaatcgaatatcttaatgcatcttgaggatagtctaagtgtattccctctggcttccatttagattttcctgagagaactgatttcaaatgcttctgatgctttagataagataaggctaatatcactgactgatgaaaatgctctttctggaaatgaggaactaacagtcaaaattaaggtaagtgtaaggcagtttttctttcttttaaaggaaaaggaatccttaaaggtagaggatccctatcagtcaagataggctagattattttgcagtggcaaaaaaaccccaagtctcagtggcttgaaagtcatcaaactatggccaaatctaacttgacttgtttttctaagtagttttattggaatgcagccatgcccatttgtttattatctgtgactgcttctgtgcttcaacagcagagtcaagttgttttaacagagaacataaatctcccaaagcctaaaatatttactgtgtggccctttacagaaaaagtttgccagcccctggcttaaatcattgatcacaggctgcctgtggtctttgctctgcctcatcctcaggctgggacagaggcgtgggcagccacctggagtgtgtagccggttgccatggtgcagagcaagcttagagggtctcatactattataattaaaggctcagcctgaaaacagagctctcctttacaactcattggccatttataactcattggccaaaactagtcacatggccttagccattcttaaatggaaagtagagtactcctaagtttctggaaggcagacagccaggaatattgagtgaagaatattaatgatccatcacagattccaaatagaggaatcattcaagttgttttgtattctagtaaagaaataggcaagacataaaattttatttttcttgaattgttttccttcaaaggtaacttgttttatttaggtcagcctctaacctttgacatttaggccagtctgcccatttgatattaatactttctcaaatacataaattactttaagatgtacactttcagaaaaggccataaaaaactatgtggaggaaaatatctcagtttagttttctgtattggaattgatgggacccaaagctggttagttcctcaatatttgtttggcataatgtaaatattaaatacaactatctggttcttgtcttgcatttagtgtgataaggagaagaacctgctgcatgtcacagacaccggtgtaggaatgaccagagaagagttggttaaaaaccttggtaccatagccaaatctgggacaagcgagtttttaaacaaaatgactgaagcacaggaagatggccagtcaacttctgaattgattggccagtttggtgtcggtttctattccgccttccttgtagcagataaggttattgtcacttcaaaacacaacaacgatacccagcacatctgggagtctgactccaatgaattttctgtaattgctgacccaagaggaaacactctaggacggggaacgacaattacgtgagtatgaccaattccttataagaattaatagtcatggtgaggatcttgactctccagttctattctctgagcaaatgacttattctgggccttaattttcctgccttataaaatgaggaaacagaactgttgtcacttgaagaaatgtttgaggacctgcaaagggccaggcacaaaggtttgtgattgctgttgtacatggagggtataaagtaggaaatagcagcagcttccccaagggagaaggcttcttgggtacccacagaggaggcactgcttggtcagtttcccaggttagaagagtaatttgtctgtggagcatcctgaataaaggcatggaggcatagcatgctcactagatgaacagagttcttttcggtggcagttatggatagaatgtgatgaacttttatttatttatttattttgagacggagtctcactcttgttgcccaggctggagtgcaatggcacaatcttggctcaccacaacctccgcttcctgggttcaagcaattctcctgcctcagcctcccaagtagctgggattacaggcatgtgccaccacgcccagctaattttgtatttttagtagagatggggtgtctccatgttggccaggctggtctcgaactcccgacctcacgtgatccacccacctcggcctcccaaagtgctgggattacaagcatgagctaccgtgcccagccagaatgtgatgaactttttaagattctcaaggtggtgtggaggatgtgaggagtggacaaggggagactctttgggggaaatattcctcttgaaaatattcaagatgagtggtagcaaccagggctggggctggcttgtagagataaagggcttaaagaaagttcatgaaagttgtgaaagctgtggaataaaatacgtcatttaaggatagttacaagtttttaaatttgaattaagatccctcttaagccagtaactgttg

SEQ ID NO: 665 - DNA, 6000 bp, Homo sapiens
aatcgaatatcttaatgcatcttgaggatagtctaagtgtattccctctggcttccatttagattttcctgagagaactgatttcaaatgcttctgatgctttagataagataaggctaatatcactgactgatgaaaatgctctttctggaaatgaggaactaacagtcaaaattaaggtaagtgtaaggcagtttttctttcttttaaaggaaaaggaatccttaaaggtagaggatccctatcagtcaagataggctagattattttgcagtggcaaaaaaaccccaagtctcagtggcttgaaagtcatcaaactatggccaaatctaacttgacttgtttttctaagtagttttattggaatgcagccatgcccatttgtttattatctgtgactgcttctgtgcttcaacagcagagtcaagttgttttaacagagaacataaatctcccaaagcctaaaatatttactgtgtggccctttacagaaaaagtttgccagcccctggcttaaatcattgatcacaggctgcctgtggtctttgctctgcctcatcctcaggctgggacagaggcgtgggcagccacctggagtgtgtagccggttgccatggtgcagagcaagcttagagggtctcatactattataattaaaggctcagcctgaaaacagagctctcctttacaactcattggccatttataactcattggccaaaactagtcacatggccttagccattcttaaatggaaagtagagtactcctaagtttctggaaggcagacagccaggaatattgagtgaagaatattaatgatccatcacagattccaaatagaggaatcattcaagttgttttgtattctagtaaagaaataggcaagacataaaattttatttttcttgaattgttttccttcaaaggtaacttgttttatttaggtcagcctctaacctttgacatttaggccagtctgcccatttgatattaatactttctcaaatacataaattactttaagatgtacactttcagaaaaggccataaaaaactatgtggaggaaaatatctcagtttagttttctgtattggaattgatgggacccaaagctggttagttcctcaatatttgtttggcataatgtaaatattaaatacaactatctggttcttgtcttgcatttagtgtgataaggagaagaacctgctgcatgtcacagacaccggtgtaggaatgaccagagaagagttggttaaaaaccttggtaccatagccaaatctgggacaagcgagtttttaaacaaaatgactgaagcacaggaagatggccagtcaacttctgaattgattggccagtttggtgtcggtttctattccgccttccttgtagcagataaggttattgtcacttcaaaacacaacaacgatacccagcacatctgggagtctgactccaatgaattttctgtaattgctgacccaagaggaaacactctaggacggggaacgacaattacgtgagtatgaccaattccttataagaattaatagtcatggtgaggatcttgactctccagttctattctctgagcaaatgacttattctgggccttaattttcctgccttataaaatgaggaaacagaactgttgtcacttgaagaaatgtttgaggacctgcaaagggccaggcacaaaggtttgtgattgctgttgtacatggagggtataaagtaggaaatagcagcagcttccccaagggagaaggcttcttgggtacccacagaggaggcactgcttggtcagtttcccaggttagaagagtaatttgtctgtggagcatcctgaataaaggcatggaggcatagcatgctcactagatgaacagagttcttttcggtggcagttatggatagaatgtgatgaacttttatttatttatttattttgagacggagtctcactcttgttgcccaggctggagtgcaatggcacaatcttggctcaccacaacctccgcttcctgggttcaagcaattctcctgcctcagcctcccaagtagctgggattacaggcatgtgccaccacgcccagctaattttgtatttttagtagagatggggtgtctccatgttggccaggctggtctcgaactcccgacctcacgtgatccacccacctcggcctcccaaagtgctgggattacaagcatgagctaccgtgcccagccagaatgtgatgaactttttaagattctcaaggtggtgtggaggatgtgaggagtggacaaggggagactctttgggggaaatattcctcttgaaaatattcaagatgagtggtagcaaccagggctggggctggcttgtagagataaagggcttaaagaaagttcatgaaagttgtgaaagctgtggaataaaatacgtcatttaaggatagttacaagtttttaaatttgaattaagatccctcttaagccagtaactgttgtttgtatgggtgagacagagccagtgccctacagtagctctcgttgcttatagcactgtgacgtagacagggcagctttttgcctttttaaaattttaccatcttggagatgaggaaattctatttcagaggtcagttggcttgccaactcctgctaagtgagtaacagaatgtgcccacagcttcaatttttttttcttaattcagttttaagttttcttaacattaagggaaagaagcacatacttatcattgtgaccaactttcttcatcctagaaagtaacatttcctgtttttactgcagcagatgttcttttaatgaagactaattagatgactgcattttagtacttttttaacttgtgttcccaatttaccttcccctgccttcgtcactaacattgatgtctccaggtttcatttggaggcatcactaagagttatgccccagtgccctctctttttaagcactgggctagatgttggagaaggatagggcaatcattcccaaggaaagatagaaagtgatgtcccaagagatgttaatgtcaggttgctaagaagcaggtgaaattatctggatataagctccatgaaggcaaacattttgttggaagctccattcccaaagcttaacacttaattggcagccatttgtatgaataagtgaggttaaacaggacagttccatgcagggaacgatggctgctaacacctatccaggacctagtttccatgaccatgcatatctttttaaaaatttcctttgcccacttcttaaatgttaacatacattttctccaagttaagtttcagcccttttctcattgtccatgtgatctttatgtagtcttatccactgccacggcctcaggttccatctctagttctcaaatttatattcttagcctagatcaggagttagcaaactttttcttaaaagagccagctagtagaaaaaaagataaaagaaaacaacaagaaagaaagagccagctagtaaatatttttagcttgtgagctatatggtctgtcacatgtcccaactctgtttagcttgaaagcaggcatagacaatacataaggatgtgtcccagccaagtgtggtggctcatccctataatcccagcacctcgggaggctgaggtgggaggatcacttgaacccaggagtttgaggtcagcctggacaacataatgggatcccatctccacaaaaataaaaaataaaaaattagcttggcacagtggtgcatgcctgtagtcccagctactcaggaggctgaggtaggaggattgcttgagcctggcaggtcaaggctgcagtgagccatcatcacgcctgggtgacagaggtccaaaaaaaaaaaaaaaaaaaaaagtgtcccaataaaatttctaatgggtgccagctgtacagctatagcttgccagccccttgtctaggtctcactactgggctctgtgttcatgtgtttaattgccttttaaatgcttctacctaagatatctaaccagcagcttctacttgcatccaaaactgaactcttaatccccaaatcactagaacatgtgctctgagaccaggggcctagtcactcactaggctttgtcatatcatggctacttattggccaggtaccactaaactaatgagccttttgagacagggagggaaccatagatagaccatttcccatacttaattgggaacacaagtatcaagatatggactacctactgtgcttaagagtaggttctaggccgggcacagtggctcacacctgtaatccccgcactgcccggtagaattttatataatagtagaaatgttctatatctgcacttttccattttggcgatcaccagccacatgtgactgttgagtacttggaatgtggcagcataactggaactgaactgtacattttatttaaataagtcacatgtgcccagtggctgccattttggatagtgcagatataaatataaaccagattaattttctagcttttttaaggaaaatgttttcattaattaggaatagttatctacaataatcattaggtttctggaataacagtaagagctatgagagtgcatgattccatttctctccagaatatttcagtgctttctcaccttgaaaaatgaaaacaatctattcagacggttgggaatattttaattttctacttaaaactaaggttattctccacttgaggtaatgtagaggagattcttctctttactgtatctacatgtgttacattttagctcacaaacccttgttggtgatggagagttaacatgaataattaggacatcttggattatactgaactgctggctattaccatggtatttaaatgaatttataatcagatcttctaaatgttaggtgtctctaaacatcgaatttttcttgcagccttgtcttaaaagaagaagcatctgattaccttgaattggatacaattaaaaatctcgtcaaaaaatattcacagttcataaactttcctatttatgtatggagcagcaaggtaaatctatattgattaaaaacttatatgtattaccttggcacgtatttaaatattcaacactaaaagaatgaaggcaggccggcgcggtggctcatgcttgtaatccccgcactttgggaggccgagacaggtggatcacctgaggtcaggagttcgagaccagcctggccaacatggcgaaaccctgtctctactaaaaatacaaaaatgttagctgggtgtgtggtagcacacgcctgtaatcccagctactcgggaggctgaagcaggagaattgcttgaacccgggagacggaggttgcagtgagccaagatcgccccactgcactccagcctaggtgacaaagcaagactctgtctcaaaaaaaaaaaaaaagaatgaaggcaaaatgtggtctattagttaaggatactctcagggttttcttacaaaaacctattttttgacctgtaatgttatatcatattctgtagacaaaatcagaattgttaaacaaatgagtttaaccataattctcttatttcaacagactgaaactgttgaggagcccatggaggaagaagaagcagccaaagaagagaaagaagaatctgatgatgaagctgcagtagaggaagaagaagaagaaaagaaaccaaagactaaaaaagtaagtctggtttatctccctgcataagatattgtttaacatgtataggcaaaaccaggaaaacctaagtatgcactggctgatttgaagtcagcttcagttcaggtgctaagtccatggagccagcttttaaaataaggcctttgtttgtatgttgaatacattgtcctgtagaaagttttaagtatcaaacccaggtcatttttatgaagagttttctaacttttatatattgcctaggactggtggcttatatgtttggaattttaaaatcttaaaaagccttctgagtcctcttttgtct

SEQ ID NO: 666 - DNA, 6000 bp, Homo sapiens
gaaaacagagctctcctttacaactcattggccatttataactcattggccaaaactagtcacatggccttagccattcttaaatggaaagtagagtactcctaagtttctggaaggcagacagccaggaatattgagtgaagaatattaatgatccatcacagattccaaatagaggaatcattcaagttgttttgtattctagtaaagaaataggcaagacataaaattttatttttcttgaattgttttccttcaaaggtaacttgttttatttaggtcagcctctaacctttgacatttaggccagtctgcccatttgatattaatactttctcaaatacataaattactttaagatgtacactttcagaaaaggccataaaaaactatgtggaggaaaatatctcagtttagttttctgtattggaattgatgggacccaaagctggttagttcctcaatatttgtttggcataatgtaaatattaaatacaactatctggttcttgtcttgcatttagtgtgataaggagaagaacctgctgcatgtcacagacaccggtgtaggaatgaccagagaagagttggttaaaaaccttggtaccatagccaaatctgggacaagcgagtttttaaacaaaatgactgaagcacaggaagatggccagtcaacttctgaattgattggccagtttggtgtcggtttctattccgccttccttgtagcagataaggttattgtcacttcaaaacacaacaacgatacccagcacatctgggagtctgactccaatgaattttctgtaattgctgacccaagaggaaacactctaggacggggaacgacaattacgtgagtatgaccaattccttataagaattaatagtcatggtgaggatcttgactctccagttctattctctgagcaaatgacttattctgggccttaattttcctgccttataaaatgaggaaacagaactgttgtcacttgaagaaatgtttgaggacctgcaaagggccaggcacaaaggtttgtgattgctgttgtacatggagggtataaagtaggaaatagcagcagcttccccaagggagaaggcttcttgggtacccacagaggaggcactgcttggtcagtttcccaggttagaagagtaatttgtctgtggagcatcctgaataaaggcatggaggcatagcatgctcactagatgaacagagttcttttcggtggcagttatggatagaatgtgatgaacttttatttatttatttattttgagacggagtctcactcttgttgcccaggctggagtgcaatggcacaatcttggctcaccacaacctccgcttcctgggttcaagcaattctcctgcctcagcctcccaagtagctgggattacaggcatgtgccaccacgcccagctaattttgtatttttagtagagatggggtgtctccatgttggccaggctggtctcgaactcccgacctcacgtgatccacccacctcggcctcccaaagtgctgggattacaagcatgagctaccgtgcccagccagaatgtgatgaactttttaagattctcaaggtggtgtggaggatgtgaggagtggacaaggggagactctttgggggaaatattcctcttgaaaatattcaagatgagtggtagcaaccagggctggggctggcttgtagagataaagggcttaaagaaagttcatgaaagttgtgaaagctgtggaataaaatacgtcatttaaggatagttacaagtttttaaatttgaattaagatccctcttaagccagtaactgttgtttgtatgggtgagacagagccagtgccctacagtagctctcgttgcttatagcactgtgacgtagacagggcagctttttgcctttttaaaattttaccatcttggagatgaggaaattctatttcagaggtcagttggcttgccaactcctgctaagtgagtaacagaatgtgcccacagcttcaatttttttttcttaattcagttttaagttttcttaacattaagggaaagaagcacatacttatcattgtgaccaactttcttcatcctagaaagtaacatttcctgtttttactgcagcagatgttcttttaatgaagactaattagatgactgcattttagtacttttttaacttgtgttcccaatttaccttcccctgccttcgtcactaacattgatgtctccaggtttcatttggaggcatcactaagagttatgccccagtgccctctctttttaagcactgggctagatgttggagaaggatagggcaatcattcccaaggaaagatagaaagtgatgtcccaagagatgttaatgtcaggttgctaagaagcaggtgaaattatctggatataagctccatgaaggcaaacattttgttggaagctccattcccaaagcttaacacttaattggcagccatttgtatgaataagtgaggttaaacaggacagttccatgcagggaacgatggctgctaacacctatccaggacctagtttccatgaccatgcatatctttttaaaaatttcctttgcccacttcttaaatgttaacatacattttctccaagttaagtttcagcccttttctcattgtccatgtgatctttatgtagtcttatccactgccacggcctcaggttccatctctagttctcaaatttatattcttagcctagatcaggagttagcaaactttttcttaaaagagccagctagtagaaaaaaagataaaagaaaacaacaagaaagaaagagccagctagtaaatatttttagcttgtgagctatatggtctgtcacatgtcccaactctgtttagcttgaaagcaggcatagacaatacataaggatgtgtcccagccaagtgtggtggctcatccctataatcccagcacctcgggaggctgaggtgggaggatcacttgaacccaggagtttgaggtcagcctggacaacataatgggatcccatctccacaaaaataaaaaataaaaaattagcttggcacagtggtgcatgcctgtagtcccagctactcaggaggctgaggtaggaggattgcttgagcctggcaggtcaaggctgcagtgagccatcatcacgcctgggtgacagaggtccaaaaaaaaaaaaaaaaaaaaaagtgtcccaataaaatttctaatgggtgccagctgtacagctatagcttgccagccccttgtctaggtctcactactgggctctgtgttcatgtgtttaattgccttttaaatgcttctacctaagatatctaaccagcagcttctacttgcatccaaaactgaactcttaatccccaaatcactagaacatgtgctctgagaccaggggcctagtcactcactaggctttgtcatatcatggctacttattggccaggtaccactaaactaatgagccttttgagacagggagggaaccatagatagaccatttcccatacttaattgggaacacaagtatcaagatatggactacctactgtgcttaagagtaggttctaggccgggcacagtggctcacacctgtaatccccgcactgcccggtagaattttatataatagtagaaatgttctatatctgcacttttccattttggcgatcaccagccacatgtgactgttgagtacttggaatgtggcagcataactggaactgaactgtacattttatttaaataagtcacatgtgcccagtggctgccattttggatagtgcagatataaatataaaccagattaattttctagcttttttaaggaaaatgttttcattaattaggaatagttatctacaataatcattaggtttctggaataacagtaagagctatgagagtgcatgattccatttctctccagaatatttcagtgctttctcaccttgaaaaatgaaaacaatctattcagacggttgggaatattttaattttctacttaaaactaaggttattctccacttgaggtaatgtagaggagattcttctctttactgtatctacatgtgttacattttagctcacaaacccttgttggtgatggagagttaacatgaataattaggacatcttggattatactgaactgctggctattaccatggtatttaaatgaatttataatcagatcttctaaatgttaggtgtctctaaacatcgaatttttcttgcagccttgtcttaaaagaagaagcatctgattaccttgaattggatacaattaaaaatctcgtcaaaaaatattcacagttcataaactttcctatttatgtatggagcagcaaggtaaatctatattgattaaaaacttatatgtattaccttggcacgtatttaaatattcaacactaaaagaatgaaggcaggccggcgcggtggctcatgcttgtaatccccgcactttgggaggccgagacaggtggatcacctgaggtcaggagttcgagaccagcctggccaacatggcgaaaccctgtctctactaaaaatacaaaaatgttagctgggtgtgtggtagcacacgcctgtaatcccagctactcgggaggctgaagcaggagaattgcttgaacccgggagacggaggttgcagtgagccaagatcgccccactgcactccagcctaggtgacaaagcaagactctgtctcaaaaaaaaaaaaaaagaatgaaggcaaaatgtggtctattagttaaggatactctcagggttttcttacaaaaacctattttttgacctgtaatgttatatcatattctgtagacaaaatcagaattgttaaacaaatgagtttaaccataattctcttatttcaacagactgaaactgttgaggagcccatggaggaagaagaagcagccaaagaagagaaagaagaatctgatgatgaagctgcagtagaggaagaagaagaagaaaagaaaccaaagactaaaaaagtaagtctggtttatctccctgcataagatattgtttaacatgtataggcaaaaccaggaaaacctaagtatgcactggctgatttgaagtcagcttcagttcaggtgctaagtccatggagccagcttttaaaataaggcctttgtttgtatgttgaatacattgtcctgtagaaagttttaagtatcaaacccaggtcatttttatgaagagttttctaacttttatatattgcctaggactggtggcttatatgtttggaattttaaaatcttaaaaagccttctgagtcctcttttgtctttttatcatgcagagattaaccataaaaatggttctctggcttgcttaggtagcagactaagaagtattgatcatggtggttgagaaatatttttgtaaaatgttggatttctttaagtcatgaaatgggaatatataatatgtatttccttctaacctcaaaacaaatattttcaagaaacatttttgctagttaaaaaataacaatgaagaaaaacttaagtggcttttcatcagttaacaattgtctttttgaattaaatattgagaaaaatactttgcttttgatacagttggcagaaaccttactagataacaggtatcctttggtgccctttttttttttttctttaatttggagacagagtctctgccacccaggctggagtgtggtagcacgatcatagctcccttcatccttgaactcctaggcttaagcagtcctttcacctcagcctcccaagtagctaggaccacagacacacgccaccatgactggctaagttttaaaaattttttgtatagttggaggtcttgctatgttgcctggactggtcttgaactcctaggctcaaacagttctcctaccctaacctcccaaagtgctaggattacaggcgtgagccaccacaccagtcctctgggtctttacatagtcttttgaaatc

SEQ ID NO: 667 - DNA, 6000 bp, Homo sapiens
aaaaatctcgtcaaaaaatattcacagttcataaactttcctatttatgtatggagcagcaaggtaaatctatattgattaaaaacttatatgtattaccttggcacgtatttaaatattcaacactaaaagaatgaaggcaggccggcgcggtggctcatgcttgtaatccccgcactttgggaggccgagacaggtggatcacctgaggtcaggagttcgagaccagcctggccaacatggcgaaaccctgtctctactaaaaatacaaaaatgttagctgggtgtgtggtagcacacgcctgtaatcccagctactcgggaggctgaagcaggagaattgcttgaacccgggagacggaggttgcagtgagccaagatcgccccactgcactccagcctaggtgacaaagcaagactctgtctcaaaaaaaaaaaaaaagaatgaaggcaaaatgtggtctattagttaaggatactctcagggttttcttacaaaaacctattttttgacctgtaatgttatatcatattctgtagacaaaatcagaattgttaaacaaatgagtttaaccataattctcttatttcaacagactgaaactgttgaggagcccatggaggaagaagaagcagccaaagaagagaaagaagaatctgatgatgaagctgcagtagaggaagaagaagaagaaaagaaaccaaagactaaaaaagtaagtctggtttatctccctgcataagatattgtttaacatgtataggcaaaaccaggaaaacctaagtatgcactggctgatttgaagtcagcttcagttcaggtgctaagtccatggagccagcttttaaaataaggcctttgtttgtatgttgaatacattgtcctgtagaaagttttaagtatcaaacccaggtcatttttatgaagagttttctaacttttatatattgcctaggactggtggcttatatgtttggaattttaaaatcttaaaaagccttctgagtcctcttttgtctttttatcatgcagagattaaccataaaaatggttctctggcttgcttaggtagcagactaagaagtattgatcatggtggttgagaaatatttttgtaaaatgttggatttctttaagtcatgaaatgggaatatataatatgtatttccttctaacctcaaaacaaatattttcaagaaacatttttgctagttaaaaaataacaatgaagaaaaacttaagtggcttttcatcagttaacaattgtctttttgaattaaatattgagaaaaatactttgcttttgatacagttggcagaaaccttactagataacaggtatcctttggtgccctttttttttttttctttaatttggagacagagtctctgccacccaggctggagtgtggtagcacgatcatagctcccttcatccttgaactcctaggcttaagcagtcctttcacctcagcctcccaagtagctaggaccacagacacacgccaccatgactggctaagttttaaaaattttttgtatagttggaggtcttgctatgttgcctggactggtcttgaactcctaggctcaaacagttctcctaccctaacctcccaaagtgctaggattacaggcgtgagccaccacaccagtcctctgggtctttacatagtcttttgaaatctactgaagccatggttactgctaggataaccttggtgagtgctgagagagactaatcaaatactataataacttcaggttgaaaaaactgtctgggactgggaacttatgaatgatatcaaaccaatatggcagagaccatcaaaagaagtagaagaagatgaatacaaagctttctacaaatcattttcaaaggtaaatatttataattccctagtttctggttattaatgaatagacaaaatatcaccctcttagtttaattgtatatggtatgtgaccatgaatatgagatggtccattcccattttttcccagtgagaaaattcaaaaaaagacctttaggccaactataatatgtctacttctggtttattgacctagtcacaattaaaatcacatttatgaacctttgagattgacacctcagtagagatggtctttgagagtaattggtttccagaacacaccatttttacttaagttgaattattatactcatcactacttcaaaattgcagcagttattaaaattagtcctagctcttagtgaatagtgaaactacaaaatcaagaatgtttgaaacagttttatggctgtttaaacacaattggtttcctttttattcctgtgtattttgtaatatgtgatttttttaaaaaaattattttgagaaggcatctgtagccttcaccagcttgccaagggttttgtgtgacaaaaaaagattaagaaccacctacataggtagatgtgtgatttccaccacaaaacccgtaaaacatgaaatcatgttgttaagtggcttttaatataatctttaaagagcttgcttatgacatcaaacacttattgtgagatcctatgcctgggaataattactaaatttatgtttccttgcctgtttttttttttcttcttcttttattgatcccttcttgtaactcttaaggatgcaaaactagcattgataaagtttgtttaaagttaatgtttccccagcagcatttagtacaagcagtagaatgctctagtggacttaaccatagctaaataaaacttaatattctgtgtctgtatttgttcttttctctattccatatcctttaaatttcaactcttaaaacactgttggttctgccttcacttttatttccataaactctaaagtcctagtgtctataaacttacttcatataaagcagctgtattagaaatataattaatgtgagccacacatgatttgaaattttttagaagccatacaaaaaaaggaaccatgaaatgttaatagtataatttatttaacccagcataccccaaatagtattatttcaacataatcaatataaaaactaataatgagacattttatatcctttttaaaatttgtactgtgccttcaaaatgtattttacactttaatagcacatctgaatttgaactagctacatttcagtgcttaacagccatatacagtaatagataatgcagatcaagagaatttccaactttgttttacaggtatttacatacatctttgtagccactcttagagctaagttccatggaagaaacatgttcttgagtacttactgtagttcaagggcacactgaagtgttgtatgtaattttgtcatttaggcagggtggtggttttcctattcacttctctcatacgtaagaagtataaactcatccttccttctgagagtttaggaaataatgttattgacaatcatcatcaaaacaaccatgtctagtgaattagaattgcaattctagatatttcttcactccacccttttctttctcttccccccacccttttctttctcttccccacctcccgccagtaaaggaaaattttttgttagttaattgctaaactgaatatgtaccacatagtacattgcttagttcttgcactgcttttctcctgtgtcgtttgaatgactaagataccaactttccacaggaaagtgatgaccccatggcttatattcactttactgctgaaggggaagttaccttcaaatcaattttatttgtacccacatctgctccacgtggtctgtttgacgaatatggatctaaaaagagcgattacattaaggtgagtttttaagtagtacatgctgcgtttaaaatttgaaagtttaatttccagaaagtgacttttttttggtctctttagctctatgtgcgccgtgtattcatcacagacgacttccatgatatgatgcctaaatacctcaattttgtcaagggtgtggtaagtatctgaagtttgggagaaggggtgattgttgtgggggtctggcagtgtagagtgtttgtttggctttgctttcttccagtggttttattgctcactgaactttcttttgccatctgaaggtggactcagatgatctccccttgaatgtttcccgcgagactcttcagcaacataaactgcttaaggtaagtgtctctgggaagaaactctccactttgctgtttgattggggttcagaggacaggctccatttgtggagtaaaaccagattttgggtctggtccatgattcttcagatgaatttcctttctttctggagttatcagatcctaagaatctgattctttttctcccaacatttaataatgaagtttcaaacatctagaaaaaaattaaagaattgtacaggtccaggattaacattttgtcatctagacacatagccacctttttatcaagcctttcattaaacctttcccctccaatacttccataattagaagactctttagtttttgaatttaaaagtatttgaaagtagcatatttgttcacttcatttagatgctagagagagagtatcactgagtcctaaggttagaatataaacattaaggcaatcttgtggctatttgcacggacagctgaatttcagcccaatctgaatgaattggagtgcttcaccatttcctgcccctcaataaatggcaataacgatatcgtctttgtgtttttcacactcctgcctgggtaccttacattctcaaaagttggagattaacttctctaatcagttattctttcattgtgtttaggtgattaggaagaagcttgttcgtaaaacgctggacatgatcaagaagattgctgatgataaatacaatgatactttttggaaagaatttggtaccaacatcaagcttggtgtgattgaagaccactcgaatcgaacacgtcttgctaaacttcttaggttccagtcttctcatcatccaactgacattactagcctagaccagtatgtggaaagaatgaaggaaaaacaagacaaaatctacttcatggctgggtccagcagaaaagaggtgagatgaactcataagtgttgtcagccattctggaaggtagctagggatttatagccaactcttgagggggagaaaaggaaaacttaattgtgtaactggagtagttataaggcctggtcagtcactgacaggaaggtcatttatattctctgaacctcttaattcttcacctgtaaaatggagtttttaataatgtataaacatagcagctgctaggataaacaaatacaccagggccagacttggaaaactttgtgacttcttaattttgtaggctgaatcttctccatttgttgagcgacttctgaaaaagggctatgaagttatttacctcacagaacctgtggatgaatactgtattcaggcccttcccgaatttgatgggaagaggttccagaatgttgccaaggaaggagtgaagttcgatgaaagtgagaaaactaaggagagtcgtgaagcagttgagaaagaatttgagcctctgctgaattggatgaaagataaagcccttaaggacaaggtactgtggaaattacaaattgtggaaatattagtatcagcatttaagagaaagttattttgtgaacaaattaagctgcagctggttactttgtaaccattagaatggtaaaaatttaattaatgtaattaaattattgggagaaagcttaaaactttcgacaatactgctttgttaataacttgttacaaattaaattttatgtttttaaaaggtggtatttaaacttctgactagaaaattcagattatcaagtaagtgcccctacaaattctcctaaaccttaagaaaagctatttttatgacctgcttctgtgtttatgatcttaagtgataaagtcttagacagttgaaagacaattgctcaatgaccttacctgttgatattaatttatatgacttgatttctttccctaagattgaa

SEQ ID NO: 668 - DNA, 6000 bp, Homo sapiens
cacaaactgttttccaaaataatctcctaaaactcttcctcccttaaagatctccaacaggacaccaatgaggaagaagaggaacaggcaggggccgggtactgtggctcacgcctgtaatcccagcactttggaaggctgaggcgggtagatcacaaggtcaggagttcgagactagcctggtcaagatggtgaaaccccgtgtctactaaaaatacaaaaattagccaggtgcagtggtgggcacctgtaatcccagatacttgggaggctgaggaaggagaatcgcttgaacatgggaggctgaggttgcagtgacctgagattgcatcactgctttccagcctgggagacagagcaagactccgtctcaaaaaaaaaaaaagaaaaaaaaaagaggaacaggcaaacagtcctagaacccatccttcccaagaacacagaaaaatgtcctcacatgtgccccacagtaaaagcagccagagtctggtgaaatatctgcttctagcttcctgtttaggatgttgttcctctctatatttgtttgctaggggtgccatagcaacatgccacagtctcaggggcttaaacaacaaaaatttattttctcacagttctagaggctggaagttcaagttcaatgagttgacagggttggttcctttttttttttttttttttgagactgggcctcactcctcattctgtcacccaggatggaacacaatggcatgatctcggctcactgcagccttgatttcctgggctcaagcaatccttccacctcagccgcctgagtagctgggaaccacaggagcacaccaccatgccagctatttttttttttttgtagagacagggtttcaccatgttgcccaggctagtcttgaactcctgtgctcaagcaatctacccgcctgggtctcccaaagtgctgggattacaggtgtgagccaccaggcccgggcagggttagttccttctgagggctgtgaaggaaagacctgttctaggttctctccttggctggtagatgccttcttcctctgtcttcacatggtcttccttctgtgtgtctgtgtctgtgtcctaatttcctcttcttatgaggacaccagtcataatggattcaggtccatcctaatgacctcattttaacttaattacttaaagatgctatctccaaatatagccacattttgaagttccaggggttatcaatttggggtggagcggtggcaggggggacagaattcatcccactacagcctccctccctcttcccaagtccccagtaaccatttgtcaccctaattctaaagggctcaaactctggggcgtggcaggtgtgtgactttggatgagttacttaacccctctgccttggtttatgcatacataacgttgggctaacaatagtatctgtctcatagggttattaggggaattaaaggagttatgtgtctagagaacttagaacagcacctggcacagagcgagcactatataagtgcttattaagttaaacattgaaatcgacaactcatttttactaaactgttaggagaagcttggcacggtggtgcacgcctctagttctagccactcgagaggctgcggtgggaggattacttgagcccaggagttcaagaccagcctaggcaacatagcaagacccaaaaaaatctctaaaagtttttttaaaattagccaggtgtggtggtgtgtgtctgtggtcccagctactccagagctgaggtgggaggattgcttgagcccaggagctggaggttgcagtgagttatgatctcatcactgcactccaacctgggccacagagagaaacaccatttaaaaaaaaaattttttttaataaaaattaagacaatttaaaaagtgctaggagacatgttaccctcccaaagaatttgctttctttgagcaatgcttaatatcagcaatggaatcaccaattcacaataggggaactatatatatttgagggtgtggatccccaacattcttcaaagtacactatttgacaactacatgatccactctaaaatattaacagtagtcaacatttattaaatgctagtgatgggaccgggcatggtggctcatgcctgtaatcccagcactttgggaagccaaggcaggaggatcactgaaggttaggagttcgagacgagcgtggccgacatggcaaaaccccatttctactaaaaatacaaaaataagctgggcgtggtggcgggtgtctgtactcccagctactggggaggccaaggcgggagaatcgcttgaacctggaggtggaggttgctgtgagccaagatcgtgccactgcactccagcctggtgacagagcaagactctgtctaaaaaacaaacaaacaaacaaacaaaaaacaaaaaacctaatgatgggccaggaggcactgtgctaagtaagggctttcctggtatttaggctgggaggtgggtactattattattcccactttacagttgagagaatggaggctccaaaaagccacctctcaaggccatgctccccagttagtaagtggtccaatagcacaggataactcatgtgtgcaaattaaggactgccagacttaagagtgtcagggagagagaggtccttccttctctcccactttttcatcacccccttctcttccccctctgctgaacgttgcatccccacggccaagattgcaccccctcttctacagacaacatccaagctgctgggacccgacccagcgccaccttgcgagcccagcatttcgaggggcaggcttccaaacagggtaataatcgtcccattaaaattaatgtccatgaagtgagccgttaaaagcgtgcagattaaaaatggggggagggaattgttcaatttaaatccaaagggctttttaaatagacactgtgtcttcattcttggaacgctacacccgggcaatggatcaggtcccctctgtaaagactagggggattaaggaggtgagtcccaggagaatgggaagtggttctggcgagaagcaaagggaaccaaggtctatccagggcccactgcgtgccaggtgcttggcacacatttctctcatttaatctctgccccaatcctgggatggaggtattattattcccagattacagggggcagtataaaaccgtggttaagagcttagagcctgcggcatactgccctagttcagatgacggtttcattcttagctactctgtgagctagggcaagaacccttacctacctgtgcctcagcttcctcatctttgaaatattatagtaattgcatgtagaattgttgggagatttacctttaggcagcagaggcaagggcgcccaaagcccacaggtgccagacatagaagatgcgcagtaggtcttggccattatgaagcctagaataattggagctgggtgagggaaaaggccaccagaatcacacagtgttgtgggctttgagccctgactttgttgtcatttcaccacgctgtgggccaaaagggacatttctcctcctgatcaattcagaccaaaactaagttcacagactcgaagaatcttggttatactctgcggtgggaaggcaagaacggaagctccctcagcaggttccagactcccaacttggagccatctctggactcatcccgatggtctgaatcccaaagttgtctgaatcccagtcgatttaagatcacaggtttcattctcccccacagaatcctgacagccgcccagcccatctgaaccttcaccgtttgtgacaactgcagacgctccagtctggaggtgcacaggagtggctgtcggattggaaaagggggaattaaagtcccccgcgcccctcctctcgccgaccccttagggtctccactgcgcattaaatcggggtcatcgcagaaaactgtaacgccatcaggaaaataatgttcacaaagaaagcagacaagaagtttccctttagaaagccccttgcgagggtcttttgggtgcgggtgccgggcagcgagaatgcctccgtccgcgccccacgcgagctcaggtgggcccatccagcctcccaccgggcgctgggggcactttagggtcaggtttctagccaggcgctgggggcacgttagggtcaggctgaaagcctacaggtgccaagtcagacctgaaacgaggcaagttgggtgtaatctgacccttccataagattttgaatccacccacctcccccaaacaaaacaacagcctcggaatatttttgaataatgcagccgaattcagcatcagcttcatccaaaacggcaaacaagcctttttccctcgccaaatcggaactcgagctgaattcaggaaaaggggaaggagaacaaccttccctcgcgctccgcgcctccgcgggggtcccccgagacccccaaagcccaggacctccgctgcggggagccttctcgcgccgccccgcgccgcgctccccgtctcccaaacctcgcgctccctagctgccggcgccgctagggttaaaagttacctctcggtttcttctgcctgcagccccccccccaacccccgggggccggatgatgtaacccccctccccgcccccctccaccatgtgacactttaattaataatagcgccgtcagcacaacaaacgcacaacacaaggagaaacttggtgtccaggggaggcccccggcggctggagcgcggcggcagcgggcgcagaggccggagggagaggaggcgaggggcggcccgagcgcggggcgggagcgaggccagcggtcatgtgcccgtgccccctgcaccgcggccgcggccccccggccgtgtgcgcctgcagcgcgggtcgcctggggctgcgctcgtccgccgcgcagctcaccgccgcccggctcaaggcgctaggcgacgagctgcaccagcgcaccatgtggcggcgccgcgcgcggagccggagggcgccggcgcccggcgcgctccccacctactggccttggctgtgcgcggccgcgcaggtggcggcgctggcggcctggctgctcggcaggcggaacttgtaggaacgcggggcttcttggtggggccggagccgagacccagccggagcgagcaacaggtacgcgagcgagcgagcgagagccggggcgcggcagctgggcactggagacgctgggctggcccgggagcgggagagtggcaagtttggctttcttcttttcccttctccttcttcctccgttctcttctcttgcaagcatctccacctctcctcttctacccagtccccagtcttcccttccaagtgtaaggtccaccgtttctgcccccatctctgcgagtccttaagcgcatcttgctactcacttatagctcagtggcttgcggaggacttcagcctccataatccccaccagccccacaaataaacacacaatgcaagtaaaaagtgtgcttgctatgggaatgtagttgtaagccacgccaaatacttaaaatctatcgcacttccaagaaaggtccccggtcccgttccaatcctcttgccgttcctgagtcgcccccgtctccatcacctttgctcccaacctcttgtccctaagtgtcacttctccaatctctgatccccattatctggcaccccaagcgcatctcgagacttcctccccctccaggtttctggctggcccaatctttcttcccaagctccgcgcatttgcaattttcctctgccctgccaacttcgctccttctcgagtgaggtgtcctgtttaaggagtttggcttccttctccccagacggttgtagctgctacgggaaggagacgccctcggagtgggctggaatagggggctttcagggaaactccaatgggaagccttaaggaaggaacatttattgagctccttcggggtgctgggcactgtttagggaggtcatgtgttgagaacttaggacaggaagtgggtac

SEQ ID NO: 669 - DNA, 6000 bp, Homo sapiens
gctcacgcctgtaatcccaggactctgggaggctgagactggcggatcacgaggtcaggagatcgagaccatcctggctaacacagtgaaaccctgtctctactaaaaatacaaaaaattagcctggcgtggtggtgggcgcctgtagtcccagctacccaggaggctgaggcaggagaatggcgtgaaccccggaggtggagcttgcagtgagctgagattgcatcactgcactccagcctgggcgacagagcaagactccatctcaaaaaaaaaaaaaaaaaaaaaaaaagagggtcattatataaaatttgaaacaaagaaaaaactatgatcacaaaatgcatctctttcattgaaaaaagagtgatatttaagcacaaatctctctcaacttcagaaggtcccaacttcaggtaggtaggcattgtaaactcatgtgtaacctatttactcccttatgttttttttttttaaatcattttccttctccaccttccagaaaaaaaagtattcactcaaacttttattgatgggtgggtgtggtggctcatgcctgtaatcccaacactttgggaggctgaggcagggggatctcttgaggctaggacttggagaccagcctgggcaaaatggtgaaacccctctactaaaaatacaaaaattagctgggcatggtggtgcacacctgtaaccccagctactactcgggaggctgagtcatgagaatcacttgaacctgggaggtagaggttgcaatgagccaagatcgcgtcactgcactctagcctaggcgacagagcgagactccgtctcaaaaaaaaaaaaaaaaatacaattcagctgggcacggtggctcacgcctgtaatcccaacactttgggaggccaaagtgggcagatcacttgaggtcaggagtttgagaccagcctggccaacatggtgaaacctcatctctcctaaaaataaaaaagttacccggatgtgtggcatgcacctgtcatcccagatactcgggaggctgaggtagaagaatcacttgaacctgagaggcagagcttgcagtgagcagagattgtaccaccgcactccagcctgggtgacagagggagactctctcaaaaacaacagcaacaacaaaaaaccaaacacaatttactgggagcttgcttatgctaggtacagatctgtgtgctggggacaaaataagacaagtcttcccaagtattgcactgttttaaattttcccctgatacttaagtttctccctagcctttgttgttttcattgtccttctgtggccactttccagctgcattaactcttctttttgtgttcctcaatattaacagctttattgagatataattcacataccatataatacacccgtttaaattatacaatttagtagtttttagtatactcacagagctgtacaaccattcacatagctaattttagaacgttttcttttcctttttttttttttttttttgagcagggtctcgctttgtcacccaggctggagtacagtggctcactgcagcctcgacctcctgggcacaagtgatcctcctacctcagcctcccgagtagctgggactacaggtgtgcaccacgatacccagttaatttttgtttttatgttttgtagagatgggatctccttatgttgcccaggctggtctcgaactcccgggttcaggtgatcctcccgtctcagcctcccaaagtgctcagattacagccatgagcaatcacacccggcctagaatgttttgttttgttttgttttgttttttgagacagagtcttgctctgtcacccaggctggagtgcagtggcgtgatctcggctcactacaaactctgcctcccgggttcacgccattctcctgcctcagcctcccaagtagctgggactacaggcgcccgccaccgcgcccggctaattttttgtattttttagtagagatggggcttcaccgttgtctggatctcctgacctcgtgatccgcccgccttggcctcccaaagtgctgggattacaggcgtgagccaccgcgcccagcctcctagaatgttttcattaccccaaaagaaacctgtgtctagtagcagtcactccatttcccccctcctccttcagagaccttaatcactactctactttctatctctatggattggcttattttggacatttcctgtaaatggaatcatacaatatataatctttttgtatctagcttttttcacttagcattattattttctttttcttttcttttcttttctttttttttttttttttgagacagggccttgctctgtcgctcaggctggagtgcagtggcgcaattttggctcaccgcagcctcaacctcctgggttcaagagattctcccacctctggctcccgagtagctgggattacaggcgtgcgtcgccacatccggctatttttttttttttttttttttgtatttttagtagagatagggtttcaccacgttggccaggctggtctcgaacacctgacctcatgtgatccgcccgcctccgcctcctgaagccttaggactacaggagtgagtcactgtactcagccagccgcatgatgttttcaaggttcatccatgttgcagtatgtatcagtacttcattccttttttggtctaataatattccactgcatagagagaccacatttcctttaaccatttctcagataatggacatttgggttgtttttactttttgactattatgaataatgctgctaagaaccattagcatgtacgtttttctgtggacctaggttttcatttctctcgggtatacacctaggagtggaatttctgggtcttatggtaactctgtatgttttaacatttttgggccgggcgcggtggctcacgcctgtaatcccagcactttgggaggccgaggtgggcggatcacgaggtcaggagatcgagaccatcctggctaacacggtgaaacccgtctctactaaaaatacaaaaaactagccgggcgcggtggcgggcgcctgtagtcccagctacttgggaggctgaggcaggagaatggcgtgaacccaggagacggagcttgcagtgagcagaaatcgcgccattgcactccagcctgggcgacagagcgagactccgtctcaaaaaaaaaaaaatttttttttttaagaattgtcaggcattttcatagcagctgcatcattttacattcccaccattcatgtatgaagattccaaattctccacatcctcaccatctattttctttctttttaatgttacccatccttgcaggcgcacagcggtatccatggatttgatgtgcatttccttgatagttaatgatgttgagcatctttcatgtgcttattaactctggaggtagacctgccaggccttttctaatgagggacaaccatggctttgtaccccaagaacatttttattgagttgctttgtgtctagatcattaggagaattaattaatactttctcttccaatgaagctcagctgcgtcctacatcgtgaatgaaaggctttctgtacatttttccaaaaaaaacctaggactattatggataagaagtgacattatctgagcagcacttgaagcaagagaaatacatactctgatgcattatttcagtctaaggaagtggcctgccacgcactctctctctctccgtgtgttttaatctaatatagcacaacttgtcgaagcaaatctataatgtatataaataacagaacagtcttaggtcctcatgaagagcgaactgacttttttatgtttaaaatcttaaatactggttaagttagaggtgagattaaaaagtgtaggaaaatcggctgggcccggtggctaatctcagcactttggaaggccgaggtgggcggctcacctgaggccaggagttctagaccagcctggccaacacagtgaaaaccagtctctactaaaaatagaaaaaattagccgggtgtggggcgggcgcacgaagtcccagctactagggaggctgaggcaggagaatcctttgaacccgggagacggaggttgcagtgagccgagatcacactattgcactccagcctgggcaagagcaagaccttgtcaaaaataaaaaaaaggtgtaggaaaataaactgtcatccagtacagctgaagaaatcgataccttaatttacaacctcagtttctctgtccaaaggcaattccaagactcgagcaaattcttttattatgctacgattttggttattttgaatacagcttttcaaagagcccttgggatttgagagcccttggttttctaagtgttttcaataagtcttgtttttaaaggccgcgtcctagcgagtgcagctgccgctccttaccggacccacgagtgaggagccccgaggtcatcaccgagcatgaacgcgggaacgtctgggaaggaaatctgaggccctgctctgacggtcataacaaaggccttcgagccaaccggcgtgttcaaattcaccacggcccttcccgcgctcccctccccggaaacttgaccacctagcccagaaagccgcagcagcttcctcagggacgctatctcccatttcaaacacccaaccgagaaagcagcgccgcagcgcgccttccgccacgcccaggtccgcaggtcttcgctcggggcggaaaagaatcctccccgcgcactcccagccaggaggaacgccagaggccccgcccaatccctgtcgcttcattggctctggtgaccggcctcccgaaagtcggcttcctattggtcgtcgtggccgccgctctgcgcttttaccggggcacgcggcgagcgtgaccacgccccttacgtccggacgctcggtcgcctcccggggcgcggtaatcaccgcccagagggaaggaggtcggcagtgtgaggagctgctatggtgctgagtttcctggtagagccggccgagctgaggcggtcgcggccatgaaggtgaggggccggtggagccggacagaccctcctcgccaatcctatcctgccagggcacctgaagcgcctcctttctttccgccttagcggttacctagtcgtcatctcggagagctgcgctgaggggggtcgcttgcccggcttcaggtgccccaaccgagccagggcaggctgccggaccctctcgagctcctccagtgccacccccgtcagcgacccgagcggtggggagaagccgggcgtccctagcgttcgcgccgggtgggcccctctctgcgccgggccctgtgcgcctcctcgggggcctgaggcagagccgccagggctcgcctgagcctcggtcccttggcgcgcggcgtgccctttcccgccccgagtccttgaactaacccaagtgttggggacatcgtgggaccgaggagaacaggaggggtgcagggggtggtgaggctagggccaggctaacgggttaaagaactctcagggtggggatgccacccggaaggggtgcttcgtaggctgcacgtcggggccgcgaactagagaaggctggatgtgcctccatcgccactaggtaaacgcagcaaggaatttggcagcttgagttctccaaggtgggagtgagagcgtgggagcattactgatgagaagttgaagaaaaggggaaaggggagcggggtttccggcctacttctgagagatgattctcaacccgatcactgagagttctgaagagctttgtgaacagcagtcagttcagggtattgattcatttgccgaactcaaaccaagtgggatgagtcataaggtgatgataactttcagacctagatggtttcgttaatctcagtgcagaggtgtgctgggggtgggtaatctagcaggtgagctgctagattaacgctgtctccataaagcgtcaaagatttactatagaagattgaaaaagagtgtcagctggtcacagaaat

SEQ ID NO: 670 - DNA, 6000 bp, Homo sapiens
agactgtcaggctgtggtggggggcaggggtgttggaggagaagttgaaaatccgtgtgttctctgcccctctgctcctccatcttagcttctggaggagttaaggcaccaagggcaccaagtcaggttggcagttttgctgcccttgcccaagcctccagcaaaactagctggtcccctgctttgctgggtcccagccaggtgtgattttggttgttgattagtaaccacacattgtttttccccacctttttcattagtggaggtttttgttttgttttgtttttgtttgtttgagacagagtctcacgctcttttcagactggagtgcagtggtgcgatgtcagctcactgcaacctccacttcccgggttcagacgattctcatgcctcagcctcctgagtagctgggattacagatgtgcaccaccacacctggctaatttttgtatttttagtagagatggggtttcaccatattggccaggctggtctcaaactcctgacctcaggcgattggcccacctcggcctcccaaagtgctgggattacaggtgtgaaccaccgtgcccggcccattagtggagttctgatgggcacggtaaatattattaatgaaagagaaattctgtatacttttttaaaaatctctttaatgaaagaatgaagagtggcagagataataattgaaagattagtttctcatggaattaatttggccttgatattcagtatttggaaatgtcttaaagaaaaccattttcattgtagaaaatccttttttaaatacttgttatatcccagggagattagtttataccttccacctcaggcagtcatcagctgctttagagaatggaatccaccctgcccctccattttttggttcctggggctcaattcaagtctggtcaagtctccctggctggggattctgtcctgggaacagatactcagttgtagtctcatgtgtctgcactcacccaagactctatatacttgcttgctcagagcatagttagggcagctcctaaaaatgcattcagcagaagactgaaaaacttcaattgcttcatttgtatgcaaatagaaaatggtagataattatatattatacgcctttgtgtaagttcatttaatacttgaagcagtctttgtctcaaaagagtatgcccttactgagaaaggatatgtgaacggtacatttattgttggggagagtggattgtttacatcatgtctggacttttgtctagttgggtagacagttctacaccagcagcccccttaataaagaagtctacacagacactgttttgtgtcttgctatagagtgttgaattctaaccaacagagaattaagtattttgttaattgtggagcaaaagagtaatggttgaaagagggatgatttaaaacagcacatttaattctcagagaaaactgggacagtctcattgtgagttctattcgattcagatctgccctcactgcaaatggattatgattaagcatgatgtgttggtcggtcttgttctcagttgtacactaaagaccagcctgtcaccaggaggaagtgtttgtattgagcagagtttaattcaagaagaaattatttttttgagatgaggtcttattctgttgcccaggctggagtgcagtggcacaatcatagctcaccacagccttgaacttctgggctcaagcagtcctcctgcctcagtctcacgagtagctgggactatagcaaagcaccaccacacccagcaatttttttttcttccttttagagacagggtctttgttgctcaaactcctggcctcaagagaaataattctttttttctttttcattaaatttattatctttttaattttctgttggctagggtggtctcgaactcctagctttaagcagccctcctgcctcagccccacaaagtgttgggattatgggtgtgagtcaccacaccagctgaaatactctttttaaaatatcaaaatgaactggatgtctaaagcagacagtaagagggactatgataaagatggtgaggcaaaaaaatgcagacatcacatagatgatcttctttagactgaatttattgtagactgtgatatattcagtcgtggtttaatgatgacatcctatagaaaatagaggataccttttttgtcagacaacagaagaaaaaggcaattatttaaaatttctcagattcttttatttctaaatggattagtgtgaatttcaagccacatagtgtttctttgcttaagttcctccgttgctgtaaaacacccaaaatcaggcggtaacaaggggccgcaaaggctagaacacttaactgcctggagacatccatttgaaggatgtgagggttaaaagggaacagaatcaggcctatttttaatagcctgtctgtttcatccattattttggtgtggaggagggtataaatctcagctgtactccgttgccactaggtaggacacggaagatgaccagttctctgggggagtaattactactcactggcttcctgagcagcttgataatgttctgctcctgttttcagcctcactgtggccaaggcaataatttgataataagagatcctgattaaattaaggagccatttgcttctggatgatgatgttgataaaagggttgatgtccacactgcctgctcttttcaaaggtcagaaaacagtcttgaactaaaaactacggcaacgagcaaaataatcagaagcagcatagtttatgctttcgtttcctttgttgttgcatctgggaaagtgtctgttctttgcagaaatcctcactggctccttttgcctcacattgtgaggaggtgaaattggaagtgtcacattgggaaagtatctgtataatgagtctgtaagctgcaaaactctttgtaaatcggaatcaagcactcaggagatctcggtcacttaagcttggttctcacacccgtgcatgcttgcacttgcatgttttttaagacaacagcttttgctttagtagttgggcggtcgcaagtgaacactgtccagtggttcttctggtgcccagactcggaggagatgggactgctctcaatgtgtttgttagaaacgaaactgttcgcactataaccccataaccccttacaatgttcagaaaaaaacaagaaggggcttgaaatacccactagtgtgccgcctgctcagcccatctgggtctgtgaaaccacatctgagccctgtgggctgtggtggcgacacaggcagagggcgggcagggttgccagcgccccgcctgggctaggaacgcctgtgcgcagctccctgagagctcggggaccacgcggaggttgtaattggtctctagaccacacctagttgttgagtgccgctgcttgaaaatctcagttctgccgagatcgcagaatacacacaagctacctttgggcaccagagcagacagaaccgcggagcttcagggtggaagattcgtggaaactttgccaagtaagtgaggtggggagagaaggaagccagtgcctgacactgtggggagtggctgggcaaagcagcattggaggtgttgtagggttcctactgtctgatgagctggtgtggggttcttactgtctgatgtcgtctctggtggaagttagcagggctggggcagatgcacagagcacggtggcgggggtgagcccaggatcggattgatgcccacccaccacctggcaccctgcagtcccagctggccagaaggcaagcatgctggaccacaaagcaaagatcctccagctctgctgctggcaagccttggggccaggggactcacagaagagcaggtttgggcctgtgccttcctcctgcccaaatgggtctctctccccttccccttccagccagggccgcagctggggctgcagcttgagtgacgggaaaagaaaggtttactccaccagcgcattagcggcactcacagcattaaaaatgcaggaggtggtgggaggagcgggccagggaggaaaactcatgcagctgcggggcgcggggaagagccgggcttctgcctcctcagcccggatcagagccgaagaacgagggcagtttgggttgagaaggattctccagtgtaaccgagaagcgagcgtccaggaggctgttggggaggtcggcactgtgggcttcctggccttcgtttgctgtttcgagggccaggacctcgtgtgttcccgtccgcccctctgggacggcgccagcccggcaggccgccgaccgtcctggggctcccgcgcagcgcgatgccggcctcgtccaccgtccacgtgctgcagctgctgcgggagctgctcgccttcgtgctcctcagctacacggtgctcatcggggcgctgctgctggccggctggaccacttacttcctggtgctgaagtgacagcgccgtcgccgcgcccggccccgcctcccgcccggccccgcctcccgcccggccccgcctccctaactcaccaggaaattcccttcaagccctggcccgaactgagtccccgcccacccgccagcgtcacggcgcccgactcagctccgcgccggacccacctccgcgccctcaggccctgcatatgccccgccccgcgcggaagttccggcggttggttgccttgcgcggccgttacagcctttgccctaagcctcgccccctttccccctgcctgcccaatcccgactgcttccttgggtgggggcgtggctatggggcgaggcgctctcaggtggaggccgtgccccgctccgcgctcacgaagctgcgtcacttccggcgtgtgcgtctggcgtccgcgcgctgcacaatggcggctctgaagagttggctgtcgcgcagcgtaacttcattcttcaggtaccgctgcggccgcgtagaggggacaggaccagagggagggaccgacgcggacagcgctgtggcccggcccacggcgcccgccttccttacgcgctcatctctcgtccgcccagctgggtcgcggcgtctcgctccggtcgggaggactgaggacagccccgcctccgccccctgggtcaagcccggcttccttttcagttcgtccatcttctagaaacgagtccccgagaccccgggctgccttcttggggctgctccgcctcctgaccagccctcgtcagccactcgaagtccctgaggagacgtggagaggaggagggacacggcatggggggagtccgggaagggagacgagcgtctgaagacgtcctcccgagggcagaaggggccgggggagctggcgcagggctctctacctagcgctgcaggctcctgggcgattgtagcgggaccgtcacacacaactggcacccaggccaggggtccagagctaaattctgcctgcaggagcggttattgtggcatccgtttctaaaaagtttaaaggcaacattttattttattttaatttttttgagacaagatctgcctctgtcgcccaggctggagtgcagtggcgagatctcagctcactgcaacctgtgcctcccggcttcaagcgattctcagcctcagcctcccgagtagctgggattgcaggcgcccgccaccacgcccggctaatttttttttttctttttgttttgtttgagactcagtctcgctctgttgcccaggctgaagtgcagtggggcgctctcggctcactgcaacctctgcctcccaggttcaagcgattctcctgcctcagcctcccgagtagctgggattacaggagcgtgccaccactccgggctaatttttgtgttttaagtagagatggggtttcaccatgttggtcaggcagatttcgaattcctgacctcaagtgatccacccgcctcggcctttatttacttatttttttttaatagacacggggtcatgttgccagccatgttgcccaggctggtcgtgaactcctgggctcaagtgatcctcccgcctt

SEQ ID NO: 671 - DNA, 6000 bp, Homo sapiens
taaattttaggtcaaccgggagaaaaccgagtgactctgatatttttccttgggggcgtaaccttcgctgaaattgctgccctgcgatttctctcccagttggaagatggaggtacagaatatgtcattgccaccactaaactaatgaatggaaccagttggatagaggctctgatggaaaaacctttctaggatgttcagaggagacttaacaagtgtactgcagaataaactacctctttgaagaaattgctgaaaggaagtaaaaccccatagaagaaacatgggaatacagaatatattctggggtcagcttcttaaattatactactgtttactgctttctccgtctcttttgtattccctttttttttttcctttgagacggagtcttgctctgtcacccagactagagtgcagtggcacggtctcacctcactgcaacctccacctcctaggttcaagcaattctcctgcctcagcctcctgagtagctgggactacaggcatgcaccaccacacccggctaatttttgtatttttagtagccatggtgtttcaccatgttggccaggctggtctcaaactcctgacctcaggtgatccacctgcctcggcctcccacagtgctgggattacaggcctgagccaccgtgcctggcccctaatctgctgaagaaagaagaatagaagaaaatcaacctgagtaaaagcagcactggttttgagttttctaagctcagggtcttcattagagacctctggaaatacattaaggatggtgggggtagataatccattcagccagacaaacggggccagctcttaaaataagaaagctgagactgaggaggtgaaactgaaaataaaaagagaaagttcatcctctaatccccagtgctgtatttcttcaaggcgcatcaggcctaggacagtggttaagtgttgggagctggagatcattttatcactgagttgagatttctttttcctgcagagtgtgggagattatatttagggtcatcagtcactgtcgcaactgatcactaaggcaagtttgcttccttctacttcttacaaagcaagaggtttaggggagcttcttgcccagaaacaaagtttatgctctatgtgatcagctacatctccttaggttccatacttatcaggggcttttgacatggaagaatgtgataattggggagcaaccttctgagaattcagcctttgaagtaattcaaagacagtttcttagcacacacgttaactccagacacagcagtggtgggtgcctccattgaggtttccgttttctcttctgtccatcaagggcccaacatccaactggtcccacagtgagcaggggcaactcttgcttcttcagcatctggccacttcgtttccatggtaactgccacgtgtacttttctagcagtctgtggccactccgtactcagctgaaaacactgtttcagccccctctctggtgacctcagccttctccaggtgtatctcttgatgatcttggagaccagcagccacagctgctgctactcctgcaggagactgtcaggctgtggtggggggcaggggtgttggaggagaagttgaaaatccgtgtgttctctgcccctctgctcctccatcttagcttctggaggagttaaggcaccaagggcaccaagtcaggttggcagttttgctgcccttgcccaagcctccagcaaaactagctggtcccctgctttgctgggtcccagccaggtgtgattttggttgttgattagtaaccacacattgtttttccccacctttttcattagtggaggtttttgttttgttttgtttttgtttgtttgagacagagtctcacgctcttttcagactggagtgcagtggtgcgatgtcagctcactgcaacctccacttcccgggttcagacgattctcatgcctcagcctcctgagtagctgggattacagatgtgcaccaccacacctggctaatttttgtatttttagtagagatggggtttcaccatattggccaggctggtctcaaactcctgacctcaggcgattggcccacctcggcctcccaaagtgctgggattacaggtgtgaaccaccgtgcccggcccattagtggagttctgatgggcacggtaaatattattaatgaaagagaaattctgtatacttttttaaaaatctctttaatgaaagaatgaagagtggcagagataataattgaaagattagtttctcatggaattaatttggccttgatattcagtatttggaaatgtcttaaagaaaaccattttcattgtagaaaatccttttttaaatacttgttatatcccagggagattagtttataccttccacctcaggcagtcatcagctgctttagagaatggaatccaccctgcccctccattttttggttcctggggctcaattcaagtctggtcaagtctccctggctggggattctgtcctgggaacagatactcagttgtagtctcatgtgtctgcactcacccaagactctatatacttgcttgctcagagcatagttagggcagctcctaaaaatgcattcagcagaagactgaaaaacttcaattgcttcatttgtatgcaaatagaaaatggtagataattatatattatacgcctttgtgtaagttcatttaatacttgaagcagtctttgtctcaaaagagtatgcccttactgagaaaggatatgtgaacggtacatttattgttggggagagtggattgtttacatcatgtctggacttttgtctagttgggtagacagttctacaccagcagcccccttaataaagaagtctacacagacactgttttgtgtcttgctatagagtgttgaattctaaccaacagagaattaagtattttgttaattgtggagcaaaagagtaatggttgaaagagggatgatttaaaacagcacatttaattctcagagaaaactgggacagtctcattgtgagttctattcgattcagatctgccctcactgcaaatggattatgattaagcatgatgtgttggtcggtcttgttctcagttgtacactaaagaccagcctgtcaccaggaggaagtgtttgtattgagcagagtttaattcaagaagaaattatttttttgagatgaggtcttattctgttgcccaggctggagtgcagtggcacaatcatagctcaccacagccttgaacttctgggctcaagcagtcctcctgcctcagtctcacgagtagctgggactatagcaaagcaccaccacacccagcaatttttttttcttccttttagagacagggtctttgttgctcaaactcctggcctcaagagaaataattctttttttctttttcattaaatttattatctttttaattttctgttggctagggtggtctcgaactcctagctttaagcagccctcctgcctcagccccacaaagtgttgggattatgggtgtgagtcaccacaccagctgaaatactctttttaaaatatcaaaatgaactggatgtctaaagcagacagtaagagggactatgataaagatggtgaggcaaaaaaatgcagacatcacatagatgatcttctttagactgaatttattgtagactgtgatatattcagtcgtggtttaatgatgacatcctatagaaaatagaggataccttttttgtcagacaacagaagaaaaaggcaattatttaaaatttctcagattcttttatttctaaatggattagtgtgaatttcaagccacatagtgtttctttgcttaagttcctccgttgctgtaaaacacccaaaatcaggcggtaacaaggggccgcaaaggctagaacacttaactgcctggagacatccatttgaaggatgtgagggttaaaagggaacagaatcaggcctatttttaatagcctgtctgtttcatccattattttggtgtggaggagggtataaatctcagctgtactccgttgccactaggtaggacacggaagatgaccagttctctgggggagtaattactactcactggcttcctgagcagcttgataatgttctgctcctgttttcagcctcactgtggccaaggcaataatttgataataagagatcctgattaaattaaggagccatttgcttctggatgatgatgttgataaaagggttgatgtccacactgcctgctcttttcaaaggtcagaaaacagtcttgaactaaaaactacggcaacgagcaaaataatcagaagcagcatagtttatgctttcgtttcctttgttgttgcatctgggaaagtgtctgttctttgcagaaatcctcactggctccttttgcctcacattgtgaggaggtgaaattggaagtgtcacattgggaaagtatctgtataatgagtctgtaagctgcaaaactctttgtaaatcggaatcaagcactcaggagatctcggtcacttaagcttggttctcacacccgtgcatgcttgcacttgcatgttttttaagacaacagcttttgctttagtagttgggcggtcgcaagtgaacactgtccagtggttcttctggtgcccagactcggaggagatgggactgctctcaatgtgtttgttagaaacgaaactgttcgcactataaccccataaccccttacaatgttcagaaaaaaacaagaaggggcttgaaatacccactagtgtgccgcctgctcagcccatctgggtctgtgaaaccacatctgagccctgtgggctgtggtggcgacacaggcagagggcgggcagggttgccagcgccccgcctgggctaggaacgcctgtgcgcagctccctgagagctcggggaccacgcggaggttgtaattggtctctagaccacacctagttgttgagtgccgctgcttgaaaatctcagttctgccgagatcgcagaatacacacaagctacctttgggcaccagagcagacagaaccgcggagcttcagggtggaagattcgtggaaactttgccaagtaagtgaggtggggagagaaggaagccagtgcctgacactgtggggagtggctgggcaaagcagcattggaggtgttgtagggttcctactgtctgatgagctggtgtggggttcttactgtctgatgtcgtctctggtggaagttagcagggctggggcagatgcacagagcacggtggcgggggtgagcccaggatcggattgatgcccacccaccacctggcaccctgcagtcccagctggccagaaggcaagcatgctggaccacaaagcaaagatcctccagctctgctgctggcaagccttggggccaggggactcacagaagagcaggtttgggcctgtgccttcctcctgcccaaatgggtctctctccccttccccttccagccagggccgcagctggggctgcagcttgagtgacgggaaaagaaaggtttactccaccagcgcattagcggcactcacagcattaaaaatgcaggaggtggtgggaggagcgggccagggaggaaaactcatgcagctgcggggcgcggggaagagccgggcttctgcctcctcagcccggatcagagccgaagaacgagggcagtttgggttgagaaggattctccagtgtaaccgagaagcgagcgtccaggaggctgttggggaggtcggcactgtgggcttcctggccttcgtttgctgtttcgagggccaggacctcgtgtgttcccgtccgcccctctgggacggcgccagcccggcaggccgccgaccgtcctggggctcccgcgcagcgcgatgccggcctcgtccaccgtccacgtgctgcagctgctgcgggagctgctcgccttcgtgctcctcagctacacggtgctcatcggggcgctgctgctggccggctggaccacttacttcctggtgc

SEQ ID NO: 672 - DNA, 6000 bp, Homo sapiens
caccttctccctgtgtgcgcacatccccggtgactctctgcgggtcctaatctcctcttttaagggcgtcagtcagattggattagggctcaccccactgacctcatttaaacgtaatcaccgatttaaaggccctgccccccgcgccaatacagtcacattctgatgcaccgagggttagggctgcaacatgggaattttggggggacactgttcagctcataatagtagggtgcctataaaatgggctaaaaccatgccttcctataggattcagtgaggaccgagggagctagaggtggaagtgctttgagctgggggtggcacagggaggcccccttcatgtggcctgtcacgtctgaggagagggcggcttttccatgccatgcacggtaactcgtgtcaacattcctcgtgctgccctgtttaaaatctatccgtgttcctatgtgtgtatcaggcttattgcttccttctgctgcctggaccccctaattcatgttcatcctgttgtatttattcccttagcgacgggggtaccttggttatgtctgactcctgcctccacaaacagcaaatatgctggaccctgctgccttgtacttctccacaatttcctggggatgcgcaggagtggaattgctgtagggcagagggggagccattttcacccaacatgccttccagaagggccactgctgttcaccctcccagctctcacatcctctccagcacctgagacgatttagtcttcgagaatgtctggggtctcagtgagggtacgtggtgcagcattgttctcatgtgcttttctgaggtgtgaatttgagtcttcttcctttcataagtcctcaggtgggggtctgaggctcagagattttgagggccatgttggagggtcacagagcaaactggggctagaccccaccagcttgggcttggagggcctccagcttggatgtagggcccttcataaatccaggatgatctcatcttgggatccttaacttggtaacatctgtagagaccctatttttaaataaggccacattctgaggttctaggtgggcatgaatttggcaggggacatgcttcagaccagcactatgtgtgcaggtgcccaatcctcagatctgcagagctctgggttcaaatccaggtcccattacttgggtcctgtggaaactcacttttttcctaaaagccgatttccacctctgcacatggggccaatgttcttccatctcacaaaccagaagtcaaggccaggcgcagtggctcatgcctgtaatcccagcacttagcgaggcagaggtgggaggatcgcctgaggccaggagttcaagaccagcctgggtaacatagtaagacccccccccccatctccacagaaagtaagaaacaaaaacaaaacaaactggaggccaaggagagcagctgcggatggtcacgtgcctctccctgggtgtgcccagctcttacccagaaagccctggctggcattaaaaataaggaaggtaaaatagggatatgatcaaacaaattaaaagtgtacggaaaaagagtcagccttctggaaagatcacagcacgacactgctcccctggccccagctggtctttgctccagaggtgacttgggttaatagttccttgtttttccttcctgcaataaacatgtttgcgtccacagagggggacccacacccgtatccttcccgtccgtggcacacgtcccacaagggcacacggttcccatgcttttctgcctcttggctggggcacctaggtggatcttggcatctcttgttcccgcacagaacccatcctcatccgagccctgggcctctgtctcccagcaggctttgcaaataggaccttgtaaaggacagggctgtgtttcccaaaggccagagcagtgaagaggggcatgtggggtcgtggggcacacctctaggacattggggtccaggggtcctttccagtaagaccttgctgtgctggaaacacccctgtgtctttcagggctgttttcagagtcagggttgatgtgaccgccacgtttcctctgggcctgacagctgtaatctgtggcttgggagtgcagataagtgtgatgaagctgccagcaggcctgggcatctgtgtccttggtgggggcagggagaagagacagggactgggatgctggggccagggccagagccccgctgagatatgaggtccccttccaccctgggaggtgtgtggggaggagcttcctcgaacccctttagctgggacggatggaagaatgagcagctttgcatttccggcagcgtctccagctttcctggggctttctcggcttgtgttattgatgaactccagtgcgtgaggccattggagccttagaggcctgtttcccctggacaggtgactgcctgggccagaggcagcactggcatggtgccctcttgctcctggctgggagtgacacggggcgtggggcgctttgcattcatccccagctgtttgggcacatttacaaccctcattttacagatgggacaaaccccagtggagaatctgctccgggcagctgtttatgaaccacctgaatggggcacacaggactgtgggaggaggaggagggacccccagggctgaagtggcagggaaagctactcatcctttcggcccatgtttactgctcacaaattgtgggccaggtctcgtgccaagtgttggagctacagccgtggacaaaagagacctggtcctgctcacggcagctacgctttagcaggagggatgggccatggagaagcacatggaagaggtggggtggcgagaagagctaggaaggggacgaggcaggtgagctgacatggagccactgctgggaaggggactccttctgatgtgggagtcaggagggcctctcagaggaggggctctatgagctggggagcagctggcaaagagcacagcaggttcaaaggccggaggtgcgaaggagcctgctgtgttggaggaagagggagcaggccagtggggttgggagaagtgactggagggggtgaaaggggacaggcatgtgggggccttgcaggacacctggaggagttcagatttggttttcaattccatggagggttctgagcagggaagagccatgatctgactcagtattttttttttttttttttgagacagagtctttctctgtcgcccaggctggagtgcagtggcatggtatcagctcactgcaacctccgcctcccgagttcaagcaattctcttttttttttttttttgagacggagtcttgctctgttgcccaggcgggggagtgcagtggcgcaatctccgctcactgcaagctccgcctccctggttcatgccattctcctgcctcagcctcccgcgtagctgggactacaggcgcccgccaccacgcccggctaatttttttgtatttttagtagatacggggtttcaccgtgttagccagcatggtctcaatctcctgacctcgtgatccgcccacctcggcctcccaaagtgctgggattacaggcgtgagccaccgcgcccagcctcaagcaattttcttgcctcagccttctgagtagctgggattacacgtgcgtgccactacactcggctaatttttgtatttttcgtaaagatggtgtttcaccatgttgggcaggctggtcttgaacccctgacctcaggtgatccacctgccttggcctcccaaagggctgggattacaggtgtgagccaccacgcccagcctgactcagtcttgaagagctctctggctgctgtctggagaagggagtgtcgggggccaggctggaagcggggaggcagagaagatggtgatttgagccaggtgggggtagttttctaaatggaaagaagggaacatattcgagttttttttcagggagagtcaacaagataggtcagtggactggggtgcgagggaaggagaggaatcaagggtggttcctcaaggtttgaggagtttggtagatggtggagccattttccgagacgagaagatcgggggagggaggttgagagcagatggagtgtgggccttaactctggtcctaaaatcaagcgaggacaactcaacaacaagagtcagacaaccccattaaaacacggaccaagcacctgcaaagaagacatgcaggcagccaggcgcggtggctcacgcctgtaatcccagcactttgggaggccaaggtgggcggatcacaaggtcaggagttcgaggccagcctggccaagatggcgaaaccccgtctctactaaaaatacaaaaattagccgggtgtggtggcaggcgcctgtatgtaatcccagctactcaggaggctgaggcaggagaatcgtttgaacctgggaggtagaggttgcagtgagccaagactgtactccagcctgggcaacagagcaagactctgtcttaaaaaaaaaaaaaatgcagatagccaacggggacatggaagtgtgctcagcgacactcgctcatcgttagggaaatgagaatcagtgagacacactcatacccattaggatggtcacttgagaaaacagaaaatctcaaatattggtgaggatgcggagaaatcggggcccatgtgtgccgttggggtgagggtgcggagaaatcggggcccatgtgtgccgttggggtgagggtgcggagaaatcggggcccatgtgtgccgttggggtgagggtgcggagaaatcggggcccatgtgtgccgttggggtgagggtgcggagaaatcggggcccatgtgtgccgttggggtgagggtgcggagaaatcggggcccatgtgtgccgttggggtgagggtgcggagaaatcggggcccatgtgtgccgttggggtgagggtgcggagaaatcggggcccatgtgtgccgttggggtgagggtgcggagaaatcggggcccatgtgtgccgttggggtgagggtgcggagaaatcggggcccatgtgtgccgttgggaatgtaggatggtgcagctgctgtgtggaggcccccccaaaatttaacatagaattaccatatggtggggcaaccccacttctgggtatcaaagaaatggaagtgggaacttgaagaggaatctggccaccgcgttcattgcagcgctgttcacgatggcccaacggtgggagcaacccgagtgtccgctgatgggtggtgggtaagaagctggggcccatccacacgttggaataggattcagcctggaaaaggaaggacgtttggacgcacgctgcgacatgcacgggccttgaggaagttatgcgagtgaaataagccacaacaggacaaataccgtacgattccatttgcatgagctccctagagtagccagatccacagagacagaaaagagaatggtgggtgccaggggctgggggagagggggtgcagagctctttttcagtgggtacagggtttcacttttgcaagatgaaagagttctttagatggatgttgctgataattgcacaacattgcaaatgtccttaatgccactgaactgtacacttaaaaatggctaagttgggctgggcgtgtagtggctcatgcctgtaatcccagtacttttggagcccaaggtgggtggatcacgaggtcaggagttcaagaccagcctggccaagatggtgaaaccccgtctctactaaaaatacaaaaattagcctggcatggtggcaggcgcctgtaatcccagctacttaggaggctgaggcagagaatttcttgaacctgggaggcagaggttgcagtgagctgagatcacaccactgcactccagcctgggtgacagaccgagactccatctcaaaaaaaaaaaaaaaaaaggctaagttggtaaattttatgtttaccccaattaaaattaaaaactgtggcagggtttaacctgaagggagaaatggtaccggcccctcctgcttgaatgggt

SEQ ID NO: 673 - DNA, 6000 bp, Homo sapiens
gggcaacaggtggaggagctccagggaggaggatgtggctggagcagagtgggcaaggagagggagggggatgaggtcagggagatgtgcccatctgggtgcgttttgactttgtctctctagtatgagatgtggtgatcttgtgggccatggtgagggctttggcttttatgctgaatgaggtgggagccacggaaaggtttctttctttttgttttcttgagagacagggtctcactgtgttgcccaggctggagtgcagtgacacaatcacagctcactcactgcagcctcgacttcctgggctcacgtgattctcccacctcagcctcctcagtagctgaaactagaggtgtgtgccactttacctggctaactttttattttttgtagagatggtgtctggctgtgttgcccaggctgatctcgaactcctggcctcaagggatcctcctgcctcagcctccaaaagcactgggattataggcatgggccaccatgcctggccatttctttaaaataacagttttcattgagatataatttgcatatcatacattcacccatttaaagtatataatttggccaggcatgatggctcacacttgtaatcccagcgctttgggaggccagggtgggaggatgaccagaattttgagagcagcctgggcaacaaagtgagaccctgtctcaacaaaaatgaaaacatcaggtgtacatagtggcatatacttgttgtccaagctagtcaggaggccgaggcgggaggatggtttgaacccaagacttcaagactgcactccagcctgggtgacagagtgagaccctgtctcttgaaaaaaagaaaaagtaaataaagtgtgtaatttgatggttttttgtatattcacggagttgtgcaaccatcattaccatcacttttaccgtcacttttagaacattttcaccactccaagatgaaaccccaaacctgtagcagtcactcctcattctccccagcccctggcaaccactggtctactttttgtccccatagatgtgcctactatggacattttatataagcagaatcatacatgtggcctttgtgtctggcttctttcacttatcaatgttttcaaggttcatccatggtgtagcacgcgtcagcccttcattcctttttatgctgagtcatattccagtgcgtggttatgccacattttatttacctattcaccagctgatgggggtgtgggttattttcactgcttggctgctgtgaacatttgtgtccaggcttccgtgtggacatgctctttcctttctcctgggcatatacccaggagtggaactgctgggtcttaggggacccctatgtttaccttttgaggctgcaccattttacaatcccacaagcacctcaagaggcttccaactcctccaggtctttgcctgcagtcattctccgtctttgatcacgaaaggactctgagcagaggaggaaaagcatctgacttgattttccaggagccctgtgacaccatgttgatcatattttgttatcagcactctttcttttcttctgtatcttcgactttccccagggcaagacctctctctcaaacatgacgaagtctttttttcccttcttaagctgccctccctgccaccggaagtgactcccctcagcaaggccaaggtggctcacgtgtcccatcaccctttcatctctgcccttctctctcgagtgacagcatggcgtgacatgagggctctccagccatggccttgcagccctcttgggtaagcatcacgtacatttggaccttgaagacttggtcatgaatcagagttagattgggtgagatggtcaaggcaggtcagtatcaaggaagtggaggagggtgtcagggccaggcagaccgcagattttagttaactggctaatttccgagaactacaaaagtcattaaaaaaaaaggcaactgcatagctgaaggctgttgaaggccttaaggaattcaatgaagtgatattaattaattaatcaatcgatcagttacttgattaattaatgagttaattagctgattgagtaaagtatttattgagtacctgctatgtgccaggcatttttccaggtgctggagatacatcgataagcaaaacagggtcagcttctgtctctcgggagctggaggagatgaacaaggaaacagataagaccatttcacacaaagcaaggtggcctgacagagtgggctgggactcctgttttcaacagatgcaacagcaaaggcttctctgaggagtgggtttcagctgagcccagaagaggagagtggggagccatggaaggatctaggggaagcgtatcctagacagaggaacaggaagtgcaaagttcctgacacaagaaaaagctggggatgctcaatgaactgaaacaatgggggagagggcaggagatggaggcagagagatgggcaggcgccagttcatgtgggtccggaaaataacgacgacactccccagctcagttgcactgacacattccagggactgttctaagcactggcacattttttgacttgtttaatcctcatggtagcccttggaaaggggctcttctaatccccgtttcgtagatgaggagactgaggcacagaaaggcccaaaccacttgccccaggactccaatgtgggaaaccccagagcctggatttctctgaacctgtcccccggggctaccacagtctcacctcagccactctgacctccctcaggagttgggccctgccccttggggcactggaccatattcggcctccttagaggaaggcagtgccaggcaaagctgtctaacgagaacatagcaggtgctctgtaaatattggttcaggcgaagacatgttgcttaaggatggccctgcgagaaggctgctttcttctggagttaaataagaggtttagaaagcctccctcggagcactcaaggactgagcctgccttacccacgtgctggggacaccaccctcctgtccctgtgtaacccaggagtctcttctcagtaacttcattcagaaaatgaggggactggccagcacttcagggaccagaaggcaggccaggtggggtgtggtggaggacttcaggggggcgtggagggcttcagggatacactcacccatctaagggcaactgccacttagtgccagcccacttctctcccttttttcttttttctttttcccccagggtcttgctgtcacccaggctggagtgcggtggtaagatcagggctcactgcagccttgaactctgggactcaagggatccttctgcctcagcctcctgagtagctggggcgacaagcgcatgccactgtggctggttaatcttttcattttctgtagagactggtctcactatgttgcccaggctggtctccaactagtggcctcaagtgatccctcacctggaccttccaaagtgctgggattacagttgtgggccaccatgcaccgggcctgttctgttttcttggagcacttgcctgcaattatccttcattcatttgctcacgtgctcatcattggtttccctcttcattagaaagtggggacttggtttgggttaactaagcttccctgtgcatcagttttcatttctttctttctttttctttttcttttctttttttttttttttgagatggagtttcgctcttgttgcccaggctggagtgcaatggcgctatctcggctcgccacaacctccgcctcccgggttcaagcgattctcctgcctcagcctcccgagtagctgagattacaggcatgcgccactacgcctggctaattttgtattgttagtagagacggggtttcgccatgttggtcaggctggtctccaactcccgacctcaggtgatccatgaagtccacccgcctcggcctcccaaagtgctgggattacaggcgtgagccacctcccagttttcttattgtaaaatggagccattgtgtgcaaagcactcaggacaggggccagcacctagaaggctcctcagtcattcattctagaatatttactgtgagcaggcattccctgccaggccacgttctagagctcaggacgcgtgggggggggggcccgcctcacgggttggcatcccagttggagcacatggtcagaatgcaaggacgcaaatgaacgtgaacctgccagggggtgctcagtcatagggtgatggtggcaccagcgttacgaaggatagggccaggcggatacctgggagaacagaattgcctgtgcagggtgtatggaggccctggggctggagcctgcggggcttcttccagggacagtgaggctggagatggactgcggagatgagggtctagaaggtggtggcggggcatgtggaccgttgtaagggctctggggttcctgggtgggctggcgaagtcctactcacagtgaccaaccatgatgatggtcccgatagaggaggagagggaggaggagggaaaaggaagggtgaggggctcagaggggagagctgggaggaggggagacataggtgggggaaggggtaggagaaaggggaagggagcaagagggtgaggggcaccaggccccatagacgttttggctcagcggccacgaggcctcctcagctcccgccccaaaacggaagcgaggccgtgggggcagcggcagcatggcggggcttgtcttggcggccatggccccgccccctgcccgtccgatcagcgccccgccccgtccccgccccgaccccgccccgggcccgctcaggccccgcccctgccgccggaatcctgaagcccaaggctgcccgggggcggtccggcggcgccggcgatggggcataaaaccactggccacctgccgggctgctcctgcgtgcgctgccgtcccggatccaccgtgcctctgcggcctgcgtgcccggagtccccgcctgtgtcgtctctgtcgccgtccccgtctcctgccaggcgcggagccctgcgagccgcgggtgggccccaggcgcgcagacatgggctgctccgccaaagcgcgctgggctgccggggcgctgggcgtcgcggggctactgtgcgctgtgctgggcgctgtcatgatcgtgatggtgccgtcgctcatcaagcagcaggtccttaaggtgggtgagggagaccccagggggtccgcgcacggacccgggctgttgggcgctgggcgccgggaggacccgcgcgttgcggtgggtgggcgaccgcagcggaatcggcgcccgggcctggcgccgcagagcacgagggaggccaggcgcttcgggaggggctgctgcccgcctccccaccaccctcaccgccccagactgaggctaggggggaacccaggggctttgctggaggcgcaggccagggttggggaggcctggacgggagaccacccgggcgcctgacccgccctaaagggtctgggcgcccacgacggatcaggagtgtggacaggttgcttccgtggtgccgcccgaaggagcccaagagtgtgtgaacgtctgctttcacagcagccggtagcagggtccggtaaaattagagctgcactttgcttgtatcctgtgagcccaggaggacaggaaccttctgtgagacccacgtgggtgcccagctcacatggtaggtgctcagctgagcatcctccactgcccagaatctccccataggaaccctctcccagaggcagaatgcgcgactctgttctccctgctcactgcctccatgattcagtctggaaactataagccgcttttctccccagattcatgcagaggcaggcagcagcccaaggtcctctgagtgcacgcagccttaggtctttcctctgatcctaactttgcataccattgccctttcaaccagggagacagattaggcggtcagctggtctgcagacggacagactctgccctgggtgcctgggtggcctgtttgaatg

SEQ ID NO: 674 - DNA, 6000 bp, Homo sapiens
ttatttgataaaacaaaaacaattcttgaaagcatctctttctcccttccttcctgtgcctgggggtgggtggggagtctgtgttgagcacctcagctgagaccaggcaattgcagtggcctgcgaaggtgtttggactttgtcctgcagaccgtgagaggcccctggagattctacactggggaatgacaatttcctaggtgttttaggaagctcagcctgcctgccggtggagggggaagggaggaggggagagggttccggccagttaggggattggagctgtcatccaggcaggagatggtgtgatctggatcagcagttctcaaagtgtggtccccagaccagcagcaccagcgtgttcaggaaacttgctgaaaatgcagttatcaggcccacccagacctactgaatcaggcactccaggggcggggccagccatctgggtttcactaaacctccaggtggttctgctgtttgctcaagcgcaagaatgctcgctgggctaaaggaagagggtggagagggtacgtaagtcccttgggcctgcgggacaacgtgccaccaactgggtggctcagaacaacagaaatgcatttcttacctttctggagggcagaaatcagaaacgaaggcatcagcagagccctctgaagcctggggtggggagaagccttctttgcctccttcgacctctggtggctgccagcagccctcggcatttcttggcttgcagatacagcactgcaatctctgcctcaatggcacatgacattttgtatgtgcctctgtgacaagatgtccttcttctccttcttttttgtttttttttttttttgaggtgcagtttcgctcttgttgcccaggctggagtgcagtggcacgatcttggctcactgcaacctccgcctcccgggttctaatggattctcctgcctcagcctcctgagcagctgggattacaggtgcccaccaccacgcccagctaatttgttgtatttttagtagaggcggggtttcaccacgttgggcaggctggtctcgaactcctgatctcaggtgatccgcccacctcggcctctcaaagtgctgggattataggcgtgagctaccgcgcccggccggatgtccctcttctcataaggacccctgtcctattggattagggcccgccagaatccctcaggccctcctcttgatttaattgcatttgcatctgcaaagaccctatttccaaatagggctgcaatcacagggaccaggggcctaggacttggacatatcattttttggagggacacaattctacccacctcagatggggagaatgaaaggaagcaacaaacagcaaaacaagagaaatgttagtgattagatgtgggagtggaagtaggatgaaaacagaaagaactcaaatgccctgccgttgttacatgaataacaaagctggggtaaccgcggtgtcctttttccctttttctcaaagagggacatcctcaggctagtatttcagaaactttatcctaagttcttgggactcataaacacattgctgaaacaaactccgtctcacctgacgacctctctctctcccccatggggcagggctggggaagaaggagcgagcaaggcccctgtccacctcacggagccagggcccaattgcgttgactcttgctgagggcgacactttagagccaagttcgagttgaagttcaagggcccaggatctggaggcatctgaagctgctccagctctcagctgcctcaagggaaaagatagtctcagagatagtctagcacctgtcttggtgaggagccaggcagcacataagtgtgggagctcctgcctctgacaccagacatggctgaaagcatttgtccttctggaagattccacttcacccatcactccagagtgagtcagaagcccctggagggtttgtgaaaatgcagattcctgggccttactccccagtgtctgagtcacaggtctggggtgagaactcagaatctgctttccttctttccttccttccttgcttccttccttccttttctttccctctttctttctttcttttttctttctttctttctctttctttcttttctttctttccttcctttctctttctttcttctttccttccttcctttctctttctttctttctttccttccttccttccttcctttccttccttcctccttcctccctccctcccttcctttcactcagaatcaattttcctttctttgactcagaatctgccttccttccttcctctttctttcttagacaggctcttgctttgttgctcaggctggagtgcagtggtgtgaacatggctcactgcagcctcgacctcccaggctcaagagatccttccaccggcccgatgtccctcttcttataaggacccctgtcctattggattaggccccgcccgaatcccgcaggccctcctgttgatttaattgcatctgcaaagaccctatttccaaataaggctgcaatcacagggaccaggggcctaggacttggacatatcattttttggagggacacaattctacccagttacctgagtagctggggctagaagcacttgccaccgtgcctggctaattaaaaaaaaatttttttgcagagatgggatctcactatgttgtccaggctggcctcgaactcctgggctcaagttatcttccagccttggcctcccaaagtgctgggattacaggtgtgagccaccacacccagcctgagaacctgcatttctatcacatttccaggtggcctggtgctgctgctgctctggagaacacctggaggagaacaaaggcccatgatgaacggttctcagcctagtgtgcatatgagaatcacacagggagtttcaacacacaccaacccctgtgcccgacccagaccctgggaaaccgctgagggcggggtacaagcgctggcccccagggagttctaatcactggccaaagtcggggtgcacagcccaactccttctcacccgtcaatgccacttcagataccacttcttcagcaagcctttcctgacttcctccaatggggttaggtccctcattcatgcattcattcattcattccacaaaccatcatgccccttgtatgcaccgggccctgtgctggtgctggggattcagcaccctcgtggtgtttctctacagaaacatggaggaaacaagtggtgaaaaatcaggacagatgatgccagggtgtgatgaatatagaacaggacgacgacataaagagcattcgttaattagagacagggtatcactctgttggccagactggagtgcagtggtacaatcgtggttcactgcagccttgaactcccaggctgaagcaatcctcccgcctcagcctccggagcagctggaactacagacacacctatcacgcccagttaatcttttctttcttttttttttttttgagacagagtcccactctgtcgcccaggctggagtgcagtggtgcaacctcggctcactgcaacctctgcctcccgtgttcaggtgattctcttgcctcagcctcccgagtagctgggattacaggtgcacaccgcacctggctaatttctgtatttttaggagagatggggtttcaccatattggccaggagggtctcgaactcctgaacttaagtgatcggcccacctcagcctcctaaagtgctgggattacaggtgtgagccactgtgccagagaagagggttactttagatgggctggttgaggaaggcctctttgaggaggtgatgttggagctgcccctcaaaaaagcctccgtggagcccttttaaacaagaggagcatttgaagcggggctcagagcctgtgctgaggtcctgcggtgggcacaggctgaccccataagaagaacctgaaggaagccagggtggctgcatcccagagagcggagagggaggcagaggagggcagcccggggaggacctggagtttatgcaacaggaaaccaacagagttcaagcaggaagtaacacaatcccactcgctttgaaaaaggtccactctgtgcccctggaatgcgccctcaccgaggtggattcctctccctgaaagcgtttttctcaggtgtcacggcagactcattggtgtgagaagaatctctttgtcccactggtgtgtgatctttatgagaaggtgattaacgtgcccccttgcccataggaagtgctcagtcggcacagtctgacagagctgggtgtggtggcgggtgcctgttgtctcagctactagggaggatcacctgagcccaggagtttgaggctgcagtgagctgtgatcaccccactgcgctccagcctgggtgacagagcaaaaccttgctctgaaaagaagtttgacaaatgaccctgtgagtgtgtatccagtggtcctccttggcactgcccatccctgcccaaacaggagcctcagctaccaccagatgtgtccagaaagatatttctgcccattgttttccaaaggatatttttgtttttgtttttgttttgtctttttttttttttttttttttttttgaggctgagtcttgctctgtctcccaggctggagtgcagtggtgtgatctcggctcactgggttcaagtgattctcctgcctcagcctccgaagtagctgggattacaggtgcccaccaccatgcctggctaatttttgtattttaattagagatgggtttcaccatgttgtccaggctggtctcgaactcctgacctcaagtgatccacctgcctcggcctcccaaagtgctaggattacaggcatgaaccaccacgcctggccccctccaccttttttttttttttgagacagagtttcacgctgctacccaggctgggcggcagtggcgtgatcatgactcattgcagccttaacctccggggctcaagcgatcctcctgagtcagcctctggagtagctgggactacagatgcgtttgccaccacacctagctaatttttgtattttgtagagatggggtttcgccaagtggcccaagctggtcttgaactcctgagctcaagcaatcctcctgcctcggcctcccagtgttgggattacaggcgtgagctactgcgcccagcccaaagaatatttttggaaccagcttctctgtgggctccagccatccctggcagacgcctcggcctgcagcctaagaacagttccccctcaggaaagaaactgacagctttgtggttctgcgttgaagggtaagggcatctcctaagctccagtgttcttggtacccacgctggtttcagggaggcacctcctgcctcgctccatggcagctggcctctctgatgctgtggacggtatccctgggcctcagtgggccctgggcagagcgggtgggtgttggagacaaggggccagtggcaagagctgcagttttctgggcaggaaggaaaatgttggtccagtaggaaaacaggcaaaacagatggggactagctggacatggagctgtttggttatgctgaagcatgaaacttcggctttcattttaaaagcctgtgtttggcagggcatggtggctcatgcttgtaatcccagcattttgggtggccgaggtaggcggatcacgaggtcaggtgtttgagaccagcctggccaacatggtgaaaccccgtctctactaataatacaaaagttagccagatatggtggcgggcgcctgtaatccaagctacttgggagactgaggcaggagaatcgcttgaacccggggggtggaggttgcagtgagcaagattgcgccattgcgctccagcctggtgacagagtgagactccgtctcaaaaaaaaaaaaaaaaaagagcctgtgttcttcaggcccatgcacggtgagaggtcaggtggttctcttgagttagaaagtgaacctcaaaaactcatctccgattccaacatagcag

SEQ ID NO: 675 - DNA, 6000 bp, Homo sapiens
accattctctatagttggtcatttaggttatctacaaatatgtgttagtattcctgcagagacccacaagtagtctctcactaatacctaaagtgaaggaatagtttattgaagttgacaaacactggcccttcacaacagaattgacaaaagaagtggttcactgcttcccttctgttacaggttagtagacagataaccagaggtagtctccgtcttttgtccatttgtaataagatcatcccaaccatgaggcttagtggtcggaactcatactcccagtgcctgtggatggtgcatttttaaatcttttccacttcatatcattattttcctccaaaatggtgactatatttcaatttttccagccttagcatttcttttacctatcaaaaacatttttgtgtaattcctccaaataaatattgtcactatgcattgctgattagaaaagaacagcgttcttaactctgatagcaaatatcgtatcagggaaaataaaccattttggagctcaaggaatttagcatcaaaacaatggactctaagatgcacagcacctgacatatatgtaggaggtgctctgtagatatttgtggaattagtgacaaaaccccaaggaaattatcccttaagagaaacgaatggttacttctaatcttactacagctaccagttaatatgccagccttcaggacattggtttaaagacctgaggctatatatatttttttcagattattactttctatgggctaagtgaagaaaggctgtttcaggttgacagcagtacctcctaataattcagacaaagttttggaaacggacagttgttggggaaagggaatgtgaaatacgaagtgaagtgccctgactgaaaaatcagcatccaagtttttcacttactcattaaatggaacttaaattatctattttgacaagtaaaaatttaaatttaaacccgagatctatcatgtgttggtgaggggtaaatgtagaaatttctgcctgggcattgatcaaagggaaccatccctcagtcttcctgttaaggatgaggcaatagttaccctgaaaaccaggcacagaaaagaacatcacatagttttgtgagatggactttgtaaggataaatttcctttttcattttaattgtccttacttgacatgagacatttttcttccctatttcttcccagttcagacacatgcagcaactaagtgataatcagtagaaaataccttcaaagcaagctgcaaccacaaaacacaaggaaggagaaaagaactttttcccttaagcagaaccagggatgacctaaatactatgtcacccttcagagatggcaacatttacatttttgactaaaaaaaaaacaaaaaaaaaaaacagaaaaacttcttttgtaatctcttctttcattatcttattaccactatcattgttttatgtctgttttcttgatcttttattttattttatttttttttaatttttaaatttttttgagatacagtctcattctgtcgcctaggctggagcagtggtgtgatctcgactcactgaaacctccacctccggggtacaagggattcttctgcctcagcctcctgagtagctgggattacaggcacctgctaccacgcccagctaatttttgtatttttagtagagatggggtttcaccatgttggccaggctggtctggaactcctgaccccaggtgatccacctgcctcggcctcccaagctgttggagttacaggcatgagccactgtgcccggcctatttgttcttttaattcaaacctttatttggttcagtggagttcacctaactatgattactaagatctgcgggttgactggaaggaaatacactacgaagttataatggttattgctatagtgggattacaggatatttataattttccatctgtgttttgagaaggttactaatgggaaagcaaaaaattagagctacagccctggcatcaccacttttattatgtgcgctggggcaaatcagcatctctgcacctctctttttctaagttaaagggggtcaccaaggtgatctccgagtttactttcaagtttaacgttctgtgggtctaatggaaaagacagtttagcttgatataacccttgtggagcacaatttggctgtgcctttcaaaactacgaatgggtatacctgctgacccagtgactcccatttctggaaattgctcctatatatatacttgtacagatatgaaattaaagttatgcaaggttatttcttttttttttttcttttgagacggagtctcgctctgttgctcaggctggagtgcagtggggcgatcttggctccgcttcccgggttcacgccattctcctgcctcagcctcctgagtagctgggactacaggcgaccgccaccacgcccggctaattttttgtatttttagtagagacgggtttcaccgtgttagccaggatggtctctatctcctgacctcatgatccgcccgcctcggcctccctgcaaggttatttcttacagaatagtctatgatagctaaagactggaaacaagtgaaatattcaccaacatcctggggttcagtaaattgatatttagatacaacagtgtggtggttagctgtaaaaacccttcaatatatatttttaattttttggacctatgtgtcagggacattggtgttataggttctctgtgcctgcctcgtcaatttttttaaagaaagaccaaataaaagtaaactatgacatttgaagaaacaattgggcaggagagcctcaaagatttcaaggatttggggaaagtctgtaggaagactcctttaaccaaataaatattctctgacgccctgaaaaaccggaatagaaatgaaggcaaggccaaatttgaagctggcttcctttgccaagaatgatccagtagggcaccgcctatttttagggtgcggctgtctggatcgggggctgcttctgcagagtgtaattggaaaggtggggggaagcaacagctgtactttgggggcctgcctttgagctcatcatctgagttactgaggtcccctagcggctgtcagaggaggcccagactgtccaaatttgatagtaaacgtgaagagaccacaagaccagggtgggaaccagtccccgcccgtccccaatccatccggctcacgctccccaccccacccatgcctagtatcagcaagaagctgttgtgataaatagattatgaagaaacaggagcccggactagagagacgatagtgagaatataaaagaagaaagataatctctctcaatctttttaacttttgtaagaggcctaatttttccttttttcccctcttttctcttttattttttcaacaacctcttgtccaactgactaattttctctagatgccactttttccattgcagaattacttgtaagaaagaaagggattaaaaaacaagagttggaagctgtccttttggacaagatatttaaaaccctactgtccatcttccatcctaagtggtcccatctttctaaaaggaaatgccttccatattcttcctaaaaaagcaaaagcataacaaaacaaaactggaaaactgtttcttctgcttgagacacaagggccattatcttcccacctttggccccactgatccttgacaggatgtcctggacctgcagcccagatgaggaaaggtggggtgtgggtggggggttgactgacacacacagcaagtagcctcaaggaatttgggggtggggcaggctgcgccccaaggctttggtcctatctcccgccccccttgcgtttttacttaacacccgatcacttccgttgcaaataaaaaagaagtaacaaacagctaaatttaattagggataagtaataaaatgacctggttctctctaactgcgctcctgagcccttcgctgccggccctggacttagtggacggagcgggagattcccgcccaggggaagaggttcccacggagggcatgcggtcgcgggtgcctttggattcgtgtgttcagggaggccagataatctcctccccgcgccggagcccctgttcctcatttctagcattttaaaaaaggtcaagaatacagtgaatccggctgggggctgccggctgggtgacgcgcctctggctagaccgaatggcacaggctgagcccgggggtgcggaccggtgggcacggagaagggtccctcggcgcggactcgactgcaggagccgcggcgccgggggtggggggcgtgtgccgctcgcgagggggccggaggacttgacagatcgcagcgaaagaaaacattaaaccaaaacaaaacccaccgattccccacgtcgttcagcaaagacatcgtgggtggagccaggagggagcgattgagtagaattcctcgcggccgcctccgcccgcccaccccgcgcccccggccctcggccccctgccctgccagcccgccgggctcggcccgcagcggaggtcagggagcagcgagcgcctcctcccacccgggcttcccgagtactcggctctgctgctccgtagtaaacaaagtgtcgccggcgcctccacgctggtttgcttcctagcaatcaaaacactgagaaggcgagagaatcacagaaacactcgagaattaccagaaaataatagagatccaaaaaaaaaaaaaggaggtgagtgtgtgaaagagaaaaacaccccactaccccccaccagcccaccgccgcctccccgtggaaaaccgggccccacccagcccggcgcccactggctgcccgggcggcggtgccgcatgcccattggccgcgcgggctgtcggtcaggggcgggccggcgcgcgcgccgccgcgggcggggggcggcggcagatcccgtaagtcgggcggcctggtagtcgcagcagccgctgccgcagccgccacattcaacaggcagcagcgcagcgggcgcgccgctggggagagcaagcggcccgcggcgtccgtccgtccttccgtccgcggccctgtcagctggagcgcggcgcaggctctgccccggcccggcggctctggccggccgtccagtccgtgcggcggaccccgaggagcctcgatgtggatggccccgcgaagttaagttctgggctcgcgcttccactccgccgcgccttcctcccagtttccgtccgctcgccgcaccggcttcgttcccccaaatctcggaccgtcccttcgcgccccctccccgtccgcccccagtgctgcgttctccccctcttggctctcctgcggctgggggaggggcgggggtcaccatggccgaggcgcctcaggtggtggagatcgacccggacttcgagccgctgccccggccgcgctcgtgcacctggccgctgcccaggccggagtttagccagtccaactcggccacctccagcccggcgccgtcgggcagcgcggctgccaaccccgacgccgcggcgggcctgccctcggcctcggctgccgctgtcagcgccgacttcatgagcaacctgagcttgctggaggagagcgaggacttcccgcaggcgcccggctccgtggcggcggcggtggcggcggcggccgccgcggccgccaccggggggctgtgcggggacttccagggcccggaggcgggctgcctgcacccagcgccaccgcagcccccgccgcccgggccgctgtcgcagcacccgccggtgccccccgccgccgctgggccgctcgcggggcagccgcgcaagagcagctcgtcccgccgcaacgcgtggggcaacctgtcctacgccgacctcatcaccaaggccatcgagagctcggcggagaagcggctcacgctgtcgcagatctacgagtggatggtcaagagcgtgccctacttcaaggataagggtgacagcaacagctcggcgggctggaaggtgagtggactcggcgcgcgg

SEQ ID NO: 676 - DNA, 6000 bp, Homo sapiens
acatgaatgtaagattcagatttgtgacattcagagaatttggaatttcatgtaccatcattaattttatggcaattatatgagttctcaatgttagaaagaattttaattctaatgtgaatccccttttggcttgggaaagctattttattttattgtcgtccaagctggagtgcagtggcatgatctcagctcactgcaacctctgtctcctgggttcaagtgatcctcccacctcagcctctctagtaactgggactacaggcttgcgccaccgtgcctggctaatttttgtattttgagtagaacagggtttcagggtttcaccacgttggccaggctggtctggaactcctgacttcaagtgatctgcctgcctcagcctcccaaagtgctgagattacaggtgtgggccactatgcccggcccaaagattttattttaaatggctgtgtgaaatgccaccttatagatatgccattatttatttaaccattctctatagttggtcatttaggttatctacaaatatgtgttagtattcctgcagagacccacaagtagtctctcactaatacctaaagtgaaggaatagtttattgaagttgacaaacactggcccttcacaacagaattgacaaaagaagtggttcactgcttcccttctgttacaggttagtagacagataaccagaggtagtctccgtcttttgtccatttgtaataagatcatcccaaccatgaggcttagtggtcggaactcatactcccagtgcctgtggatggtgcatttttaaatcttttccacttcatatcattattttcctccaaaatggtgactatatttcaatttttccagccttagcatttcttttacctatcaaaaacatttttgtgtaattcctccaaataaatattgtcactatgcattgctgattagaaaagaacagcgttcttaactctgatagcaaatatcgtatcagggaaaataaaccattttggagctcaaggaatttagcatcaaaacaatggactctaagatgcacagcacctgacatatatgtaggaggtgctctgtagatatttgtggaattagtgacaaaaccccaaggaaattatcccttaagagaaacgaatggttacttctaatcttactacagctaccagttaatatgccagccttcaggacattggtttaaagacctgaggctatatatatttttttcagattattactttctatgggctaagtgaagaaaggctgtttcaggttgacagcagtacctcctaataattcagacaaagttttggaaacggacagttgttggggaaagggaatgtgaaatacgaagtgaagtgccctgactgaaaaatcagcatccaagtttttcacttactcattaaatggaacttaaattatctattttgacaagtaaaaatttaaatttaaacccgagatctatcatgtgttggtgaggggtaaatgtagaaatttctgcctgggcattgatcaaagggaaccatccctcagtcttcctgttaaggatgaggcaatagttaccctgaaaaccaggcacagaaaagaacatcacatagttttgtgagatggactttgtaaggataaatttcctttttcattttaattgtccttacttgacatgagacatttttcttccctatttcttcccagttcagacacatgcagcaactaagtgataatcagtagaaaataccttcaaagcaagctgcaaccacaaaacacaaggaaggagaaaagaactttttcccttaagcagaaccagggatgacctaaatactatgtcacccttcagagatggcaacatttacatttttgactaaaaaaaaaacaaaaaaaaaaaacagaaaaacttcttttgtaatctcttctttcattatcttattaccactatcattgttttatgtctgttttcttgatcttttattttattttatttttttttaatttttaaatttttttgagatacagtctcattctgtcgcctaggctggagcagtggtgtgatctcgactcactgaaacctccacctccggggtacaagggattcttctgcctcagcctcctgagtagctgggattacaggcacctgctaccacgcccagctaatttttgtatttttagtagagatggggtttcaccatgttggccaggctggtctggaactcctgaccccaggtgatccacctgcctcggcctcccaagctgttggagttacaggcatgagccactgtgcccggcctatttgttcttttaattcaaacctttatttggttcagtggagttcacctaactatgattactaagatctgcgggttgactggaaggaaatacactacgaagttataatggttattgctatagtgggattacaggatatttataattttccatctgtgttttgagaaggttactaatgggaaagcaaaaaattagagctacagccctggcatcaccacttttattatgtgcgctggggcaaatcagcatctctgcacctctctttttctaagttaaagggggtcaccaaggtgatctccgagtttactttcaagtttaacgttctgtgggtctaatggaaaagacagtttagcttgatataacccttgtggagcacaatttggctgtgcctttcaaaactacgaatgggtatacctgctgacccagtgactcccatttctggaaattgctcctatatatatacttgtacagatatgaaattaaagttatgcaaggttatttcttttttttttttcttttgagacggagtctcgctctgttgctcaggctggagtgcagtggggcgatcttggctccgcttcccgggttcacgccattctcctgcctcagcctcctgagtagctgggactacaggcgaccgccaccacgcccggctaattttttgtatttttagtagagacgggtttcaccgtgttagccaggatggtctctatctcctgacctcatgatccgcccgcctcggcctccctgcaaggttatttcttacagaatagtctatgatagctaaagactggaaacaagtgaaatattcaccaacatcctggggttcagtaaattgatatttagatacaacagtgtggtggttagctgtaaaaacccttcaatatatatttttaattttttggacctatgtgtcagggacattggtgttataggttctctgtgcctgcctcgtcaatttttttaaagaaagaccaaataaaagtaaactatgacatttgaagaaacaattgggcaggagagcctcaaagatttcaaggatttggggaaagtctgtaggaagactcctttaaccaaataaatattctctgacgccctgaaaaaccggaatagaaatgaaggcaaggccaaatttgaagctggcttcctttgccaagaatgatccagtagggcaccgcctatttttagggtgcggctgtctggatcgggggctgcttctgcagagtgtaattggaaaggtggggggaagcaacagctgtactttgggggcctgcctttgagctcatcatctgagttactgaggtcccctagcggctgtcagaggaggcccagactgtccaaatttgatagtaaacgtgaagagaccacaagaccagggtgggaaccagtccccgcccgtccccaatccatccggctcacgctccccaccccacccatgcctagtatcagcaagaagctgttgtgataaatagattatgaagaaacaggagcccggactagagagacgatagtgagaatataaaagaagaaagataatctctctcaatctttttaacttttgtaagaggcctaatttttccttttttcccctcttttctcttttattttttcaacaacctcttgtccaactgactaattttctctagatgccactttttccattgcagaattacttgtaagaaagaaagggattaaaaaacaagagttggaagctgtccttttggacaagatatttaaaaccctactgtccatcttccatcctaagtggtcccatctttctaaaaggaaatgccttccatattcttcctaaaaaagcaaaagcataacaaaacaaaactggaaaactgtttcttctgcttgagacacaagggccattatcttcccacctttggccccactgatccttgacaggatgtcctggacctgcagcccagatgaggaaaggtggggtgtgggtggggggttgactgacacacacagcaagtagcctcaaggaatttgggggtggggcaggctgcgccccaaggctttggtcctatctcccgccccccttgcgtttttacttaacacccgatcacttccgttgcaaataaaaaagaagtaacaaacagctaaatttaattagggataagtaataaaatgacctggttctctctaactgcgctcctgagcccttcgctgccggccctggacttagtggacggagcgggagattcccgcccaggggaagaggttcccacggagggcatgcggtcgcgggtgcctttggattcgtgtgttcagggaggccagataatctcctccccgcgccggagcccctgttcctcatttctagcattttaaaaaaggtcaagaatacagtgaatccggctgggggctgccggctgggtgacgcgcctctggctagaccgaatggcacaggctgagcccgggggtgcggaccggtgggcacggagaagggtccctcggcgcggactcgactgcaggagccgcggcgccgggggtggggggcgtgtgccgctcgcgagggggccggaggacttgacagatcgcagcgaaagaaaacattaaaccaaaacaaaacccaccgattccccacgtcgttcagcaaagacatcgtgggtggagccaggagggagcgattgagtagaattcctcgcggccgcctccgcccgcccaccccgcgcccccggccctcggccccctgccctgccagcccgccgggctcggcccgcagcggaggtcagggagcagcgagcgcctcctcccacccgggcttcccgagtactcggctctgctgctccgtagtaaacaaagtgtcgccggcgcctccacgctggtttgcttcctagcaatcaaaacactgagaaggcgagagaatcacagaaacactcgagaattaccagaaaataatagagatccaaaaaaaaaaaaaggaggtgagtgtgtgaaagagaaaaacaccccactaccccccaccagcccaccgccgcctccccgtggaaaaccgggccccacccagcccggcgcccactggctgcccgggcggcggtgccgcatgcccattggccgcgcgggctgtcggtcaggggcgggccggcgcgcgcgccgccgcgggcggggggcggcggcagatcccgtaagtcgggcggcctggtagtcgcagcagccgctgccgcagccgccacattcaacaggcagcagcgcagcgggcgcgccgctggggagagcaagcggcccgcggcgtccgtccgtccttccgtccgcggccctgtcagctggagcgcggcgcaggctctgccccggcccggcggctctggccggccgtccagtccgtgcggcggaccccgaggagcctcgatgtggatggccccgcgaagttaagttctgggctcgcgcttccactccgccgcgccttcctcccagtttccgtccgctcgccgcaccggcttcgttcccccaaatctcggaccgtcccttcgcgccccctccccgtccgcccccagtgctgcgttctccccctcttggctctcctgcggctgggggaggggcgggggtcaccatggccgaggcgcctcaggtggtggagatcgacccggacttcgagccgctgccccggccgcgctcgtgcacctggccgctgcccaggccggagtttagccagtccaactcggccacctccagcccggcgccgtcgggcagcgcggctgccaaccccgacg

SEQ ID NO: 677 - DNA, 6000 bp, Homo sapiens
ccccatctctactgaaaatacataaattagccaggcatggtggcacacacctgtaatcccagctactcgggaggctgaggcagaatcgcttgaacccgggaggtggaggttgtagtgagccgagatcgtgccattgcacttcagcttgggtgagagtgaggctcagcctcaaaaaaaaaaaaaaaaagtctggtgacagtggtgctgtgcttaaagttacagacctatagaatgcttattgtacatttacattgttctgacacaccagagatatttcttagaatttaaaacaggtctgaggatctaatgacttgtgtactgaagttgcagattagccttttgattggatatttagttaccatctttgacttttgtcctagatgaccaagacctagttgtctgtggtggcgtccttgccttcaggatgtgttaaccatcatccgaccagatacactacccctttgctctaagtattctccaccacccacccaccgccctctgccacggtactatatgtttttattagccagcccggagaaggaaccttgatgagaacttttgatttaattttgtttgatgtttttgtttccaggtctggaagagtaggagcaaggcagggtctgaaagctgattttaaaaaagatgccttctccatgtagaagtcaccctgccttcataagcctctagggtctagaatgatttttcatggatgctttgaagaatgtggtttgctgaagagtgggcatggactagagttatagattatcagtgtaataaagccagaaggtttttttgagcaaatgactttcacttatgccaagacctgtttttgagcccgttgtggctgaaattgaattggcagactggactgcctttctcctctccagtgggaactaggtggcttgtcattgaagaaaaacctagtaaaagggcatattagtaatggggccaataagggggattaggatttccagatctgttagataacagataatagagctatagaaatgaaagcaacttcaagaaaagaagggattcatgataattcttagttgccacagaagggtatgatttacccttcttttgacagcattgactttcctaaatcctgcctcttctgccatttgttagcctagatcatcaactggagactggttttaatgggaaatttggacgcttatcctttgttttgattgttggcaaaggtagccttgttcctttttatggtgctggggtttctaactttcctgtggaatttcctgttgcaagagaatggaggagtccagtgagctgggagagggaaatgtaggcgatactgttgaaggattaggtagtgctgggtgctagatgtttgaatgccaggccaaggaatttggactttttttgagatggagttttgctcttttttctcaggctggagtgcaatggcgatctcggttcactgcaacctctgtctcccaggtttaagcaattctcctgcctcagcctccgaagtagctgggattacaggcatgtgccaccacgcccggcgaattttgtatttttagtggagacggagtttctccatgttggtcaggctggtctcaaactcctgacctcaggtgatccgcctgcctctgcctcccaaagtgctgggattacaggtgtgagtcactgtgcccggccaggaatttggactttatcctgtaggtaatagtaaagcttctgaagatgcttttttttttttttttgagacggagtctcgctctgtcccccaggctggagtgcgccatctcggctcactgcaagctccgcctcctgcgttcacgccattctcctgcctcagcctcctgagtagctgggactgcaggcgcctgccaccacgtccagctaagtttttgtatttttagtggagacagggtttcatcgtgttagccaggatggtcttgatctcctgacctcgtgattcgcccgcctcggcctcctaaagtgttgggattacaggcgtgagccaccacacccggcactgagggtgcttttttaaagaaaggaaaagatttaaaattggtgttagcatgtaggatgaattggagggaaatgttctttaatcttctctatttttttttggcagtctattctcttctattccctctgcatgtgttagtttagcatatgctctttggaaattgaccagtacattttaaaccaattcagaacgctaccaaacctttaaaaaacctgttgttattgggcctgatggtatgaaaatagtctgttttcttctattccctcatagctgagagacttaaccatggtttcaagaaggaaccagaggtagaaagttgtcattgagagatctttttttgtgtgtgttttggatcatcagagtataatatattggctttaaaaggacctcagaggtagaatatttttctatttgagacagatttcaaacatccagtagctgactgtttatcttgtagttagatatctctagaagaggacatctgtcccttttttagagttatattccagtgttggcaaccctttagtttccttttttgcccaactgaaagctgtgctcatttaaagtgctatttaggagggataagtagaaaacattaagactgtcctcaaaataagtctttggtcttgaaacaagttttaattcatttcccaactttcatctgttctgttctctaatctatatgaggtaattttgtcttaaaaaatagttttgtttttcctagtttacaaattcaaaaccagtttgaatctgtaaggcaaggaggcctagtccagagttttctgtctcacgggagctattaggctgttgtggactggggtccagcatttcttttggaattatccatcagatctgtggatcctaatattatctctcataactgttatccgagagattagaagtttgccacccatgtgcctgatagtcttgtttctaaatatctttcatatcattgctactttttcatcctctgttttagcctctcaatatctcttatgaagactactgtaatcctccttactggccttccggcctctggtttccagtccatcttctactgtgtttgcaggcttgatttgacttgcaaatctgattgtgtcactcccatgtacaatttgtgtttcccaaagtaaaattaaaactttttttttgacatacaggctctttcatgatctggcttcctcgctgtctgcagcttcatctcttgcctctgcctcctctatactctgctccaacagtattgagctacttgtcattctctgaacactctcatgtgtcaaactatttgcctttgcttgactgccttcaaaattccttcactttttagacttctcagctcaagtgcaatttccttttttttttgttactgtttttaaagagaacaaggtcttgctatgttgcccaggctggcctcaaactccttggctcaagcagtcctgcctcagcctcctgagtagctaggactataggcacacagcactatgcctggcttattgccctttggaacccttccctgactctccagcagattgaggtctttcctctgtattcctttttcaccttgtatgtgtgtgtgtgagagagatatggcattgtgctgtatttgggtgtctgccttctctctggaaggtgagcccttgagggcaggggctgtcttctcatctctccatcctcagtgctgaacactgtatatgttaaatggtgagcaggcctatagtcatgtcaggaatagtgagcaatgatgtgctaggttctctgccaaggtgctgggaattcaactgtgaagcacacagacgtggcttctactctcacagagtttgtaattagtgggaaatacagacaagtaaatatggatatggtgctgatggagaattattggtgagaatgggaacacaatgtgcatccaaccctgcctagtggtcctgcaataatatttctcttatacattcgccttcctaaagtaggcttcataaatcactctatttttcctcttttcctttattcttagttggtgatcttgcttttattttttcactaaaaaaaagaagtagataagaattccttcatcttttcaccactgaatcataacagatcacctacttttatacccatactctctgacttctcatggtggatgatgtgtctctttcctgtgaaagctctgcttgtgcagaggatccagtcttcccttgctcactcagggactccgcttctgcaattattcctctgttccgtgtcattaatttctgtttctctcctggatcattcccatcatacaaacatgttctaatattgtctatttaaaaaaaatccgtttgaccacagataatcttctagctaccatcccatttcctttccatcattacagaatttcttgaaagaataattaatgttcctacttcctcccttaactattcattccttaacccactcttggtattggtctgtcctcgctacttcactgaattacttcactgaaactactcttgccatgttgcaacgtttagcatttaatgtaggtattggcttctgtgtaaaaggaaagttttttcttgaatacaacactctcctgcttgttctgtctcacctcactgctttttcctttctgctgttttgtgctgggcgcttctctgactgagagcatggttgtagataccttcactttgtatttttttttaaatagataaacttaaataacacctgtatacctacaactactcctttatatttttagttttgaactgtcccccgaattccaaattagtaaatccagttgccaacttgatgtcttcacttgatgtctgatatgtaccttgaacttaacatgtccaagatcaaacctgctcatccagccatctgcctcttcaccagttagtacgtggtgtcaatgttggttgtggttttttttttttttttttttgagacatagtctcactctgtcacccaggctggagtgcagtggcacaatctcggctcactgcaacctccatctcccgggtttaagcaattctcctgcctcagcctcctgagtagctgggattacaggcacgctcccccatgcccggctaatttttgtatttttagtagagacgaggtttcgccatgttggccaggctggtcacgaactcctgacctcaggtgattcacccacctcggcctcccaaagtgctgggattacaggcgtgagccgccatgcccggccggttgtgtttttaaatgaagaaatttaagtttccggggtcccttgatttctcttatctcctgcatctgtttcatcagcaagctctgtcttctccaaaatatagcctgtatgtctttatttctgtccatttttactaccattcccctgagctctttgggtcctaagtaattcttctgcttctttttattttttatatttttgagacggagtctcgctctgttgcccaggctggagtgcagtggcgcgatttcggctcactgcaagctccgcctcccgggttcacgccattctcctgcctcagcctcccgagtagctgggactacaggcacccgccacaatgaccggctaattttttttttttttttgtattttttagtggagatgggtctcaccatgttagccaggatggtctcgatctcctgaccttgtgatccgcccgccttggcttcccaaagtgctgggattacaggtgtgagccactgcgcctggcctatttttatttttatttttatttttttgagacgcagtctcactgtgtcgccaggctggagtgcagtggcgcgatctcagctcactgcaacctccgcccttggagttcaagcgattcttctgcctcagcctccctagtagctgggattccaggagcctgccactgcacccggctaattttttgtattttatttttagtagagatggggtttcaccttcttgaccaggctggtcttgaattcctgaccttgtgatccacccacctcggcctcccaaagtgctgggattacaggcgtgagccact

SEQ ID NO: 678 - DNA, 6000 bp, Homo sapiens
gaactcagggcaagaagacagctttgactccttatgatttcatccccgaccatcaggactcgtggctcactggcttccccaaccaagttgtccttaaaaactctgatccccgaatgcttggggagactgatttgagtaataataaaattccgttctcctgcacagctggctgtgtatgaattactctttctccattctaattgcccagtcttgatgaaccagctctgtctaggcagcgggcaaggtgaactccttgggaggttacaaaccctctttctatgactgtaagtcatcactgagtattccaaaagtaggtggagctgataaactgatagctcaggcctggcagctatagattattcttgtttcaaatgggtatcactgccatttgaataaactgtgaacaaggtatatctctttgactgaacatagaaatgagtggaatagctcataagttgttctgtccaatgacagccactagccacaagtggctacttagatttaaataaaagccaaataaaatttccttagtcacactgtaaccaagtatccccatttttctaagagatagtttaatgatttttaaaaaatctctcttcttttcccccttctcctcacttcctccttagctctttagaaatgcaattgtagccttttacctcctctttatcagacactccctatggggcaggttcatctaactatgtgcttagaagctccagagaggaactctcacccaccgggaggttgccttgagagacaacagcctatctacaacccaaagtatgcctgctacaaagctttctcttacctggagagttttggccacttttacaacccagtcctgcccacaaaaggcaccagcagtcactgtccagtagataaggcactgaaggtagtatgcagaccccccaaccactcgcttcctcccctcgtgccattcatgccagcattccatgccccatttcaaaagcaccctctttctgctccaaaagtgaaatggtacccttaaggcagaaaaccagtacttcctcccctaaggtagctttggaataaaatatcattttctttataccagatctcactcttgttaagtggactctgcaagcagcgagagagtgaacctgcatttgggttacaacactaactagtttaagtgctcaatagccacatatgtctagcagttactatactgggcagtgcagagacattgtcacagaaaattctattgcacactgttgctcaggcactgatgatttcagccccatgttgtggtgagtgatctgctcttggaaaggacaatatagtggactcactttcgggtgccagcaagggggcaaaactgaggcttttttgagactcccaaacagctaggagggagggaaaccagacaaaggagctgaaaagttgttccacttcatcagaaactgaaaggatgaagggatatgggttcactgaagatatttactgctttactaggacttgatcagaaacttgatactttaaaaatttgactttgtgctgtttgcaacttgattctccttaaatttttatttctgaaaataataacctattttatctgttctattaggaaacaaggagagggggttttggtcacactggggccaaagtttagaaggtagagattatatatgcaatagcagttaacagaagcaaagaggggaatcttaaggcaaacgtgacaatgcaagggaaaggaaatggaaaagacattcttttccatgcggagatttcctttagaagagttattgtctactcaaactttggaggatttgtgtttcttttggtaaataatgtgatttctttttgtagaggatgtatgatgtaaaatcatggactttgcccttaagggaaccctcttgctcctccactcttccattgttttatgtaatgaaacccctaaagtatactctgacttcagtttcagcttataaattagatctgccctttaagagccatttgagttgcagtccctccagtgctatcttttgcatacccaaattattgggggcgctgtagtttggctaacttttaatcattcagagaactaggagaagcagacatggttaattactaggattaatgatagttaataagagcaaacatttactgaacatttactgtctgccaaacactatgctaacagcttaatgcttaacattatctcatttaatcctcacataatttcaatgagccaggtattgttatttctgttttatagaaaaggaaaatgagactgtcagactgagtaacttgttccagattagacaactagtaaacagcagaatcaaggttcaaacctaggactgtctgattctagagcttgcactcttatccactactctggacaagaattttaaactatattaatattctgatttaaactaattgaaatcaacactagtgttagcaatttcctattgacagatcagttaaaaatgtttcaatgattatagaatcataaactgaatagagaagtaggccttttcttgctgttttaagtagttcagaaaagccctagtgtagtatattggtgtgactagcaggtctcagaaacaaatgcattcaataagtccatttggtgtttttcatctcttcttctctcctgtgagagttcctggggagatcttaatgatgatagttgacatggatcaaaggcagacaaaacataagggagaaaacactggaaggagcctggctgatggaacagaaactccctgaagaatccacacctgaatgattaaaaagcatcagcctagcctgtaaagtttgaagttgaatattcgtgaggaagctaccctcctacttgttgatgaggcagagagaaaggttcaacttgtcagagaaattgatgcttcctgccatattatattgaaataagaaccagcttgttatccactctttttttttctttctcagcaacataggtttaggctgaacttatgttcatatagctgcacaaatctccacgggtatgaatataaatctatctattcaaatagactctaaaggtttcttaggttatttctcttctttctagaacttaagtaaggctttgatcaccactgataatacatccgttagttaatgcgtgtagagtttccagtctaaaggcaaataaaaagtgaaaaggggccggcgcagtggctcactcctataatcccagcactttgggaggctgaagcaggcagatcacctgaggtcaggagttcaagatcagcttggccaacatggcgaaaccccgtttctactaaaaatacaaaaattagccgggcgtggtggcaggtgcctctaatcccagctactcgggaggctgaggcaggagaatggcttgaacccaggaggtggaggttgcagtgagccgagatcgcaccattcactgcactccagcctgggtgacaagagcaaaacttcatctcaaaaaaaaaaaaaaaaaaagtgaaaaggcaggaacgctgttgttcacctgctgttttaggaattttgctcacgtacagttcaaaatattaagaagctgaaaataaagtacctggtcatgtgtggaaaaacttacagctaaaaggtgagatgaactgggtctagaaggtcggattcacgtgaaattaaaagggcaacgaaagccagaacttaatttcttaaaaaaagttaaaacaggccgggtgcagtggctcatgcctgtaatcccagcactttgggaggccgaggctggcggatcacaaggtcaggagttcgggaccagcctggctaacaatggtgaaactccgtctctactgaaaatacaaaaattagccgggcgtggtggcgcgtgcctgtagtcccagctactagggaggcggaggttgcagtgggccgagatcgcgacactgcactccagcctggccgacagagcaaggctccgtctcaaaaaaaaaaaaaaaaaaacagttaaaaccctcaaaataatcccacttgttaaaatacaaaacctgaaaccatttcagtttcttctgcaaaatgagttggagagagtagggttgaaccaggcatgctctttcgggcctttcgacgctgacatcccgggatattacaccaggttcaagataccagcttgcggaaagagagctgctaaacttgaccatatgctttttgcacgacattcgacagctgtccctcccttcaccagctcttttaaggctgcaaatatatctgattcacgtgagagtccctacaagttagtacaacgtcaggccccaaggaggcgcccaataaatgttggcattgcagggccagatcccgagttccagttcagaaccctgctgaggtcaggcttcctccctgcctcccgcccctcaccacacccactcactcccccaagtaattaagtctaaactggggcctgtgcagtgattggccgcgccgggtctcactgcggatgaacttgacttgttccaatgatctgtgacagacatctgcagacagcgcccttaacagaattagggtcaggctggtatcaaaccccaggaacgccaggcattgcctcaaagtagatgcaaaccgttaaatcttccaggactcagaaggaccagagagagccggatacctctggttagctacgcggtccccagtaaagcttattcccctcttcctcccagtgtgtcttgttgccagagcaactgtgggcgtcaccgagctgacgggcggaaacagaacagaaagagtacacgtccccagctcattgatagggccattgcgcagacgcattaacttttctgagttgtagttgagtctgttgatgcagtccgcgtctgcgcattagttgttacgcgccctggccggcctcagcgcctgcgcaaattggcacaccggggagggcggagttaggtcacgagggtgcgcatgcgcaaacagcacatccggtgtggtcgacgggtcctccaagagtttggggcgcggactggagtaccttgcgtgcagttatgtcggcgtcggtagtgtctgtcatttcgcggttcttagaagagtacttgagctccactccgcagcgtctgaagttgctggacgcgtacctgctgtatatactgctgaccggggcgctgcagttcggttactgtctcctcgtggggaccttccccttcaactcttttctctcgggcttcatctcttgtgtggggagtttcatcctagcgggtaatggttctataagtgatcataataataatgtgttactttggtgtgctgcttttgttttcatagtactctatatcagaccaccgccccttgaagttatgagaagagcctgcattgcccttttgttgtgaatggggaaattgaggctcagaaagcttagattatatgcctaataccaaacggctccgtaggagttggacttaaaagtctaaagaaaccaccttcgtgccgctactccacttggtgatccacttcacttaatattggtccggggaaaaccctattccaactttaacttaggtttaacacaactctaaaattagtagacttttcaaatgaaaaacccaaccttgaatcatctctgtcatcttggcctaatcattaccaatctccggtgaaacgtttcaatgaaagtgcaaagaatataaatactggtgcttttcttgttgaatcatcctttacttgattttgccttttagctgctactactttttttcttgttgaggaagctgttatttcactgtcctgaacccaatttttgttcacataactctattttagccttatttttccttttgattccaggatttggtaaccttgtagactgctatatttagcgagaacagtctccatcaatttttgttaaaatctgacttttcttgcccaacggggattcagtgaatactgaaaacaggcgtggcctctatcactggtatcacctgctactttgactttgaaaacatgccagcattcatggtttcttttcagtgtgatcatcagtcaggtcatcagttgtattttcagtccaatatg

SEQ ID NO: 679 - DNA, 6000 bp, Homo sapiens
aagtccagggcacatgaagcttggagtcatagagtttcctgtccccccactccaggtaaaggtggttttgatcttcattttatgactgagataatttagtcacattgattctaataagatgataggcaagtggcatcttgggcaaatacttagattgtccattgttgcctaggcccgcttcagtggagtagtgtatagaagggaaatgcagtcttcactgaggagcagttcacacacatcactcgtacctgctttccttctacctgcctatcacatgggttgttcaacattctaacaaaacagcatgcccagaagcctaaacccataggcattggatctggtaaataaatctttgagaaggttgcatacatttctggaggccctaccacaactgattaacaacacccttcctggtctctcacccctccagagtgttaagtgtgcagtctggcagccctctagagctctggccaattttgaaagcgtaatcaacaatgctaaatggaaaagaccatttatggcatggccaggcgtggtgactcatgcctgtaattgcagcactttgggaggccaaggcaggtggatcacctgaggtcaggaattcgagaccagcctgaccaacatggtgaaaccccgtctctactaaaaatacaaaattagccgggcatggtgtgcacctgtaatcccagttactcaggaggctgagacaggagaatcgcctgaacccgggaggcggaaggtgcggtgagctgagatcacgccattgcactccagcctgggcaacaagagcgaaactccgtctcaaaaaaaaaaaatggaaaagaccatttatggcctaaccttggtttttctgtctgtctcaacaagaagtcatatgactttaaaaaacagagcagtaaagtgttaaaaaaaaaaaaaattagacttcaaggacctgtcaccatttggaagagattgactgactttttgctgtgtttggttaaatccattctgattctgattgtgcctgaggaattctaaatttatgaggtaaggtgtctttttcattgcttggagcaggaatttgtgggtcctcagtcctgtttcagttgagtgctgttcaaaactctggtcttctgccttgtatgggtataacaaaaatgtccccatatagcagaaaataatggtattctctttttacttaaaaaaaaaaaaaaaaaaaggggaagaaagaaaagaggggatttgtttgtgtgggcagctgtatcattcagctgtagttaattcagacctggatttctctagatacaaccttcctgtatgcacagacctagcaggcaatagcagttttaggctcttggtacaatgcatgtttgtccttctgcctgtgtaggaggaaggtattggttccttaagccaatatgatggtgtaattgatattccccaggggacatacaatgccaatatcccaaatgatgcatgaaaaagcagaatttgttgtcatcaatagagtttgctccactgagaaattatctaaggacatataccccaaaatcatactgttctaggttatcttgggaccagtatgcttctgagggtatctagtcccactgtttcttattaaattttcacgtcagtttttcagctcctcgtgaattttctataataactaaaatttcagcatatatgcctataggaatttccttttccattagcttctctgaatctcatattcacatatgagttgtaatgtgatattattagcctccaagtagttgtacccttttcttctgggcttctttgtgtactgtttacttatgggtagatatccccactgcttattctgtgcagtttcacagactgttaagctatgttgggctctgacacatggttaacaaggttttggtactagtcctgcaagtagatagagtccattttggggacagtttcaaggattcctctttatcttttttcttttttggagacagagtctcactctgtcacccaggctggagtgcagtggcccgatctctgctcactgcaacctccgcctcctgggttcaagcaattatcatgcctcagcctcctgagtatctgggactatagacgcggctgccacaccctgctaatttttctatttttaatagagatggggtttcaccatgttggccaggctggtctcaaactcctggcctcaggcagtcctcctgtctcagcctcccaaagtgttggtattacaggcgtgagccaccatgcccggccctcattattgtctgaaaataaaatgttcggaattgttgggtcccacagaattgatcatggggaaatagaaaacacacgcctcttgtgtcttaagagggtaaaggagaacgtggtaagattcttattcttaaaaaaaagaaattttcggccgggcatgatggctcacgcctgtgatcccagcactttgggaggccgagacgcgcgaatcacaaggtcagaagatcgagaccatcctagctgacacagtgaaaccccgtttctactaaaaatacaaaaaattagccgggtgtaatggagggtgcctgtagtcccagctgctcgggaggctgaggcaggagaatggtgtgaaccccggaggcggagcttgcagtgagctgagattgtgccactgcactccagcctgggcaacagagtgagactccgtctcaaaaaaaaaaaaaaaaaggaattttcaataacaaaatttctcaaaatcagccacttctgcagaggcatattagcagctgagagtattttaggacagtggataaacagagcattttatttgaggatggctgaaggtaacattttctgtggtgtaacattgtttgtggggattctattaaaaaaatttttttctttttttgagatggagttttgctcttgttgcccaggctggagtgcaatggcacgatctcggctcaccacaacctctgcatcctgggttcaagtgattctcctgcctcagcctcccgagtagctgggattacaggcatgcaccaccacgcccagccaattttgtgtttttagtagagacagggtttctccatgttggtcaggctggtgatccgcccacctcagcctcccaaagtgctgggattacaggcgtgagccaccatgcccagccaaaaaatttttttttcaataagaaaacttttaggttagcaagcatttagtaagtgtccacttggtacccacaatgacaccctaattcagaaatagttagggaacattactttgtgttaggccctgggctaggggccaagagatgcaatccctacccttgaggaattatgcagggtagagatggggggcagataaagtagcagttattatacagagtgataagggcattgctgaaaacctgtcatgccaatcactgaatggctttgcctcagaaaacaagcagtctactcttttgaggaaactcagagccccagaggtggcatcagatgagataatggcctattaagtgtgcatgtattttacatgtatctgtaccttcacttggggtgtcctccaagccagactcttaagagctaacacttaactacactgttccatgaaataggtattgtcactatgcccactttgcagattacaagacagatatacagaaccaggaacttgcctactatcacacaacttttaacagagtggggctagccagtctgactccagagtcttcactcttaaccctgagcagacagggaccactatgtgaaaggaaacatttaaagtaatgtataaatatggccactttagcatgcagttggcattgtaagtgtaagattttaagcagcggggagaaaatttcattcctagcttaaaagctcaaatgttacacgagacactgagctttggttctcagaagtttatcttagtgtaaacttctactgccactaggacacaaaaggaacatctctgcagtcaacaaataagcattttgagtatctactgagcactttttgaactattagcatctgtttcccactttggtctagtgaagattcccatgattaatattttctgcttagttcccagtcgctttctgcccagctgatcttccccgccccatatagcagcactctcacttcactgtcttatctactttagagcctcaccttggagcccttgcttcaagaagtggccttcaagcttcagctacccaaggtccccttgccctgtttatcctttctttttctggcccgagtggaccctggggcagggtgaccttattaaagactctataaaacaaagttgtctgtcatctcttcagagacaccaaccctgccccccttctactggtatttgaaaaaagaactctccctgctatccacttccctccaccatccctgggaaaaggacatgttggagtagtaacacgtggtcattgccggggtgagcagccagttactgtagtgattggatagtgacaattcccatcccacctccctacctgcagcatctgactggttggtctggtttcagtgttccatgcctagattactggatagaggatggtaggcacataaaacattgctcatgccccaccctctatccagctttcattaccatccttctttaatcacttttcaactttggctttatcgttcttatttaatcctttttcactcccacctctactgtttgcctgccttctattctctctattttctagaatcttccaatcaagcagctgtaactttacatgtcctccacccagccccctcccctgccccctgggaagaccaggagggagcactccagccctggggggttaagcctctgtagctgctgtaacttgagaaaagaaggccaggcctctggagccagcagtcggctccctgtggcctgccaaaggataagaaccttgctcactcagctccctccctcttttctttcccctcccctgctgcagcaaggccctcccccatccgcacacacaggctgctgggtaagtggcaagatggctcccctgcatgtctccggctgatcgctgccgctccgccaatacaatagagccagccactaccagcagcctggccctcttcctccttctccagagagaccaatccagccgaactcggggtttgccgtgaggacttaacgcttatctcttaaaagccagatctgttttagcctccccgcaccaccaccacctccccttccatttaccattttttggatccccggttgctacatctcaattttctctctctggatcgggtggctggggaggaggtggtgggatcttggaacaaggaaggtgtggttttttttctttattttttttaggattttttttgtttggtttttgttatttcttccattccagaaagggataaacagcacttccagggggagaaaaaaaatcatgttatcagaaagcaaagaagggtgagagcttcacatttccatgtatgccttttccccgccgccctagctcccttcgtcttccttctcttcctcatggctttcattccgtctttcgttttggtttgttttcagtcattctgccttccccctttgtcctgcctgcccagtttctaattggccccacatgccctttctgtatgggaaatagatattttttttgtataagccttttctctagatgtaagcagctaaatctcgtgtttctctgggggcctgtttagctgggggcacagttccgattttcccctccccctaacccccctagtgcatcccttcttgactgctctagggaggttcttctgacctctgagtgtcagtcagtcagcctgttgggaatgctgacttttctggtggtggttatcggcctgggaggcttggtttcccctctcctgagccttaggcctctgatcatcttgatttgattttttttgcttggtgtttgggtggtagagggggtgagatttgagatagaagttggggacgaagacagaaatcaaaggtggaaagatagtttatctgaagtgaatctctgggattctttgcctgaaatgggagctaact

SEQ ID NO: 680 - DNA, 6000 bp, Homo sapiens
atatataggtgaaagcagacttcaaaaagggtatactttccatgagaaacagatgtcaaatatcaatgtcacagaatttccctgggactttcatggaggcttagcatgaaaggaggtgtaactacctccccccaccaactacgcaggattgacaaaacagcgcagtggggagggagatacgtactgggcgaatgtctgctgagctccagctctggtctctccaggctgctctgaaagtcaggaggcagcagggaagccactccctcaggatggatcatctcgtcctccgactcagctgaagcttctgcaaagtacagatcgggtcggggcagggagggagtgaaggactcagcatgtaggaatatgtagaggagtgaaggaggtcaggcaaagtcacagatacagagatacataccaaaaagagcaccgtataaaaagaaaaaactccctgggattcagctctacttcatctaaatggtagcttaatttacttataactcttcctgttggcaggaatcctcttctaacaagacagtcaaattaagtgtcctcttccctgacaaaagtaaatagtaaaccacttggcttcatgggctatgaaagcaagtaagtagcagtctcagcctcacttatttctgaaattgtctagttagacaggcctatctacttggtgacagggataagaatgacgaactccttgttaaaagtgacaatctgggcttaccttcaagttctgcagcttctcgagcttcacgttccagacgctgcctaagtagctcctgctgcttttccagatactgttttatgaaactgttctggctcatttcctcaccaatctgtgtagaggaaatgaaaacagagggtctaggaaaacaaaccaggagaatgcaaagaagaacattccatggagcaaaggtccactccttatagttgcgcccaagaaagataactaaaatgttggaaggcttttttctaagttagttctatattgaagaacagaatagccttgagtcacacacaaaaaaagggcaaaaagaagagctgcacataagtttttgatttaaatattcagttcccaaagagtgatactggtatacaaattactattctttatttttattttttgagacagagtttcactctgttgcccaggctggagtgcagtggcgtgatcttccctcactgcaacctctgcctcctggcttcaaatgattctcctgcctcagcctcctgagtagctgggattacaggtgtgcaccaccacactcggctgatttttgtatttttagtagagacggggtttcactatgttggtcagacgggtctcaaactcctgacctcaagtgatccacccgcctcagcctcccaaagtgctgggattacaagtgtgagccaccgtgcccagccacaaataaccttaaattaaaattcctgtaattatatcttttaggctaaattcctagattacgtggaacattatctaaagggtaatctaaaatttccttttggtagtatcaagactgaaacatgggggctcacgtctgtaatcccagtactttgggaggctgaagtgggaagactgcttgagctcaggagttcaagatcagtctcagcaacatggcaaaacccgtctctaccaaaaatacaaaaaggtgggcatattgtggtgtgagtctgtcatcctggctactcaggaggtggtgggtgcagtgaactgagatcgtgccactgcactccagcctgggttaaagagcaagactccatctcaagaaaaaaaaaaaaaaaagccagttcctccaaaagatcaaccgttacctatccaggaaacatttttttttttttttttgagacggactatcactgtcatccaggctggagagcaatggcgcgatcttggcttgctgcaacctccgcctcctgggttcaagacattctcctgcctcagtctcctgagtagctgggattacagacatgtgccaccacaaccagctcatttttgcatttttagtatagacggggttttgccatgttggccaggctggtctcaaactcctgacctcaggtgatctacccgccttggcctcccaaagtgctagcattacaggcgtgagccacaatgcccggcctcatatccaggaaacattttatcaaacaactccaaaattcaagtatagtatttaaaagtatgaaatcaagagactaagaaaagggatatccattcagcatttagacaaagttataactccattttgtctgggtgaaaggaaatccttggtaacaggagcttatgccttttcctatttttttttttttgtaatacagattcccaagttgcccttctgacctccagctttctcttcacaagttctcctccctagaaccttcttgcttagcaagtcctatttagaactgaaaaagcaaaaaaacctgaatactttctatgttattagtcatgtttcctaaacatagtaaaggtttattttcacctaaagtagaaatgagtctcttggcactcaatggacattgttgaagggtgggttgcatgtgtattacagaataggcatgtttgctgcacaaacccggtgttaataaaagcaaagcttcaaagactaacatgcaatgggcaaaaggaatacaattaagctgattaacttatgcagtttcttatgcttgttaaagtacttaattgaacctctgaatgctggctagattatgatacttacagcttaatgaggtgataacaaaggaggaggagggctctcttgttttccacagtatcctgagacttcatctagtactgaggctgcacactattgctttaacaaagacttggatttttcctttaagtatatgacacattataatgaggggatttttaaaagctgaaagaaactttaagagactgtgcagcctaataatttttggattttaactgtggaataatttaaaaattttatgcagaaactcaatagttaaaaagtagatctaatctagtttaagagaggagtatgagccttgcttacttgggaaaaaggtatttcccctaggaagctccccaaagcagctccacaaaaccctaagagaacagttataaacccatgggtttagtctgtttctcatattacagataaggaaatggagaagaccaaggcctccaaaggttgtttcttatcctaagtaaagaggtattagtaatgtttatgagtaagtgcactgagttagtagttaacactagtaatggtgggtgacttacacaggattgaacccttggaaaatctacatcaacaagagttcttaatcagcaactatttccctacactgccatattggtgatctacttcatatctatactcaaagacatcaactacctttcctaaattcatggcagataaatgacttcagatctctgtactacacgtaattaatggaagccacacctttctacacatgccatttcaattattataaactaacagtgcctctgattctgttctttactccaggcccttgtatacaactgggttgattagaattcaactgtcctggtttgagaacatttctgactaagagaacttaggaaaacagtcatgaggacttaagcatcaaatatacaacaccacgtccttccatgtgtctggatatccaaagggcccactccattgaatacaccttctttctcacctgggaatttggctggaatgcagcatggggtgttgagtgtttctgtaaattttctagcattagagcctggtatagagaagggtaaaagtcagaaatgatgaggaaaaaaaagaaaaacaaacccccacctctaccacaacctctaaattaaacgcaatgacttaaatacacacaattaaactgtattccttttccagggacctgaaaaccctttactaacactgttctcattcatcttcagaagacccataaaggtagccatggttactgttactaaatgtacagatataaaatgcaggcacacagaatcagtgacctggctatgtcataatatcagtaatagaaccagtactaaaatccctattatcttctgcactttcgccaagtgccccttctaaatctgatcatgcatgtaaaattacttaaaatactcaaaccagccatggggctcctggtttttgcctgacggaattacttggtcaaagggttacccagtaccagggtcaatttgtataatttccagtactgtggcacctagatttatcaaatttataaaattttcaaagaggaagctacagaagaaaatgaccacagaccctgtaaactgtggtctaacctagtctatccacacaaacacacacacacaaacacacacacacaaaactatcagcttctgtataagcaacggtctgccaactcaaccctggagccaacccagacctaatctgcactacctgccacgtatcctgttgaactctaattaaaaccaagacatcctcatcttcccttctttaaaccaaacctatacacttgaatcgagctacacctacctcatgacaatcccaccttaatctactcaaaccgattcaaaatccccaatatatatcaacctgcctcgcctctctcaccaatattcaccaaactcttaaccacccaaattgccactagatgccactaaattagagacctctctctcatcaagtcccttcaaataaaggtctctcttcatctcacctcctcatctaatcgagcagacattttaccctaccccagtcctattcgtgcagataccgataccaaccccatccaccccttcgcgcaactatacccctaactccgacccagcccaactcgcccccctcaggccagcaacgccgtaggttgtagtgggatttaactccttctgcagcgcatgcgccgaaaccacagatacaaacaaggagggggtgggggaaggaggaaggagcttaagacactcctggagagtagtgcacaccctcccatttgggctcgcgctgctgccgttaaggcgggaaccggcgcgatctccattccagcgcgaacctcatcaaccaccgtgcgcgcggatccagaggctcgcgctggcggcctgagcgagctcgcgccgagcccggatactgcgcctgcgccgcggcagaggctcgtctctaccgggtccgctctcctccgacaccccagcaacgccgactcctcacccctttgagccgcttgaccagggcactcttctgcccgctcttggctaggcctcgctgctccagtgcggccttcaggtcggtcacccgcagcgcctgaagaggcttcccgtccagagtcacctcctccagctccgccatcttgcgtgaggtactcgggtccgtcccgacggcttcgggcatcttcggtaatttccgccaacgcccttcgaacgtaccgagatgaccccgcccactgccatactctacccctcgattaccactcagaactccccgggttcctccggatgtcctcggatgtttccgtctccacatcgttaccaatcaattctttccatccgccctgcagcgccccttttctcgccctgctttcaggctcggttttcttcgtcttgccgaagctttgaatcgaatatattcggaaaccctcgaccctggtataaccataatcggagatgttcgtttatttccggacctagagatgaggcgctggggcgcttgggtgtttggggcgggtccgaggccggaagtgcgtgggctgccgggctggcccagcttagggttttcaggaaatttggaagctgccgcagtagttggagtctaaggactcgtgacaatcttcgggtgcccttcgagagaaaaggggaggtaagcggggtagaagtacctctatgggccgggtcagactcggtgtttgcggattaccttaatagggcaagccccccactccttaacgcaaacagcttctgccctctgtcctctgaatcatagccactcccatcttaggctttttttggggaggggcggggggctggtgcggaatcgg

SEQ ID NO: 681 - DNA, 6000 bp, Homo sapiens
tgtatttttgatagagacagtttcaccatgttgcccaggcttgtctccaactcctgagctaaagcaacccaccggcctctgcctcccaaagtgctgggagccactgccaccactcccagcccccttcctttcttaagcactgttagggattgtgtctagctacctaaagaacatagactgactcttcccttaagccacttcccttgctgccaagttaggtcttcttccaataatataagatgctagaagacttagatcttgatcttatttctactttaaggttcgatagtccctcttaatgatttcctgtttagcttaatgcttggatgaggcggggcttcatgagctctatctttaagggtaaagccccttagccagacgtggtggtgcggcgtgcgcctgtagtcccagctattcggaaggttgaggcaggagaattgcttgagcctgggaggcggagattacggtgagccaagatcacaccactgcactccagcctgggcaacagaccaagaccttgtctccaaaaaaaaaaaaaaaaaaaggtaatgccgctttatctactaaggctaggcattattccatgccaaatattaccttctatgttcctaggttgctggttacttcagaccataatccctccatgacccacctaaggctgtccatgggactctgcctaatgctgctaatcctggtgggtgtaatgggaaccacagcctaccagaaaagagccactcttcctgtgagaccatctgcctcttaccattcaccagagctccacagcacaagggtcccagttagaggaataagggaggtgtgatgttgcccagaacatgacagggggtaaggaagagaataatttcttgtgagacaactggatggaaaatctattgtgtatacttaatttctactttctttggaatgcctctttccccggttgtcaatattatatagcctggcaatgaaaaaagggtgaagttttacagttctaaagatccattctttattttggtacaaaaataaattgttcaacctgtaaattgtcacttattttcgtattgttgtaaagcaaacttacagaataggaacacctgctaccagttccaagaatatcacatacatatgccttagaaaaaggccaggtatgatggttcatgcctgtaatcccagcactttgggaggccaaggtgagaatggatcgcttgaggccagcagttcaagaccagactagaaaacgtagcatgacccctgtatctacagaataatttaaaaattagccagatattgttgtgcgggcctgtagtcctagatactcaggagactgaggcagaaagattacttcagcctagaatttgaggttacagtgatctcacgctcactgatgatcatgccactgcactccaaacttaagtgacaacccatgtttttaaaaaaaaaaaaaagtcaccgcgagttcgattcaaacagtgtgaaggaggaagcaactaattatctccctctcctgatttttcataattttattaaatcatcactgggaaaactaatggtttgcgtatcacacaattacactacaatctgataggagtggtaaaaccagccaatggaatccaggtaaagtacaaaaacgccaccttttattgtcctgtcttatttctcgggaaggagggttctactttacacatttcatgagccagcagtggacttgagttacaatgtgtaggttccttgtggttatagctgcagaagaagccatcaaattcttgaggacttgacatctctcggaaagaagcaaactagtagactgatgagctggattgcttagattgataacatttacaaataggagtccagttgacatgctattaatgttgaaataaccatgcctgtactggtcagtgagttcggtcagctggttggaataccagttccagagctttaggcgacacatttgaattgagttatcattgtagagagtcatggctccatcagctatggttatcttctttggtctgaatgcctatcagtccttaccagctgtagcagccactgcttggtaaaactttgccacgaagtctggctcactgaactccagctgtctgacaaattcattgcgctcctgctcagcccagcctcgaaaccactgatcccaaagatgtagctggcactcaaagatagaaggtggtcggtctgccccagacacactaagctgctccagactatccagcagtggttgtaatttttctggcactgccttagctaccaggtcctctaggaaacgttcacgctggggacctgaccaattggcaaaccagtgaagaatacacttcatctcctgggaggtgatgtaagacatcagaggaggggaagggttagtattgtgtggtactgagggtaagagagatgggaaggatagtggcattgaagaggatgactccagtggcatcctgaaacataaaagcactgttatatgctctccaggtagagcaacgaaaatacaactttcaagcaacaagacatcttaccacactcaattagcatctacagagaaaattactttttatgaattcaaagacccaaaataataagagtcctttatttagattattatccaactaccttagaaaaatcaccaaaaataacttcatttcctatttgcctgcctttttcaaacccattcttccccacccactgtcttcctccatctttcttataaagaacctaaaaataaccaatatatttcttgttcattctcttcctcttacttctatgtgccaggttgggtaaagaaaaaaacaatgattaatgttggtccattacatcttctccaaaatgaaaatgcacacattttaaaatctagtacgtgcagctggtcaaggctgatgctaattgttttgcagctatcaacagtgggggaagaaagaaaaaacattatttatgatgaaagagccttcaatgtgcatataagcctctgaaatatgccaacaactccataacatccgttacctccttacatttcctgtaaagcaccaggaaaagttaaaaagcagagtaaggaccttgctcaaaataaggtaacgcatgaaagaaccagaagcccgggtgtttgagacgttcttaaaaaagagtccagttggtttgttggcttagagatctaacaagtgttatactattttatgacaatccatgtctttaaacaattgtccttaatatttagtatgggccagacgcggtggttcttgcacttccaaagtaatctcagcactttgagaggccgaggcaagaggatcgcttgagcccaggtgttcgagaccagcctgggcaacatggcaaaacctcatccctacaaaaaataaaaaaattagttgagcgtagaggtgcctacctgtagtcctagctacgtaggagactgaggtaggagcatcacctgagcccgggaggttgaggctgcagtgagccctgatcgcgccactgcactccagcctgcgtcagagtggagggacccagagtggagtgacaaaaaaaaaatttttttttttttttagtatggtatctattggtgccttgcaattttttttttttttttttttttttttgagacggagtcttgctctgtcacccaggctgtagtgcaatggcgtgatctcaaccactgcttcctgggttcaagcgattctcctgcctcagcctcccgagtagctgggactataggcgtacgccaccacgcccggctaatttgtttgtatttttagtagagacggggtttcaccatattggccagactggtctccaactcctgacctcaagtgatccgcccgcctcggcctcccaaagtgctgggattataggcgtaagccaccgcgcccggcaccttgccactgattttgcatcatgaatgcaacggaaagatcagccaatttgactttaatagttttcagtctcttaaatctctaacgtatctcttaaatctctaaactatttgtctgtgacctattttactgtttgtgtttcttctgcatcaagttggaggattggtagtgacaaagaaagaagcccctaaacaattaatattagttcaagtaccaaaaaagttcagggcgcttgcattttccagttcttgccctacaggaagcagttcctccaagggaacttactctcttctgcggagcaaggaagaactttcccagaatcttgccacatggcttccaaggcaaactcaaactcaagttcagcgtcatagatcagttcatagtctgggtccgaagacacggcgatgcttcttgcgcacccccacggagcttgttattccgattccgcaccagccccccgcccctccccaaaaaaagcctaagatgggagtggctatgattcagaggacagagggcagaagctgtttgcgttaaggagtggggggcttgccctattaaggtaatccgcaaacaccgagtctgacccggcccatagaggtacttctaccccgcttacctccccttttctctcgaagggcacccgaagattgtcacgagtccttagactccaactactgcggcagcttccaaatttcctgaaaaccctaagctgggccagcccggcagcccacgcacttccggcctcggacccgccccaaacacccaagcgccccagcgcctcatctctaggtccggaaataaacgaacatctccgattatggttataccagggtcgagggtttccgaatatattcgattcaaagcttcggcaagacgaagaaaaccgagcctgaaagcagggcgagaaaaggggcgctgcagggcggatggaaagaattgattggtaacgatgtggagacggaaacatccgaggacatccggaggaacccggggagttctgagtggtaatcgaggggtagagtatggcagtgggcggggtcatctcggtacgttcgaagggcgttggcggaaattaccgaagatgcccgaagccgtcgggacggacccgagtacctcacgcaagatggcggagctggaggaggtgactctggacgggaagcctcttcaggcgctgcgggtgaccgacctgaaggccgcactggagcagcgaggcctagccaagagcgggcagaagagtgccctggtcaagcggctcaaaggggtgaggagtcggcgttgctggggtgtcggaggagagcggacccggtagagacgagcctctgccgcggcgcaggcgcagtatccgggctcggcgcgagctcgctcaggccgccagcgcgagcctctggatccgcgcgcacggtggttgatgaggttcgcgctggaatggagatcgcgccggttcccgccttaacggcagcagcgcgagcccaaatgggagggtgtgcactactctccaggagtgtcttaagctccttcctccttcccccaccccctccttgtttgtatctgtggtttcggcgcatgcgctgcagaaggagttaaatcccactacaacctacggcgttgctggcctgaggggggcgagttgggctgggtcggagttaggggtatagttgcgcgaaggggtggatggggttggtatcggtatctgcacgaataggactggggtagggtaaaatgtctgctcgattagatgaggaggtgagatgaagagagacctttatttgaagggacttgatgagagagaggtctctaatttagtggcatctagtggcaatttgggtggttaagagtttggtgaatattggtgagagaggcgaggcaggttgatatatattggggattttgaatcggtttgagtagattaaggtgggattgtcatgaggtaggtgtagctcgattcaagtgtataggtttggtttaaagaagggaagatgaggatgtcttggttttaattagagttcaacaggatacgtggcaggtagtgcagattaggtctgggttggctccagggttgagttggcagaccgttgcttatacagaagctgatagttttgtgtgtgtgtgtttgtgtgtgtgtgtttgtgtggat

SEQ ID NO: 682 - DNA, 6000 bp, Homo sapiens
tttccagatactgttttatgaaactgttctggctcatttcctcaccaatctgtgtagaggaaatgaaaacagagggtctaggaaaacaaaccaggagaatgcaaagaagaacattccatggagcaaaggtccactccttatagttgcgcccaagaaagataactaaaatgttggaaggcttttttctaagttagttctatattgaagaacagaatagccttgagtcacacacaaaaaaagggcaaaaagaagagctgcacataagtttttgatttaaatattcagttcccaaagagtgatactggtatacaaattactattctttatttttattttttgagacagagtttcactctgttgcccaggctggagtgcagtggcgtgatcttccctcactgcaacctctgcctcctggcttcaaatgattctcctgcctcagcctcctgagtagctgggattacaggtgtgcaccaccacactcggctgatttttgtatttttagtagagacggggtttcactatgttggtcagacgggtctcaaactcctgacctcaagtgatccacccgcctcagcctcccaaagtgctgggattacaagtgtgagccaccgtgcccagccacaaataaccttaaattaaaattcctgtaattatatcttttaggctaaattcctagattacgtggaacattatctaaagggtaatctaaaatttccttttggtagtatcaagactgaaacatgggggctcacgtctgtaatcccagtactttgggaggctgaagtgggaagactgcttgagctcaggagttcaagatcagtctcagcaacatggcaaaacccgtctctaccaaaaatacaaaaaggtgggcatattgtggtgtgagtctgtcatcctggctactcaggaggtggtgggtgcagtgaactgagatcgtgccactgcactccagcctgggttaaagagcaagactccatctcaagaaaaaaaaaaaaaaaagccagttcctccaaaagatcaaccgttacctatccaggaaacatttttttttttttttttgagacggactatcactgtcatccaggctggagagcaatggcgcgatcttggcttgctgcaacctccgcctcctgggttcaagacattctcctgcctcagtctcctgagtagctgggattacagacatgtgccaccacaaccagctcatttttgcatttttagtatagacggggttttgccatgttggccaggctggtctcaaactcctgacctcaggtgatctacccgccttggcctcccaaagtgctagcattacaggcgtgagccacaatgcccggcctcatatccaggaaacattttatcaaacaactccaaaattcaagtatagtatttaaaagtatgaaatcaagagactaagaaaagggatatccattcagcatttagacaaagttataactccattttgtctgggtgaaaggaaatccttggtaacaggagcttatgccttttcctatttttttttttttgtaatacagattcccaagttgcccttctgacctccagctttctcttcacaagttctcctccctagaaccttcttgcttagcaagtcctatttagaactgaaaaagcaaaaaaacctgaatactttctatgttattagtcatgtttcctaaacatagtaaaggtttattttcacctaaagtagaaatgagtctcttggcactcaatggacattgttgaagggtgggttgcatgtgtattacagaataggcatgtttgctgcacaaacccggtgttaataaaagcaaagcttcaaagactaacatgcaatgggcaaaaggaatacaattaagctgattaacttatgcagtttcttatgcttgttaaagtacttaattgaacctctgaatgctggctagattatgatacttacagcttaatgaggtgataacaaaggaggaggagggctctcttgttttccacagtatcctgagacttcatctagtactgaggctgcacactattgctttaacaaagacttggatttttcctttaagtatatgacacattataatgaggggatttttaaaagctgaaagaaactttaagagactgtgcagcctaataatttttggattttaactgtggaataatttaaaaattttatgcagaaactcaatagttaaaaagtagatctaatctagtttaagagaggagtatgagccttgcttacttgggaaaaaggtatttcccctaggaagctccccaaagcagctccacaaaaccctaagagaacagttataaacccatgggtttagtctgtttctcatattacagataaggaaatggagaagaccaaggcctccaaaggttgtttcttatcctaagtaaagaggtattagtaatgtttatgagtaagtgcactgagttagtagttaacactagtaatggtgggtgacttacacaggattgaacccttggaaaatctacatcaacaagagttcttaatcagcaactatttccctacactgccatattggtgatctacttcatatctatactcaaagacatcaactacctttcctaaattcatggcagataaatgacttcagatctctgtactacacgtaattaatggaagccacacctttctacacatgccatttcaattattataaactaacagtgcctctgattctgttctttactccaggcccttgtatacaactgggttgattagaattcaactgtcctggtttgagaacatttctgactaagagaacttaggaaaacagtcatgaggacttaagcatcaaatatacaacaccacgtccttccatgtgtctggatatccaaagggcccactccattgaatacaccttctttctcacctgggaatttggctggaatgcagcatggggtgttgagtgtttctgtaaattttctagcattagagcctggtatagagaagggtaaaagtcagaaatgatgaggaaaaaaaagaaaaacaaacccccacctctaccacaacctctaaattaaacgcaatgacttaaatacacacaattaaactgtattccttttccagggacctgaaaaccctttactaacactgttctcattcatcttcagaagacccataaaggtagccatggttactgttactaaatgtacagatataaaatgcaggcacacagaatcagtgacctggctatgtcataatatcagtaatagaaccagtactaaaatccctattatcttctgcactttcgccaagtgccccttctaaatctgatcatgcatgtaaaattacttaaaatactcaaaccagccatggggctcctggtttttgcctgacggaattacttggtcaaagggttacccagtaccagggtcaatttgtataatttccagtactgtggcacctagatttatcaaatttataaaattttcaaagaggaagctacagaagaaaatgaccacagaccctgtaaactgtggtctaacctagtctatccacacaaacacacacacacaaacacacacacacaaaactatcagcttctgtataagcaacggtctgccaactcaaccctggagccaacccagacctaatctgcactacctgccacgtatcctgttgaactctaattaaaaccaagacatcctcatcttcccttctttaaaccaaacctatacacttgaatcgagctacacctacctcatgacaatcccaccttaatctactcaaaccgattcaaaatccccaatatatatcaacctgcctcgcctctctcaccaatattcaccaaactcttaaccacccaaattgccactagatgccactaaattagagacctctctctcatcaagtcccttcaaataaaggtctctcttcatctcacctcctcatctaatcgagcagacattttaccctaccccagtcctattcgtgcagataccgataccaaccccatccaccccttcgcgcaactatacccctaactccgacccagcccaactcgcccccctcaggccagcaacgccgtaggttgtagtgggatttaactccttctgcagcgcatgcgccgaaaccacagatacaaacaaggagggggtgggggaaggaggaaggagcttaagacactcctggagagtagtgcacaccctcccatttgggctcgcgctgctgccgttaaggcgggaaccggcgcgatctccattccagcgcgaacctcatcaaccaccgtgcgcgcggatccagaggctcgcgctggcggcctgagcgagctcgcgccgagcccggatactgcgcctgcgccgcggcagaggctcgtctctaccgggtccgctctcctccgacaccccagcaacgccgactcctcacccctttgagccgcttgaccagggcactcttctgcccgctcttggctaggcctcgctgctccagtgcggccttcaggtcggtcacccgcagcgcctgaagaggcttcccgtccagagtcacctcctccagctccgccatcttgcgtgaggtactcgggtccgtcccgacggcttcgggcatcttcggtaatttccgccaacgcccttcgaacgtaccgagatgaccccgcccactgccatactctacccctcgattaccactcagaactccccgggttcctccggatgtcctcggatgtttccgtctccacatcgttaccaatcaattctttccatccgccctgcagcgccccttttctcgccctgctttcaggctcggttttcttcgtcttgccgaagctttgaatcgaatatattcggaaaccctcgaccctggtataaccataatcggagatgttcgtttatttccggacctagagatgaggcgctggggcgcttgggtgtttggggcgggtccgaggccggaagtgcgtgggctgccgggctggcccagcttagggttttcaggaaatttggaagctgccgcagtagttggagtctaaggactcgtgacaatcttcgggtgcccttcgagagaaaaggggaggtaagcggggtagaagtacctctatgggccgggtcagactcggtgtttgcggattaccttaatagggcaagccccccactccttaacgcaaacagcttctgccctctgtcctctgaatcatagccactcccatcttaggctttttttggggaggggcggggggctggtgcggaatcggaataacaagctccgtgggggtgcgcaagaagcatcgccgtgtcttcggacccagactatgaactgatctatgacgctgaacttgagtttgagtttgccttggaagccatgtggcaagattctgggaaagttcttccttgctccgcagaagagagtaagttcccttggaggaactgcttcctgtagggcaagaactggaaaatgcaagcgccctgaacttttttggtacttgaactaatattaattgtttaggggcttctttctttgtcactaccaatcctccaacttgatgcagaagaaacacaaacagtaaaataggtcacagacaaatagtttagagatttaagagatacgttagagatttaagagactgaaaactattaaagtcaaattggctgatctttccgttgcattcatgatgcaaaatcagtggcaaggtgccgggcgcggtggcttacgcctataatcccagcactttgggaggccgaggcgggcggatcacttgaggtcaggagttggagaccagtctggccaatatggtgaaaccccgtctctactaaaaatacaaacaaattagccgggcgtggtggcgtacgcctatagtcccagctactcgggaggctgaggcaggagaatcgcttgaacccaggaagcagtggttgagatcacgccattgcactacagcctgggtgacagagcaagactccgtctcaaaaaaaaaaaaaaaaaaaaaaaaaattgcaaggcaccaatagataccatactaaaaaaaaaaaaaaatttttttt

SEQ ID NO: 683 - DNA, 6000 bp, Homo sapiens
gtaagatattccaagtactttcctttcaaatccatggagtccggatgtttgaaattaaatttattaagcactcactcacgtgtatattgtcctagacagggttgcgtttcagagaacaaagatccctaacacgatcatccagtcccgtcactacctgactccctcctcccatacaataacacattcccccatctctaggacatagggatcttagtcccctccccccacctttttcttcttcttttttgagacagggtctcgctctgtcacccaggctggaatgcagtggggtgatctcagctcactgtggcctcgacctccctaggctcaagtgattcccccacctcagcttcccaagtagctgggactacaggtgcacaccaccatgccagctaatttttgtatttttgatagagacagtttcaccatgttgcccaggcttgtctccaactcctgagctaaagcaacccaccggcctctgcctcccaaagtgctgggagccactgccaccactcccagcccccttcctttcttaagcactgttagggattgtgtctagctacctaaagaacatagactgactcttcccttaagccacttcccttgctgccaagttaggtcttcttccaataatataagatgctagaagacttagatcttgatcttatttctactttaaggttcgatagtccctcttaatgatttcctgtttagcttaatgcttggatgaggcggggcttcatgagctctatctttaagggtaaagccccttagccagacgtggtggtgcggcgtgcgcctgtagtcccagctattcggaaggttgaggcaggagaattgcttgagcctgggaggcggagattacggtgagccaagatcacaccactgcactccagcctgggcaacagaccaagaccttgtctccaaaaaaaaaaaaaaaaaaaggtaatgccgctttatctactaaggctaggcattattccatgccaaatattaccttctatgttcctaggttgctggttacttcagaccataatccctccatgacccacctaaggctgtccatgggactctgcctaatgctgctaatcctggtgggtgtaatgggaaccacagcctaccagaaaagagccactcttcctgtgagaccatctgcctcttaccattcaccagagctccacagcacaagggtcccagttagaggaataagggaggtgtgatgttgcccagaacatgacagggggtaaggaagagaataatttcttgtgagacaactggatggaaaatctattgtgtatacttaatttctactttctttggaatgcctctttccccggttgtcaatattatatagcctggcaatgaaaaaagggtgaagttttacagttctaaagatccattctttattttggtacaaaaataaattgttcaacctgtaaattgtcacttattttcgtattgttgtaaagcaaacttacagaataggaacacctgctaccagttccaagaatatcacatacatatgccttagaaaaaggccaggtatgatggttcatgcctgtaatcccagcactttgggaggccaaggtgagaatggatcgcttgaggccagcagttcaagaccagactagaaaacgtagcatgacccctgtatctacagaataatttaaaaattagccagatattgttgtgcgggcctgtagtcctagatactcaggagactgaggcagaaagattacttcagcctagaatttgaggttacagtgatctcacgctcactgatgatcatgccactgcactccaaacttaagtgacaacccatgtttttaaaaaaaaaaaaaagtcaccgcgagttcgattcaaacagtgtgaaggaggaagcaactaattatctccctctcctgatttttcataattttattaaatcatcactgggaaaactaatggtttgcgtatcacacaattacactacaatctgataggagtggtaaaaccagccaatggaatccaggtaaagtacaaaaacgccaccttttattgtcctgtcttatttctcgggaaggagggttctactttacacatttcatgagccagcagtggacttgagttacaatgtgtaggttccttgtggttatagctgcagaagaagccatcaaattcttgaggacttgacatctctcggaaagaagcaaactagtagactgatgagctggattgcttagattgataacatttacaaataggagtccagttgacatgctattaatgttgaaataaccatgcctgtactggtcagtgagttcggtcagctggttggaataccagttccagagctttaggcgacacatttgaattgagttatcattgtagagagtcatggctccatcagctatggttatcttctttggtctgaatgcctatcagtccttaccagctgtagcagccactgcttggtaaaactttgccacgaagtctggctcactgaactccagctgtctgacaaattcattgcgctcctgctcagcccagcctcgaaaccactgatcccaaagatgtagctggcactcaaagatagaaggtggtcggtctgccccagacacactaagctgctccagactatccagcagtggttgtaatttttctggcactgccttagctaccaggtcctctaggaaacgttcacgctggggacctgaccaattggcaaaccagtgaagaatacacttcatctcctgggaggtgatgtaagacatcagaggaggggaagggttagtattgtgtggtactgagggtaagagagatgggaaggatagtggcattgaagaggatgactccagtggcatcctgaaacataaaagcactgttatatgctctccaggtagagcaacgaaaatacaactttcaagcaacaagacatcttaccacactcaattagcatctacagagaaaattactttttatgaattcaaagacccaaaataataagagtcctttatttagattattatccaactaccttagaaaaatcaccaaaaataacttcatttcctatttgcctgcctttttcaaacccattcttccccacccactgtcttcctccatctttcttataaagaacctaaaaataaccaatatatttcttgttcattctcttcctcttacttctatgtgccaggttgggtaaagaaaaaaacaatgattaatgttggtccattacatcttctccaaaatgaaaatgcacacattttaaaatctagtacgtgcagctggtcaaggctgatgctaattgttttgcagctatcaacagtgggggaagaaagaaaaaacattatttatgatgaaagagccttcaatgtgcatataagcctctgaaatatgccaacaactccataacatccgttacctccttacatttcctgtaaagcaccaggaaaagttaaaaagcagagtaaggaccttgctcaaaataaggtaacgcatgaaagaaccagaagcccgggtgtttgagacgttcttaaaaaagagtccagttggtttgttggcttagagatctaacaagtgttatactattttatgacaatccatgtctttaaacaattgtccttaatatttagtatgggccagacgcggtggttcttgcacttccaaagtaatctcagcactttgagaggccgaggcaagaggatcgcttgagcccaggtgttcgagaccagcctgggcaacatggcaaaacctcatccctacaaaaaataaaaaaattagttgagcgtagaggtgcctacctgtagtcctagctacgtaggagactgaggtaggagcatcacctgagcccgggaggttgaggctgcagtgagccctgatcgcgccactgcactccagcctgcgtcagagtggagggacccagagtggagtgacaaaaaaaaaatttttttttttttttagtatggtatctattggtgccttgcaattttttttttttttttttttttttttgagacggagtcttgctctgtcacccaggctgtagtgcaatggcgtgatctcaaccactgcttcctgggttcaagcgattctcctgcctcagcctcccgagtagctgggactataggcgtacgccaccacgcccggctaatttgtttgtatttttagtagagacggggtttcaccatattggccagactggtctccaactcctgacctcaagtgatccgcccgcctcggcctcccaaagtgctgggattataggcgtaagccaccgcgcccggcaccttgccactgattttgcatcatgaatgcaacggaaagatcagccaatttgactttaatagttttcagtctcttaaatctctaacgtatctcttaaatctctaaactatttgtctgtgacctattttactgtttgtgtttcttctgcatcaagttggaggattggtagtgacaaagaaagaagcccctaaacaattaatattagttcaagtaccaaaaaagttcagggcgcttgcattttccagttcttgccctacaggaagcagttcctccaagggaacttactctcttctgcggagcaaggaagaactttcccagaatcttgccacatggcttccaaggcaaactcaaactcaagttcagcgtcatagatcagttcatagtctgggtccgaagacacggcgatgcttcttgcgcacccccacggagcttgttattccgattccgcaccagccccccgcccctccccaaaaaaagcctaagatgggagtggctatgattcagaggacagagggcagaagctgtttgcgttaaggagtggggggcttgccctattaaggtaatccgcaaacaccgagtctgacccggcccatagaggtacttctaccccgcttacctccccttttctctcgaagggcacccgaagattgtcacgagtccttagactccaactactgcggcagcttccaaatttcctgaaaaccctaagctgggccagcccggcagcccacgcacttccggcctcggacccgccccaaacacccaagcgccccagcgcctcatctctaggtccggaaataaacgaacatctccgattatggttataccagggtcgagggtttccgaatatattcgattcaaagcttcggcaagacgaagaaaaccgagcctgaaagcagggcgagaaaaggggcgctgcagggcggatggaaagaattgattggtaacgatgtggagacggaaacatccgaggacatccggaggaacccggggagttctgagtggtaatcgaggggtagagtatggcagtgggcggggtcatctcggtacgttcgaagggcgttggcggaaattaccgaagatgcccgaagccgtcgggacggacccgagtacctcacgcaagatggcggagctggaggaggtgactctggacgggaagcctcttcaggcgctgcgggtgaccgacctgaaggccgcactggagcagcgaggcctagccaagagcgggcagaagagtgccctggtcaagcggctcaaaggggtgaggagtcggcgttgctggggtgtcggaggagagcggacccggtagagacgagcctctgccgcggcgcaggcgcagtatccgggctcggcgcgagctcgctcaggccgccagcgcgagcctctggatccgcgcgcacggtggttgatgaggttcgcgctggaatggagatcgcgccggttcccgccttaacggcagcagcgcgagcccaaatgggagggtgtgcactactctccaggagtgtcttaagctccttcctccttcccccaccccctccttgtttgtatctgtggtttcggcgcatgcgctgcagaaggagttaaatcccactacaacctacggcgttgctggcctgaggggggcgagttgggctgggtcggagttaggggtatagttgcgcgaaggggtggatggggttggtatcggtatctgcacgaataggactggggtagggtaaaatgtctgctcgatta

SEQ ID NO: 684 - DNA, 6000 bp, Homo sapiens
gggagagacagggggcggtgtcagagcaaggcactggaccaatcagaggccgaccccggcgtccaggccggcagagtgcggcccagctgccagggtggcctagagccactcgcagatggggtccccaaaagggatgggcaggcgcaagcccagggatgggatggagatgggtgctctttggcaaatccactcccacaagcccgctgcggccgactggaggaggtccccaggaggggaggtgcccccgccgcctacctggaggccgcgggcgcggggctggcagggcgcgaagtggcggagggcgtccctctgcaattggatctgcacgtggcggggcacccggggcagctcaccgggacggaagcggcgcacgacagccagctccaaccccagtgcgtcggcgaaacgcactctcttgcgggtgtctgggctacggctgcggggcgcccgggccccgccgcctccggctggtgcagatcgggcccggcggccccgactcggtgcgtgagcgcgggatcgggccccgaaccgcgtcccgccctcgcctggctcctcctccggctcctcctcgaggctgggccgctggctacggtagtaggcgcgctccgttagcgcggcgatgaagctcaggttgcggggaatgtcggtgcccgggggccgctcacgggacatggcagccccttccccggcggggccagctcgcagcgccaccgcgctcccctctcttcctctctcccgcccgccccgcgtcagcgcagaagtcgctgggtccgcttctgcagcccctcgctgctgtgtattctccttgcagacacctccaggatcctccacctcccgttgctttgcctctcctctgtgaccacccttccctccctctggccgtcagcttccagggtcttagactatcacatcctgcctcctgctagcggtctgctctgagcgtgcgctcaactgcactcaccctccggttccaaggccctcacggcccgggcgcccccgcccacagccctctgacaggtggctccgcttgtcttcgctgctgcaccagggggcggggactccacctttgcggtcccgagtgaagctactcaaccttttaaaaaaaacatccacggacgggacgcgatggctcacgcctcaaatcccagcactttgggaggccgaggtgggaggatcgcttgaagcctggagttcaagaccagcctgggcgtcatagtgagacccctgatctctacaataataataataataaaatgtaaaaagtcctcaacttttccggcacagcacaggaaaggttaacgccgggaagaaaaaataacctttcattttcttgcaggggaaggttcaaaacgcccagcatgtgactttatctttggggttcactgttttcttttctgaaacctaggctcctggtttgggcagggggtggtggtgcgtgcaaagaaggaaaggtcatgaaagctaggtagagtctttcaaatagaaggtgagaatatggcacccgaactgagaactgcaggaagacctagcttctagtgaccttgagcaagcaaggcataacttctctggagtcagtgttctcgtgtgtgtgtgtgtgtgtgtgtgtgtgtgagtgtgagatggagtctcgctctgtcgcccaggctggagtgcagtggcgtgatctcggctcactgcaacttctgcctccccggttcaagcggttttcctgcctcagcctcctgagtagctgggattacaggcgtccaccaccacgcccggctaatttttgtatttttagtagacacggggtttcaccatcttggccaggctggtcttgaactcctgatctcaggtgatctgcccgcctcggcctcccaaagtgctgggattacaggtgtgagccacccctgaactcagagccatactctgaactcagtgttcttatctgtaaaaaagtggtggagttctgatttctaatccaagtgtaagccctttgagggcaggggctttgtctgattcatggtgagttttagtatatggtaggcactcaaattattgaatgaacaagcacccaacaactctcttggagttgggactgtggaattataggtccagtgggagcttccaagaagggcagagctggctttttcccctttcattttttttttttaacattagtgaaaaaaaaaagtgaagttgtttttagtttttttctaactttcctactgatctaatatagcacttacaatgtgctaggtactgttgtaagggttttacaaatactaacccatgtaatacaaccatcagaggaatagagactattatgtctagtttaaagatgagagaattgagggagagaggggagaggactcttacccagggtcacatagttaataattggggaggtgggattaggacctaaacagtttagctctagagtccacgctcttacccgcttggttatataagattaaaacatttaacaataatagttaacatcctcagagtgttaaaagagggaatattagagtagaaatgaagtctctaaatttaaagcagcaggatagtttaactgtaaaaccacaagtgactaagttgaaaataaaccatgagacacatgttatcttattattatacaattcattcctgtttacatgcattcgcactagtattgactgtagcaatactagttagctaggactcatttttaaagcaatattgactttttaaattttacacgtatatagaatgcatggatgtattctcttcgtatcattatatgtgatacaatatatacaatgtatatattgtatatgcatatacaatataatatatataatgcatataaattaatgtctaataaatcatacattaatttatgttacaatcaagctggcccaggagtttgagatcagtctgggcaacataatgagatccctatctctataaaaaatgaatttaaccaagcatggtgcagtacacctctagtcccagctaccagggaggctgaagtgggaagattgcttgagcctagacggtggaagctgaagtgaactgtgcttgtaccactgcactccagtttaggccatggagtgagaaccttgtatcacaaacaaacaaataaaccaggagtgcaaatgaagacttggactaggttattctctaaagaagagggcaaccttgctggtggcagccagaatgatcaggctaagagcaaaaatgaaatgaggatggttgaaaggatacagccataaaggagtgtaataggctgtgtgtttagaatagaggagagaattgagtatggacttgtaaatggtgtggattcagactatgagaaccatattgactatgtgaaggcaagaggtgatcttgaagcgatagtgtcaaagttacagcatgagatggctgtgctagcttcttacatatcagcctatggctttgggaaaatcacttaacctctccaaacctcaatttcctcattcatagaatgaggataaaacagcataaggactggtgagaggaaaaaatacacatgtaaaaaaagcacagcatctaataactcctcaaaatatgttagtttttacctttttttttttttgagatagagtctcgttctatcacccagtctggagtgcagtggcatgatctcagcctcctgggttcaagtgattctcatgcctcagcctcctgagcagctgggattacaggctggctaatttttgtattttacgtctggctaatttttgtatttttagtagagatggggttttgccatgttggtcaggctggtctcgaactcctggcctcaagtgatccacccgccttggcctcccaaagtgttgggattacaggtatgagccaccgaacccagctagttgttactgttattgctgcagaaaagaccttgcttctccagtgaccataagggaagatggtaatacagaggcttggattggaggtagaagcaaagggagctagcagaataggagaattaggttgcctctttctggcctttggttggggcactctttaaaaaagtgccagatccaagagcccagggggctggctgtgagtgccctcatgtggatcagctatggtcagactgcttcacgcctgtgacctgccctgtataaatatactgccatgtataaataatggccccatatatatgtaatctggaaggataaacatcaagcttaacactggcaacctgcagggagggaagtggaattgggtgtgtatgtgtgtgtgtgtttgagaacctgtattttattactccgcacgtctttattgtttgatttttttcataatgagaatgagtttgtgtgttgggtaaaaaaaagaaaaagaaaaaaaccccactaaaatcaatctaattacaaaagaagatgaattaaagaaaagtaccgagagaaactgcttgtgatccaagtcctggctccctaatgcctggctgaagcccagcccacaaagagaacactgggttaaaggtcctggagaaaagatgggaaaggtttggtgtctatgtggtgtctgctagccccataagggtaaggcacctggtagacggttcccagcttaatgggaactgctcctgttttccaggcacacagttcagggctggaaaagttcaacaagtgcatggaacatcggaaacctcctgaaaatgctaaatttgccccgagatgtcccgaagtccggcatatttctctgggcagcctagaggctcaggagcccagcccagcccagcccaccgtgccctctcagccagcccttctttgccttcagcagccctccctcttcctgagtagtggccctttgcaggcctgcgtcccagccccgcccctctctctggacgcatctctgggccccatcatcacccggcgccgggccctccctctgcccccccctttctcctccctccttccttccctcccttcctccctctctccctccctcccagctcctgcaccaggaaacggcccggatcccggcagcggcctgacccgtgagatccctaacctggcaggcgggcggggttggagactggctgaggtgggggtaagggaggagctgggcctttgggctgcactagggggaaccgggaatagagatggtgtcggcaggaagcccttggccttgggtttcccgggaggacagtcattaaacatggattcggccacacagctggtagagcgttgggggcaggggcctaggcccagagctgcaaccctagcccttcccaggccagaacctgatccctggccttcccctcctggttctgatctccccctcccctttccagggctccacgctggccaggaggatgaaaggccccagctgggggctccttgccaccagtgctgtgtcttaagagctgccatcccggctgggtgagtgtctccttcctttctctgtctggagtaacccattgcgtctcccacctttctcttcagcccatctgctccccctcatcttgtgtctctgccaacatctttacatcttgcatttggggaggtcctaagacccttcctctagccaagaaggtgtggactaaggagacccgggggtgggggtgttgtaggggtgtcattgagctgacgttgtcttattgtgaaaagaatctaaagtatcctaaacagaaaatttacttgttttacatttaatttggcatattaggaatgtaatggccagccactcacagcctagtctcatatcatgacttaattcccttgttcttgcctctccctgtccagtgagtcctgagcatttcctctctcctcctcatctcactgggttggtcaaaccagaagtgctccttctgattctctcttcatatattcatgccagtctttcatccttgcctcttatagccgcccggatggcgaccccagcctcggccccagacacacgggctctggtggcagactttgtaggttataagctgaggcagaagggttatgtctgtggagctggccccggggagggcccagcagctgacccgctgcaccaagccat

SEQ ID NO: 685 - DNA, 6000 bp, Homo sapiens
ttcttttgcacatagttgcaacctttccccatgtgtggagggtttgttttcagtagctgggataagggttcccccatgagctggagcatccctgagtcggcagggggtggaaggaagggggcagacgggaatccgcactgccacagtaaaaagaggtttcttattgccgggcgcgatggctcacccctgtaatcccagcactttaggagaccgaggtgggcagatcacgaggtcaggagttcaagaccagcctgaccaacatggtgaaaccccatctctgctaaaaatataaaaattagcagggcatggtggtgagcgcctgtaatctcagctactcaggagtctgaggcaggagaattgcttgaacccgggaggtggagtttgcagtgagccgagatcatgccactgcactccagtctggatgacagagtgagactccgtgtcaaaataaataaataaataaataaataaataaataaataaataaataagagatttcttatcactctatgtttactattcacctccagacaaaaaatgagaactttttattctgtaaaccttagacagtaagtccaacctcccttgattgtgaggatttactgtgaaagtgctttgtgaaccatcacatgtggaaaagaccagttgttatcattgttgctggtgggggcggggagggaaaggccactcagccagtctggcagttggactcatgaaagttcacactgtagactttacccttgactcagaacatgctctctgagtggaatcacctctatcacgttatgtctgtcaaaatcttaccatattgaaactccaagacctaataacatccattaaataccaaagtgaccagcaggctacttacaattacaagaaatcaggagggagcagcaaataatagactgacgggctagggtagtggcaggtgggagagggaagctgctacatctctgggcatgtcttggagacaaagaggaagctgaactgtagaattactacactcatttcatgaactcatttcaggaaaattagaaaatgcagataaaaataagactataagtactcacctcagcagcacacacactaagaaaaagatatgattataaaatataagaacataaaaatcacctataagcccatcagccaggaataattcctttaaacatttttctatttgtccattcatatatttttctaagcatatatacgtatacatacatacattctttcttcgcggtgaaatctgatgttaaatcaaacagctaaatgtttattaatataaattttcatatgtccctttctaatactagaatcatatttttagcagatccttttgtggtaaaatacacatagcacaaaatttattattttaaccctttaagtgtacagttttgtggcatcaggtacattgacttcattgtataaccattactacatcgttagaacctttcatcttcccaaattaaactctgtactcactaaacagtaactctccattctcttccctcagcccctacaaaccaccattctactttcatctctatgaatttgactattctaggtacctcttataagtgaaatcatacgatatgtgtccttttgtgactggcttattttacttaccataatatcttcaagattcatccacattatagcatgtgtctgaattttattaaggttaaatcatatttttaaggctgaattatattgtatggtatgtatatacaacagtttgtattggaccgatccattcacttattgatggacatttaggttgttttcaccttttggctgttgcgaataatgctgctatgaacattggtgtacagttatctatttgaatccatgtttcctattctttttttttatttttatttttattttttgagacagagtcttgctctgtcccccaggctggagtgcagtggtgtgatcttcgctcactgcaacctctgactcctgagttaaagcgattctcctgcctcagactcctgagtaggtgggattacaagcacatgccaccatgcctggctaatttttgtatttttagtacagatgggatttcaccatgttggccaggctggtctcaaactcctgacctcaagtgatccgccagcctcggcctcccaaagtactgggattacagacatgagccactgtgcctggcctcaattcttttaggatatactcaggggtggaattactggtagcagatctttttaaaaaattagtcctggccgggactgtcacctcaattaataccatttggtctgtaattagaatctcttaatcaaacaacggataagaattaagactagaatatgcaaggagaccacatagatcccccacaacccgctacccctacaacaattagggagagggaaccagagctcacaggagagatgaactgaatgtaattagagacaatcaggagcagggaactgaaggaataagaaatatccaagtaaggctggacgtggtggctcacacctgtaatcccagcactttgggaggccaaggcaggtggatcacaaggtcaggagttcgagactagcctggccaacatggtgaaaccccgtctctactaaaaatacaaaaattagtagctgggcgtggtggtgcatgtctgcaatcccagctactcgggaggctgagacagaattgcttgaacccaggaggcagaggttgtggtgagctgagattgcgccattgcactacagcctgggcagcaaatgtgaaactccatctcaaaaaaaaaaaaaaaaaaaattagccaggcatggtgacacatgcctgtaatcctagctactcaggaggctgaggcaggagaatcgcttgaacccgggaggcggaggttgcagtgagccaagaccacaccactgcactccagcctgggcaacagagcaagactccatctcaaaaaaaaatttcatttaatttaaaaaaagaaatacccaagtaggctccaaaagcatgggacatctgtggtcagaggcatcagtcctcagaaaagaccagagctcagaattccaagaatcagcctctgcctaggtccacccccatacccccttgctggaagctgagggtcctgttaggcacttagtctaaggttcttctccctgctcttccttcttttaaagaggctgtttattttgagtcaaaaagtagtataggccctgataccacacccaactttgtgcttcacagtggtttatccctcattctcagggtctcgtcacaatctgaagaaacccagttataacacctttccaaatcctttctgcctgttcccttcaagtggagatactgagcctgggttattctctctaaaaagaatcacaaagggagtggctgccccttttgatggctctcagcttctgactctaggcttttctgaggacctgctacacttcttgccttcttggattctgtgtgataccaccatatctctatactaaagcctacttcagatggatttcatgaactgtgcaggtgagagccctcagtccctacaggaacccaatcacctctttcctcctactgagtatggagctccatctaggatgatcagtgccttaagaaaggctcgatattttgggttgttcatttattcattcaattcaacaaatatttattgggtatctgccatgtattggcttttaaggagactacggttgaacaattccctaaatagttccaaaatagcatgaactgaccctgctagaagccatggtgtggctctccaagagttgttttagaaaaaactacagatcacttctgcctcaaccagcagagcccatggaccactgaacaaaatggaaagcaagtaccaaggtgagcacctttagtgagagccaacgcacaacccacaggattgagtatccctgtgaaggattgagtgcctagggcaggccctatcgggttcccacaacctccagtcatggtcagacctcagaaaggtaaaatatggacaccttttttctgccctaaatctttaagactctccatgcttctgggttatcaaaagactgtgtccagagcatgtgcttgtcaggaacattaattagggtatttgcatgcaagagttgtcatgcaagggagagggcaggaaagctctgaggtgtttccactgtagtgtacaccacaatgtcaccaaccctctggatgggctgataaatctagccttaccacaatgccctgggagtgggcttggggcctgccacctccaggagctcctgttcaaagggcatataagtccctatcaatgccaaagacttgcctcgcaagagcagctatagggactgggcaggaatacagatagggatccttcactacattgttggatgcttcacacctttcccagccacctgcacgaccagctgagtggtacagccctgaagcctatgtgaaaacaggataacttgatggttcagagccattatttccatatgggcttaggcaaggtacttaaactctcagtgtctcagtttcctcacctatagaaaggtaataaaagcagtacctatccccttagggttcgtgtgagaattaaataagctaatatatatacctggtgcatgataagttttatatacgtgttggctatgatcttagggcagctgtgagagagctgagccctagaaccataaaaccctcctaagcaccatctccactcatggcctggcaggtcgtggagcaggaaatcctgtgggaaaagggaaggctttgactgtaggagtgggttgattgtgggttcctggaaggtgaggactccttccctaacatcctcaatgcccagcaacacctaatctggctgcggcaggtgctcaggaaacgctagtcaaggagaaaggcactagctttcgctctgccccctgccccaccccaggggcgggactgtagaggcgcctataagggaagttgttcagtcaactcggaaaaagggtaacaacccggaaagtagactcaccgtcttggtctagagactgacccctgcacagacagaccccttcccctctctgcgaaaggaccaagccccagaagtcactccatctcctacggctcgcaatttccagaggccccctggcaccttccagcctgatgtcgtgcgtcaagttatggtgagtagggagtggcatgtcgatcgcagcctccgacattcacacccagagagccccacagactcgctcagagaacgtctttgagtccggggacggtgggggccggcgagggaggctggggattgcagtgagaacgccgagtcacaggggcgcggggagcagcgctgaggcacggcacggccggctagtgggcgacacccctctctcaggcccagcggtgcccccgcccccttggtgtccatcgaggaactggagaaccaggagctcgtcggcaaaggcgggttcggcacagtgttccgggcgcaacataggaagtggggctacgatgtggcggtcaagatcgtaaactcgtgagtgaccccggttgaccccagccgcaatctggccaaaaaggtggagccactgtgctctggggcctgaatggcgaagggagggattttcccacgaccccggtgcgactccagctctctcctggagtgtaggaaggcgatatccagggaggtcaaggccatggcaagtctggataacgaattcgtgctgcgcctagaaggggttatcgagaaggtgaactgggaccaagatcccaagccggctctggtgactaaattcatggagaacggctccttgtcggggctgctgcagtcccagtgccctcggccctggccgctcctttgccgcctgctgaaagaagtggtgcttgggatgttttacctgcacgaccagaacccggtgctcctgcaccgggacctcaagccatccaacgtcctgctggacccagagctgcacgtcaaggtcagctggtctacacccctctcagcctcaagacaaggccccagagctgctccagccaggcccgccggacactagacctccagag

SEQ ID NO: 686 - DNA, 6000 bp, Homo sapiens
atctcagaaaaaaaattaattacctctaactaaatccttgtctcggcctgtttgttgaacaaaagactcaaactaaaatccaactgtattgggttgaatagtgtccccccaaagtttatgttcacccaccacctatgaatgtgacagcatttggaagcagggttttgcagatgtaactaagttagaataagttcatacttgattaagagggaccctaatcaaatgactggcatcactttaaaacaggtaaatgtggacacagacacacagggaagatcacccagcaacagatacagagattggagcaatgcatctacaagccgaggcagtggcaaggattgctgatacccctagaagctaggagaagcatgggacagactttgccagacacttccagaaagaaccaactctgctgataccttgatttcaggcttctggcctccagaacagtgaaagaatcaatttctgttgcctgctgccagcagtttgtaatactttgttataacagcactaagaaattaataccccagagtgtcttagtcagggtccaagaagacagaaaccactccaaatatttgcaaacaaaaggagtttattccagggaactgattacatgacaggagccaaagagggtaaaatgaatcaaccgagagattagcaatagcaggaagccactaccacacctagctggaggcatggagggagcaagcagtgttgccaggaccctgatcacctggcagaatatgaaaccatatctagcctgccaggtgagagctggagccaggaggagagcagaggagtcatcctgaaacagtccgcaagctaagaagaaagagtgggaaggaaaaagaccctaattcttcagcaccacccattggcttggtccaagaagacagagctgtcagacagagaaatctgtgtgatgtagactgtgtcacagagaagagcagcaggaagatgagggctggatctgaaagctacctgggcaaggatccaaaccaacaactccactccaaccccatgagactcaaaggaggagagtttaagcttttgctgttttttaaataaattactaggatccataataataccagtaaaaggtgagatctgaaggatgagagacactatgaagaaacagtgtgagacagtaataatgcactgatgatcatggcagtacaaaaaatgggaagtccttcatgagtcaggtttctttaaacccacatgcaactcccacttagatggacacaacagtatgtgaagactcatactgtgttcttttgttccaagaaccaccacgggaacacaccaggaaaaccaaaggaattcacacaccctttgaaagaagcaggacactgctgcaaattttgcaaaacaggtgaaaaactgtaagttcccaaagtgtgagagggaaaaaacctgcctctgaacacacatccccactggggaatctgaaaatccagatcaagggagaatttaaccttaccttgaactgaaacaaatgtaggcagtcacacaaaatataaaagtagaagtatcagtatcagaagactgcaaggcacttccaatcttcagcttgagcccagggaagccattcctgactatatctcacaggatctctcagggaaggcagccagtggaattggggaggggtcaccaggtgaaggaagcttccaactgaaattggtagtggtttcaattggacacaaactttctttagtggagtctaggggacgagtgggagctttggcaatatgagcacatgaactcagaagcaaagaagccactcccgttggagtgggcagatggggaggggtgatatctgaaatccatgcttgctttctcagtgggaaagttcacagccttgggcaagatctgagtggggcactttgggagtgagactggccttgccaactgtgtgggagctgggtgagacctctcgctaccagctttccgccacttccctggtgaattatatgacacaacagaggtagccaagatcccctctggaaaataaccccattggcctaagaaccacccccacatcccgcacagtggccacagcaaaccccacccaaggagactctgagcccagacccacctaaccctgccccaacatgatggtatttctttactcaccctggtaaccaaacacaaaagatagaaactcttgggagctttcaggccccacccatcatctgagaaaccaaaatactcaccctggccaacttagggcaaacctagatccctctactaccaatgcagctggtgctctcttgaaagcaccacttcttggctggaggccaaacaacacaggccattacagcaactcatgacagaataaccctgaacccaggaaggagaagataacacctaattccaatgcctgcaacatcctggctaaacagaggtcctgagtgtgtccacatgaaaacttcactgctagcataaccagcattcaagaaacccagcacactacacatatctacaaccaaggactctcacagagtctacttcactccccttccacctccaccagagcaggtaatggtatccatggctgggagacctgaagagagatcacatcacaggactctttgcagacattccccagcaccagctggaacctggtagcgccactgggaggctagacccagaaaagcagtaacagccaatgcagtccagtggtcagaaagtcccatccctaggggaagggggagagcaccacatcaaaggatcaccccatgggataatagaatctgaacagcaggacttgagttccagacctttccactgaaatagtctacccaaatgataaggaactagaaaggtaattctggtaatatgataaaacagagttctatatcacctccaaaagatcacactagctccccagcaatggatccaaaccaagaagaaatctctgaattgccagataaacaatccagaagatcattaagctactcaaggagataccagagaaaggtgaaaaaacaactttaaaaattaaaaaatatatatatacataaatataggatatgggtgaaaaattccccagagaaatagatatcataaagaaaaaataatcacaacttctggaaatgaaagccatgcttagagaaatacaaaatccactggaaagtttcaacactagactagaacaagcggaagaaaaaacttcagagcgcaaagacaatgctttcaaattaacccaatcaaacaaagactaagaaaaaataatttttaaaaaatgaacaaagcctccaagaaatgtgggattatgttaaacagtcaaacctaagaataattggtgttcctgaggaagaagagaaatctaaaagcttgaaaaccttatttgaggaaataattgaagaaaactcccctgtccttgctagatacctagacatccaaatacaagaagctcaaagaacacctggaaaattcatcacaaaaaagtctatcacctaaagtcctatcccagttctgttaaagtaatagcaggaatagcaccttataaatacctagaaaaatagtagaaggaaacatgcttaagcattaataatgatctccggtggtagaatttttggtaagtttaattttatcatttacatgttcctacttaactatacatatatatttatatatattcatatacataaatatacaaacatatgtatatatacacatttttgtttatggacagcctatgactgtgagccaagggacatcagagacatggctctctggaaactgagagaatacttagtggacagttttttgtttgtttgtttgtttgtttttgagatggagtctcgctctgtcacccaggctggagtgcagtggcgcgatctcagctcactgcaagctccacctgggttgacgccattctcctgcctccgcctcccaagtagctggaactacaggagcccgccaccacgcccggctaattttttgtatttttagtagagatggggtttcaccatgttaaccaggatggtctcgatctcctgacctcgtgatccacccgtcttggcctcccaaagtgctaggattacaggcatgagccaccgcgcccggccttagtgaacaattattatcaggatgatcagcatccatttttccatcacctggcaacaacaactagcatttctcaagggaaatcccctcctcattcataagcaccatagatggagtggaacagtccccacctcagcttaaggagggctaaataaccaaagcataaagcaatcagtccactacacttcagtggacccaatgatgactcattttggttcaataaatatcaagtccagaacttttgtgcagaactgtggaataaaaaaagttatctttgtcacagaatatttatatttaaagaggggattctaaatatcccaaaaatatgaatctgagatagtggtaagataggaatgggttgccatttgcagtatttgttgggtgtgtgcaactctgcatactgctaaggcaagtccagcctccgtctcacaccaacaggcagatttccccaccacggcccttaccatcttgtgctctaaccccagattttcagtctactcttgctaaccatcaattcttcaagggcaagagccatgtctctcatatccctggatctggcttgctaaataattattcatgattttatctgagtagaaaaagagccaagaactgagaaaaggagacattcttggttctcagtcactgaggagcttctgcagtaccagcctttctgctagctgcagccacagcttcaacagctccacctccttgttctttattcttgctttcaccttgttactcagcagcaggggtgtaaatgtgacagtgccatgtcaacttaaaccaaaccagataattttaataaaccaccttctataatgacacccatcaaaaccagaaggggacaagtctaggaggtctctgagtttactgtacccatccctccttcatctccctccagcatttgtttctggaaggagtcaacaccaacagctctgacctgggcagccttcctgagaaaatgcagccattcctcctcctgttggcctttcttctgacccctggggctgggacaggtaagtgactatccctattccagaggcctgaacccatcttataagataccctgtacccatgagcactggtcaggaattttcctcaatctgagcccacctcccattccacacccagacttataaatctgaggctagatagacactcagcaaagatcgaaaaatgaagggtgttccctaaaaggtttaatgggtgttagcctctccctagacctctcctttatgacctggagtgtggattgttcttagaaaggcatttggtagggaatgtgaagctaaaaaagataagtaattattactctacactccaacccaggaaagaggagctcagacaccaagttgcagtcataggagttgttactggactcagcttaagaaccacttattcagtgcccccacccagtcacccctgccaggagggaagcccatggtgcaactgatctcagagatggcaagatgactgtgtccatagctctcccattaccttggctccacctgggctttgcgattcatttttagttgatttctccacttccttctgcctttgcaggccctcagctactccactgacctggtgataaccccctctaacatccctgaggtcctgaatcccaccagcactacccccactaaacctcagccaaaggctaattggaggctattcatttatgcaccaaacaacacttactgagaacctagaatgtgttcagccctggcacatgagaattttagaaaatccaactccagaagctcatgggtagatcattagaaaatggcaccaatcaggaggacagcagaggctcagaggaatcagagagactcactaaaaaggaggagcctgggaagtcctgtccaggatcctctggggctctaccactgtgaaaatagatctttcttcctccatgtgtgtttc

SEQ ID NO: 687 - DNA, 6000 bp, Homo sapiens
gcaataagggaaaattaaaggttgttctagtagatactcaaactccagaaaaataatagatgtatgtctgtcctagaaacacttttctcttcccatctctgccctcttcccaatccttactaccacagaagcaaaatggaagtaccacattctccactctaatatgttacctaagttcttctttgctgacagattttttatctcaaattatttttgattttatgtacatatcccaggaattctgactagcatcctatcctaataggaatacagagataacttttaactgagacaagaatttcttctctacaggtcaagtgtggtggctcatacctgtaatcccagtactttaagaggccaaagtgtgtagatcacttgaggccaggagttcaagaccagtctgggcaacatggtgaaatcctgcctccactaaaagtacaaaaattcgttgggcatggtggtacacacctgtaatcccagctactccggaggctgaggcacgagaatcacttgagcccagggagcggaggttgcagtgagccaagatcggaccaatgcactccagcctgggtgacagagcaagatgccgtctcaaaaaacaaaacaaaacaaaaaaacagattttcttctctacaacatagctgagtctcatggtcaaatgaaatctagggccaacttctggctccttatgcctgtaagttctgactttgccatgacttaagagaatgatcaagctcagggaaatcaggtcacaacatcagaatcaaatgtcatgtatgagtgtgggaatgtcatgtcattgtgctgttctcatttacctgtaaggattggccttggccacttcgaaaagggactagctgtggttcagtgaaaggctaatacccaagagtatttcccttcatgggcaaggcatgacattcttctacagattaagaacagcagggaaataaggaataaaagggaagagcgtgtgtaatatgaataaacttttccatcaccatatggtagccactgaggtacctctctcttctaacagaatcagaatctaacatcagagatatagacaaaagacttttattcttcagcacctccttaatttttctccccaagtccctgaaaaatataggagatggtgaagtttgtagaagacttatattactaaaattagaaataaaagtggagacattactaccaaccttagagaaattaaaaggactataaaaagaatactatctacatttgtacaccaacaaattaggtagtctagatgaaatggacaaattactagaaacacagaaactaccaaaacagactcaagaagaaatagaaaatccaaccagatgctcacttcatcactgctattcaatattgcactggaattcctaaacagagcaattaggtaagaaaatgaaagaaaaggtatccaattatgaaggaagaagtaaaactatttctatttgcagatgacatgactgtatacaaagaaaatcccaaataatccacacaaaaactagtagagttaataagcaaattcaacaaatttcagggtacaaaatcagttgtgtttctatacacaaacccacaatgaacaataaaaaaaggaaactaagaaaacaatttcctttataataacatcccaaagaataaaatacatgggactaaatttaaccaaggaagtgaaagaattgtacactaaaaaccacaaataattgctgattaaatggaaagatgtcccatgttcacggatagggatacttaatattgttaaatggcaatacttcccaaagcaatctatagattcaatgcaatctctgtcaaaatttcaaatggtcttctttgctgaaatggaaaagccaatcctaaaattcatatgtaattccataggatccaaaaaagcaaaaccaatattgaaatagaaaaacaaagttggagtacttacacttctcaatttcaaaacttacaagctacagtaattaaaacagcatggcaaaggcataaggatagacatatggatcaatggaatagattcagagtccagaaataaacacaacatttatggccatttgatttttgataaggattgtcaagggggtcttgaacattcagtggggaaagaataatatcttcaacaagtggtgctggaacaattggatagccatgtgcaaaatactctagtagactcctaccttatgtcacatacaataattaatttaaaataaatcaatcctaaatataagggccaaaaccataaaactcttagaagaaaacaggcgtaatcttcatggtttctgatttgtcaatggattcttaaatttgacaccaaaagcacaagcaacaaaagataaaattgatacatttgaatgcataaaatttttttaatttgcacatggaatgacaatatcaagaaaatgaaaagacaatctgcagaatgggagaaaatatttacaagccacatatctgataagggctgagtatccagaatatataacaaactcttccaactcaacaatgaaaacaaaaacaacgcaattttaagaatgggcaaaggacttgaatcaacatttctccaaagaagatatgcgaataaccagcaaacacatgaagtgatgctcaacatcattactcataaaggaaatgtgaatcaaaaccatatgacatactactttacacccattaggatgaagataataattttaaaataacaagtgtcagcaaggatgcagagaaataggaactttcctatgttgctgataagcaatgcaaaagggtacaaccactgtggaaaacagtttggtggttccttaaaaaattaaaaataggattattgtataactcagaaattccaaaagtatatatatttggtatatatccaaaagaactgaaaacatattgttcatgcagaaatttgtacacaaatgcttattattgctgcattagctacaatagccaaaagatgaaaacaacccaaatgtccattgacagatgaacaaataacttgtggtataaacatacaatgggaatattatttttccattaaaaagaacgaatactggcatgtgctacagcttgtatgaatctcagaaacattattacaagtgaatgtagccagccacaacaggtcatgtattgtgtgattccgtttatatgaaatatccagaggtggtggttgcagattttgaatgtgctaaatgtcactgaattgaatactttaaaatggttaattgtatgttatgtgaattttacctcaattttttaaatgggtcataaacttatgtttagcataatccccttttaattttaaaaaatgcagatattacatgagaaaaaatgtgctagagcatatttcaagacattaaagatggttatcagtgaatgatgagaaattaggtaatgtttattattttcgctttgctaaaattatttaaaaattacttgcatattaaattttttaatgcctaggaaagaaagactatagttgtattgactaagatttctacgagcatggggaaaatgcttaatttgtagggttaatcaaggataaaataaattgcattgtatgtacaatgtgatcccaagtatttaaaacacactgcttatggtaacagtcagtctgtgggagacaggttaaaaagtgatattttcccttcctactttccaaattttcttaacaaacatatattatgactataatcagaaaaaattatttttaaaacgtctactatggggcaagctaggttcaaaaaatagaagtttgataaatgtagttggcttgctattgacaaggaagacgtttacactggaattctatattttgagatataccattcctcatagaaaaatttcctcacagaaaatataaaggtggaaacaaatcacaagaatcgaaccatgtagagagacttagttgtcttttaacagaattgggcacgggctgttcagaaacaacaatctttcacatccattataatgatagcattagtgtagtttgtttagcaaatgtttactgtgagcctgttatgtgctgagcctgctatgtaagaagtgtggctctctggacaggagacagaatactaaacaacacaactactgatctttggctgcctggcatgcttcctcacttcatatggtatcagcaatttagcaccacaaacgtcctttagagaaccagccctttctcattcttggttctagtggcttgagtagactgaccccagcctacccaaagtggatttgactcctagcaattcattaatctagcccaataaaatgtcaagtacaggacttttattgaaagcattcagaaaagaggtggactctcacactaaacatttgtaactaaataagggatgttagaaattctctagaaaggaagctatgataataaatgggttgctagatgggtctagtagatggtggccatgctttgttactgccttgtgtattgtgctaccatagccctccccaaactgtactctggctcctggcatttccgtctcttcaaccagatggtcagctctctaagtgaaggagacacatctccaacatgcttggttctagcacaacagaagggctcaaacacatacctgctaaagaaactatcctgatggatttagcagcatggccatgaggcattggcggttctatcactgggaactcaggtttctggtgctccagtacctctactggctgataccacatcctacaattcacttcataggcttgggttcctgctctgggctgaataggtggtccactctgagtcatcagctgtgggtgatgatgtggtcactgcatgattctcacacaagcacccagaggacgtcatcaggcagaggcagtgggggtgggcagcatttacagaaaatctgtgatgagacaccacaaaaccagaggggaacatgaagtcactgagcctgctccacctctttcctctcccaagagctaaaagagagcaaggaggaaacaacagcagctccaaccagggcagccttcctgagaagatgcaaccaatcctgcttctgctggccttcctcctgctgcccagggcagatgcaggtgagtgaccgtctccaccctcgggggcccaaccccatcccacaggtctcctgccctttctccacattcctgatccatctatctaccaggaatgttctgaactccagctcccattctaccaagaccccccaagtgtgatgctggataagctatcagcaggaatggcagagcagcaggccattctcaagaagagccagtgggtactatcccttccccagagcccacctttgtcacctggagagtaggactttcctagaagtaaatggcagaggatgggaaactagaaaagagaaatattaaattattctagagtaggcctggcttctgtttctgggataagacaggtgcttctctcactgtctacttaggagagaaacccagagctcagctgacagcagaattggtacaatcactgtcctcagaacactgttaatgtgtttgctcagtcccattctccaactctgcttttcttccctggcctttggtggctcccctctttccaaggatgaggcactacggcaggccccagcttccctgctttctagaattccaccagcactgctctaccagccctcatccagaggctaactggagccagtccatcatgcagccatgaacatttactgggcacccactacatgtcaggctctaggaaacaggatatgacagtatctagatccctccacttacaccctggccattagaaagcagcactatcctagacaccacaggactcataagggtcttggaaactcacctgaaacaaagcaaagtcaggagaggaatgatcaggagcctctgggatttcactgtccctaagacaggtatgctcgccttcaactacatatggaagaaagatttacagaccaaagtctgctgttcttccctttttcagagcaggaaattgaagccccttcctccaggccactcccaactccaggctat

SEQ ID NO: 688 - DNA, 6000 bp, Homo sapiens
acctcaggtatggcagtactttgatggaaaagaagacatgtagacatttttcatcagaaataaaaaaggacacgatggaaccttcccatatttctgttggaaatgtaaaatggtacacctattgtggaaaacagtttggtggttttccaaaaagttaaacataggccgggcgcagtagctcatgcctgtaatcccagcactttgagaggccaaggcgggtggatcacttgaggtcaggagtttgagaccagtctagccaacgtggtgaaaccccatctctactaaaaatacaaaaattaggtgggcatggtggcgggcacctgtaatcccagctacttgggaggctgaggcagaagaatcgcttgaacgcaggaggcggaggttgcggtgagccgagatggtgccattgcactctagcctgggtgacaagagcgaaactctgtctcaaaacaaacaaacaaacaaacaaacaattggctgggtgtggtggtaggtgcctgtaatcccagttacttgggaggctgaggcaggagaatcgcttgaatccgggaggtcgaggttgcagcgagccgagattgcgccattgcactgtagcctaggcgacaagggcaaaactccatctcaaaaaaaaaaaaaaaaaaaaagaaagagttataaaattaccatatgcccccaaaactgtatgcctaggtctattctccaaagaattgaaaacaggtactcaacatacttatgcatgcatgttaataacagcactattataatagccaaaaagtggaaacaacccaaatactcatcagtggatgactggataaacaaattgtggtatatctacgtagtggaattatcattcagccataaaaagaaataaaatcttggtaaatggtacaaaacatcatgctaagtgaaagaagccagtcacaaaaggtcacaggttatatgattccattattaggaaatatctagaatgggcaaatccatagagaaggcagattgatggttgctaggggcttgggagaggaggcaatggggaataactgcttaataggcacagttttcttttggggtggtgaaaatgttttggaactagagagaggtggtggtttcataacatcgcgaatgtagtaaatgccactgaattgttcattataaaatcgtaaattttatgttttgtgaattttacctcgttaaagtcaaaatgcatacatatataaataggacagtgttacagttgagaaggcagaagcatcccatgcttcctcttccactcaactgagactctttggtttcgtcatctgtaggaaaatgaagttgaactaggtgaccactaatatctcttccagttcaaattcaaaggtaagaaaactcaacatttttctttctcccctactcctccacatgcttgaaaatgactgcatctatactgcagatgcacactggaagacaatgttgctgtaattaaattacagggaaattaatttgctttagttattatggaaaggtattttaatattcattattatgacacaaattagtggacaaataactaaagcaaatgcactttaacaattagcttgggttttccctctctgatgctcagacccacagcctgtgcctggctccagcctgtctgtgttcctccgtgcaatcacacactctgatttttgccagtcacagtatctctgattcctctgccaaatgcagtgctggcagccctaagctgatcgggaggtccttgattgattaatgagtgcccttgccaagcagggatggtgccaagggattgaattcctttctaaactgcccatgctttacaaccaacataatctagaacagttgtcactaggactcacttagactattgctctagttataacgagttacaattttactgtgaaattattgaaatattatttgaacagtaaactaaatttacccactcctgggatttgaagtcttgggtcaacatgttcattctggaaggtggttgtataattttctgtattttactgaccaccacccctctaccagtgattgcaggtttccattcctttgtaaattccctccttatcgttcctaggaataaggtgtatctacaaaaagcctccagctagaaacatttcagctagttactaaggattatctgtcaccttccccctttttgattctgtccctcttcagggatatctacttctgagatttacacagtccccaaagctgcaaaatgcacgacccaatgccaaccagggtctacattcaggctgtcttagaccaggtttctcctggtcaccccattatccatagtgcccctggaggagatcactgcaggaggcaaagcagttccttctgtgcagggttcaagcagaagtagagaggagggctttcctcctttttggtactgcactccatttcactccttgctgcaattttttttttttaaggctaaatttcacttttgtcacccaggcaagagtgcagtggcataatctcagctcactgcaacctccacctgctgggttcaagtgattctcttgcctcagcctcccgagtagctgggattacagatgcctgccaccatgtgtggctaatttttgtatttttagttgaggcggggtttcaccacgttggccaggctggtctcaaactcctgacctcaggtgatctgcccacctcggcctcccaaagtgctgggattacaggtgtgagccactgtgcctggccctttgctgcaatttaacagtcctccagttttcactttatgtctctggctcccaccactcaaatgtccactgctcagatagacaaagctgagagacaaatgccctgtagaactcctaagttctccctccactggcctctaagcttttgtgctgggtcaggctaatttgcttgactcttttccagtgacttctctttggggaggctccccagccccttttgcaaatagatccttccagataagcccagacatactgaatcccaagtggaggctgctatggctcagggtcagacattgagttcccagtaactatttattagccattcactatgtgctaaacactggggttccaaggatgatggtctcctctcatcatggagctgccttgggaatttagacaagagctctttgagcagtgatggcctttaccccaaggaggggtacctcctgctcaaaggtaataccaaaggtgccaactaatcactgacttggcagagaacctctctcaatataactagaagtttcatcaaagtttcttaagcactccaccattgactgctctccttcaccatcccccaggttcttactcaaccacgtgcctctgtctgcttctttccaacttgtagcagcacctttcctcttctattctttgttcttgtcctggatgtcattccctttctcccctcagaggcagagaggagagggctgctggaggaagaagaaaagtgaaaaagctgtagaaatttgcttccacaataaacaatacccgaaaaacctgtacattcttttcttcaacttaaatgaagaacccaagtgtgcactcatatgaagtaaaaaaggtgcaaataggccgggcacggtggctcacgcctgtaatccgagcactttgggagggcgaggcgggcggatcacctgaggtcgggagttcgagaccagtctgaccaatgtggagaaacctcacctctactaaaaatacaaaattagccaggcatggtggcgggcgcctgtaatcccagctacttgggagcctgaggcaggagaattgcttgaacctgggatgcggaggttgtggtgagcagagatcacaccactgcactccagcccaggcaacaagagcaaaactccgtctcagaataaataaataaaaaaaatacagttcctttttttttttttttaaagaagtacaaatagctttgcatgcaatttatgaattttttcctgattctgatcgctggtgttcagtaggaaagggaatcaaaactccataaagcaaatcagcttatctgtagataaccaaagtcttctcagtggtgtctgtccctcttgtgaaagtacagctgcttgtgggaaaagtgagagacctagaatacagtgtatcttttgggggacatacctctgactgttacagaagcatgtgattaatttggaaggtagaatttcggaacatcatattttaataggaagcttgaaaggtaagtagaggaaaacatcaagcaaagcaaaatacaccatttgcagagttcaatcagatatgactcagcatttcttcattgtgctcatccccagctcctcaagcacatagtgccttgcacacagtaggggctgagggaaatattcgttaatgcattaattttagttaaaactagatacctcctaatctctcagtggcttgaactgggtcaaacagcagaggaatggggtaaataaggaaagacacccggtaaaggtagaacaagaccactgcttaataaatatattcgtttttggggttattattttgctcaaaagtctatgaggtgaccaacccagaatgtggcagttaattctatttacattttcagtgtgggatccaggttttcaagtttgttatgtgattttatgcaaaacaatatgcaaatccagcgcattctaaaaattcagtctgctttccagccgctcccctggtcacaaacaactaaggttggcgccgggctctctgggatccttcgcggaggggcagagcaggcgggggtgactggcagcggggcgggggaaagggcggtcccggaggcggtcccggggcggagcccgtgacgcgcggagtcggccggcttaagggccggacctcagcgtctcccggagtctggccgcagtcgcggcagtggtggcttcccatccccaaaaggcgccctccgactccttgcgccgcactgctcgccgggccagtccggaaacgggtcgtggagctccgcaccactcccgctggttcccgaaggcagatcccttctcccgagagttgcgagaaactttcccttgtccccgacgctgcagcggctcgggtaccgtggcagccgcaggtttctgaaccccgggccacgctccccgcgcctcggcttcgcgctcgtgtagatcgttccctctctggttgcacgctggggatcccggacctcgattctgcgggcgagatgcccctgggacacatcatgaggctggacctggagaaaattgccctggagtacatcgtgccctgtctgcacgaggtgggcttctgctacctggacaacttcctgggcgaggtggtgggcgactgcgtcctggagcgcgtcaagcagctgcactgcaccggggccctgcgggacggccagctggcggggccgcgcgccggcgtctccaagcgacacctgcggggcgaccagatcacgtggatcgggggcaacgaggagggctgcgaggccatcagcttcctcctgtccctcatcgacaggctggtcctctactgcgggagccggctgggcaaatactacgtcaaggagaggtctaaggtaggacgcgctcggcgccctgccgcagctgctcccgcggggacgggaggcactcggagtccgttgtatgtcgacttcccagggccgtaagcgaactttgttttttaaccaagaagtcagcctggtttgtctctactcgctgcttccccccacccctcgccccagctcctctgagcgaaagtcaacgttaaggggctcaggtgaaccatgatgatgaccttctgttgactttgaaatattggctcttgtgggtgacaaaagccagacaagctgtggctgtggtccgattttaagacgaggttctcaaagatccaaaggagggaaagggtattggaaacactgtgtatcatctgagacacacgtgtcctcatgatcttaaatgcctactttaaagccacctaatactgcccttcattgtggtcagaagagatttctacaaaagcactcagaattctggaggcagttgtgattttgccatgt

SEQ ID NO: 689 - DNA, 6000 bp, Homo sapiens
gctgagagctgaacctaactgacctaattcctgtggtaggtcatttaacacctgtgttgaggtgcttggggatggacaaggaatttcagggaagaacccgggcactttgacagagaataagactggtagagggaccgccagtgctgggttccggatggactaaggctacagaaatggagcagagctgggcgcggtgactcacgcctgaaattccagcactttgggaggctgaggtgggcagatcacctgaggtcaggagttcaagaccagcctgggcaacatggtgaaaccctgtctctactaaaaatataaaaattagccaggcgtggtggcaggcacctgtaatcccagctactcgggaggctgaggcacagagaatcgctagaacccgggaggtggaggttgcagtgagctgagatcatgccactgtactccagcctgggcgacagagcaagactccatctcaaaaaaaaaaaaaaaaaaaaaaaaagaaagagaaagaattggggcagaattggctttaaccagtctgtagtaacactccttatatgtggaagaccactaaatactggctcctttttggtccaaggtgaccatattcttttgactttgacatcgtttgtggatcaggaaagggataatgtaataattttttcttaggtataagtcaaagacatgaattgcatttatacactactctgcattttctagaatgcaataactttactttttcctcagaaatgttttggctgggtgtggtggctcagacctgtaatcccagtgctttgggaggccatagtgggtggatctcttgagcccaggagttccagaccagcctgggcaacatagagaaaccctgtctctacaaataaaattagtcaggcatggtggtgcatgcttgtagtcccagctactcaggaggctgagttgggaggatcgcttgagcccaggagtttggggctgcagtgagctgtgattgcacaattgcaccccagcctgggcaacagagtgagaccctatcccccaaaaatttaataaaaatgtttacagagtacaaatgcagattttttatattgtatagcggtaaagtctgggctttcagtatacccatctttattcttctctctacctaggcaagagagccattttagggatgaaaacctcaagatagagcatctaagccaagtttcacattactggtttcttgtgacatttgctcctgtagaatcgtccagtacaatcagtagactgaactgataagacccttcaagcctttattacttttctactacagccaataacacatagatttaagagatggaatgctcttaaaagatgtttaccccaaaacgagcacgtatgaaatatgttaaccacctatttctcctgcaaggtgaccctagacaggacattctctctggacttgtttctcctggtatgacataaagaacgttgcgtaacagcttgtttttctttagcactacgtgcctgccgctctgctatgcattttacgtggattgtcttatgtaattttcacaacagcccagctaataaatgagaaaactgaggctcagaggtgagcatctgctaacaaatgtcagtgcagtcccatttctgagcctatgtccttaggaacttcctgtattagtgagatctttcccagctctatatgaattcagcatattcttcttggccaaaataatttcctcaactggcaattagggtccaggaagtttaaatcaacgggatgacagaatgacaacggagaggtctccaaccacaggccaaacagcatgcttccaccccaagcctgagattggtaatttcctataaccttgcaacagcctccctcccacacactgggcccagggtgcctgcaaagctttgctggaggctgggtgtcaggtgtgagaagctgctgggagttacctcctccctcacactgctccacctccacctctgccggaggatggaacttcagaaccggaggcccacggcagcctgaagaaaatgatcaggataactcatttgtaaaaatctgtttaataaatatacatcataaaagtaccaaaataattaccaacaatacattatgtacaccatttacaggagggtaacacaaaccttgacaggtagtaacttttcaccccacatcactgaacgcttaacactcctggctgttacatgtcacaggataccactggggtcagtcactcgaagcacaataaatataaaatgtggtccttccatgaaatttttgataaccttctccaaaaaccccacaaaggtgaggtttaaaagaagttttctcagaatttcaatgatctttctcgtcccctacaaaaagttcacaaaagcaacaaaatgagggctgatcctaccacaataagacgttttgggccaggcagtgtgcagtgtggatataagtacaccctttaaattttttcttcttttttctttttttagaaaaataaaactttttttttgtacaaatatacaagtccatgttctttcagcccctttgcgctcataacgtcagacgctggcctccaaacacacagtcatcatagggcagctgaaaacaaggggaaaaaagacacgttaagcttccggagcggagctctgccaagctaccgggatggggaggccactactggaaataactcttggactccattctccatagcccaaatataatgaactttacaggctgagagagtttgcctttaatgcttctctttaaaaaaagagggggggcaggtacattcttgggatactggttatgcacagaaatttgagagactcattatgtagatacccctctgataaggagcagctctaggggcctgggagggtgaagggaatggcacctcattagttagagcgccgaaggagttcacagactcacctcgtcctctgtgaactccgtgaactctgactctgtgtcatagctctcctcatcctcactctctggcagcatctgaaggttttctagtgtcagctggcccagctgctgctgtatccgggtgcttgggcggccccaggtgagctggtagggagaatagccctggtaggtaactctgttgacatcagccccacacttcaacaggagtgacaccaggtcaggattttgcaggtccactgcgaggtgaagggcagtccggccattacagggctcctgaaaccaaaaggaatttgagatgcttatggctgcatttggaatttctgctcacaacataagcacgaggagcctgactcagtgcgtcgggggcaggaagcaccaacctgagcattgacatcagcacccaaggacaccaaaagctccacgatgcccaggtagccatggatagaggctaagtgtagacacgtgtggcctggaagaacaaaaggaaaaaagtataaccacctgtttcaaccctcactcctttcacctattcttttatggaacaagtagtcttatcttctgaattttaagaacccacagtctgggttctgaaagaactttataaaggcatccaataggcactttgcacacatattttctcaaccttccaaatgttaggagtttaagctcttgcctggactccttaagttggcccacctgccccttctccacgtcacctgccctccgagggggtggggcagggcagggaggcagacataccattgtagttggtagccttcaggatggagtggaggtgcggggtggtgcaggactgagtcaggactcccacgctggccaggcagccctgctcacaggcaaggtgtaggggggtatttcctcgaaagtctcggagctcaggatcacagccagctcccagaagtgcctcagcaatttctggctggttggtgatcacagccaagtggagtggagtctacgaatgcaagagagaccagagaaagtaagccatggaccaaacccacaccccgagttcccctcaacccgtgtctcctggttgggtgctgctcctcctagacaggggggtggggagggctggcaaatagcagaggctccaggtgggtcataaagacctcaccaaatcagtggaatttccttcactctctaggatgtgggctgatgtgaagtaaaaggtgagggtaaatagtgctcagtggccctgaattcagaaaggatctggggtgactctgctacatcagctacgtcccagggtcagagagaacccgggccaggcaagcggcgcacctgctgcaggttgttctggaagttgaggaaggccaggtctcccttcacctggcggatcacttccatggtcagtgccttttcttcatggatgatggccaagtgcaggaacctgtggggaagagagggaaaaaccccaggggtggtgagtgcaccgcgtggggcccagggaggcgcgggctgcgggggattgcgcaaggccggggtttctggaggccgaggccgcggtgttttccgcgaggttattatgagctgagtgttcctggcaggcgcccagggactttccgcccccctccccccgcggccccggcgggcgccggccagaccgccccgccctcccgccagctcggaacgccctgtacttcccctcccggctgctcggcgcccgccagcggccagaaactcccgccccgccttatgcaaccggggacttcgcgtccccgctgccgccccgcccccggcctagaggacgggtctggggggagggggcgtgtggcgacgctgccatccaccagggcccagccgccgcccctccgagttgggccggtgccccgcgcggccctgcagccctgcagcgttcggggcggtgcaggagccccggggtgccgcggcgcccgcccggctgcatcgctggtcccccggctcgggctccaggcccggcgcctcccacccccaggccgcgcgcgtcccgccctcccgacgacccccagccccgggcctccgccacttacgagtccccgtcctcggtgagctgctgcttccagggctccgagccgcgcggcacctcctgcggctcgaggcggatctcctgcagctccttgaccatctgctcgtactcctcgtctttcatggagtccaggccgctgtcgtggcggtcgtccagtagccgctccttcttcagcccgtcgcgggggccctccatggcccactcctgggggcgctcggccgcctggaacatggcgcggacgagctgcgggcgctgctgcgggtgcgctgggccgcgggctgcgcgctgcttcctcgctggggcgctggcgggcgggacggcggcacggactgctgtgggctctgcagcgccgccgcggcgccctataaacgctggctggggatttctctggggcggggtcaggctcggggaatttccaagccagtcagaccagaaaaagagaactggcttcgtcctctgctagggggaaaaagaagcctaaaccctgagctggggttcatcggagaaactccctgcgatgagccactagggtcacggacagggaactttttgatgagcgccgagtggctggaaagtccttccgaccaggccccctccccccggtacttccctgcagcctgcaccctgtaatcctgtccctctgcaagtgagccttctttccctggggtttcccacgatcgatttgaattggggtcgtcggctgctgagatcccaaggacgccgacctgatgggcggtccctctttggggtttgccaacctgccggtcctttccgttttttgatcttttgaaaacgcaagagtggaaatgatggctgggcgtagggatttgctttccccagacttctaaggggaaggacgcactgtggttagggggctgcaggccgcgccggtgtttctgcctataccaggctctttgcagcaaaggaacttttagcttcgcccccacccccccacgcacccccgccaggtagaagttgtgaaagctttggaggagtgaaaagcctaaatccttggagaactctcaaatcacttcctagggatgaacagccctgttgactgggggaggggcaa

SEQ ID NO: 690 - DNA, 6000 bp, Homo sapiens
ggctctgtttagccaatagatgcagaaatgcattgtgtttagttttcataatgtttttatgtttgtttgaggcaaggtctcactcttttgctgaggctggagctcagtgacacagtcatggcccactgtagcctcaacgtcccaggttcgagcaatcctcccacctcagtctcccaagtaggtgcgactacaggtgtatgccaccacacctggttaatttttttatttttatttttatagcgatggggtctcactatgttgcccaggctggtctcaaactcctaaacgcaagtgatcctcctgcctcaccctctcaaagtgttgggattgcaggcatgagccacggagctgggccaattttttttatttctttaacaatagaaggtcactactgaactgaaggtgctacatgccaaaagttgtctgagctaagtatgagggaagtacacaccctgacctaagctgttggagatcccactcctttcagactcaaatggtctgtttcactcatctgtgaaatctgcctgctccctatgcgtaagtattttgagtttgagatcctttaaagctttgatctccattaaattgcagaatttgtagcaaaggaaacacattaaggatttgacggtcttattttcacttcactacaaatgaaggttctgacagctgtttttccttttttttttttttaattgagacagagtctctctctgctgcccaggcaggagtgcaatggcacgatctcagctcactgcaaccttcacctcccagggtcaagtgattctcctgcctcagcctcccgagtagctgggattacaggcatgtgccatcacgcctggctaatttttgtattttgagtagagatggggtttcaccatgttggccgggctggtcttgaactcctgacctcaggtgatcagctcgcctcagcctcccaaagtgctgggattataggtcggagccaccgcccccagccttgtttttctatgggaaaagatccatagcttgggggctccctgttctgaagaggatgcagacagttgctaccacgatagcaagaaagaagacaacctgagactgaaagcagaatatttagaatttcacagtggggctgccagttgggagtgcacctgccttgctcttcaggaactctgtcatggctcgtctttcttccagcctagctgcactgagcaataggtagcctgattccagagttgaatttgctgtagccaaaacaatttagttttaattggccaggccagttgacacaggccaccctgccctgaggattttggaccacctggctgaacttgtagactctctccatggcacttcaggcaataggttttgtccatactgtgcttgttccatgcaggaggagtgcctgaagtgcctgcagccaaaccaggccctggcgatgctccttttcccatgggggtgctcctggagcatcactggccgtcctgtcatttcctacggctgcgtcctgggccaaaatacaaagcagctttgaggtgtaacttattattttgccttatgcattaaaaaggccaaataacattaaaaatcagttatctaaagtattttgttttgttttgttttgttttttgagacagagtctcaccctgttgcccaggctggcgtgcaatggcgcgatctcggctcactgcaacctctgcctcctcggttcaagtgattctcctgcctcagcctcctaagcagcatctgcaccaccacacccgactaattttttgtatctttagtagagacggggtttcatcatgttggccaggctggtctcgaactcctgacctcatgatccacctgcctcagcctcccaaagtgctgagattataggcgtgagccactgcgcacagcctacagttttaacattttttttaacggttatgttagctagaatgtttgacaatgaggaggagaaaaatctgagtgctgaagggtccataaaggtctttctttttcttttttttctttttgagacagggtctcagtctgttgctcaagctggagtgcagttgtgccatcatggctcactacaaactccacctcccaggctcaagcaattctcccacttctgcctctggagtagctgggactacaggcacctgccaccacactctgctaattatattttttgtagagacaagagtttagccttgttgcccaggctggtctccaactcctgggtggcaagcaatcctcctgcctcagcaacccaaagtgctgaaattacagcagtgagccacaactcctggcccataaaggtctttctaaatcaaaaccagaccctcttgttgtcttctgcccagtctgctcatggttctaatttccaagtgtatattctttttcacccacgttgtaatgtttgttgacttaaaccatatagcgctatagatgatggggagaaaacctgttggatcacattattcaaaactgtttcccagagtcgcaggaaaacaataggtacctccttggaaatctccactgtagggacaagtcatcaaggctcagcacctcccaatttttgcaaaaggcactatgacaaatcaaggaacgcctgtgccttactcttaccactaggtgtcacacaaaacaatcaggaataaacaccaagatcctgaaggctaccagaaatataaaaccatagaaggtggtgcaaaaaaaccttattcctcagatatttttattttttataaccatttttatacctgaagccaaatatcttcttctgatgtatcctctataattgggacatttagagtttgatgtttctgtacttgtttaaaagaagtgactatccccagatgggggtcaggggacacccaccctttattttccctaacagttggagtagaaaatacttttgagtacattccaaattatagtgtagtcagtctgattttcacagcgtgttttcaaaagtgttaatactaagactgctttggccaaatgattaatatactgccaaggggttcctgggtaaatttctatgcatttcagtttctttttagggaagtaggaacaatatctatcttacaagattagttctgagaacaatgtggtacataaggcgctggaattctttcaaaaatttataccctgacatttccaagagccatggtcacccttacaaaggagagttaggcatgcatttgtagacaagcaatatgacttttaagctagaaaagaccttaagtaacattcaatctaatcttattataaaagttaagtataccacaaaaaagttaactgacctctccaactaatgtgcagtcaagtaaagatagaacctggaattgagatgtcccattgcagtcactgtttcaccttgcctcaatcattgtagatttgcatatcataaacctgcagagacaatggtgtctatccctgggaagttttcattgtaacatgtgatcattattaccctggagggtctatctgattttaatttttttcccttcatacttggtctctctctatcgagtcagatttctttcattctaatattaggggaggggtggagatacgaagagaggggaaggattggttagtacaaggccagtcaaggtaaagatgattgcaataatcaccagaaatctctgcagaactacagaggcctcctgggactaattctgaagagctctgaccgaagtttgctttattttgcctgtaccaattctaccaagtagatgaattcagtccatggcttgcaggcttggaggtggaggtggagtggagagcataaattatatttctgcaggtgaaaccagagcatagtgagccgaaacccctttctacccaggtggcgtgaatgggtccaactgctactgtcccccaggacaagagagcaaggaggggcgggcaggatgggactaccttgagcctcccgcaggatgcctggcaactactttcttagtggtccttaaggtccaatcgcggttaaggcactaactaaactcattcttcagcctccttctctaagttctcctcgaatttgggtgcccagaagtaggctcacgatcctttttctgcgggagcacaatgtaggtcagatagcataaacgaatagctacttatgaacacaatagctactctgctattgcaaggtatccacaaccaccactacaaacattaacaccttgctttacttgggaaacaaaaaaaatcatggtcctattcagcagtttccccatacagggagcgtttgcccctcccccagtcaacagggctgttcatccctaggaagtgatttgagagttctccaaggatttaggcttttcactcctccaaagctttcacaacttctacctggcgggggtgcgtgggggggtgggggcgaagctaaaagttcctttgctgcaaagagcctggtataggcagaaacaccggcgcggcctgcagccccctaaccacagtgcgtccttccccttagaagtctggggaaagcaaatccctacgcccagccatcatttccactcttgcgttttcaaaagatcaaaaaacggaaaggaccggcaggttggcaaaccccaaagagggaccgcccatcaggtcggcgtccttgggatctcagcagccgacgaccccaattcaaatcgatcgtgggaaaccccagggaaagaaggctcacttgcagagggacaggattacagggtgcaggctgcagggaagtaccggggggagggggcctggtcggaaggactttccagccactcggcgctcatcaaaaagttccctgtccgtgaccctagtggctcatcgcagggagtttctccgatgaaccccagctcagggtttaggcttctttttccccctagcagaggacgaagccagttctctttttctggtctgactggcttggaaattccccgagcctgaccccgccccagagaaatccccagccagcgtttatagggcgccgcggcggcgctgcagagcccacagcagtccgtgccgccgtcccgcccgccagcgccccagcgaggaagcagcgcgcagcccgcggcccagcgcacccgcagcagcgcccgcagctcgtccgcgccatgttccaggcggccgagcgcccccaggagtgggccatggagggcccccgcgacgggctgaagaaggagcggctactggacgaccgccacgacagcggcctggactccatgaaagacgaggagtacgagcagatggtcaaggagctgcaggagatccgcctcgagccgcaggaggtgccgcgcggctcggagccctggaagcagcagctcaccgaggacggggactcgtaagtggcggaggcccggggctgggggtcgtcgggagggcgggacgcgcgcggcctgggggtgggaggcgccgggcctggagcccgagccgggggaccagcgatgcagccgggcgggcgccgcggcaccccggggctcctgcaccgccccgaacgctgcagggctgcagggccgcgcggggcaccggcccaactcggaggggcggcggctgggccctggtggatggcagcgtcgccacacgccccctccccccagacccgtcctctaggccgggggcggggcggcagcggggacgcgaagtccccggttgcataaggcggggcgggagtttctggccgctggcgggcgccgagcagccgggaggggaagtacagggcgttccgagctggcgggagggcggggcggtctggccggcgcccgccggggccgcggggggaggggggcggaaagtccctgggcgcctgccaggaacactcagctcataataacctcgcggaaaacaccgcggcctcggcctccagaaaccccggccttgcgcaatcccccgcagcccgcgcctccctgggccccacgcggtgcactcaccacccctggggtttttccctctcttccccacaggttcctgcacttggccatcatccatgaagaaaaggcactgaccatggaagtgatccgccaggtgaagggagacctggccttcctcaac

SEQ ID NO: 691 - DNA, 6000 bp, Homo sapiens
gggtcaatcctcaggaatatataacaattataaagatatatgtcagagccccaaaatacatgaaacacaaactttcagaacgaagagcaaaatagacaattcaacaatatttggagaacttcaatactccactttcaacaatggacagaacaagtaggcagaatatcaacaagaaactagaagacttgaacaacactatacaccaatcagacctaacagacatctaactatagaacacccagtgatggaagaatgcaaattcttctcaagtgatggaatattctctgggataggccatataccaggccataaaacaaatctcaataaattttaaaaagattgaaatcatacaaggtatgttctctgaccacaatagaatgaaattagaaattaataacaaaaataaatttgggaattcacaaacgtgaaaatgaaaaacacactcctaaatagccaattgacaaaaaagggtatcaaaagagaaaattagtatatgctttgagatgaatgaaatgatgacacaacaaaacaaaagttatgggatacagctaaagcagggttgggaaatttagagcttaaacacatacgttaaaaaaataaagatctcaaatcaataatcataactttcatcttaaaacaatcagggtaaaagggggcataaacccaaagcataaagaagaaggaaataatcaagaagagaatagaaaaatggtagagaaaaccaacaaaactaaaagttggtgctttggaaaggtcaacaaaattgagaaacctttagctatactgactttgttttgtgttgctataacagaaggctgggtaatttataaacaaaataggtcatgattattagctcgtggtgcaaatggctgggaagctcaagggcatggccctggcttctggtgaggtcttctgtgctgggtcataacatggcacagaaggtcaaaagggaagcggacaagtgcaaagagagaaaacctaaggggtatcctggctttataacaacccattctcaagggaactaattcattcccaagagaactaatccagtctcatcagagtgagaactcactcactatgagaacaacaccagggccagcattgaggctatcacctttacttgggaggctgaactggaggagcacttgagaccaggagtttgaggttgtagtgagtcatgattgcaccatctctccccagcctgagtgacagagagataccctatatattttttttaaaaaagaacagcaccaagccattcacaagatccaccccctttattcaaatccctcccaataggccccacctcccaataccatcacatggggaatcaaatttcaacatgagttttgatggagacaaactcaaaccatatccaaaccataacactgaccaataaataaaagaaagaagactcaaattactaaaaccagcaataaagagaggacattaatatcaatgttacagatataaaaaggattataatactatgaacaacgttaggccaacaaattagacaacttacatgaaatggacgtattcctagaaagatgcaaactaccacaaccaactcaagaagaaatagaaaatcatagtagacttataacaagagattgaattagtaatttaaaagctacctacaaaggaaagcccaggcctaggtgacttcactgctagactctatcagacagttaaagaagagttaatacaaattcttcacaaacacttccaaaaaatagaaaaggagggaacacttcccagcttattttacgaggccagttatatcctgatagcaaaaccaaagacattacaagaaaactacagaccaatatctctaaggaatatagacataaaaatatgcaacaaaatactagcaaactgaatgtggcaatatataaaaagaattatacaccatggctaagtgggatttataccaagaatgcaaggttgatttcatgtcccaaaatcaatcaatgtaatacactgtatctttgggaggctgaggcaggcagatcatgaggtcaagagaaagagaccatcctggccaacatggtgaaaccccgtctctactaaaaatataaaaattacctgggcgtggtggcacgtgcctgtaatcccagctactcgggagttgaggcaagagaattgcttgaatccaggaggcggaggttgcagtgcgctgagatcacaccactgcactctagcctaatgacagagcaagactccgtctcaaaaaaaaaaaaaaaaaaaaaacaaaaaaaacaccatatcaatagagtaaaggacaaaaaccacatggtcatttcaataaatgcagaaaaaggatttgtcaaaattcaacacttcttcaagataaaaacagacgaccttctaggaatagaaggaaacttcctcacctgtataaaaggcaactatttagaattcacattaacatcatacttagtggtaaaagacaacgcttttctcctaagaacaggaacaagataagtatgtttggccactcttgccatttctattcaacattgtaatggaggtctagtgtcttagcttgggctgccataataaaatatcatagactgggtggcttaaacaatagaaatttattttctcacaaatttaggaagttctcattgtactcaaggcaagaaaactctggactagggtgttggctgttgagatggaaattggtggtcagattcaggatacgttttgaaggtaacgtttacaagatttgctcataggttacaagaggagaaggtgaagagagagaacaataaagaattaacatgtacatgtttggctagagaaacctggtgaacctcggggctctttagtggatggaagaccaggagaggaagaatcaagaattatcttttttggccgtttgatgtttgagcttctgaacccccaaaatctgagacaggtctcagtcaatttaggaagtttattttgccaaaattaagaatgcgcgcccatgacatagcctgaggaggtgctgaggacatgtgcctaaggtgggtggagcacagcttgattttatattatatattttagggagacatgagacatcaatcaacatatgtaagatgaacattgtattggcctggaaaggtgggacaactcaaagcaaaggcgggacaaactcgaagccaggaaggggcttccaggtcataggtgggtaagagacaaatggtggcattcttctaagtttctgattagccttccaaaggaggcaatcagatatgcatttatctcagtgagaagaaggatgagaggcaggtttgccctaagcagttcccagcttgacttttccctttagcttaatgattttggggccccaagatttcttttcctttcaccagctattacatacccaagagatgtttagcaaggagttgaatacatatgcctgtagttcccagaaggatcagagtctgaatgatatacagttgaatacatatgcctgtagttcccagaaagatcagagtctgaatgatatacagttgaatacatatgcctgtagttcccagaaagatgagagcctgatgatatgaagagaaaggtggcgggagatggggggcggggggcagtaaagcatcctggagatgccgatgtccggaagtaaaggaggaccagccaagaagtttgagaagaatcagctactgtaggacagaaaaaaaagcgagctgcccagacagcaagatagtaaagtgtttcaagggtgtggtagaatggggctaggagtcatgctagatgcattgagaagaaacaattgggatttatcttgctggtcgctggtgtccttgagagggctattcagtggaggggtggggaaggggactaattggggttaattaagttgaaaaggtgaggtaagatagtggcaactatttccttgagacttagtctctctctatagcccagattggagtgcagtggaatgatctcggttcactgcaacctccgcctcccgggttcaagcgattctcctgcctcagcctcctgagtagctgggactacaggcgcctgccaccacgcctggctaatttttgtatttttagtagagacggggtttcactatgttggtcaggctggtcacaaactcctgacctcaagtgatccgcctgccttggcctccctgttttgctaggattacaggcgtgagccaccgcacctgcaactattttcatttgactgatggggcagtgcacattttggtttgcatttgtatttacgaatgtttgagagaaaaaactcaaatatcttacaagcctatgtgtctggttccattttgaagtactgacctaggatctctgtacctactgaattttttttgagagataacatacacctgaaagtgcataaagtgcactgtcttaaaatgtacagcttgatccttctttaaaaaaaatcatatacgtacgcccatgtaactactgttcatatctagatgttgaacacctccaacacatccaacataaccataatgttcctctgcaccttccctgtctataatctctcagaagtaaaccaatattccgactcctataaaatccattagctttactacatgtttcaaagaaaacaaatgagaactctgaaggacatttaattggaaaactgctttagcacattataaacttaccaatttgcttgtaaacgctaaccatttggcgccaaaatcctgggagggtcttttaaaccgttcttcctcaaagcaccgccccactttttacaccacgcctccttttgctctgttccttcccccacaatattgggacaccctaggcggtagaagcagccgcttttctgtcatgcgcattgcggagagtcgttcttccctctttcccgacttcaccactcactgggatcagacccctgtcatgcgcattgagagtcctctagacaggcgctcctcgcagcaccgtagtgcgcttgcgctgagcagcccgcgagggcggaagtgggagctgcgaccgcgctccctgtgaggtgggcaagcggcgaaatggcgccctccgggagtcttgcagttcccctggcagtcctggtgctgttgctttggggtgctccctggacgcacgggcggcggagcaacgttcgcgtcatcacggacgagaactggagagaactgctggaaggagactggatgatagaattgtgagtgcggggcggccagggtcctacgtccgtgcctggacacacgacttcaccccgcacgttcctcgtgcgggtcgcaggctccccaggactgcgcctccgagttgcggagcgagcgtccccgacttctgcagctccccaaactcttgggatctgccgccagcttggtcccaccccctcgtctcttacccgtgaatgttaagtttcttctggggtgcaccctcgtttcgtttcttgggttgtggtgcgcccaaagggttagtgccaatgcgaattctgacatttttcatgactttgaggatgcgactggggcgcggggagggaggtgtccgactcgtgtctaagtagttaaagtgattcttcacagacttctacacttattttcaccacattttacataagagaatattgagcaaaatttctcctctcgttttgtctgtccttaaaagatagtctctttatggtgttggaatttggcgcttttaagctttttttaatggattgggtacgtttcttttttattgtaaatactgagtcaattcaagttgggttatttttaagttttcgttttctctttttgcctcctcttttgctttctctttttttcactcctcatctcatttttcctttgggtgtctttgtagtgtagagaataccttgggttgtgactcctaggtctttgtaaatggtattacattaaaagataatgtattaatgtatacactctcaagagcgccaggtcatcatttattgctcgaacgaaatcatgtattttgtgtggtgatttcaatttaataatatctgttctgccgcggtgggaaataaagtatctgtctttgc

SEQ ID NO: 692 - DNA, 6000 bp, Homo sapiens
acctaaagcatctgtgatggtccaggaggcttctgaggcgatcgggcagcgtcagtcttcagccactaagctgagtgggtctgggaaggagtcggccaaggaacattgggtttgagctccaggacctttaggagcagtggcgatgtgagtcggacagtctgacctccagtgggggcccgcacagacagggcatggcttaggaggaatctcgggctgtgggcattccaaggcccagtggccaggcttttggcatttgaagcaaggtccacgaggaggttttgaaggagcccctgggagctgtggcttggatgttatgaagtttttgtatgctggagacgtggttgtgggttgtcttacagcagaggcaagtagctgtaactcagagatgcgttgtcacttggctgcctcttctctattattgtacaccttgaaggcgaggttaattaagtcctgttgtgaggttgagggctggaatccaattttttggagttttttttttaatgttgggagcagataaaatgcatattgagaataagatggccttagggctgggcgcggtggcttacacctgtaatcccagcactttgggaggccaaggcgggcagatcacctgaggtcaggagttcgagaccagcctgaccaacatggagaaaccccgtctctactaaaaatacaaaactagcctggcgtggtggtgcatggctgtaaccccagcttctcgggaggctgaggcaggagaatcgcttgaacccgggaggcggaggttgcagtgagctgagatcgggccattgcaccccaatctgggcaaaaagagtgaaactccatctcaaaaaaaaaaaaaaaaaaaaagaataagatggccttctggcccttctgggtctagggcagtaaagcatctaagagttgttgccaaatgggccatgaactgggctgggtttttatatttgatgaaaaggagcctaagcactaactgatttgggagaggtcagataaagaaaaaggagcattaaccttgactgtgccttcagctccagccacctctttaggaggaaattgttgggcaggtgggggagggctagtcacgaaacaaaactgtaagccagaccaggtatgaggaggggaggtgatagaaggattatagggtgggggagtggaggccgaggaagaattgggacctggctcggcctggtgaggagcagcctggggagaaggggagaggtcagatgggtccgtagaaaaggaggatttaaaggactcagagcttggggtggagactgaaggaacacacaggagagaaagaagaaagatttggaacgagttgcattgggagcagagactagggagggaccaatgtgtgaaagaatgcctggatgtcaggcacctcagaccatttgcccatttttcgacaaaaattatctagatcttgtaggatggagaaatcaaaagtgccgttttctggctatttgggaccattgtcgaatttgtactggggccaagcagggttgtagaagaaaataaggtgttttggtcttaggtcaagtgtaagttgaagaggttttaagttcttgagaacacaggctaagggagaaaggggaatggagggtggaagtttgcccatagtgaaggaggcaagcccagagaaaagagagggtagagacttggagtgggtggtggtacttgccacccaggggaggaggtacttgccaccaaggggaggtggtacttgccaccaaggtgaaggatcaaggcaggcatccccgtggtgatcagacacctctgaaatgtgagtgaataatcaagcaggcgttcctgcagtgattggacaccaagggaaaactgtcttcccgagtctgtgaccaatgccagagttttgggtgcacagataaaatgtgtctcctttgtctctactagagaggaaaaaactggaattggaaggacagggagattaaagggtagtgagaaggctggagaagagagtgaaaaggccgcttacccaattttaaattggtgagatgttccttgggctgattgatgggaggacgcgaggtcataggtggatctcctcatgcagtgagggtgaggacaggggaccagtttcccgaaggagtcctcctgtcctgggtcttcagcaccaaatgacacacacgtccgtgtgaagagagtccaccaacaggctttgtgtgagcaacaaggctgtttatttcacttgggtgcaagtgggttgagtccgaaaagagagtcagcaaagggaaatgggggtggggcagttttataggatttgggtaggtagtggaaaattacagttaaagggggttgtgctcttgtgggcaggggcgggggtcacaaggtgtttggtggggagctccagagacattatccaggagaaggaatgtcacaaggtaatgtcatcagttaaggcaggaactggccattttcacttcttttgtggtccttcagttgcctcaggccatccggatgtatacgtgaaggcttgggctcagaggcctaacagtaggacataaagaaaatgagaagaaaattatctgaaggctggttattcaatgttagggtttgctatttttttaaaatcttactgcctttttgttgcaggacttttttttttttttgggaaaaacagagtctcactgtgtctcccaggctggagtgcagtggtgcaaactcggctcactgcaaactttccttctcagattcaagcctcagccacctgagtagctgagattacaggcccacaccaccatgccgggctaatttttgtatttttaatagagacggggtttcaccatgttgtccaggctggtcttgtactcccaacctcaagtgatcctcctgccttggcctcccaaagtgctgggattacaggcatgagccaccgtgaccaggcgttcatgaaaaattttcatgacattctgtgaggtgggtggaccataatttattgtaccacatttatttatttatttatttatttatttatttatttatttatttatttttattttttgagacatagtttcgctcttgttgcccaggctggaatgcaatggcgcaatctcggttcactgcaacctctgccttccaggctcaagcaattctgcctcagcctcccaagtagctgggattacaggcatgcgccaccacgcctggctaactttttttgtatttttagtagagacggggtttctccatgttgatcaggctggtctcgaactcctgacctcagatgagccgcccaccttggcctcccaaagtgctggaattacaggcgtgagccaccgcaccctgcctattgtaccatatttagtttcccaattttttgctatataatattccatgaatatctttgcccaaaatttttgtagattgtttctaagaatagttcatcagcattttaagacatcctattaatattagcggactgcaatcagattgaagtagttcacaaatagatgggttttagcctgtatttgttcaatactgaactattgtatgtatcaggcactgttatgtatcaggcactgttctcagcacttgtaaaatgtatatgtgctgctgacaagcatgagcacttgtaaatgaacaaactaaaatccctactcttgttaaagtgggggaggtgaagaattttaaaaacatcttttttcgttcaaccttctcccacaacttatctttcattctgctaatggaaaatattacttttgttcttaaatatgaagcttttgtgtgtaaaaagtattagaatctcatgtttttgaacaaggttggcagtgggttgggaggagggattggagattgatgcgataggaatgtgaagggatagcttggggtggattttattttttaattttaatttttattttttgagatggagtcttgctctgtctcccaggctggagtgcagtggtgtgatctcagctcacgggttcaagcgattctcctgctgcagcctcccgagtagctgggattacaggagcgcgccaccacacccggctaatttttttgtatttttagtagagacggggtttcaccatgttggttaggctggtctagaactcccaacctcatgatccgcctgcttcggcctcccaaagtgccggaattacaggcgtgagcgactgcacccggccgcttgggggtggatttttaaagaaactttagaagaatgtaacttgcccagataccatgtaccgttaatttcattttcggttttttgaatacccatgtttgacatttctccgttcaccttgattaaataaggtagtattcattttttagttttagcttttggatatatgtgtaagtgtggtatgctgtctaatgaattagacattggtactgtctttaccaaaactggacaaagagcaggcagatgcaaaaatcaagtgacccagcaaaccagacacattttctgctctcagctagcttgccacctagaaagactggttgtcaaagttggagtccaagaatcgcggaggatgtttaaaatgcagtttctcaggttctcgccacccaccagaagttttgattcattgagtggtgggagagggcagagatatttgcgattttaacagcattctcttgattgtgatgcagctggttcgcaaataggtaccctaaagaaatgacaggtgttaaatttaggatggccatcgcttgtatgccgggagaagcacacgctgggcccaatttatataggggctttcgtcctcagctcgagcagcctcagaaccccgacaacccacgccagcgctctgggcggattccgtcaggtggggaaggccaggtggagctctgggttctccccgcaatcgtttctccaggccggaggccccgcccccttcctcctggctcctcccctcctccgtgggccggccgccaacgacgccagagccggaaatgacgacaacggtgagggttctcgggcggggcctgggacaggcagctccggggtccgcggtttcacatcggaaacaaaacagcggctggtctggaaggaacctgagctacgagccgcggcggcagcggggcggcggggaagcgtatgtgcgtgatggggagtccgggcaagccaggaaggcaccgcggacatgggcggccgcgggcagggcccggccctttgtggccgcccgggccgcgaagccggtgtcctaaaagatgaggggcggggcgcggccggttggggctggggaaccccgtgtgggaaaccaggaggggcggcccgtttctcgggcttcgggcgcggccgggtggagagagattccggggagccttggtccggaaatgctgtttgctcgaagacgtctcagggcgcaggtgccttgggccgggattagtagccgtctgaactggagtggagtaggagaaagaggaagcgtcttgggctgggtctgcttgagcaactggtgaaactccgcgcctcacgccccgggtgtgtccttgtccaggggcgacgagcattctgggcgaagtccgcacgcctcttgttcgaggcggaagacggggtctgatgctttctccttggtcgggactgtctcgaggcatgcatgtccagtgactcttgtgtttgctgctgcttccctctcagattcttctcaccgttgtggtcagctctgctttaggcatattaatccatagtggaggctgggatgggtgagagaattgaggtgacttttccataattcaggtgagatgtgattagagttcgatctgcggtggtggcagaggcttacaagaaacactaacgggacatgggaaccaattgaggatcagggaataaagtgtgaagttgactaggaggttttcagtttagaacatggcagagacattctcagaaataaggaagttaggaagaaagacctggtttagagaggagggcgaggaagtggtttggaagtgtcactttggaagtgccagcaggtgaaaatgccctgtgaacaggactggagctgaaaacaggaatcaattccatagatttccagttgatgt

SEQ ID NO: 693 - DNA, 6000 bp, Homo sapiens
tgggagctgtggcttggatgttatgaagtttttgtatgctggagacgtggttgtgggttgtcttacagcagaggcaagtagctgtaactcagagatgcgttgtcacttggctgcctcttctctattattgtacaccttgaaggcgaggttaattaagtcctgttgtgaggttgagggctggaatccaattttttggagttttttttttaatgttgggagcagataaaatgcatattgagaataagatggccttagggctgggcgcggtggcttacacctgtaatcccagcactttgggaggccaaggcgggcagatcacctgaggtcaggagttcgagaccagcctgaccaacatggagaaaccccgtctctactaaaaatacaaaactagcctggcgtggtggtgcatggctgtaaccccagcttctcgggaggctgaggcaggagaatcgcttgaacccgggaggcggaggttgcagtgagctgagatcgggccattgcaccccaatctgggcaaaaagagtgaaactccatctcaaaaaaaaaaaaaaaaaaaaagaataagatggccttctggcccttctgggtctagggcagtaaagcatctaagagttgttgccaaatgggccatgaactgggctgggtttttatatttgatgaaaaggagcctaagcactaactgatttgggagaggtcagataaagaaaaaggagcattaaccttgactgtgccttcagctccagccacctctttaggaggaaattgttgggcaggtgggggagggctagtcacgaaacaaaactgtaagccagaccaggtatgaggaggggaggtgatagaaggattatagggtgggggagtggaggccgaggaagaattgggacctggctcggcctggtgaggagcagcctggggagaaggggagaggtcagatgggtccgtagaaaaggaggatttaaaggactcagagcttggggtggagactgaaggaacacacaggagagaaagaagaaagatttggaacgagttgcattgggagcagagactagggagggaccaatgtgtgaaagaatgcctggatgtcaggcacctcagaccatttgcccatttttcgacaaaaattatctagatcttgtaggatggagaaatcaaaagtgccgttttctggctatttgggaccattgtcgaatttgtactggggccaagcagggttgtagaagaaaataaggtgttttggtcttaggtcaagtgtaagttgaagaggttttaagttcttgagaacacaggctaagggagaaaggggaatggagggtggaagtttgcccatagtgaaggaggcaagcccagagaaaagagagggtagagacttggagtgggtggtggtacttgccacccaggggaggaggtacttgccaccaaggggaggtggtacttgccaccaaggtgaaggatcaaggcaggcatccccgtggtgatcagacacctctgaaatgtgagtgaataatcaagcaggcgttcctgcagtgattggacaccaagggaaaactgtcttcccgagtctgtgaccaatgccagagttttgggtgcacagataaaatgtgtctcctttgtctctactagagaggaaaaaactggaattggaaggacagggagattaaagggtagtgagaaggctggagaagagagtgaaaaggccgcttacccaattttaaattggtgagatgttccttgggctgattgatgggaggacgcgaggtcataggtggatctcctcatgcagtgagggtgaggacaggggaccagtttcccgaaggagtcctcctgtcctgggtcttcagcaccaaatgacacacacgtccgtgtgaagagagtccaccaacaggctttgtgtgagcaacaaggctgtttatttcacttgggtgcaagtgggttgagtccgaaaagagagtcagcaaagggaaatgggggtggggcagttttataggatttgggtaggtagtggaaaattacagttaaagggggttgtgctcttgtgggcaggggcgggggtcacaaggtgtttggtggggagctccagagacattatccaggagaaggaatgtcacaaggtaatgtcatcagttaaggcaggaactggccattttcacttcttttgtggtccttcagttgcctcaggccatccggatgtatacgtgaaggcttgggctcagaggcctaacagtaggacataaagaaaatgagaagaaaattatctgaaggctggttattcaatgttagggtttgctatttttttaaaatcttactgcctttttgttgcaggacttttttttttttttgggaaaaacagagtctcactgtgtctcccaggctggagtgcagtggtgcaaactcggctcactgcaaactttccttctcagattcaagcctcagccacctgagtagctgagattacaggcccacaccaccatgccgggctaatttttgtatttttaatagagacggggtttcaccatgttgtccaggctggtcttgtactcccaacctcaagtgatcctcctgccttggcctcccaaagtgctgggattacaggcatgagccaccgtgaccaggcgttcatgaaaaattttcatgacattctgtgaggtgggtggaccataatttattgtaccacatttatttatttatttatttatttatttatttatttatttatttatttttattttttgagacatagtttcgctcttgttgcccaggctggaatgcaatggcgcaatctcggttcactgcaacctctgccttccaggctcaagcaattctgcctcagcctcccaagtagctgggattacaggcatgcgccaccacgcctggctaactttttttgtatttttagtagagacggggtttctccatgttgatcaggctggtctcgaactcctgacctcagatgagccgcccaccttggcctcccaaagtgctggaattacaggcgtgagccaccgcaccctgcctattgtaccatatttagtttcccaattttttgctatataatattccatgaatatctttgcccaaaatttttgtagattgtttctaagaatagttcatcagcattttaagacatcctattaatattagcggactgcaatcagattgaagtagttcacaaatagatgggttttagcctgtatttgttcaatactgaactattgtatgtatcaggcactgttatgtatcaggcactgttctcagcacttgtaaaatgtatatgtgctgctgacaagcatgagcacttgtaaatgaacaaactaaaatccctactcttgttaaagtgggggaggtgaagaattttaaaaacatcttttttcgttcaaccttctcccacaacttatctttcattctgctaatggaaaatattacttttgttcttaaatatgaagcttttgtgtgtaaaaagtattagaatctcatgtttttgaacaaggttggcagtgggttgggaggagggattggagattgatgcgataggaatgtgaagggatagcttggggtggattttattttttaattttaatttttattttttgagatggagtcttgctctgtctcccaggctggagtgcagtggtgtgatctcagctcacgggttcaagcgattctcctgctgcagcctcccgagtagctgggattacaggagcgcgccaccacacccggctaatttttttgtatttttagtagagacggggtttcaccatgttggttaggctggtctagaactcccaacctcatgatccgcctgcttcggcctcccaaagtgccggaattacaggcgtgagcgactgcacccggccgcttgggggtggatttttaaagaaactttagaagaatgtaacttgcccagataccatgtaccgttaatttcattttcggttttttgaatacccatgtttgacatttctccgttcaccttgattaaataaggtagtattcattttttagttttagcttttggatatatgtgtaagtgtggtatgctgtctaatgaattagacattggtactgtctttaccaaaactggacaaagagcaggcagatgcaaaaatcaagtgacccagcaaaccagacacattttctgctctcagctagcttgccacctagaaagactggttgtcaaagttggagtccaagaatcgcggaggatgtttaaaatgcagtttctcaggttctcgccacccaccagaagttttgattcattgagtggtgggagagggcagagatatttgcgattttaacagcattctcttgattgtgatgcagctggttcgcaaataggtaccctaaagaaatgacaggtgttaaatttaggatggccatcgcttgtatgccgggagaagcacacgctgggcccaatttatataggggctttcgtcctcagctcgagcagcctcagaaccccgacaacccacgccagcgctctgggcggattccgtcaggtggggaaggccaggtggagctctgggttctccccgcaatcgtttctccaggccggaggccccgcccccttcctcctggctcctcccctcctccgtgggccggccgccaacgacgccagagccggaaatgacgacaacggtgagggttctcgggcggggcctgggacaggcagctccggggtccgcggtttcacatcggaaacaaaacagcggctggtctggaaggaacctgagctacgagccgcggcggcagcggggcggcggggaagcgtatgtgcgtgatggggagtccgggcaagccaggaaggcaccgcggacatgggcggccgcgggcagggcccggccctttgtggccgcccgggccgcgaagccggtgtcctaaaagatgaggggcggggcgcggccggttggggctggggaaccccgtgtgggaaaccaggaggggcggcccgtttctcgggcttcgggcgcggccgggtggagagagattccggggagccttggtccggaaatgctgtttgctcgaagacgtctcagggcgcaggtgccttgggccgggattagtagccgtctgaactggagtggagtaggagaaagaggaagcgtcttgggctgggtctgcttgagcaactggtgaaactccgcgcctcacgccccgggtgtgtccttgtccaggggcgacgagcattctgggcgaagtccgcacgcctcttgttcgaggcggaagacggggtctgatgctttctccttggtcgggactgtctcgaggcatgcatgtccagtgactcttgtgtttgctgctgcttccctctcagattcttctcaccgttgtggtcagctctgctttaggcatattaatccatagtggaggctgggatgggtgagagaattgaggtgacttttccataattcaggtgagatgtgattagagttcgatctgcggtggtggcagaggcttacaagaaacactaacgggacatgggaaccaattgaggatcagggaataaagtgtgaagttgactaggaggttttcagtttagaacatggcagagacattctcagaaataaggaagttaggaagaaagacctggtttagagaggagggcgaggaagtggtttggaagtgtcactttggaagtgccagcaggtgaaaatgccctgtgaacaggactggagctgaaaacaggaatcaattccatagatttccagttgatgttggagcagtggagaagtctaagctaaggaaggggaagaggaggccaaggcaaacacttaggaacacttgcaacgagggggtggaagaagagcaaggagccagctgaggagaatgagtgtggttggagaaccaccacagcgcagggtcgccagagctgaggaaggggagggaagcttcaggaaggaaaaggttggcagggattttgagtgttaggcctggtgtagcagaaggaacagaagatttagagcagcgctagccaatagaaataaaatgtgaggcccggggcggtgg

SEQ ID NO: 694 - DNA, 6000 bp, Homo sapiens
ttgtttttgttgttcacagggctaagaatgttcatggctaagaatgttaaaaagtctcctagtgtcttttgccacgctgcctgaacagtggggtcattgaccgccatgcaatcctcaattgttttcagctgatactggaccgaaatcaaatctagctttgcctgcccctttctttgtaccagtagcgcttgtttgttcaccaggcctgactgaagacctagccctgttgcctgcctctgcttcctaccgagccccctgtaaagagcagctctcccagggaggctcaccttgtagcattgtgatctttggaagcatcaagggaggcacaagatttctctgggtgaactggaaaagacttgggctgggcatcagaagacttgggttctgcaactggcattgtttacactctctctgtaactctgtgcaggcaaaatctttcaccttttctgagtttttttttacatgtcagtacagattcctttcctcatgaggtttctttaagactcaaatggaagaatagatgtgaaaagaactttgaagatagtattggaaaatgctaaagtgactgctgtgttattgatgatttttatgggatttgtctgagaaagctccagtgtgaccagtttgtaccagcttgtatggtttcttgtaataaccgaacagatcctgttagcatagggtaaaaatggaaactacttcttttaaaatgaccagtggctgcagtggctcaggcctgtaatcctggctagttgggagactgaagtggtagggttgcttgaggccaggcaagaccagcctgggcgatacagcaagaccctttctctaaataaaaaactagccacccatgtagtcccacctgcttgggaggctgaggtgggaggatcgactgaggccaggagttcaaggctgcagtgagctatgattgccactgtactccagcctgggtgacagagtgagaccttgtctcttaaaaaaaaaaaaaaaaaaaaaaaaaaagatttgcattatagcttatctttttttttttttttttttttttgagatggagtctcactctgtcacccaggcaggaatgcagtggcgtaatctcagctgactgcaacctctgcctcctgggttcaagcaattgtcctgcctcagcctcccgagtagctgggactacaggtgcacgtcaccatgcctggctaatttttgtattttttggtagagatcgggtttcaccatgttggccaggctggtctggaactcctgaccttgtgatctgcccaccttggcctcccaaagtgctgggattacaggcgtgagccactgcgcccagccagcttatccttttttaaaaaaacataaatactaggatattgagattattgaaaatgcttttggtgcttcagttttgaatttatacttagagcagtttttgaagtttaagatctcatttacttctaagtaatagatttactagtaatcaaaatcgcttcaaaataccgtaatcctcattgctgtaaactcctacggggcaggtttggagttttataaagaggcaatatagtgtactctgtgaattccaactcctcacttgccagatgtgaccttaagcaagtgaacttctgtgtgccacactgttttcatctgtaaaaggataaagggaatatcataaattagtttgttaagccttagtttaataatgtctctaagttttacatataagtagacagtgtctttcttgtttagtgaataatcattcttattatttaatagtatctctactaaatttattgtgtaagattatactaatcttgtttagtgcgtggtaatcacttctgctcatatttaacctataagcataatatagtttatttatataccatttatttattttattttattttttgagatgcagtcttgctctgtcacccaggctgcggtgcagtggcgcaatcttgcttcactgcaacctccacctcccaggttcaagcgattctcctgcctcagcctccttagtagctgggattacaggcacgagctaccatgcccagctaatttttgtatatttagtatggacagggcttcaccatgttggccaggctggtctcgaactcctggcctcaaatgatctgtgtgcctcagcctcccatagtgctgggattacaggcatgagccactgcgtccggcctacttaccttttatttttgcttgcattaccctttctttgccttgtttcatttggctaagactgtcttgtttacttgctttgcttctgagggattatatgagagttctatgggtttttccataatggagtgtacttttattattttattatttgtttttttgagacagggtctcactctgtcactcaggctggagtgtagtgatgcagtcactgctcactgcagctttgactttcttggctccagtgatccttccacctcagcctcctgagtagctggaaccacaggcacccaccacccacacccagccaattttttttgtatttttagtagaaacagggtttcaccatgttggccaggctagtcacgaactcctggcctcaagtagtaacacccatctcagcctcccacagtgctgggattacaggcatgagccaccgagcccggcctcatgcaatttattgactacttcactgaaagtgaacttgtatggatactcaaaaagtacagtttgtattgaatacatattgtttttgcatcatactaaagctgaacagttctaaactgaactgtcatcagggaccgtctgtattgtgaaatcttaattttgtccatattaaaagacaggaacagggctggttcgtggtggctcacacctgtaatcctagcactttgggaggctgaggtgggtggatcacttgtggtcaggagtttgagaccagcctggccaacatggtgaaacccagtctctactaaaaatacaaaaattagctggacatggtggtgcacacctgtaatcccagttattcggggggctgagacacgaaaattacttaaacccaggagttagaggttccagtgagcgagatcgtgccactacattgcagcctgggtgacagagcaagactgtgtctcaaaataaagacaggaacaaaggtatcgataactcttaagtataggttaaattcccacaaaaatctagttttaaaaaatctttttttttttttttttttttaaaaacagagtctcactctgttgcccaggctgagtacagtgacgagatcttggctcactgcagcctctaattcctggactcaagccatccccccacctcagcctcctgagcatttgggactacagatgcatcccacctgcacccagctaattatttttttgtagagatagtgttttcctatgttgcccaggctggagactgatctgcaactcctggccttaagctctttattttttaagcaaatttgcactgttttcaattaatatgaatttgcatttcgctgatctcatgctagctgacaatgggctgaaggtgaggggaggagaaagatggacatggtacataaaagcatgtatgataaagtggaatgtcaccttggttaaaaatgtgtaatgatttgaatgatacaaatataagtagttaagggttattttgaacttgatacctttgctggaggaaaaattactttatgcatttttgatgaaaaatcattagaagaaaaaaaatggaatatttagaggaaagagtatcctgatgttaaaagtgaaaatgaaataggacattgagaaaatttttttatgtaaatgtgtatatggtaatgtattaattagcgttaggtatgtacacggatttttgccttctatatttctgaaaaccttctgtgaaaaggaagagttgaaatcataaagaattggctgatggaaattaaggtagacaggcaaatgggaatgtggcccccctaggagggtgaactctgagagacacagtcatccctgtaaataaggctgcgccaagatcaaaggagaggtctgaggctgggagtcaggagtcagccattcttttttttttttttttctgcaacctccacctcctgggttcaagcttttctcctgcctcagcctcctgagtagctgggattacagatgcgcgccaccacacccggctaatttttgtatttttagtagagatggggtttcgccatgttggtcaggctggtttcgaactcctgacctcgtgatccgcccgccttggcctcccaaagtgctgggattacaggcatgagccaccgctcctggctgagtctgcgatttcttgccagctctacccagttgtgtcatcttaagcaagtcactgaacttctctggattcccttctccttttgtaaaataagcatgttatctgtccgtcctgccttgggcattgtgataaggataagatgacattatagaattttgcaaaattaaaagcgctagacaaatgattttatgaaaatataaagattaggttgaatttggtcagcatagaaaaaggaatgttgagaacattccttaagattactcagctccctttgctggaaatcagaagtcattaagtatctttgtggttgaaaatgtttggtgtctcaggcggttctacttattgctaaagaggtctaccttgagcttatagtaaatttgtcagttagttgaaagtcgtgacaaattaatacattcctggtttacaaattggtcttataagtatttgattggtttaaatgaatttactaggatttaactaacaatggatgacctggtgaaatcctatttcagacctaatctgggagcctgcaagtgacaacagcctttgcggtccttagacagcttggcctggaggagaacacatgaaagaaaggtttgtttctgcttaatgtaatctatgaaagtgttttttataacagtataattgtagtgcacaaagttctgtttttctttcccttttcagaacctcaagaggctttgttttctgtgaaacagtatttctatacagttgctccaatgacagagttacctgcaccgttgtcctacttccagaatgcacagatgtctgaggacaaccacctgagcaatactgtacgtagccaggtacagtgtcagtctctgaaactgcctttgccagactggattcacttatcatctcccctcacctctgagaaatgctgagggggctaggcaggctttctctactttaccacatttataatatatttggtgaacttcagctgattgctggaggacacagggctgtttaacacataggtgttgatacagttcctacctaattcacatatcaccacctcagttgaagccttctccagcttcccaaggtgtgcagcgcctcatagttcatgttgtttattattttacctatcttgctcttattcttctacggctgagtccattttatttactgtattcattacctaacagttccttttagtgctcagtaaatattcattatgattgtacaatgcaaggataagtgtagaagttctaagggttcaaaggagggattcaggaaaagaacgtaatctgtgctgtcggacaaagagattcctcaccagctacatacacagacatgaaatttgactgcaactctactagctaatcatcataaagtgagagcagaggccaggcacggtggctcatgcctgtaatcccagcactttgggaggctgaggcgggcagatcacctgaggttaggagttcaataccagcttggccaacatggagaaaccccatctctactaacaatacaaaaattagccgggcttggtggcaggtgcctgtaatcccagctactcaggaggctgagccaggagaatcgctggaacccaggaggtggaggttacagtgagctgacgtcgcgccattgcactccagcctgggcgacgagcgaaactccatctcaaaaataaataaataaacaataaataaatagagaaaaagaaagaaaagaaaagagagagagcatggatgtcctgtgagacagttggag

SEQ ID NO: 695 - DNA, 6000 bp, Homo sapiens
ctttgaaaggattcaccaaataacagtagtaagcagggggattaggaaactaggtatatattaagagggagcttttgtactctataccttttaatactttctttgagaccatgtgaatgttttacctatgtatttatttatttttaatttttgctttgcctgcttttaaacaaataaattgtactttttttgaagagctctatttttatttcctttcgattatcatctgtagattcttatgtcacattttactttaacagcacatttagacagaatacagtctttaaatggaagccgacaattgatttccctggaaaatttttgaagtacaataacatttgattgattgaactttatttagtaagaattcttagcaaaattccctcccaggcacacctacatggtgcttcattttcagtgaactacaaatctctgaaacccaaaactgcaatctaaaagtacaagatggctggactcgatggctcatgcctgtaatcccagcacttcgggaggccaaggcaggaggattgcttgagcccagaagttcaagaccagcttgggcaacatggtgaaactttgtctctacaaaaaattagccgagcttcacaaacaatcttacaggagtcattcattaattaactcaacaaatatttatagagtacaggagacactagagatccagcaaaggtcaataacatgtgctgtcttagagaaaacttatattctaagaatagtcaagtgacaaacaggagctacatcaaataatcacaagtacacttcagagaattaaaaccagatcaacgtagagaaaggcttccttacattcgatagtcaggaaattctctctctaccaggagggaactgagtgacaaggaacagtcaggtgggagaagggcattccagatgaaccagccctgagcggggaactagaaggccagtttgagaaaaggaatggagagaggaggaacagtttgtggtcagagcaaggaccaaaccattttagacttcatgagcctaagaagttttgattttgttatgagcatgacaagaagccattgtaatcgagttttaaacaaaggaatgacatgatctcattttgtttaaaaaaaaaaaatcatcctggctgtagtgtggagaatggactaggggagcataaaagcagaaagaccaattggaagcctattaacagtaatccaaatgatagataatagtggtttgaaccacaaagattatggacatagaaagaagcagatagatccaggagatgttttggaggtattctggcagaatttgctggctgactagacagaggtactaaggaaaagaatcaagaataattcctagattcgggacttcctagaaactgggagaatggtgctgctgtttattgagataaatggagaagacagaggagaagcttagaatagagttctaggagaggtcagagatggagatcaacatttgggagacagaattttctaattccatagtgccgacgattttctattgatagactaaaaatgtctggaattttatatgcagtttcatctggacaataccctaagaggagatcagttataccttggcacctgctaatagccataggaatatgtatatgtagaataaatggtaaaactactgaatgcttaatatgtgccagacaccgtgagatacgtctttgaagtactatcccagtagaatttacaacaaccctatcaggagatactttttttatcaccattttacagatgaagacactgaagttcaaagaggttaaataactcgccccaaatcacactatatagaagagaaatctaaatcctggtagtctgaccccagaacttgggctaattaccactatataatacagtgtcactggggtaaacccaagatatgataacataagttagagacttttaaattccaaatttcacacactatgatttcacccataaaatgtagtgattcagccatagtcttctgattagttggagtaccctatgcaatactttaggaacttgcttcttttattttcatatatatatatgttcattcataaattaaatctggacagccagtgaatctgccatttttgtctctaaccaacacttctgtcacaaaattgtacttttttttgtttttttttgagacggagtctcattctgtcacccaggttggagtacagtggcacgatcttggctcactgcaacctctgcttcccgggttcaaacgattcgcctgcctcagcctcccaagtagctgagattacaggtgcccgccaccacactggctaatttttgtatttttaatagagacagggtttcaccatgttggccaggctggtcttgaactcctgacctcgggtgatccgcccgcctcagcctcccagagtgctgggattacaggcatgagccaccacgcccggcccaaactgtgctttttttaaataaagaaattaaaacagtatttttttccttaaagatggtgtctcactacattccctggctcaaacgattctggctcaaacgaattcctaggctcaaacgattctcctgcgttagcctcctgagtacctgggactataggtatgtgccactattcctgaaaacataatcagttttgaaggtagtgtctgggctgggcgcagtggctcacgccttcaatcccagcactttgggaggccgaggtgggcggatcacctgaggtcaggagttcgagaccagcctgaccaacatggataagactccatctctactaaaaatacaaaaaattagccaggcatggtggcgcatgcctgtaatcccagctactcaggaggctgaggcaggagaattgcttgaacctaggaagcagaggctgtggtgagccgagatcgcaccattgcactccagcctgggcaacaagagtgaaactccgtcttaaaaaaaaaaaaaaaaaggtagtgtgtggccgggcgcggtggctcacgcctgtaatcccagcattttgtgaggccaaggtgggcggatcatgaggtcaggagttcgagaccagcctggccaacatggtgaaaccctgtctctactaaaaatacaaacattaagccggcgcagtggtggatgccgataatcccagctcctcgggaggctgacgcgggagaattgcttgaacctgagaggcagaggttgcagtgagccaagattgtgccactactaggcgacagaatgagactctgtctccaaaataataataataataataataaaataaaaataaaagtagtatccagcgtactacaaagaggaagagtttgtgaatgtgtatgttactgttaagttaaacagtgttctagtatccatctcattatcagccttgggcagggcagggttgagttggctaatgttcattataaaccagatcatccagttggggactctgaatgagcatatgattgcccctttcatgctagacttagctaattaaactgttcatatgacctaaaaggatggctgtggtgccatagaaagaaaacaagttttgaggcaagagactttagtttgattcctacctctgctgttttctggttgtgagatttttggatcagttgcttttgtgttcatttaccaaaacttctcaagacaaaaagaataaatgagataatgtgacagtgccttgtaaataccaaatactatatagagatagctattattacttgtatgtttattgtgaacattaatcagccaatcaagttgttcagacttgtactgctgaacatcaattgcagatataacattcttggcagatgacttagtcacctccttctgtggaagaatagaagatagacagctccttgctgtctatcacagtatgttctggtcccgttggcctcaccttccatataatcatttccattctactgggctttagccactctggtgacttgagttcagcaaaaataatctttcttgatgggtggtatatatatttctaccttttatgctttagaatagtttcctttccatttctcatagggtttggatcttcataactgtttgaagagaaatcctgacctccagactgaaggaaagcacaccatgcctttataacgccagcctcggtcttttttttgttcccctctgtcttagttccttttgtattgctataacagaataccgcagactgggtgatttatttatttatttattttgttgttgtcatttgttttcttcttttttgtatcttttgaaattcttttcattgttgttgttgttttgagactgggtgatttgtttattcagctcatggttcttgaggctggaaagcccaagagtatatggtaccagcagcacctgattatgccatggtggatagacagaacggcaagagagagcttgcttttgtaacaaagtcactcccatgataactaacctactcctgtgataacgacattgcaggttcagtatccctgatttgaaagtctgaaattcaaagtgctcccaaatctgaagctttctgagtatcaatgtgatgctcaaaggaaatgcttattggagtgttttagattttggatttttagatttggtatgttcaacctgtaagtataatggaaatattccaaaatgcaaaatctgaaacacttctggtcccaaacatttcagataaaggatactgaacctttaatccattcatgaaggcagagtcctcatgacccagtcacctcctaaaggcctcacctcttgatactaccacaatggcaaccaggtttccagtacatgaatttttagggggatcattcaaactatagcaccctcctttatcccttaccctattccattagttttaatccccactttgtctcttcctctaatcttcagtctacactgtgacatgataggtatgctcaagtctctaacagctctaaaataacgttttctgtttttttttttgtcttcatttctggtggggttggataagaaaagtttttcaagttaaatcactctctattgcaagcctcttccaccttttttttttttttttttgcttcgaagaatgattgcctttaccttctcagttctcagttattttccagcacattatgattttatgaccttgatacagaagggctgggctcctggctaaattccacccttaaacctggaactgcaaccctaagtgaaaacagctaaccccattttttttcccacccaaatgttgcctctttggcctgccatgcccctatcctgtgctcataaaaatatttcagctgggctgggtgcggtggctcactcctataatcccagcactttgggagaccgaggcaggtggatcacctggggtcaggagttcaagaccagcctggccaacatggcaaaaccgtatctctactaaaaatacaaaaattagttgggcatggtggtgggcaccataatcccagctacttgggaggatgaggcaggagaattgcttgaacctgggcggcggaggttacagtgagcccagattgtgccagtgcactccagcctgggcaaccgagtgagactctgtctcaaaaaaaaaaaaacaaaaacaaaaaagatttcagcagctgggagaacaatataagcagctgacgtcagggatataaatggctgtgtgttgggaatacaagcagctgattgtcggaaatacaagccactgagtgttggtgatacaagtggctgagcagcgagcagagaatcaggtgagcgttggagactatggatgggacgtggctaacttcagatggtgcagctttggagaataggcccagccggagatggcctggcttcagggaaagatcaccttcttcccataccatccctttttcaactccccattctgctgagaaccacttccatcgtgcaatacaatcttctgcatatactacccttcaatctgttcatgtgatctgattattcctggacactggaagagaacctgggtgccaagaggagagggcaggggctgccaccctgaccctccactgagctggctggcacctgg

SEQ ID NO: 696 - DNA, 6000 bp, Homo sapiens
tctactaaaaatacaaaattagccgggcgtggtggcgcatgtctgtaatcccagctattcgagaggctgcggcaggataattgcttgaaatcgggaggtggaggtttcagtgagccgagatcacttaaaaaaaaaaaggaaaataagctaccagctgagagaaaatatatgcaaatcatattgaagtcctgttaaaggacttgtatttaggatatataaaggatgcttacaacttaatacgaagacgatagcccaaatttaagatagggaaatgctttgactagacattctaccaaaagagatatataatggctaaaaagcacatgaaaagatgctcaacatcattaatcagagtggctagaatgaaaaaggctaacaataccaagagctggtgaggatgtgaaaaaactggaactctcaattgttgctggtggaaattcagactggtacagccagtgtggaatgtgatttggcagtttattaaaaagctaaaaacctaaacttacatagcccagcaattgcacccccaggagtctacccaatggaaatgaaaacagtccgtccccacagagacatggacataaatgttcatagcagcattattcagaatagccccaaattgaaaacaatccagatgtccatcaactggtaaatggataagcaaaccatataatggaaaaccattcagcttccaataacttccaagaaactgtagacacatgcagtatcatggttaaacctcaaaaacattatattaagtaaaataggcgaggcatgtattgtatgagtcatatgaaatgtctagaaaaggcaaatttattgagatagaaagcagatcactggttgcttaaggcctagggtaggagtggggattaactgtaaacgggtacaaggtacctgactggggcaatggacatgtggattgtgatgatagttaaattgtacagctctctctatatatagttgtacagctctattaattttccacaatcattgaatcatgtcttccagttttatgaggtaaatcatagtccaatgaagcttttttaaaaataagatgataggccatgtgtggtggctcacgtctgtaatcccagcactttgggaggccaaggtgggtggatcatgaggtcaggagttcgagaccagcctgaccaacatggtgaaaccctgtctccatcaaaaataaaaaaattagccaggcatggtggcatgcgcctgtaatcccacctactcaggaggctgagacaggaaagtcgcttgaacctgggcggcagagtctgcagtgagccgagatcatgctgctgtactccagcctgggccacagagcaaaactccatctcaaaaaaaaaaaaaatattaattaatatgataaaatgatgcctatctcagaattcttgtaaggatttcttagtacaagtgctgggtataaactatatattcaatagatgacgattattacttattattgttattgataaataacagcagcatctacagttaagactccagagtcagtcacatagaatctggaactcctattgtagaaaaccaaaaaagaaagaaaacacagctgaagcctaattttgtatatcatttactgacttctctcattcattgtggggttgagtagggcagtgatatttttgaattgtgaaatcatagcaaagagtgaccaactttttaatatttgtaacctttcctttttagggggagtaaaacttggattgggagatttcattttctacagtgttctggttggtaaagcctcagcaacagccagtggagactggaacacaaccatagcctgtttcgtagccatattaattgtaagtatacactaataagaatgtgtcagagctcttaatgtcaaaactttgattacacagtccctttaaggcagttctgttttaaccccaggtgggttaaatattccagctatctgaggagctttttgataattggacctcaccttagtagttctctaccctggccacacattagaatcacttgggagcttttaaaactgtaagctctgccctgagatattcttactcaatttaattgtgtagtttttaaaattccccaggaaattctggtatttctgtttaggaaccgctgcctcaagcctagcagcacagatatgtaggaaattagctctgtaaggttggtcttacagggataaacagatccttccttagtccctggacttaatcactgagagtttggtggtggttttgcatttaatgacacaacctgtagcatgcagtgttacttaagacagcaagcatctagtgagaggagctggtgccatgcatgaccccacatagatcttgctgatagtgctacagcatgaaccctgaagctttcaaaactatgattttttttttttttttttttgagacggagtctctgtcacccaggctggagtggtgcaatctcggctcattgcaacctctgcctcccagatttaagtgattctctgcctcagcctcccgagtagctgggattacaggtgcctgccaccacgcccggctaatttttgtatttttagtagaaacagggtttcaccatgttggccaggctcctcttgaactcctgacctcaagtgatgtgcctgcctcggcctcccaaagtgctgggattacaggcgtgagccaccgcacctggcttttttttttttttttttttttggagacagagtcttgctctgtcgcccaaactagagtgcagtgacattagctcactgcaacttctgcctcctaggttcaagcgatcctcctgtctcagcctcccaagtagctggaattacatgtgtgcaccaccatgcctggctaatttttgtatttttagtggagatgaggttttgccacattgcccaggctggtctcaaacttctgacctcaactgatctgcctgcctcagccgcataaagtgctgggattacaggcatgagccactgtgcccaacctgaaaactatgatttaagtaaacaacccataaaatatttcttgctatttttactaaagatgtgttatcttggccgggtgaagactttctagtgtttccgtaactagggtaaaaaatgaactctattatatggcttgtacatgtgtttacaagaaagcagtgtactcctcataaataaacttttagtttattttattttttaaacactgcagcctcatcatgcttcacggaggagcctgtgcgggaagaatgctcccacacagcataaagaatgctcccgcacagcatagagaatgcccccgcacagcatagagaagcccccgcacagcatagagaatgcccccgcacagcatagagaagcccccgcacagcatagagaatgctcttcacctctgggtttttaaccagccaaactaaaatcacagaggccaacacatcatttaagatagaaatttctgtatcttttaatttttttcaaagtagttttacttattttcagattctatttctttactagaattaagggataaaataacaatgtgtgcataatgaaccctatgaaacaaacaaaagctaggtttttttcatagctcttcttccagattgaatgaacgtctgttctaaaatttaaccccaaaaggaaaatattcagttaactatgttaaaaaccaagacttgtgattgagttttgcctgaaaatgctttcataattatgtgtgaatgtgtgtctttcccatcttctccacagggtttgtgccttacattattactccttgccattttcaagaaagcattgccagctcttccaatctccatcacctttgggcttgttttctactttgccacagattatcttgtacagccttttatggaccaattagcattccatcaattttatatctagcatatttgcggttagaatcccatggatgtttcttctttgactataacaaaatctggggaggacaaaggtgattttcctgtgtccacatctaacaaagtcaagattcccggctggacttttgcagcttccttccaagtcttcctgaccaccttgcactattggactttggaaggaggtgcctatagaaaacgattttgaacatacttcatcgcagtggactgtgtccctcggtgcagaaactaccagatttgagggacgaggtcaaggagatatgataggcccggaagttgctgtgccccatcagcagcttgacgcgtggtcacaggacgatttcactgacactgcgaactctcaggactaccgttaccaagaggttaggtgaagtggtttaaaccaaacggaactcttcatcttaaactacacgttgaaaatcaacccaataattctgtattaactgaattctgaacttttcaggaggtactgtgaggaagagcaggcaccagcagcagaatggggaatggagaggtgggcaggggttccagcttccctttgattttttgctgcagactcatcctttttaaatgagacttgttttcccctctctttgagtcaagtcaaatatgtagattgcctttggcaattcttcttctcaagcactgacactcattaccgtctgtgattgccatttcttcccaaggccagtctgaacctgaggttgctttatcctaaaagttttaacctcaggttccaaattcagtaaattttggaaacagtacagctatttctcatcaattctctatcatgttgaagtcaaatttggattttccaccaaattctgaatttgtagacatacttgtacgctcacttgccccagatgcctcctctgtcctcattcttctctcccacacaagcagtctttttctacagccagtaaggcagctctgtcgtggtagcagatggtcccattattctagggtcttactctttgtatgatgaaaagaatgtgttatgaatcggtgctgtcagccctgctgtcagaccttcttccacagcaaatgagatgtatgcccaaagacggtagaattaaagaagagtaaaatggctgttgaagcactttctgtcctggtattttgtttttgcttttgccacacagtagctcagaatttgaacaaatagccaaaagctggtggttgatgaattatgaactagttgtatcaacacaaagcaagagttggggaaagccatatttaacttggtgagctgtgggagaacctggtggcagaaggagaaccaactgccaaggggaaagagaaggggcctccagcagcgaaggggatacagtgagctaatgatgtcaaggaggagtttcaggttattctcgtcagctccacaaatgggtgctttgtggtctctgcccgcgttacctttcctctcaatgtacctttgtgtgaactgggcagtggaggtgcctgctgcagttaccatggagttcaggctctgggcagctcagtcaggcaaaacacacaaacagccatcagcctgtgtgggctcagggcacctctggacaaaggcttgtggggcataaccttctttaccacagagagcccttagctatgctgatcagaccgtaagcgtttatgagaaacttagtttcctcctgtggctgaggaggggccagctttttcttcttttgcctgctgttttctctcccaatctatgatatgatatgacctggtttggggctgtctttggtgtttagaatatttgttttctgtcccaggatatttcttataagaacctaacttcaagagtagtgtgcgagtactgatctgaatttaaattaaaattggcttatattaggcagtcacagacaggaaaaataagagctatgcaaagaaagggggatttaaagtagtaggttctatcatctcaattcatttttttccatgaaatcccttcttccaagattcattccctctctcagacatgtgctagcatgggtattatcattgagaaagcacagctacagcaaagccacctgaatagcaatttgtgattggaagcattcttgagggatccctaatctagagtaatttatttgtgtaaggatcccaaatgtgttgcac

SEQ ID NO: 697 - DNA, 6000 bp, Homo sapiens
actttttattctgctccattgatctatgtttctgttttaatgccagtactcttttgattactgtaactttgtagtagattttggagtcaagtagtgtgatgcctccagctttgttctttttgcccaagattgctttggcaattcagagttattttttattccatatgaattttatggttgcattatctgtttctgtgaaaaatagcattggaattttgataggaattgcattgcatctgtaggacattttgacaatatggacattgtcattttagacattttgacaatagtaattcttctaatccatgagcatgggacatatttccatttatttgtgccttcttcaatttctttcatcagtgttttatagttttcagcatacaggtccttcatctccttggttaaatttatttctacatatttttgtagctcttataaatggcattgtttccttgatttacttttaggatagttcattgttagtgtatagaaatgctgttcatatgtgtgttgattttgtatcctgtgactttactgaatttgtttattagttctaatgattttttggtagagcctttatgatttcttatatataaaattatgtcatttgcaaacaatttaacttcttttttaatttggatatcttttatttctttctcttgcctaattgctctggctaggacttccagtactatgttaaatagaagtggcaagagtggacattctgtcttgttctgatcttagagggaaagctttcaatttttcaccatttaatatgatgtgagctgtgggtttgtcgtgtatggcctttattatgttgaggtacattccttctacacctaatttgttgagagttcttgtgaaaggatgttaaattttgtcaaatgctttttatgcatgtattgagatgatcaaatggtttctgtccttcattctgttaaagtgatgtatggtgaaagatcctgttaatgtgctattgtattcagtttgctagtattttgttgaggatttctgtatcttatgttcatcaggacattcgcgtgtaactttttatcttgtagtgttcttgtctggctttgctatctaggtaatgctggcctcataaaataaattgagaagtattcccacttctccaaatattttggaagagtttgagaaggattggtatggcttctttaaatgtttggtagaattcagcagtgacgacttcctgggcttttcttcggtggtagaatttttattactaatcagatttccttactttttattactctgtttagactttctgttttttttttcatgtttcagtcttggtaagttgtatgtgcctaggaacttctccgtttcttctaggctatcaaatttcctcttcctataaggacagcagtcagattggattagggcctatccttggggctttattttaatttaatcacctctttaaaggctctatatccaaatgcagccacattctgaagtattgaggattagggcttcagcatatgaattttgggaaaggacacagttcagttcataacaccagctaagatttagggacttttcatgttgccaggactggaaggtggcttgacccttggttctcagaactgccctctatcaatgctggcatcccctgagacaccccctttcccttctggtctttggtagttagcccaggtagtattaacctgagttgtccctcatccgtgacacaaagtgccacactgggccactgaaagtgctgtgagatgggctgaggcttcccatcacttctttgtgcccctcattctactccacctgtgctatacgggcacagagggacttgatgagtgtcttagtttgttttgtgttgctataaaataatacgtgagactggataatttataaagaaaagaggtttatttagctcatgattctgtaggccaagaaattcaaggatgtggtcccagcttctggcaagggatttcatgctgcatcacagcatggcaaagaaagtccaaaggaaagtggacacatgcaaagagggccggagaggtatccaggctcttataatagcccactctctcgagaactaatccattcctgggagaactaatccagaaagagaactcgcttactacctcagaacagcaccaagccattaaggagggatctacccccattgcccaaacgtctcccactgggccccacttcccactactgccacactgggaatcaaatcaacaccagctttataaagacaaacaaaccatacccaactatgacagtgaggtctctcaggtacatactcctgagtctctccttggaaatgaggcacaggttcactctcctccccagatcacacaactcatctagggtgtttgtcacccacccctacctcagggcttgcttggaagtgagtacagcaatcaggatgcagggcccctttctcaagcactgaccacatctaactcttgaacatacttcctctctcacaacgttaaacccaacccccgccaagcaggacaatctttttcagttttgggggctgggaagctttactttatttcagcacatattctcccaagcatagtgtctgtgcctcagtcttttccaaggccttgaatttttgaaagtcaaaactcacattgtcttctttttttcccccccgcttgtgccagaaatttccttgaggcaataaatgcaaaatggctcactgattgtgtaagggtagggctagagtgaaaagaaatgtggctgggaaaatatagcattatttcaaaatcttaccctgccatatttagttgccgctttagctagtgaaattacacctagcagatagtgtggcctcacaaaggaccccttcatcagtagaacacactcttgcactgtctgcccaatggagaagttggaaccaggtagatccacaatctcctccccattaccccatgagtagcccaactggccagtgttgggtccccagattgtgaccacagaaaaccaaataattgactggtcagaaatgccaaccccgttaaggcagtgttctgaataactactaattgtctttatctcattgttatgttgttaaaatgtcacagtgactcaatgatttaaaatttctaaccgttcattataaaagatagccctatagttgaaaatacagtattgccatattttccatattaagaagcaaatttcttaaaagctggtaaatttcttattgtgtagagttggcaaggttttagcataggtcagctccagctttttctcctctttaatcagaagtgaaagtttgtgtttcttatgtttcttaatgataatctttttcttttgaaaagcaaaatacatgaatattagatatggacatgaaaataccctttccctaaaagcagaagtatagtctattcagataaagtaagagatcatcagagtaatgaaatacctacgtaacaatgcacttgtaccccgaacttaaaaaaagatatatcatgtatagaaaccacagataagcagatgtacgaaaccaagcaaaaatgagaactttgaattacagtcacaagtaaactgaaatcgttacttttcatttttgtaaaacttcaagacatttattgttaattttttactttatacttaatttttattatttcagtaacaatatattgatttataatttactatatgctaaattactttataaactatcctgtgctttataaatgtaaggtattagttttattattctcaaagaaagacctacaacggaagtattgaaaatctttacattcctgatataccctgatcaacttcaatatggaaagccttgcttatatacaggctaatcttttctatctctgggtagggagaaaaaaacaacaaaaaaaaaacaccagcaacaacccttaatgtcctttaacaaacacagattcaaaatgtcctgattacatctttaaaattaagtcaaatgttttcatcccaaataaattctgttctttcaaataatattttcccttcatttctaataaaagtttatgagggcaagattcaaaagtgatatttctgacttttttatatatcaatagtaagaaagttataggagctaatttcacttcatattaaaccacttatagatttggcattaactttaacttgctaaagtacaagagtttttataataacaatgtaagtcttaaataaaattttcaagtttcataaaattatttgtctcagctagttaattcaactggtttttagccatctctgtttccaagaggagagaatcaaaggagaaaatagttctacaatcaaatactatatatctaatcccattagtctctcaaaaaaaaaaagaaaagaaagacggtatgaggttggctaccttaacccctgccttaagcagcacaatatccatcattaaacccctcagcctcaattctcccttttctgtttttgtcccaggaactttatcaccctgaatctacctacaatatcctcccctatctcacacatccaaatggttcattctattttatctgtacccctcttgaagtacttcttcattttgccattgcattacaatcattattaaacatgtctttctcctttactaggtaaaaaaagctgcttttggttgatagccagttcgtatacatctccccgcacactgctggcatgatgagtgaatgaatgaatgaatgaatgaatgaacaaagaaataaataaaatatttaacatatattccattaagtaaagggcatataatataatatcagtacatacttgtaattaagatgcaatgagacaagtgagttataaaaattacagtacagtaaacaataaataaaaacatctttaaaagtatttaagagactttttttgttcaaacttggataacgcacacccttctcattgagatgctgcttcctcattggtttgtgctgaaatatgagtgcaatttcctgtcccctcagcagtgttggtttctcttcttgacttgatgcaggcacagatttatcaagctcctcagtcaacaaacacatcaccggaagaaatatgggtaagtataagattaaaaaataaaataatattttaaagtagataacatgctttggcataattgtcagtgatgttcgcaacattcttcctggtttaggctgtataaatgtggtaatgcaaagcatgataagagagaaagaaatgaggaagacacatggtttcctctactttgagcagtggtaaagggccaaactttaaatttagaactaattaggcaaaaccatagatatagaaaaagggggttgttcatactttattttcttttcaggaaacagtgctttggcaaacttcattcagtattaggaagaagcctaccagcccctggctttagagctatctggcaccaatccctcatctgtacaatggtccagtaaatactttttatatccatcagaaaaaaatgtgatattaggaaagaatatttccagtattaataaatgtcaagtaataattattagttaataagtgactaccacagtgcctgaaatatatagtagagtcttaataagtaactattaaactgatagatgaaagcaagcattttctataacactgtaggaaaatattgtacttttggtcatcgtcatcaatgatttgtactatttttagatctgttcaagaatagatatactttaatatactgtagattgtcttttttgacatctggtaaaaattaaaaaattaaaaactcaccaaaatttctcagtgcttgttctaaaaacaattttctcaaaatttgattaaaggaggcaaaataatatctgaaaagatatgtgaatactgtaataggaattatatacagtattccactaaaatctcagatccacccaaattaaatgaacaactattatctgcagagcctagtattatacgtgaagtgttaccatataaattacactctgagcacctccagcttttctgctatgctgtggctagatgactaaagatgatttcttttcagaaaat

SEQ ID NO: 698 - DNA, 6000 bp, Homo sapiens
gcgattctcctccctcagcctcctgagtagctgggattacaggcatgcaccaccagccgtggctaatttttctatttttagtagagacagggtttcaccacgttggccaggctggtcttgaactcctggcttcaagtgatctgcccacctcagactcccaaagtgctgggagtagcatgagccacccctttttaatagaaatggggtctcgccatgttgcccaggctggtcatgaactcctgggctcaggctatcctcccatctctgcctcccaaagtgctaggattacagatgccaccactcccagcctacataaagcatttataaaacaaaacaaaactgaaataattttcttaaatcactgcctcaagactaataaaactggcaactctcaatgatttccctcaaattactctcctttttgagaagcagtatagaatgataaaaagctggagatctgaagccaacatcctaggttcaaatcggctctttcacatactggctatgtgactatggacaagttattcctacgtgtttcaggtttcttctgtaaaatgacactagtagcagtataatacctgcctcccaggactgttgtgaagaataaatgtaaatcactcataaacaatgtctgtaacatgcatactgaatacttaaaagatgcaagtgatttggtcatctgaccctcacaaaaacaagtatttcaaactgctgcttactttgaggattccacgtgttatatcaaaagatatatcatttcagtaactagacctttggaggcagtgagataaatgagactaattgatctgaaggatctgatctgctacttttacatcacaaaggtacctgctttatcttttaagtaacagcttgctatggaatactcagccttcctttcgggttcagtcagatgtagtggaaagatgaggttgctaggaaactttcagatttctagtagacaaatagagaaaaacttgtcaatactattgccatttccattctttggcatgactgggcaaagagtacccagtgctaaaacatttgtcatttgtgagaagcgctatgcctctgtggttagtaacgatggcgttagaatgcctggttataaccctggctctgctactcgctgtgacctttggcaagttacttgacttctctgcctcagtttccttatctgtgaaatctggataataatacccatcttatagggttgttgggaggattacattagttaatttccataaagctcttagaatagggcccaacagaataagcatcaaaaagtgttgattattaaaagcataaaatgttttccagtattaatgacataactgtataaaaatatatcttgatctcatgcagaaaagaaatgctactgtgtccatgttttagttatttgtattagtaccagatgtgaggtagtacaaatgcaaaggagaaggtacaggaacacatcttcatgtaattaacctactgcctgatgacctgaccttgggccagaaaagaaaatcagaaagattatgacttgatagcatcttttagaggggtctcatgcatctgataaggactggactaaattacctgctataggctggccatggtggctcatgcctgttatcctagtactttgggaggctgaggtgtatcacttgaggtcaggagttcgggaccagcctggacaacatggtgaaaccccgtctctactaaaaatacaaaaattagccaggcatggtggtgggtgcctgtaatcccagctactcgggagtctgaggcaggagaatagcatgaacctgggaggtggaggttgcagtgagctgagatcgcacttctgcacaccagtctgggctacagagcaagactccatctcaaaataaataacataaataaatacagctaggcatggtggctcatgcctgtaatcccaggcctttgggaggctgacgcaagtggattaccttagttaggtgaggagtttgagaccagcctggccaacatgctgcaaccctgtctctactaaaataacaaaaatcagccaggcatggtggtggtcacctgtaatcccagctactcaggaggctgaggcaagagaatcgcttaaacccgagaggtggaggttgcagtgagccgaaggttccagtgagccaagactgcaccactgcactccatcctgggtgacaaagcaaggctccgtctcaaaaataataataataatttaaataaataataaataacctgctagattttcattgaacacattgtttccatcttctatttgtaagttatttctagcctttcaacatttaacacttagtttcttcccagatagttttctaaatcagtagcattggagcgtacgttctcagggccttctgagactgtgtcacaagtcatggaaaaaaaaaatttttttaattaaaaatagctgggcatggtagctcacacctgtaatcctagcacttagggagccagagagaggaggaaagcttgagcccaggagttcgagacctgcctgggcaacatagcgagaccccattctccacaaaaaagaaaaatataaaaaataaaaccattaaaagcattaataataatttagccattaccaagaggaagaacaaattctgcttatcaagacagccatttcctcaataattttttagcaatgcctcataagctgacagcaagtctagacagctggcttagctgcaatagaatgaatcggtgttttaagtgtgaagaattttaaagcaagccaagtaattgtataaaatttaaattttatgatcatgtctggacctttttacacttaacacaatggaaatgttcatattcatttttttccccaaaggaaaaatttctgaatcatcactatgttgcacagtagaatagaaatatgaattcaggtacttagtcaagtttctaaagaatgcaaataacagacatgatttaacttccaaaatctgaagtcatcaacatgattttgtagtactctatctcaggttttacctaaaaattcgttattattcagataaagatagctccctaatcacatgtttttaaaaagcctctgccccacgacaacttcctgagatctgtgaagaaactgcagtcttgtgatcagactccatataggactggcagttttgtaatcgtagggaaaaaacggtgactgattttacgtgtcaatcagttgtagtctgctgatctgattagaagccttgacaaatgcctggtggcgattgcaaataactgccaagcatatagggatgatacagtagcccactgttttgggatcagctcttgtacaagagtataggaacaaaaacatctgtaagtaaggtaccagaaaaataactgtccacacccaaaaaggcaaggagagtaattgagctttcaaggagtgtgtccatgtggttccttcaaggggctcctcagggtgctgttgaatgtgttccaaggccagcctgttgtaagtctcactgatttcaaaaacatagtaaaatgctgctgcactggctaacagatacaatcccactccaatccatcccatccgctgacggaagttcatcattctccatgctctgtgccttcaaattaaaaaagaaaatacaattagggtctagtaatgctgtcacggcaactactccaaatgtacttgctttatctccaagaattctaggccgggcgcggtggctcgcgcctgtaatcccagcactttgggaggctgaggcgggtggatcacgaggtcaggtgatagagaccatcctggctaacatggtgaaatcccgtctctactaaaaatacaaaaaaaatagccgggcgtggtggcgggcacctgtagtcccagctactcgggaggctgaggcaggagaatggcgtgaacccaggaggcagagcttgcagagagccgagatcacgccactgcactccagcctgggcgacagagcgagactctgtctaattaaaaaaaaaaaaaaagaattctaaaatatcccactaacacacttaagatttaaaataattaaattaaacacctattaagaaatgtaaaacttacaggttgttttgtgtaatacttacaatcaagtaaaacaacacacacaaaaaaacaaaaaaccattgatttcagtatatactgagttctgctttttaacgggaatccctcagaataaatcactgcatcctacttaaacaggtccataatacccgccctccagaaactggaattaaactagtttctcacagcacatttcactttgacaggtgaaacactttctggcataacagtactgcttcagacgtgaacgcggggtgctacaagtcaagcccccaagttaagacagtaactcctaagcacttacaatggtcccgaaaatcttcctgttcccacggcaagcgttaaagagtcactcagctctgaataatcgggtggctttggcatttcagagaaagccaacataaaataaatcccctgggtcacccggctaggagaaaggtgagcgccgccagcctggagcaccagctactagtgattaagaacggcgtgactgcggcgggtcacgcgcggcccggcccccgtcgccgccgccggagacccgctctgagaacctgacccggcagggaggcgtccccgccacttgggcctccgggcggccggccccgccccctgccgcgctgcagcgccggcacgccgcgaccaaggctgcgcaggcggcgccaggcccgggcctcgccgccttgcagcgccgcgagcccagcgcccgtcagcggtcgccggcggagcctgcttgcaaagctgaggtcccggatctcaccttcctgtcccgtggtggccagcccgcccgccgtcccggatgccgccgcagtcggagcttccggctcgggccggaagcgcgcgcgccccgcccccgaggcccgcccctcatgacgtcagatcgcccccgcccgccgcgcagcttccccgagcgagaccaaaacaggtggaatccgggctggagccggagctccggcggcgcgggtggcggcacgtccctccaggtgggtggctctctgggtctggcgactcagcgctcctcagccttgccccctggtgcccgctcgcgactgtcatcgccccatcacttctcgttgcagacagtaccacaggcacctggagtaccggcatcggtcgctgtggcccccgagtgtccgtcagagcctaggggagcctgccctcccgcgcctcgtcggggcccggccaggcaccttggccgccggcgcacggacgcgggcacgagcactagatcacggtgagtggaagcgggcccgacgcggccctgcaggcccgacatccgccaggcaccagggctgggaggggtgaggggcgcgcgccgcagtgcggctgccctggcgtcgccgctgggggcagggcgcgcggggcttggggcctgcacgcttgccctggacgttggcacctttagctaacctgtctgctctgtcttgcaggctgctggacctcggcacgttgacaagatttctctggggtaccgcggaggattactttgaatttcggtggtcgcctgtggtctggcatatttagaacttaagtctattatttcgggcaccatgactttgaggcttttagaagactggtgcagggggatggacatgaaccctcggaaagcgctattgattgccggcatctcccagagctgcagtgtggcagaaatcgaggaggctctgcaggctggtttagctcccttgggggagtacagactgcttggaaggatgttcaggagggatgagaacaggaaagtagccttagtagggcttactgcggagactagtcacgccctggtccctaaggagataccgggaaaagggggtatctggagagtgatctttaagccccctgacccagataatacatttttaagcagattaaatgaatttttagcgggagagggcatgacagtgggtgagttgagcagagctcttggacatgaaaatggctccttagaccca

SEQ ID NO: 699 - DNA, 6000 bp, Homo sapiens
ctaaaaccagggtgtacatcccaaatttgggtacttttatgaaaggctttatcctacctttcagcaattgtcaaccatgcttcattttttttttttttttttttttaggtaaaagataacccatgccacctgcccaggtcttatagagtctcatattctccactgctaagtgtttaatttgcagtaggactctgattcagaataacgtgcagctgactcttgagcaacaggagcttgaactacacaggtccacttatccacagattttcttccgtctctgccaccactgagacagcaagaccaaccctccctttccccctcagcctgctcaatgtgaagatgacaaccaggatgaaggcctttatgatgatccacttctttaatgaattgtaaatatagtttatcttatgatttgcttccttttttttgagacacagtctcgctctgttgcccaggctggagtgcagtggtgccatctcagctcactgcaacctccgcctcccaggttcaagcgtttctcctgcctcagcctcccaagtagctgggattacaggtgcatgccaccatacccagctaatttttgtatttttagtacagatggggtttcaccatgttggccaggttggtctcaaactgctgaactcaagtgatccacccgccttgacctcccaaagtgctgggattgcaggtgtgaaccactgcatatggccatataattttcttaagaacattttttctttagcttactttaatatagtatataatacaaataacatacaaaatatgttaaccaactttctgttattggtaaggcctcctgtcagtaatagtaaagtttttgaggaatcaaaagttatgtgcagattgtgcagtgggctggctcccctaagccccaagttgttcaagggtcaactgtactcccctccaatgcacataagatggacacttatgaaatggagccaatgcctgccctgcctcccttgtgaggctattcggtatagataccctgatgattgtttctctttcttggcagtagaaagaacatgggccttgcagaaagacaagaattctggcctaatcgctcactacacttactacagaggatagaattctggcccaaggatgtttcaccttgaccaaatttcttttttttttttttttttgagacggagtctcgctttgcccaggctggagtgcagtggcactatcttggctcactgtaacctccgcctcctgggttcaagtgattcttttgcctcagcctcctgagtagctgggactacaggcacccgccaccacgcccagctaattttttgtgttttcagtagagacggggtttcaccgttagccaggatggtctctatctcctgacctcgtgatccgcccgcctcggcctcccaaagtgcagggattacaggcatgagccactgcgcccagcccttgaccaaatttctaaccttttgtgcccatttccacaagtgtgaaactgagttttcctataccgcaggaattttttaaattaattattatttttttttagacagggtcttgctctgtcacccggttggagtgcagtggtatgatcatggcttgctgcagccttgacttcctggcctcaggcagtcctccagcttcagcctcctgagtagcagggtctgcaggcgcacaccaccatgcctggctagtttttaaaaatgttttgtacttactatgttgcccaggctggtctcgaactcctgggttcaagcgatcttcctgcctcagcctctcaaagtgctaagattatactgctcaaccttttttcaagaggattaaatgggaaagtacatggagaaacttttagtccaatcttccaagcagcagcatgcaatgttcatttctttccttctccttccaaatttgacacactgatacatctgcactactcgcactaatttgtgcactgtcttgtttcatcccattgttttactgcttcggtagaaggtcccttcacttagaaaacaatttcctacccctgagcaccaagaggaaagagtccaaggaactaagtctgtgtaggttcagtggtttgcagattcatgctttgggaactctttattcaaatgaaatctctcttggaaccgtgatataaacaaaacagacaaagtcattttattagcattcctttattttagaagttcacacctataattttataacaatcgtgaaaatgttactcagaactagatgttttgatgacacatagcagaaatctgtggttcaagatggtcattgcaaacttaaccaatctcagcattctattctgccttttgttttgattgcacagaatcaatataattctgattcatatggaaaataacttaatatcttaacctccgctcaggatcttcatcataaatgtaggtcagtacatacctaaaaattgtcaatgatccaacatggtcacatgtgacatgctacacttgcacctagtaccaaacaagctgatacttcaatgagatctggttggcatatacacccaagccttgtctgtcccctcagagcactgcacacagatagtgaaagaacttgtgtacaataagaaattcacagggatgaggctgggcgcagtgtctcacgcctgtaatcccagcactttcagaggccgaagcaggtggatcacttgaggtcaggagttcgaaactagcctggccaacatggtgaaaccccgtctctactgataatgcaaaacttagctgggcgtggtggcacatgcctgtagtcccagctactcgggcaactgaggcaggagaatagcttaaacctggaaggcggaggatgcagtgagccaagatcacgccactgcactccagcctgggtgacagagcgagactctgtctcaacaacaacaacaaagatattcacaaggatgaatttaaataggtaaatggcagtgtagaactacatccttcctagtcaattacacctttaggagactttaaataggcacagaaacgacaaagggcttatactgagaattgcacaaaaatgagttacttggcagcacaaggtagggattgtatgtgtcacaagagtatatagactgttctaccttcatgctctactcattgccatatcccttcgtggttccctgagactcaggtgaaattaccttccaatattgcctggagaagggcctcctcctcctcagctgcctcataatcctttattagtaccaataactgcaagaaaccaggggctgggccatcctctggcagattaagctctctgcgaattgttttgtggactgccccagcaatgacttggtctaggcgggcctgattcacagcatctctctcaattgctcctctctgtaccagcttctgtaacaaaggctccagccttagtacataagccgacaacttttcctcatccttctggtaagtggttagatatttgacctgcaactccctaggattatctgtaaccccaaatacctcctcaagagcctgcagacattcatcgacagtaattaaaggattgtttatcttgaggacacgaataacatcaagtgctgggcctcgaaggctctctagcaatcgccttctcttctctacatctggcacctgccacgcctttatcatctgagtagtatgaaacatccagcgtccaaattcttcttctcctggttctggagactccctgcccgagaacactctcagctttttatacttcaagcattgcagggcaggctgaagagcctctaatgcctgtgccaacataggggcccacatttccgggatcatgccctgctctgggtctaaggagccattttcatgtccaagagctctgctcaactcacccactgtcatgccctctcccgctaaaaattcatttaatctgcttaaaaatgtattatctgggtcagggggcttaaagatcactctccagatacccccttttcccggtatctccttagggaccagggcgtgactagtctccgcagtaagccctactaaggctactttcctgttctcatccctcctgaacatccttccaagcagtctgtactcccccaagggagctaaaccagcctgcagagcctcctcgatttctgccacactgcagctctgggagatgccggcaatcaatagcgctttccgagggttcatgtccatccccctgcaccagtcttctaaaagcctcaaagtcatggtgcccgaaataatagacttaagttctaaatatgccagaccacaggcgaccaccgaaattcaaagtaatcctccgcggtaccccagagaaatcttgtcaacgtgccgaggtccagcagcctgcaagacagagcagacaggttagctaaaggtgccaacgtccagggcaagcgtgcaggccccaagccccgcgcgccctgcccccagcggcgacgccagggcagccgcactgcggcgcgcgcccctcacccctcccagccctggtgcctggcggatgtcgggcctgcagggccgcgtcgggcccgcttccactcaccgtgatctagtgctcgtgcccgcgtccgtgcgccggcggccaaggtgcctggccgggccccgacgaggcgcgggagggcaggctcccctaggctctgacggacactcgggggccacagcgaccgatgccggtactccaggtgcctgtggtactgtctgcaacgagaagtgatggggcgatgacagtcgcgagcgggcaccagggggcaaggctgaggagcgctgagtcgccagacccagagagccacccacctggagggacgtgccgccacccgcgccgccggagctccggctccagcccggattccacctgttttggtctcgctcggggaagctgcgcggcgggcgggggcgatctgacgtcatgaggggcgggcctcgggggcggggcgcgcgcgcttccggcccgagccggaagctccgactgcggcggcatccgggacggcgggcgggctggccaccacgggacaggaaggtgagatccgggacctcagctttgcaagcaggctccgccggcgaccgctgacgggcgctgggctcgcggcgctgcaaggcggcgaggcccgggcctggcgccgcctgcgcagccttggtcgcggcgtgccggcgctgcagcgcggcagggggcggggccggccgcccggaggcccaagtggcggggacgcctccctgccgggtcaggttctcagagcgggtctccggcggcggcgacgggggccgggccgcgcgtgacccgccgcagtcacgccgttcttaatcactagtagctggtgctccaggctggcggcgctcacctttctcctagccgggtgacccaggggatttattttatgttggctttctctgaaatgccaaagccacccgattattcagagctgagtgactctttaacgcttgccgtgggaacaggaagattttcgggaccattgtaagtgcttaggagttactgtcttaacttgggggcttgacttgtagcaccccgcgttcacgtctgaagcagtactgttatgccagaaagtgtttcacctgtcaaagtgaaatgtgctgtgagaaactagtttaattccagtttctggagggcgggtattatggacctgtttaagtaggatgcagtgatttattctgagggattcccgttaaaaagcagaactcagtatatactgaaatcaatggttttttgtttttttgtgtgtgttgttttacttgattgtaagtattacacaaaacaacctgtaagttttacatttcttaataggtgtttaatttaattattttaaatcttaagtgtgttagtgggatattttagaattctttttttttttttttaattagacagagtctcgctctgtcgcccaggctggagtgcagtggcgtgatctcggctctctgcaagctctgcctcctgggttcacgccattctcctgcctcagcctcccgagtagctgggactacaggtgcccgccaccacgcccggctattttttttgtatttt

SEQ ID NO: 700 - DNA, 6000 bp, Homo sapiens
tttttgtagagacgagatctcatcgtgttgcccaggctggtctcaaactcctggcctcaagcgatcctcctgcctcagcctcccaaagtgcagggattacaggtgtgagccagctagcccgctagaactgtttttctgtggccggggaccccagcctctcaccttccctgtcatcactgccctctcctcccctctcgaatatcccgcgtgaggggtttgcacacccacgcccatctcgaccttccttccttctttccttccttccctcctttccttccttccctcctttctttctttcctttatttttgagacggagtctcactctgttgcccaggctggagtgcaatggcgtgatctcggctcactacaacctcagcctcccaggttcaggccattctcctgcctcagcctcttgagtagctgggattacaggtgcccgccaccatgcctggcttgctctgcctccccacccccatttcctctgcatttgtttacaagcatccctggcccgagaagggcaccagcagcttgcttctttgctggcgacctctgctgtcagccagggtctacttcaaggacaggatgggcttcccagcccagctgccccactgtgcactcacgacagagcggggtgctttggcgccacgaccaccccagctccctgaacccccttcgacatcttcagcagctctttcagtctaaaatggtgttttcaaacttcaggtcatgaatcaaaagtaagcttaaagggtaatggccaccattaaaaaataaacagaacggaaaatatcggagtgcgccgcaggtttgagatgatctgttgttacgtgtgtgtacacacacaggttatgaacaactgggttaccatgtaaaatgtattcaaaggttcagaagccacttgttggaacaattagtaaaactgtgattctgccgtgcatcagggtccgccccccgaggctgggcaccatggctcacacctgtaatcccagcactttgggaggttgaggtgggcggatcacctgaggtgaggagttcaagaccagcctggctaacatggtgaaaccctgtttctttttttttttttttttgagagggagtctcgctctttcacccaggccggactcttttgcccaggctggactgcagtggcgctatctctatctctgctcactgcaagctccgcctcccgggttcaggccattctcctccctcagcctcccgagtagctaggaccacaggcgcccgccaccgcacctggctaattttttgtatttttagaagagacggggtttcactgtgttagccaggatggtctcgatctcctgacctcgtgattcgcccgcctcggcctcccaaagtgctgggatgacaggcgtgagccaccgcgcctggctgtgaaaccccgtttctactaaaaatacaaaaaattagccaggcatggtggtgtgtgcctgtaattccagctactcaggaggctgaagcaggagaatggcttgaacctgggaggtgcaggttgcagtgagctgagatcgcgccattgcatgccagcttggacaacaagagtgaaactccgtctcaaaataaaataaaacaaaacaaatcaaaaccaaggtccccaccccccacccccaggccacgtgtagcatgtttgagtgagagaagttgccagcacccttcagcccaagttgacccacaggggccagtggtttttgtgtgggaaggcgccacctgaggcacagaccatcacattcagggagagttataagaaaacccctttcctagccccaaagcccctggcactctgccacgaataccttttccttctcactgaaagacaaacaggatggccttctgagctgttgcatgtctgtgagtcacttgagtatctgcatgcacttctccaaaaatgcagcaagcagaacatgtaatgctacatcaactcctgtgagaaatgcgtccaaagatggtgtcggtttgttgttggacgttgccatagggaacagagatctgcctttgaagtacagcgaggagagagctctccttcctgcccatcactgctgccctgtggctctaactgcaggggcgagaacacccgccaccaacccccaaagcagttgccctgcttggggcaaacttctttgtcctgtcccccttcaattccccacagcagaggatcttcagaactgctcaattggagaagaaaaaggaggaggaggggagggagagaaagggagggaataggtctcaccagcagagggctcagcctggttgtgcctgacttcattctcaatgttgctttctaatgctaggctggagcatgaaaagagccgcagaaaaccctctcatgggtctttggaccttctgccttgcttcttcttttcttttctttaattatttatttatttttatttttttgagacagggtctcgctctgttgcccagactggagtccagtggtgccatcatggctcacagcagcttcaacctcatggactcaagcgatcctcccgcctcagcctcccaaagtgctgggaccacaggcataagccaccatcctactttttttttttttttccagacagagtctcactctgtcgcccagataggagtacaatggcacaatctcagctcactgtaacctccgcctcctgggttcaagtgattctcttgcctcaacctcctgggtagctgggattacaggcacactccaccacgcccggctgatttttgtgtttttagtagagacgtggtttcaccatgttggccaggctggtctcgaactcctgacctcaggtgacttgcctgcccgcggcctcccaaagtgctgcaattacaggtgtgagccaccatgcccggtccatgtcctgcttcttttaaaacaaccaaaaatagtccagcctaggaaagggagtctttcctgattttggcaaagttaaaccaggccataggtaacacacagcataaggcaggcgttgggagtgggccccagtcgacagggtgccaggactgtgggctaagcagggctggggacatgggaggcctcagtgcctgggctatgggaagtggttgggaccctgagcctgaggtcagtaacatcccaactcctgacaggcaagaaagggcacctgaggctcccaaggggagtccaccatgggggtgggggagaccgctggagtccataggtccctgtgagggacggcgaaggcgggcctgtcacctctaaaagagctgtgcctgtggcgcagacgggggtgccactgtggcctggtgagtgtggctgtagaacaagcatctgttgggctaatggagccagagacatggtccaatgtctctgatgtccagatagacttccagcagccaggtcggactatctggggttctggaacgttccatgggtgaagctgtaggaggagatgctggacttcctgcctccactcacatgagtcactggagcaatacaagaaggcagactggccttggctactcacactggtctcagctctggggtagggctctttataagccttcttgagaagtgaaaaatgcaaagtcctttctgtcccctcaccactgacttgcaaactccagcgaaggcctcacccctcagctggcccagagcctcccagaagccctcccttcgcttcccacctcgccaggcccagccaggctgggtgctgccttggtgggcctaggtgaatcactgacacaccactgatgcctttggggcagaaggcagaggcctcgggagaaatgcgcaggccccagcggcctggtggagggtgcagggggcgcaggggcagccaggaccgccgaggacgctgggggcacgtggcaaactggctaccctgtccacccgtgagcaagacaccactccgggggcgtgggagggtccaagggagggagaaaggaaagtgccaccaaactaatgtggagccctgccctctgcatgcgaaaaggggctccacggcctgagtcaccctcagccccacctgcgtgtgcgcgagggtgcgtggcctggtacgcgtgcgcacggtgttggtgagcgtgtgtgtgcgtgtccgcttgaggggaatgtgaccgtcgtgtatgcgtccgcgacagtgcggggggccgcatatcggacccgtgcgtgtgcgtaggggtcgcgtgtggccatgggcacacgggcgtgcacgcacgggggctgcgtatgctatgctggcgtggggggtgcgggcgaggtggccgcggggaggagcggcgccagcacctctcggcccccacgcggcctgcgtggctttttgacccggaaaggcggggacgcggggacgcgcggcggcgggggcgcggcgggggcggcgcagagcgaggaggcccgcggggcgcgcggcggggacgggagggaggcggggggcgcccggggccgtccccgccccgcgccgcggcgccgccgttgctaaggccgggcgggcggccgccgggcgctagggcccttagcaacgggtcgcgggcgcgcgcggggggccggcgggcgcgtggggccggcggcgctcgcgggctcctgccgctcccacgcgcgcgggcggcgggggcggggcggcgggcgcgccggggatttccagcgcgcgagaggaagtgcctgcgcggggctgcgtgagggagcgagggagcgagggagcgcggcgcggccgccgcgtgcgcgagccggggttgcagcccagccgggactttccagccggcggcagccgcggcggccgccggctcttccccgccccccgccatggggcagcccggggagcagaacgctgcggaccgcggcggaggacgcgcccggcgcccctgagccggccgagcggcgacggaccgcgaggtaaggggccgcggcgggcgggcgggcctccggcgcgcggccgggcgcctccatccccgtcgcctccatcccgcgccctgggcggcggggcccgggggcctcggggctgcccggcgcgggcccggcgcggcgcaggcccggcccgtcccagcggcgacggcggggcgcggcttcagcctggccccgcgccccagccgggctgcctcccgcctccggacgcctcaacttcggcaaactttgtcccggaggccgggctcggggcccgagggggccggggcgcccgcaccttttcaggaaacggggcgcgcaggcctcgctacggccgtgacccccgctggcgttgaggacccggcaccccgcggggccgcgggtttcacgcggggggacgggcggctcaggggctgcgtggccgagcgcgctgcccgggccggccgggggggcccgggcgttattggaaagttggtcctgagtcattccgcctcagaggcgcctccgaccgcttggcgggcggcgcgggggtccgggtatgggcagagggcgcgaatccccctcgcgcggccgccgagggccggcgactcccggggcaccgggcggctcctggccgcgggctctgcgtcttccccgcgggcgccaggcggctctcggcgggctggccggttccacgccgccagccagccccgtgtggggacttcggtctagtatttggacccgaggagataattctgtgtggaaaattctctcccttcggttggaaacagtaacaaactggaaacggatgaggtgttatggacgtgcttggaaatgcaagaaaccttcagattacgagctgttgacgggaccagttgtatttcacgtttttcgaattaagctcagaatcagttttcagaatgacatgtgatgcgtggtgcgtggtgtgtgtgcctgtgtgtgtgtatggatataattcattcatttttgtggcgtcagaaaggttatgtcgagcgttgtagcggcttcttaatttacattcacggcatacaactgaagaggagccattatttattttttttcctagcatttgctgcgactacacactgccggagcgtttggaaatgttgtttgctgttaccctgtatttgtctataaaattcttactgtagggaatggccaa

SEQ ID NO: 701 - DNA, 6000 bp, Homo sapiens
tttgggccaggcacagtggctcatacctgtaatcccagcactttgggaggctgaggtgagcagatcacctgaggtcaggagttcaagaccaccctggccaacatggtgaaacccgtctctacaaaaaatacaaaaattagccgggcatggtggtaggcacctgtaatcccagctactcaggaggctgaggcaggagaattgcttgaacccgggcggtggaggttgcagtgagctgagatcacgccactgcactccagcctgggtgacagagcaagactccatctcaaaaaaaaaaaaaaattaaaaaaaaaggtggggaggtgatggaggcagaacctatggattaaaaagaactaaaagggagtatctctgaacctattctggttcaggaacttccggattaaagaaaaaaaaagaactaaaagagtcagactaattcttacgtgcaaacaagtttaggaaccaatgatgcaaactacataggtaagacataagcaggcatgaagtggctagggaacagaatttaaaagtcttaatttttttttctttaccaaaagcagttatatttctgaaaagctgagttttaaagatggatttggaaggaagaatggtgcctgactcttaagttctataatatttttcaattaaaagctggtgctggctgggcatggtggctcacacttataatctcagcactttgggaggccaaggcgggtggatcacctgaagtcaggagttcgagacctgcctggccagcatagtgaaaccccatctctactaaaaaaagaaaaaaaaattaaccaggcgtggcagcatgcgcctgtgatcccagctatactcaggaggctgcggcaggagaattgcttgaacccagtaggcaaaggttgcagtgagccgagactgcgccattgcactccagcctgggcaacagagcaaaaactccatctcgaaaaaagaaaaaacgaacaaggcagagaggtctctcatcttgagaacagacccatggtaagatttattttactttaacaagaagtctaaggctgagagtggtggctcacacttgtaatcctagcactttgggaggcccaggcaggcgcatcacttgaggtcaggagtttgaaaccagcctggccaacaggtgaaaccctgtctctactaaaaatacaaaaaaattagccgggcatggtggtgggcccctgtagtcccagctactcggaaggctgaggcacgagaatcgcttgagcccgggaggcagaggttgcagtgagctgagatcacgccactgtactcccacctgggcgacagagggagactccaactcaaaaaaaaaaaaaaaaaaaaaaaaaagaagtgtatatgacaatagagaaatccttatttgggtgctgttgtttctttccagcacaagttcacaaaataagctagggaaaatcccccccgcccgggaaatgtcttggttgatttcccgtttgctctcttagagcattttcagacacctgctctatctttctgcccaaagatagagatgctgggtgggtttctatgttctagggatagaaggcaaggacttggtcactgtaacacagaactgagctagccacttgggtgtctggttggcaagttgccctggtaactccttgtttaaattgtaaactagatagaccttcaaagctacaattatgaaagtgtactaacagccacagcccaacagaaatgaaaatgtacaagcaagtacatttgcaatttttaattagcttttttttttttgagatgaagtctccctctgtcgccaggctggagtgcagtggcgcgatctcgactcacagcaacctccgtctcccgggttcaagcgattttcctgcctcatcctcccgagtagctgggtctacaggcgcgcgccactatgcccagctaatttctgtatttttagcagagacgtttcaccatgttgggcaggatggtctcacctcttgatttcgtgatccgcttgcctcggcctcccaaagtgctgggattacaagcgtgagccacggagcccgtccaatttttaattaacacttttttaatacttctttaattattgtttaaaccaagttttccagcctccttcattagcctgtttggtatttgcatgctttgcttgaatattttatctccagcccattccacaccgttagtcaacattttcatctgacagacggaatcaaggcctaggcctcccttaaacaaaacatccctcccaaaagtaccacttataaaaattgcttgccacagacattcttgctacagacattctttgcggatctttggccagtaacatgcatatacccacacatagtttgcaaataacaactattcaacgtgaagtgctacaaaagtacgatgataaagtgctcgccgcttgaagaaaagcactaataattgtaacaaagccaaaacacacacacacacaacgaaaaaaaacgcacggtaagccaagagctctttaaaaataaaaaataatcattctcgggaacaaataaggtaggtacaaacttgccaggtgactctgttacgcttaaaggttctggctgtcaacagtccccggcgtggtggcggcggcaccctcagtcccatccgactgagggcgttgatgcgggagcctcggggctgcgggactgttcgggataggacgcgagagcacctggacaaaggcctgaggcggctgtgcagaacagggagtggccccgaggcccgggtttgtcttcccttccggtcacccctcccggcccaatgtccccaggcccctgcttaccccgctgggcgccgtatccctgcgctcggcgccgcgctccggagcgagttgacagccgcggcaggcgaaggcgcggcagagaggggggagaaaggtcttcttccccgcccgcaagaccaccatggccccacgccccctggctcccgcggcgcacggcagcattgcgacggcgcgaggggccgctttacggcagggtcgcgaagcccgaggaagcgcggcggcgcggccgaccgtgcgctttcccagcggtgcgacggggtgagggggcggcgggcggcgcgggctgacccgggcggccgctccttggtcgcggtcactccaggctgcctcgctgcgccgctggcggtgggcgtggcgctgccggcggctaggcgcggacgccggaggaggtgtccccgggtttaggggtgttcggccaggggcggggctgccgggcccgggcgactgccggagctgcggaagtcgtggaagcgtcggcgacgcatcgcgcgatggcgcgggcgggacaggtgagcgaagcgcggcttgtagccttttccctctctcggggggacgagtggggcaccacctccgcgcggggctccccgctgggccaccccttcgccagcgcccagccccgtgcggcctgtcggatcaggcagggcagagtcggtctcggcgctgtccccgcccctggggtcggaagcgaccggggctggccgggcctggtctctggtgtctccggccgggcctcggttcccctcctcccccggcttcccccggccgggccgagctcccctcgcgcgcccattgtgaggtcacgtcctgcaggcgcgccctggcacccgggccaagacgcccggagcggctgctgcagccagtagcggccccttcaccggctgccccgctcagacctagtcgggaggggtgcgaggcatgcagctgggggcccagctccggtgccgcaccccgtaaagggctgatcttccacctcgccacctcagccacgggacgccaagaccgcatccaattcagacttcttttgggtaaagggccaagagggaagggcgaggcggggaggaagcagctcgggccgccttccctccgtggcctccaggacatccgccggggatagattatgcgtttccattggttacccaccttgagcgagccgtttgatagaaaccaagagcttgaaacgtgcattaggccattgtggactcccagtgggaggcgagtgaatgaattattcatagttaccacgttttcgcgggttgtttttttttgagagagtggagcatgttgggggctgaggaggtgttgggcctcgaaagcccaaggtggtgcccttcagcgctgtcccggtcgctcttctttacctgtggggttttaatctcttcagggagacttctgtgagggaagatgtgtgaggagctaaaagggtggggaggggaagtgcacaaagggatggagagaaacgaagaagcggggaccttggggatgtctgagagccactggtttttgttctggttctttcttttgcttagagtttctggaaactaggcatagctgtgtggcggggcggggtactgttagtgttcggaaggttacaagagctactgtttcacctttcataaaggtgccctgctggttccaaatagtttgtgtcgcgtacggtgactcacaccttaatcccagcactttgggaggcggaggcgggcggatcgtctgagaccagcctgggcaatatagtgagacctgtctctactaaaaataacattagctgggcgtagtggtgtacgactgtagacccagctactggggaggctgaggtgggatgactgctcagaagtatacctttttaaaatgagaattttagaatgacttaatataccattagtgttctgcagaagccttgtgctgtagtaagttatcattcttgtcgtcttttagtgcttgtgaaactgaacacaacaaaagtatggatatgggaaaccaacatccttctattagtaggcttcaggaaatccaaaaggaagtaaaaagtgtagaacagcaagttatcggcttcagtggtctgtcagatgacaagaattacaagaaactggagaggattctaacaaaacagctttttgaaatagactctgtagatactgaaggaaaaggagatattcagcaagctaggaagcgggcagcacaggagacagaacgtcttctcaaagagttggagcagaatgcaaaccacccacaccggattgaaatacagaacatttttgaggaagcccagtccctcgtgagagagaaaattgtgccattttataatggaggcaactgcgtaactgatgagtttgaagaaggcatccaagatatcattctgaggctgacacatgttaaaactggaggaaaaatctccttgcggaaagcaaggtatcacactttaaccaaaatctgtgcggtgcaagagataatcgaagactgcatgaaaaagcagccttccctgccgctttccgaggatgcacatccttccgttgccaaaatcaacttcgtgatgtgtgaggtgaacaaggcccgaggggtcctgattgcacttctgatgggtgtgaacaacaatgagacctgcaggcacttatcctgtgtgctctcggggctgatcgctgacctggatgctctagatgtgtgcggccggacagaaatcagaaattatcggagggaggtagtagaagatatcaacaaattattgaaatatctggatttggaagaggaagcagacacaactaaagcatttgacctgagacagaatcattccattttaaaaatagaaaaggtcctcaagagaatgagagaaataaaaaatgaacttctccaagcacaaaacccttctgaattgtacctgagctccaaaacagaattgcagggtttaattggacagttggatgaggtaagtcttgaaaaaaacccctgcatccgggaagccaggagaagagcagtgatcgaggtgcaaactctgatcacatatattgacttgaaggaggcccttgagaaaagaaagctgtttgcttgtgaggagcacccatcccataaagccgtctggaacgtccttggaaacttgtctgagatccagggagaagttctttcatttgatggaaatcgaaccgataagaactacatccggctggaagagctgctcaccaagcagctgctagccctggatgctgttgatccgcagg

SEQ ID NO: 702 - DNA, 6000 bp, Homo sapiens
aggcatgcgccaccacgcccggctaatttttgtattttcagtagagacggtgtttcaccacgttggccaggctggtcttgaattcctgacctcagatgatccacctgcctcggccttccaacgtgctgagattacaggcacgagccaccgcgccctgccaaaaaaattttaaaaatcagccaggtgcggtggcacatgcctgtagccccagctactaaagaggctgaggcaggaagattacttgagccagtgaggttgaggctgtggtgagctatgtttgtgccactgcactccagcctgggcaacagagcaagaccctatgtccaaaaaagggaaaaatatggttatttgtggacttgttccaaccctcctcctctcagaagttaggtgcccaacaggcaggcccagggtggtgctcccttgcatcctcaggagaccctgcctggagctgcaaacaataaacttctgatagattccaaagatggacatggtggattcagccattctccataagcatcaacctgcctgcccctgcaccaccatgcaaaggccaagcactgctctaggcaccagggaggcatgtgttagcatgcagagctcctgcctggagagccatctgtgcatgtgtgaaaagaggcacacacattcatttctgtatctctggcacctcatgaagaacctgtgcaggaaatgccaaccaccctgagacaaatgtttccattggtgttttaagcaccacaatacaggacacggttttcaaaaatacatgagactttatcagatgtcttgtttaaatcaatatgcaatggctcactcttttttttctttttgagaatgagtcttggtccatcgcccaggctggagtgcaatggcgcgatctcggctcactgcaacctctgcctcctgggttcaagcgattctcccgcctcagcctcccaactagctgggattacaggtaccaccatcatgcccggctaatttttgtatttttgtagagacaggatttcaccatgttggccgggctggtcttgaactcctgacctcaggtgatctgcctgcctcagtctcccaaagtgctggcaaggtgtgagccaccatgcctggccggatcactcttatttaccagtttagtaactctaaccagaaagaagatggggttaaactctaaccaaaaagaagatggggttaaaatggcttgttcttatgaaaactcaggttcaaatgacttgtaggttctaccagtcacagaaaaattcaaaccttagtaaacaatccacggaaacaggaaaagaaggcataccctacagctcatttttgaagctaaaagtgactttgggccaggcacagtggctcatacctgtaatcccagcactttgggaggctgaggtgagcagatcacctgaggtcaggagttcaagaccaccctggccaacatggtgaaacccgtctctacaaaaaatacaaaaattagccgggcatggtggtaggcacctgtaatcccagctactcaggaggctgaggcaggagaattgcttgaacccgggcggtggaggttgcagtgagctgagatcacgccactgcactccagcctgggtgacagagcaagactccatctcaaaaaaaaaaaaaaattaaaaaaaaaggtggggaggtgatggaggcagaacctatggattaaaaagaactaaaagggagtatctctgaacctattctggttcaggaacttccggattaaagaaaaaaaaagaactaaaagagtcagactaattcttacgtgcaaacaagtttaggaaccaatgatgcaaactacataggtaagacataagcaggcatgaagtggctagggaacagaatttaaaagtcttaatttttttttctttaccaaaagcagttatatttctgaaaagctgagttttaaagatggatttggaaggaagaatggtgcctgactcttaagttctataatatttttcaattaaaagctggtgctggctgggcatggtggctcacacttataatctcagcactttgggaggccaaggcgggtggatcacctgaagtcaggagttcgagacctgcctggccagcatagtgaaaccccatctctactaaaaaaagaaaaaaaaattaaccaggcgtggcagcatgcgcctgtgatcccagctatactcaggaggctgcggcaggagaattgcttgaacccagtaggcaaaggttgcagtgagccgagactgcgccattgcactccagcctgggcaacagagcaaaaactccatctcgaaaaaagaaaaaacgaacaaggcagagaggtctctcatcttgagaacagacccatggtaagatttattttactttaacaagaagtctaaggctgagagtggtggctcacacttgtaatcctagcactttgggaggcccaggcaggcgcatcacttgaggtcaggagtttgaaaccagcctggccaacaggtgaaaccctgtctctactaaaaatacaaaaaaattagccgggcatggtggtgggcccctgtagtcccagctactcggaaggctgaggcacgagaatcgcttgagcccgggaggcagaggttgcagtgagctgagatcacgccactgtactcccacctgggcgacagagggagactccaactcaaaaaaaaaaaaaaaaaaaaaaaaaagaagtgtatatgacaatagagaaatccttatttgggtgctgttgtttctttccagcacaagttcacaaaataagctagggaaaatcccccccgcccgggaaatgtcttggttgatttcccgtttgctctcttagagcattttcagacacctgctctatctttctgcccaaagatagagatgctgggtgggtttctatgttctagggatagaaggcaaggacttggtcactgtaacacagaactgagctagccacttgggtgtctggttggcaagttgccctggtaactccttgtttaaattgtaaactagatagaccttcaaagctacaattatgaaagtgtactaacagccacagcccaacagaaatgaaaatgtacaagcaagtacatttgcaatttttaattagcttttttttttttgagatgaagtctccctctgtcgccaggctggagtgcagtggcgcgatctcgactcacagcaacctccgtctcccgggttcaagcgattttcctgcctcatcctcccgagtagctgggtctacaggcgcgcgccactatgcccagctaatttctgtatttttagcagagacgtttcaccatgttgggcaggatggtctcacctcttgatttcgtgatccgcttgcctcggcctcccaaagtgctgggattacaagcgtgagccacggagcccgtccaatttttaattaacacttttttaatacttctttaattattgtttaaaccaagttttccagcctccttcattagcctgtttggtatttgcatgctttgcttgaatattttatctccagcccattccacaccgttagtcaacattttcatctgacagacggaatcaaggcctaggcctcccttaaacaaaacatccctcccaaaagtaccacttataaaaattgcttgccacagacattcttgctacagacattctttgcggatctttggccagtaacatgcatatacccacacatagtttgcaaataacaactattcaacgtgaagtgctacaaaagtacgatgataaagtgctcgccgcttgaagaaaagcactaataattgtaacaaagccaaaacacacacacacacaacgaaaaaaaacgcacggtaagccaagagctctttaaaaataaaaaataatcattctcgggaacaaataaggtaggtacaaacttgccaggtgactctgttacgcttaaaggttctggctgtcaacagtccccggcgtggtggcggcggcaccctcagtcccatccgactgagggcgttgatgcgggagcctcggggctgcgggactgttcgggataggacgcgagagcacctggacaaaggcctgaggcggctgtgcagaacagggagtggccccgaggcccgggtttgtcttcccttccggtcacccctcccggcccaatgtccccaggcccctgcttaccccgctgggcgccgtatccctgcgctcggcgccgcgctccggagcgagttgacagccgcggcaggcgaaggcgcggcagagaggggggagaaaggtcttcttccccgcccgcaagaccaccatggccccacgccccctggctcccgcggcgcacggcagcattgcgacggcgcgaggggccgctttacggcagggtcgcgaagcccgaggaagcgcggcggcgcggccgaccgtgcgctttcccagcggtgcgacggggtgagggggcggcgggcggcgcgggctgacccgggcggccgctccttggtcgcggtcactccaggctgcctcgctgcgccgctggcggtgggcgtggcgctgccggcggctaggcgcggacgccggaggaggtgtccccgggtttaggggtgttcggccaggggcggggctgccgggcccgggcgactgccggagctgcggaagtcgtggaagcgtcggcgacgcatcgcgcgatggcgcgggcgggacaggtgagcgaagcgcggcttgtagccttttccctctctcggggggacgagtggggcaccacctccgcgcggggctccccgctgggccaccccttcgccagcgcccagccccgtgcggcctgtcggatcaggcagggcagagtcggtctcggcgctgtccccgcccctggggtcggaagcgaccggggctggccgggcctggtctctggtgtctccggccgggcctcggttcccctcctcccccggcttcccccggccgggccgagctcccctcgcgcgcccattgtgaggtcacgtcctgcaggcgcgccctggcacccgggccaagacgcccggagcggctgctgcagccagtagcggccccttcaccggctgccccgctcagacctagtcgggaggggtgcgaggcatgcagctgggggcccagctccggtgccgcaccccgtaaagggctgatcttccacctcgccacctcagccacgggacgccaagaccgcatccaattcagacttcttttgggtaaagggccaagagggaagggcgaggcggggaggaagcagctcgggccgccttccctccgtggcctccaggacatccgccggggatagattatgcgtttccattggttacccaccttgagcgagccgtttgatagaaaccaagagcttgaaacgtgcattaggccattgtggactcccagtgggaggcgagtgaatgaattattcatagttaccacgttttcgcgggttgtttttttttgagagagtggagcatgttgggggctgaggaggtgttgggcctcgaaagcccaaggtggtgcccttcagcgctgtcccggtcgctcttctttacctgtggggttttaatctcttcagggagacttctgtgagggaagatgtgtgaggagctaaaagggtggggaggggaagtgcacaaagggatggagagaaacgaagaagcggggaccttggggatgtctgagagccactggtttttgttctggttctttcttttgcttagagtttctggaaactaggcatagctgtgtggcggggcggggtactgttagtgttcggaaggttacaagagctactgtttcacctttcataaaggtgccctgctggttccaaatagtttgtgtcgcgtacggtgactcacaccttaatcccagcactttgggaggcggaggcgggcggatcgtctgagaccagcctgggcaatatagtgagacctgtctctactaaaaataacattagctgggcgtagtggtgtacgactgtagacccagctactggggaggctgaggtgggatgactgctcagaagtatacctttttaaaatgagaattttagaatgacttaatatacca

SEQ ID NO: 703 - DNA, 6000 bp, Homo sapiens
tgggcaacaaagtgagaccccatctctataaaaaaaatttttgttttcagtctctgtagagactgtcaaaaattgccagtgctgactatattgcaagtcatcacggcagggtattgggaaaagttttcaattatcaataatcacacctcagataaatctcattggctacaatactgccgctgtgcaaagctacaaaaaaaaatttttttttttttttttttttgagaaagagtctcgcattgttgcccaggctggagtgcagtggcgcgatcttggctcactgcagcctccgcctaccaggttcaagcaattctcctgcctcagcctcccgagtagctgggattacaggcatgcgccaccacgcccggctaatttttgtattttcagtagagacggtgtttcaccacgttggccaggctggtcttgaattcctgacctcagatgatccacctgcctcggccttccaacgtgctgagattacaggcacgagccaccgcgccctgccaaaaaaattttaaaaatcagccaggtgcggtggcacatgcctgtagccccagctactaaagaggctgaggcaggaagattacttgagccagtgaggttgaggctgtggtgagctatgtttgtgccactgcactccagcctgggcaacagagcaagaccctatgtccaaaaaagggaaaaatatggttatttgtggacttgttccaaccctcctcctctcagaagttaggtgcccaacaggcaggcccagggtggtgctcccttgcatcctcaggagaccctgcctggagctgcaaacaataaacttctgatagattccaaagatggacatggtggattcagccattctccataagcatcaacctgcctgcccctgcaccaccatgcaaaggccaagcactgctctaggcaccagggaggcatgtgttagcatgcagagctcctgcctggagagccatctgtgcatgtgtgaaaagaggcacacacattcatttctgtatctctggcacctcatgaagaacctgtgcaggaaatgccaaccaccctgagacaaatgtttccattggtgttttaagcaccacaatacaggacacggttttcaaaaatacatgagactttatcagatgtcttgtttaaatcaatatgcaatggctcactcttttttttctttttgagaatgagtcttggtccatcgcccaggctggagtgcaatggcgcgatctcggctcactgcaacctctgcctcctgggttcaagcgattctcccgcctcagcctcccaactagctgggattacaggtaccaccatcatgcccggctaatttttgtatttttgtagagacaggatttcaccatgttggccgggctggtcttgaactcctgacctcaggtgatctgcctgcctcagtctcccaaagtgctggcaaggtgtgagccaccatgcctggccggatcactcttatttaccagtttagtaactctaaccagaaagaagatggggttaaactctaaccaaaaagaagatggggttaaaatggcttgttcttatgaaaactcaggttcaaatgacttgtaggttctaccagtcacagaaaaattcaaaccttagtaaacaatccacggaaacaggaaaagaaggcataccctacagctcatttttgaagctaaaagtgactttgggccaggcacagtggctcatacctgtaatcccagcactttgggaggctgaggtgagcagatcacctgaggtcaggagttcaagaccaccctggccaacatggtgaaacccgtctctacaaaaaatacaaaaattagccgggcatggtggtaggcacctgtaatcccagctactcaggaggctgaggcaggagaattgcttgaacccgggcggtggaggttgcagtgagctgagatcacgccactgcactccagcctgggtgacagagcaagactccatctcaaaaaaaaaaaaaaattaaaaaaaaaggtggggaggtgatggaggcagaacctatggattaaaaagaactaaaagggagtatctctgaacctattctggttcaggaacttccggattaaagaaaaaaaaagaactaaaagagtcagactaattcttacgtgcaaacaagtttaggaaccaatgatgcaaactacataggtaagacataagcaggcatgaagtggctagggaacagaatttaaaagtcttaatttttttttctttaccaaaagcagttatatttctgaaaagctgagttttaaagatggatttggaaggaagaatggtgcctgactcttaagttctataatatttttcaattaaaagctggtgctggctgggcatggtggctcacacttataatctcagcactttgggaggccaaggcgggtggatcacctgaagtcaggagttcgagacctgcctggccagcatagtgaaaccccatctctactaaaaaaagaaaaaaaaattaaccaggcgtggcagcatgcgcctgtgatcccagctatactcaggaggctgcggcaggagaattgcttgaacccagtaggcaaaggttgcagtgagccgagactgcgccattgcactccagcctgggcaacagagcaaaaactccatctcgaaaaaagaaaaaacgaacaaggcagagaggtctctcatcttgagaacagacccatggtaagatttattttactttaacaagaagtctaaggctgagagtggtggctcacacttgtaatcctagcactttgggaggcccaggcaggcgcatcacttgaggtcaggagtttgaaaccagcctggccaacaggtgaaaccctgtctctactaaaaatacaaaaaaattagccgggcatggtggtgggcccctgtagtcccagctactcggaaggctgaggcacgagaatcgcttgagcccgggaggcagaggttgcagtgagctgagatcacgccactgtactcccacctgggcgacagagggagactccaactcaaaaaaaaaaaaaaaaaaaaaaaaaagaagtgtatatgacaatagagaaatccttatttgggtgctgttgtttctttccagcacaagttcacaaaataagctagggaaaatcccccccgcccgggaaatgtcttggttgatttcccgtttgctctcttagagcattttcagacacctgctctatctttctgcccaaagatagagatgctgggtgggtttctatgttctagggatagaaggcaaggacttggtcactgtaacacagaactgagctagccacttgggtgtctggttggcaagttgccctggtaactccttgtttaaattgtaaactagatagaccttcaaagctacaattatgaaagtgtactaacagccacagcccaacagaaatgaaaatgtacaagcaagtacatttgcaatttttaattagcttttttttttttgagatgaagtctccctctgtcgccaggctggagtgcagtggcgcgatctcgactcacagcaacctccgtctcccgggttcaagcgattttcctgcctcatcctcccgagtagctgggtctacaggcgcgcgccactatgcccagctaatttctgtatttttagcagagacgtttcaccatgttgggcaggatggtctcacctcttgatttcgtgatccgcttgcctcggcctcccaaagtgctgggattacaagcgtgagccacggagcccgtccaatttttaattaacacttttttaatacttctttaattattgtttaaaccaagttttccagcctccttcattagcctgtttggtatttgcatgctttgcttgaatattttatctccagcccattccacaccgttagtcaacattttcatctgacagacggaatcaaggcctaggcctcccttaaacaaaacatccctcccaaaagtaccacttataaaaattgcttgccacagacattcttgctacagacattctttgcggatctttggccagtaacatgcatatacccacacatagtttgcaaataacaactattcaacgtgaagtgctacaaaagtacgatgataaagtgctcgccgcttgaagaaaagcactaataattgtaacaaagccaaaacacacacacacacaacgaaaaaaaacgcacggtaagccaagagctctttaaaaataaaaaataatcattctcgggaacaaataaggtaggtacaaacttgccaggtgactctgttacgcttaaaggttctggctgtcaacagtccccggcgtggtggcggcggcaccctcagtcccatccgactgagggcgttgatgcgggagcctcggggctgcgggactgttcgggataggacgcgagagcacctggacaaaggcctgaggcggctgtgcagaacagggagtggccccgaggcccgggtttgtcttcccttccggtcacccctcccggcccaatgtccccaggcccctgcttaccccgctgggcgccgtatccctgcgctcggcgccgcgctccggagcgagttgacagccgcggcaggcgaaggcgcggcagagaggggggagaaaggtcttcttccccgcccgcaagaccaccatggccccacgccccctggctcccgcggcgcacggcagcattgcgacggcgcgaggggccgctttacggcagggtcgcgaagcccgaggaagcgcggcggcgcggccgaccgtgcgctttcccagcggtgcgacggggtgagggggcggcgggcggcgcgggctgacccgggcggccgctccttggtcgcggtcactccaggctgcctcgctgcgccgctggcggtgggcgtggcgctgccggcggctaggcgcggacgccggaggaggtgtccccgggtttaggggtgttcggccaggggcggggctgccgggcccgggcgactgccggagctgcggaagtcgtggaagcgtcggcgacgcatcgcgcgatggcgcgggcgggacaggtgagcgaagcgcggcttgtagccttttccctctctcggggggacgagtggggcaccacctccgcgcggggctccccgctgggccaccccttcgccagcgcccagccccgtgcggcctgtcggatcaggcagggcagagtcggtctcggcgctgtccccgcccctggggtcggaagcgaccggggctggccgggcctggtctctggtgtctccggccgggcctcggttcccctcctcccccggcttcccccggccgggccgagctcccctcgcgcgcccattgtgaggtcacgtcctgcaggcgcgccctggcacccgggccaagacgcccggagcggctgctgcagccagtagcggccccttcaccggctgccccgctcagacctagtcgggaggggtgcgaggcatgcagctgggggcccagctccggtgccgcaccccgtaaagggctgatcttccacctcgccacctcagccacgggacgccaagaccgcatccaattcagacttcttttgggtaaagggccaagagggaagggcgaggcggggaggaagcagctcgggccgccttccctccgtggcctccaggacatccgccggggatagattatgcgtttccattggttacccaccttgagcgagccgtttgatagaaaccaagagcttgaaacgtgcattaggccattgtggactcccagtgggaggcgagtgaatgaattattcatagttaccacgttttcgcgggttgtttttttttgagagagtggagcatgttgggggctgaggaggtgttgggcctcgaaagcccaaggtggtgcccttcagcgctgtcccggtcgctcttctttacctgtggggttttaatctcttcagggagacttctgtgagggaagatgtgtgaggagctaaaagggtggggaggggaagtgcacaaagggatggagagaaacgaagaagcggggaccttggggatgtctgagagccactggtttttgttctggttctttcttttgcttagagt

SEQ ID NO: 704 - DNA, 6000 bp, Homo sapiens
taaataaaaaataaaaactcttcctcaagattttaagagcattctaaaattatgatacagaaaagcaatcctacaactactgtggccaaaacgtggattccaatgacctgccttgagcccgcggttgccaggagttggacctgcagtagtatgggaagctcacggcctaaataccgactgccctctgaccccaccgtccagcgattctagaacatttctagtaggaaagacatagcaagggattttcatgattgggaaatactgagagacaagctgaagatttgttaagggctatgcttctgtcatcttttaggtatttaaggctactcctttagctagctactttgagctgtttaaagtgactatctccctacacagagttacacaatgagcatctctgaaagagaatattaccctggatttccaaagatgtactctaacaggatgaccaggcaaaaggtgacccgggggaggagtctgttataacactcggacccacatgttctcaaggcacttcagaactttgggaaatcattttgtaccggatcctcagaaagcatttatggaaatacacatcctttagaagagagatgcttcacgcacgactgactttaatggctctttcaggcaacagagaaaccaccacatgcccatgacatgagctcagttgttcagcaggcacccagaggaagcctttaattccgagcaggtttcactgattggtcctggagcaggtgtagttatgacatttactaagtgagtggttaacagctgactgcctagaaaacctaggaaggcctggtccctctgggttactgacagcgtctaccctcacgttgtaaaacagcaccggggaggtgtgacaaggctgtccattttacagccttggacaacagaagagaaccattatgtgctacattcagactttctgatttagttttagtataacctgacattggtaacccgtctccagtattcatcctccaactacaggtatgagtgtttcctttttttttttttaaaggcccattaacttaatttaaatgttcccatccttatgaatttactcactaaggaaaactataagctcagattttacaaacaaaagcaacttacaaggtattattgctggtcctttatcccttctctttaatgcaatctcaaaggttttttggctattagttttcataattttcttatgttgcacacaaaaacaagattcctctctaaaacgtagaggatggggaaaatgcagatgctgtttttccaactaaaaatgtttacaaaagaacagactgtctgaacaaacaaaaaaaccccaccccgttaagctgggtaggaccaatcaggccttataagtgaaaaaaaagccttctatcgagcataatgaaacagaacatgtactgcttgtgtttgaaccttactcttatttaaccaaaaatttcccctttctcataattttcctagtattatgtaaggttatgcctagttctagattctgaaagacctgcattttaatgcttgcacaacccatttaaaatctacaaaagctgcctctattttgttttctgattaaaaacgcaaaaaaaaggacaaaccaaacaaaccacaccacatcatacagataatgatccgaatggaaaagttaacgtgctgtaatgatatttgtcttgcaacatcaaaagcagcagatactgaatagaatttgcttcaatcataaatactgagactgaaatatgcacgtataaatcaatgaactgaaagctctctatacatagaagcacatatgaagtgcaaaacagtatcaaaagtgagatctctggtatttcagtactcccattcatcagatttcaggtcgagatagctgagaatattctgcgcaagcctcacagcttgtttcctggcagccttacacttctcttctccctgcggatcaacagcatccagggctagcagctgcttggtgagcagctcttccagccggatgtagttcttatcggttcgatttccatcaaatgaaagaacttctccctggatctcagacaagtttccaaggacgttccagacggctttatgggatgggtgctcctcacaagcaaacagctttcttttctcaagggcctccttcaagtcaatatatgtgatcagagtttgcacctcgatcactgctcttctcctggcttcccggatgcaggggtttttttcaagacttacctcatccaactgtccaattaaaccctgcaattctgttttggagctcaggtacaattcagaagggttttgtgcttggagaagttcattttttatttctctcattctcttgaggaccttttctatttttaaaatggaatgattctgtctcaggtcaaatgctttagttgtgtctgcttcctcttccaaatccagatatttcaataatttgttgatatcttctactacctccctccgataatttctgatttctgtccggccgcacacatctagagcatccaggtcagcgatcagccccgagagcacacaggataagtgcctgcaggtctcattgttgttcacacccatcagaagtgcaatcaggacccctcgggccttgttcacctcacacatcacgaagttgattttggcaacggaaggatgtgcatcctcggaaagcggcagggaaggctgctttttcatgcagtcttcgattatctcttgcaccgcacagattttggttaaagtgtgataccttgctttccgcaaggagatttttcctccagttttaacatgtgtcagcctcagaatgatatcttggatgccttcttcaaactcatcagttacgcagttgcctccattataaaatggcacaattttctctctcacgagggactgggcttcctcaaaaatgttctgtatttcaatccggtgtgggtggtttgcattctgctccaactctttgagaagacgttctgtctcctgtgctgcccgcttcctagcttgctgaatatctccttttccttcagtatctacagagtctatttcaaaaagctgttttgttagaatcctctccagtttcttgtaattcttgtcatctgacagaccactgaagccgataacttgctgttctacactttttacttccttttggatttcctgaagcctactaatagaaggatgttggtttcccatatccatacttttgttgtgttcagtttcacaagcactaaaagacgacaagaatgataacttactacagcacaaggcttctgcagaacactaatggtatattaagtcattctaaaattctcattttaaaaaggtatacttctgagcagtcatcccacctcagcctccccagtagctgggtctacagtcgtacaccactacgcccagctaatgttatttttagtagagacaggtctcactatattgcccaggctggtctcagacgatccgcccgcctccgcctcccaaagtgctgggattaaggtgtgagtcaccgtacgcgacacaaactatttggaaccagcagggcacctttatgaaaggtgaaacagtagctcttgtaaccttccgaacactaacagtaccccgccccgccacacagctatgcctagtttccagaaactctaagcaaaagaaagaaccagaacaaaaaccagtggctctcagacatccccaaggtccccgcttcttcgtttctctccatccctttgtgcacttcccctccccacccttttagctcctcacacatcttccctcacagaagtctccctgaagagattaaaaccccacaggtaaagaagagcgaccgggacagcgctgaagggcaccaccttgggctttcgaggcccaacacctcctcagcccccaacatgctccactctctcaaaaaaaaacaacccgcgaaaacgtggtaactatgaataattcattcactcgcctcccactgggagtccacaatggcctaatgcacgtttcaagctcttggtttctatcaaacggctcgctcaaggtgggtaaccaatggaaacgcataatctatccccggcggatgtcctggaggccacggagggaaggcggcccgagctgcttcctccccgcctcgcccttccctcttggccctttacccaaaagaagtctgaattggatgcggtcttggcgtcccgtggctgaggtggcgaggtggaagatcagccctttacggggtgcggcaccggagctgggcccccagctgcatgcctcgcacccctcccgactaggtctgagcggggcagccggtgaaggggccgctactggctgcagcagccgctccgggcgtcttggcccgggtgccagggcgcgcctgcaggacgtgacctcacaatgggcgcgcgaggggagctcggcccggccgggggaagccgggggaggaggggaaccgaggcccggccggagacaccagagaccaggcccggccagccccggtcgcttccgaccccaggggcggggacagcgccgagaccgactctgccctgcctgatccgacaggccgcacggggctgggcgctggcgaaggggtggcccagcggggagccccgcgcggaggtggtgccccactcgtccccccgagagagggaaaaggctacaagccgcgcttcgctcacctgtcccgcccgcgccatcgcgcgatgcgtcgccgacgcttccacgacttccgcagctccggcagtcgcccgggcccggcagccccgcccctggccgaacacccctaaacccggggacacctcctccggcgtccgcgcctagccgccggcagcgccacgcccaccgccagcggcgcagcgaggcagcctggagtgaccgcgaccaaggagcggccgcccgggtcagcccgcgccgcccgccgccccctcaccccgtcgcaccgctgggaaagcgcacggtcggccgcgccgccgcgcttcctcgggcttcgcgaccctgccgtaaagcggcccctcgcgccgtcgcaatgctgccgtgcgccgcgggagccagggggcgtggggccatggtggtcttgcgggcggggaagaagacctttctcccccctctctgccgcgccttcgcctgccgcggctgtcaactcgctccggagcgcggcgccgagcgcagggatacggcgcccagcggggtaagcaggggcctggggacattgggccgggaggggtgaccggaagggaagacaaacccgggcctcggggccactccctgttctgcacagccgcctcaggcctttgtccaggtgctctcgcgtcctatcccgaacagtcccgcagccccgaggctcccgcatcaacgccctcagtcggatgggactgagggtgccgccgccaccacgccggggactgttgacagccagaacctttaagcgtaacagagtcacctggcaagtttgtacctaccttatttgttcccgagaatgattattttttatttttaaagagctcttggcttaccgtgcgttttttttcgttgtgtgtgtgtgtgttttggctttgttacaattattagtgcttttcttcaagcggcgagcactttatcatcgtacttttgtagcacttcacgttgaatagttgttatttgcaaactatgtgtgggtatatgcatgttactggccaaagatccgcaaagaatgtctgtagcaagaatgtctgtggcaagcaatttttataagtggtacttttgggagggatgttttgtttaagggaggcctaggccttgattccgtctgtcagatgaaaatgttgactaacggtgtggaatgggctggagataaaatattcaagcaaagcatgcaaataccaaacaggctaatgaaggaggctggaaaacttggtttaaacaataattaaagaagtattaaaaaagtgttaattaaaaattggacgggctccgtggctcacgcttgtaatcccagcactttgggaggccgaggcaagcggatcacgaaatcaagaggtgagaccatcctgcccaacatggtgaaacgtctctgctaaa

SEQ ID NO: 705 - DNA, 6000 bp, Homo sapiens
taattgttattggatttcttgttaatctactgattcaggccaggcatggtggctcacgcctgtaatctcagcactttgggaggccgaggcgggtggatcacctgaggtcaggggttcaagaccaggctggccaacatggtgagacccctccccccccgccaccatctctactaaaaatacaaaaatcagctgggtgtggtggcgtgcacctgtactcccagctacttgggaggctgaggcaggagaatcacttgaacctgggaggcggaggttgcagtgaaccgagattgcaccactgcactacagcctgggcaacagattaaaaaaaacctactgatccagatctagcagcagctctcatgaccaacagtgttgaagcaggaacaaaaatgaggcttcaagacgccgaagcaactgaaacacgatgggaaaatacacaggactttgctgacggtggagtcccaggttctgtggagaccgctaggtcctttggccacattcactattgaggaacactcactttagcctagaggctggtgaaagtaaagatgcaacgtttttccatccaagttcagggacacctgaatcccatgatcagtaggttctagtttagaacccggctgcagagtttacacctgagtgtggtgattacatcttcaccgtttcctgatttttatcccatgatcagtagcttctagtttagaaatccggctgcagagtttacacctgagtgtggttattacatcttcaccgtttcctgatttttatcccacgatcagtaggttctagtttagaaacccggctacagagtttacacctgagtgtggtcattacatctttgccgtttcctgatttttagaaaaaaaaaaaaaaaaaacctgtgatctgaaccaaggtaattgatctccctcccttcctacaggtgtccacgcccttggggaaggttataggggttggatgtgcttttgaccccaagggctccctacgtagcccaggccagcctggggcttggaggagggcgggtgagctgatgagaacctcctccatgctcagcttccacctgctggcatctgtgtgcccagcacacaaagcctgggcaacgggcgactcctgtgagcagagcttcaccctcttcccctctcactaccccccaccccacctgcagcccctctcctccctccccttggttcgagatgaccccaactcccccggagatttctactgggatctggtttggtttttgctttttatgatcccctaaacccatcttcacctccctgctagggctccccaggttgactggggaggaccccacattccccatgattccacgcagcaaaaggcacttctggcaggaacccgcatcccagggcaggccctggggcaccttgggctggggaagactgcggccccaaaatctccactccctgcgctgccatctgaaacaccaccatgatggataatgtcttacctagggagaaggcacctgtgctggaaaaggagacccaagagacccgcctggaccgtgtgggtgagaccatcgcaccctcctgccgagggagaaggcacctgtgctggctaaaaggggtcccaagagaactgcctggacagtgtgggtgaggccattgcaccctcctgccgagacggtgggccctgctacagagcctgatgcccctgaggagctgggaccactgtcctcccaatacacatacacacacaaacacacacagagacacacaccgacacaaacacacagacacacagaaacacacacaaacacagacacacacacagacacacacaaacacacagacacacacaaacccacacacacacaaacacacagatgcaaacacacacacacagacacacacacacagacacacagaaacacacagacacacacaaacccacacacacacacagatgcaaacacacacagacacacaaacacacacagacacacaaacacaaacacacacacacacagacacacaaacacacagatgcaaacacacacacaaacacacagacacacaaacacacagacacacacacaaacacacagacacaagacacacacacagacacacagacacacagacacacagacacacagacacagacaacacacacaaacacagacacacacatacacacacacaaacacacagacacacacaaacacacacagacacacacagcacacagacacacacacaaacacacacacacccttcacaaccttcctgggctcttagcattttctgtggggctgtcaaggcaggaagatccaggagggaccccagggcggggagagacaaactctcccagctcaggaaggcagtgtgctttcgcctaaataactgagtgagctcacactaacaggaagtgttttgattttgcagtctgagagttaatcccgtcgctggccagacatgtttgcttttaggttctctggtggcccacaggtcccagttctgaatggaaacatcccgaggcggcccctcccctcctcaaactgcaccctccccgggcatggcgctgcctgcaggctgtagagagggcctgggctttttcacaccttggggaggtgtagaccagggaaaggaagaggagaaggatgtgggcaaccctccaccaccagggagctccaccaccactccgcaggccctggcgtggcaccgtccccgagggctggcaccgggctggtggcaggcctcagcatcagagggtggctgagtcgcacacaccgcccctacccctcttcccgagactgagcccctctctctagccccagagcaggagtcacccccagccccaccagccactgcccatgaagctggttggaattgccctcagcggccacagaggccccagcggggtccccagccaggccgacatgcactagcagctcagaaagaaaggccttgtgtccagtgacctcccccaacctcggaatgtggccgttctctcctcccatccctacagtagggctgaggctgtcccgagtacaaaggccttttgtccccacaaccagcccccacccgccgaggtgacactggagctgggagagtggcagcctccatggcggccacagtggctcccagctcccctgcagcagggcctccctcctcccccagggccgggcagagggcacctgcagggcatcttccccggcaccccctggctgcagagcaccctggtgagaacgatctaatcggagagcccaggcttatacacagcttctctctgccagctgagaatttacgtttctgattaacttgtgttacccacaatacactgtagactacagaaggccaggaccctctgaggtggtgcagtgcccccagtcttgttctgggtgagggctccacggacctctttatttgtcaaaactcatacactttagttctatgcattttactctgggtaaactgtatctcaggccaggcgcggtgactcatgcctgtaatcccagcactttgggaggccaaggtgggtggatcatttgaggtcaggagttcgagaccagcctggccaaaatggtgaaacccgtctctactaaaaatacaaaaattagccgggtgtggtggcaggcacctgtagtcccagctactcaggaggttgaggcaggagaatcgcttgaacccgggaggtggaggttgcagtgagtcaagattgtaccactgcattccagcctgggcgacagagcaagactctgtctcaaaaaaaaaaaaaaaaaaaaaaaactgtatctcaaaaatacatggccacaaaaaaatacatagtcattgttttaagacaccagaaaatacaggcaagccgaaagaattctgaacaaccaacggccgctgcccgaggccagttgctgtgattgcaggtactttccacctgtccagacgcctccacgcgtgtgacacacacgcaatgccaaccacacaacgcaggccgccgtgaatgccacttacatctgtcagtgacaaaacctgaccgtgtttccactaactctgacacaatattttaaatgactgcacattatgctgtgtgcataagccaatttgtgttcaacaaatccatgtattgttggaaattaaccacttctggggttattctttcagaattctaaacagtagggccacaaatatcctgatagcttggtctttgagcacctttaaggtgctatcttgaggtaaagacccaggattggtgttgctggggcaaaagacactcacctgcattttaaagggttcttttttgtttttgtttttttctgagatggagtctcgctctgtcacccaggctggagtgcagtggtatgatctcagcttactgcaacctccgcttccggggttcaagcgattctcctatctcagcctcccaagtagttaggatgacaggcgcctgctaccacacctggcaaatttttgtatttttagtagagacagggtttcaccatgttggtgaggctggtctcgaactcccaacctcaggtgatccacctgcctcggcctcccacagtgctgggattacaggcttgagccactgtgcccagccttaaagggtatttttaatgccttatggaaagcaggggttccaataggctttccagtccagtctcttccttgatctttataactccaaagagcctggcagacactgagcctgcgggggaacacgagaaccattctgccttggaaataagactaacctactggatgcagaccagaatgcaatacaccttgacagtgtaaaactaatccctggacttccggccgggtgccgtgactcaggcctgtaatcccagcactttgggaggccgaggcaggtggagcgcttgaggtcaggagttcgagaccagcctggccaacatggcgaaaccccatctctactaaaatacaaaaaaaaaaaaaaatagctgggcttggtggcacgtgcctgtagtcccggttactcgggaggctgagacaggagaatcacttgaacctgggaggcggaggttgcagtgagccaggattgtgccactgcactccagcctgggcgacagagcaaaaataataataataataatacctggacttttactttcacgtaggcaaggtggatcccacagggaaggtcaccacaactactcacaataactgaggaggccagacacattgtgaaaaccttactgcgaaggcatcagagagctgcagaggctgcgaggacttaacgaactaaaattccagagaatggagaactgtcagataagcaggtgacccacagccatctttttacctggggacatttgcctatttgggacactgggctaaggattgggcttggcccaggcagagagctacagccggggaagaagaaaccagcaaagattctcactgtcacagggaggaaagtggcaaaatcggagtgtccagggccacaaccaggcagcggggccctcagccccaccccaagacacctgtaggatctcaatgctgctgcaggaggaggctcaggagcaagttgagcagctctgtgaggctggactgcacttcccacagcctttcaaagtggggagatcaagacccgccaggctctcagctgaaatctggagagaccaatcccccaaaccagggcaaaccagaggaagcctgaaccccatcaaactacacaccagtccacccgggcccatccctcactgggttgagggacctgcccctctgtccatcctaactgcctgaggtttttgctcccaatacaagccaggtggctccaattagaacaactaatgtgcaaataacaactataattgccaggccgggcacagtggctcacacctgtaatcccagcactttcggaggccgaggcgggcggatcacgaggtcaggagatcgagaccatcctggctaacatggcaaaaccctgtctctactaaaaatacaaaaaaaaaaaaaattagccgggcgtggtggcgggtgcccgtagtccaaactactcaggaggctgaggcaggagaat

SEQ ID NO: 706 - DNA, 6000 bp, Homo sapiens
gccaccttgagatggggtgggacacacaggcagaagccagcctttgagtattcccagatgctctcctttcataacacagcaagagagacaaaaagggagccccgaggcaggggtaagctcctggggagagggggctgcgggctttctctactcagccctcacatctacactgggccctcaaagtcaagtcatctaaattgaaatttgagagctgcaaaataggttttcaaacctctgttttgtagtagctgctaaatcttccaccagaacacaagttgtcatcgttttctttcctctcgggatggaaggcaggcgtttcacagggtaaaaagacaccaacgcagaggggaaatacttctcccccagcaccaactcactcacttccacgtgaaccagagacaagaggctctggcgtctgagcggtgggttagtgcagacaggcaggtcaatcattcgggtctccacccccttcttctcagtagcagatgtttggagggtctgagtggttatagtaaggggctctctccacttttcatcaataacacagccccagtgtagatggggtcagagtggtctctgttgaatacatgggtaaaagacaaattagtgataattgtagtgaattcttatcattttatgacaatatttattcagaatggcatccattctgaataaaagtgggactttctggtacagaagcagggctcagtcattcttgacagtttctagctcctcacctcctcccagttgcccagggtggtccacccagatctctgctttatacacctgccagctggtgaccagctccctatgggacacctggatacaacctactggactcagcccctggcccccacacccctcacggactgtgcagacgtgccacagtgaccaccacccagtcacagcaagatgccatgaagctgatgcctgccggctcgaaatcacaccccacaggaaatgcacttgagtaacaacaccctggacctgaatacagatttggtgcacaggccgctggctcgctccccaccatctggctgggcctgcctgttccccgtggctccccctccccactggcctgtgaggaacgctgcctcctcgctcccgcccggttgagtcacacacctgctctgcagtttcatgtgttctgctgtgctgcctcctccagctctcacctgacccttgcacccaaacctcactctcctggtcaggactctcccagagagaccatcatgataggaatgaactgatcactgctcagacaaaagccacaggctgcctgccaaagcctagaagcaagctgctggtgagaggaatgccagcacagctggatacacaggcctgaggccatcagccagggtcaggaggcatcccacgagagcacacactgtaaccccatgcccaccgcccccagagccccatcagggaagggccaaagtttacagccactctccaggagagacctcaagacgaattagaggaaaactatgacaatgattttgtttaatgataattttcctttttcctagcactctggaaagctgccagtttctttacaagttaaccatcaatctgatgcagggcaggtgagccccaaaattggggcttaaccctggagggttcatggcttcacccaggaaggcattcaagggtgagccagtggtgttagccaggcaagtttgttaaagcagcagaatcctacccagcaacctctgaggaaccggcatgtggcctgggggacagccccactccataagctgcccgatgttctgtatctgtccacgatggtgatgagaccctaggagagttgcaagtctgaacacagggaaatctttagaaatccccacgatccataagattgaaaacaatcctcctctctgagaacttcatctatttctgggataaaccaaatctgtgtttagtcacacgtgactccaactgagtaactttcaagtcatttccctaaggcagaaaaaattctccattatgccagcaaagtggcaaggaagagccaagaatgcttgatcccatccccaccacagggaaccctgcacggcaggaggagaaaggacatctaagctggagactggtaaggtttcagccacccatggctaggaaagcatacactgcctctgagggggcgtgggcagctgcaacacgggagtcacgtgggaggggtttgcgggactccaggcatcacctcttcacaccggaggcaacaccgatggagtcgtgagaacatagtccaggtgtgtccagaattggtgggttcttgatctcactgactttaagaatgaagcactaggtcctcacagttgactgttacagttcttaaaattgttatgtctgcagtttgttccttctgatgtttggacgtgtttggagtttgttccttctggcagactcacggtcttgctggcttcaggagtggagctgcagaccttcacaaggagtgttacagctcttaaggcagtgtgtctggagctgttcattcctcccggtgggtttgtggctttgctggcctcagaagtgaagctacacaccttcccagtgagtgttacagctcataaaaagtgtggacccaaagagtgaaagagcaaagccccaaacatgtggcagaacaccaacacgttcccactgcctgctcgggcggcctgcttttattcccttatctggccccacccatatcctgctgattggtccattttacagagggctggtctgttttacagaaagctgattggtccgtcttgacagggcgctgattggtgtgtttacaatccctgagctagacacagaagttctccaagtccccacagagcactgattggtgcatttacaaaccttgagctagatacagggtgctgattggtgtctttacaaaccttgagctagacacagagtgctgattggtgtatttacagtcccttagctagacataaaggttctccaagtccccaccagattagctagatacagagtgctgattggtacatttacaaaccttgagctaaacacagagtgctgactggtgcgtccacaatcccacagctagacataaaggttctccaaatccccaccagattagctggatacagagtgcccatgggtgcatctacaaaccttgagctagacacagggtaccgattggtgagtttacaaaccttgagctaaacacagtgctgattggtgtatttacaatcccttagcttgacataaaggttctccaagtcgccgctagactcaggagcccagctggcttcacctagtggatcccacaccggggctgcaggtggagctgcccgccagtcccgcgccgtgcgcccgcactcctcagcccttgggcggtcgatgggaccgggtgccgcggagcagggggccgcgcaagagcccacggcaggggggagactcaggcatggcgggctgcaggtcctgagccctgcctcgcggggaggcagctgaggcccggtgagaattcgagcgcagcgccggcgggccggcactggtgggggacccggcgcatcctccgcagctgctggcccgggtgctaagctcctcactgcctggggccggtggctccgattgcggggcccgccgagcccacgcccacccggaactcacgctgacccgcaagcgccacgtgcagcccgggttcccgcccgcacctctccctccacacctccctgcaagctgagggagccggctccggccgcggccagcccagagaggggctcccacagtgcagcggcgggctgaagggcccctcgagcgcggccagagtgggcgccgagagcgagcgagggctgccagcacgctgtcatctctcacagggcgaagcccacgccacaggacgggtcggttctgtacccgccggggcaggggagagccgcctctggtgagcagaaccccggagaagggacgacgcgggtgcacctcgcggcatggggacaccaagtcagacgaacccgctgtgcaagaacattttccacacagcggcgcatacccccgcccgggggcgctcggcagccgcacgcggccctcagagcgcagcccccacacgcctttacttctggaaggcggagaccgccacagtgaggagctaagccagctgaggcaacacagaaaaacccccgttcctacccaaaaccaaaaagcggggcgcggaggcgcgcgcctgcggtcccagctaccggggaggccgagaagggaggatcgcctgagcccgggaggcgcaagctacagtgagccgagactgccactgcactcagtctgggtgacagagcgagaccctgtctctaaaggggaaaaaagagctaggaagaagcgggctgcctcttaacttcggagaagtaaatgaggaactataaccagtgtctaccgtttaggaaccaaacaaaagctgacaggaatcccgccaccgacccagccgccccagactttgccctggcctatcccgcgccgctcctcaaactagacccgccccgacgtcgccctggcctatcccacgccgatcctcaaacgaggcccgcccccgatgcacaagctccgccctcgttgcaccgtcctgaccctcggcctcgcccccgccccctggctcttcccgcgcagccgaatgccgcgacctggctcccacccttcgtcgcttcgcgccgcataggaaccccgcccctagtctctcctcccgcctatcctgagcggcgcgcgcacaaatctctcccacggacccgcccaccctgatcctcaacctggcccctggcctttcccgcggcgtcgagtccagtacaccgacgcacgagtcccacccccgatctctccctcggcctatcccgcgccgctccgcgcaggagtcccgcctcccacttcgcccgcagcctatgacgcgccgcgtcgctccctctcctcaaacccgctctcgcccgcggatgggcgcgcagctgtgacgtcacggcgtcgttggtaaggggctggcggccggggagctgcgtagctcccggccccgcggccatgcccaagcggagctgccccttcgcggacgtggccccgctacagctcaaggtccgcgtgagccagagggagttgagccgcggcgtgtgcgccgagcgctactcgcaggaggtcttcggtgagtgtcgggcgggctgccgagggtccgctgcgtcggggcctggaacgggccgggcctcagcgtcccctctgaggcctgagcggggggctggagggccctgctttctggccccgcgttcccggaagctgggaggccgcggggacacaagctggccacgcccagggctggggtcagtgagggggatgtgaggaccccagcgttcgcccaccctgtccaacagcctgaaagaaaagggtccctgcccctagcccccgcgccctcttccacgatcccggttagtcgccgccctgcagtgagcggcacccgcctggtgctttctcaggactgtcccgtgcaggatgtcctgggagaggttggggagcggggcgtcctgcatggagtcaacccgaagagtgcccctcctgtcccaagaggtattcatggagcgcgcggccctgccaggcacggcggctttctcgggagaccaaaggcaggcaagacagatgtgccccgtctcccgggagctccccagcctagttggggagaccagcaggaggagtcgccacaggtggtcggggcaggcacaggtttgtgcaggcgcacctgcagggatggcacggaaggcttcttggaagaacagtctgagcggaatcctgtgggggcgagtaggagttagccaggcagaggaagggaaggaagagggcgaggcagaagccaggcagcaggagagcgaaataggactccgtgtggctgcagtgtccagttctgggtgggatgtgagggcagtgagctcccaggccttctctggctttctcctgtggatttcaggcgtgttgatcttattgatcatcactctgactggggtgattaataccctggggcaggtaaaaagtgga

SEQ ID NO: 707 - DNA, 6000 bp, Homo sapiens
tgctggaaagacgtccccaagtaggtgatcacagataagatctagtgcagtaatagaggccttggccttggactgggacagagacccctctatactaacaggaaggaaggcagacaatataggtacagatacaagtaggctgggagttgtggtaatggcaacactggaaattcttttctggttgctttcatttcttcatgaaatagaaagcaaagtcagcagctgagagtgagggtggaaggagagaggagaagatattgtcatgtattctgtattttgggagtttgctccatgcattttcaggagttctctaatcatgactccagcccttcaagtcaaagtacccttatgacttatgacctggtaagctcttcactttcccttttctccaccagagtacaggctgtggattccaggctgaaagaatagctcatgccagagtctctccccctgtagctggtgagcaccctcagtagtagatggagctgttcaaaacaacatagtaaataaagacatctttctgagaaacttatgtgttttccagtttgcattgtttatatattaagcacgagaaactagctaaactatagaaaatctgcttgcctatgaagagaagaatcaggaagaggtactttccccacaaactttatatttgcaagaggacagtgcatttttttctaagtcctatcataacatctacttttcgtcaaacagtgaaagcctatgagatccatagtcttttttttttttttgagacggattcttgctcggtcgcccaggctggagtgcagtggtgtgatctcggctcactgcaagctctgcctcccaggttcacgccattctcctgcctcagcctcccaagtagctgggactacaggcgcccgtcaccatgcctggctaattttttgtattttcagtagagacggggtttcactgtgttagccaggatggtctcaatctcctgacctcgtgatccacccacctcggcctcccaaagtgctgggattacaggcgtgagccaccgcgcctggccaatccatagtcttagactaggaattactgggtttcttgtgatgtttgaaggctcagatgctaccttgacacagtagttgaggatgcatcagaatcaactggcaggtttattaagacacagattactgggcctcatccccagagttttaattctgaatttgcatttctaacaagttcccaggtgatgctatttttctggcctacattttgagaacaactaccttaaggaattggctaccattttatttaaaaaataacttaggttgccgggcacggtggctgttgcctgtaatcccagcactttgggaggctgaggcggatggatcacctgaggtcgggagtttgagaccagcctgaccaacatggagaaaccccgtctctactaaaaatacaaaaaaattagccgggcgtggtggtgcatgcctgtaatcctagctactcaggaagctgaggcaggagaatcgcttgaacctgggaggcagaggttgtggtgagctgagattgcgccattgtactccagcctgggcaacaagtgcgaaactccgtctcaaaaaaaaaaaaaaaaaaaaacttaggtcatgtatgtattaaaaatatgcaaaaagtacagtttcgtttctaaggagctacctatataattcagcactttggttttgatactcatgaattctcatgagtcctacctaagggaaaactgaattttttattcatgcaatggcatatgtttaaaatcaggactatcaagcaaaagcaataccagaaaagattccttccctttgttatttatgcaatccaaaggtctctggttgctcaaaatgcaggaggtacttgtgtggtatttttaaaccttaataacacatttttggaccagaatcacacgaggacagcatataccgtatccttgttgaaagaactttggctagttgtgtccgctaattaggaagtgctagaagggggacctcagaattttcctatcctaaacactcttggttgaattgagaaaaacaagatacgccttgaatgaacagatggagagtaacatacccccggacttctgagggcatctgcagaatagacttacaggcatggattctggaattagactgtactggtataaatcccagttctgttacttactagcttgagcaaattatttaacttttttgcaactcagttttcttatctgtaaaataggaataataatagtgtttatttcatagggatattttgaagatttaatgagttagtacgtggaaagtgcttagaatagtatcaggtgcaaaataagtgttaaaaaaacttggcatcatccacaaaccaatctctctctaaaatggcatacctttcaaaagtgttactgagtcttacactgactagttgaaagtatcaagcatagtgaatgtgccctaataacactggcttaatctgcaagccactgatcttttcaacctcataattttggaggcttctcaagggatagttatatagttccttaaagccctatttcccactggtctcgtctctcactacattggagatgtacatattaatctcataccagacatttgcccaaatcagggtttctcaatgttggcaaatttaaggctggataaatttttggataaattacatcggtagctccttagatactaaaacgtaccttttgcaccaatctatctgtgctagtggttctcatccagggtgattgcctctcagggaacatttggcaatgtctggagatgtttttggttgtcttaatgagggggagaggggttcattctggcatctagtgggtagaggccagggatgctattaaatattctacaatgcacaggataagctaccgccacaaaatgttacccagccctaaatttgccaacattgagaaactccgatttgtgcaaatgtctagtttgagattaatgtgtggatcttcaacttggtgagaggccagaccagtgatatgctggtagatatttaaccatattcttccatgccccttccccactgctatggtctaaatgttcatctccctcaaaattcatgttgaaatcttttttttttttttagacagtctccttctgttgcccatgtacaatcacagctcactacagcctcaacctcctgggctcaaatgattctctatcttagcctcccaagtagtgggactataggcatataccaccatgcccagctaatttttgtagaaatggggtttcaccatgttgcccaggctgatcttgaactcatgtctcaggcaatccacccgccacagcctcccaaaatgctgggattacaggcacgaaccacacacctggcctgtaactgtgtaatcttggaagttacttaacatctgttttagattcctgatctgtaaaatggagacaacactagcttacctcgtaggccagctattagtcccaaatgaagtgatatgagaagtatgtagaatagtgtttggtgcatataagtgctctacaagtgttactatttttaagactgtttctctggagttgacaatccttcaatagttccccctgtctggaaggcgcccctactcccatttaccaaccaggcaaactcctactcaaccattaggctttagctcaggggtctatttctcatgaagccttgggtaacccgtttaaatataatttaacttttcttctttggaccttgatcttgaatctctcactgcactcagcaacacggtactgtaatcatctattcacacgactagattatcttccttgtgggcagtgagctacttgagggcaggggcaaggttttttttttgtttttgtttttaatttcaggacatagcactgtgcctgatgcagagtaggcaattagaagcaatgaaaagtattaactatgtatggatataggaaagaaccagaaagtactgagggggaagaaaacacttattctgctaggctgacattttagcccttgctttcattattttcaggtggtttcagtcccaagttaaaaactgctttcatgcatctgtgtaaccaactgttccccttcctgttttctccttggttgaaagaagggactggagtgagaccgccttagaatgccagttccaccactacctagttattcactttagtcaagttttttttaacctttccaaggctgttacctcactgcagaataaggatgacagtcatccctacctcatagagctgttatgagaatgaaatactcatgtgctcaataaatgtcagctgtagtagtcatttctacagaaattctgctgaggactttgacgccctttctagccatctcccagtttcgcactgttctctctcccacgtgctgcagtccacctctcaccagacacaaactcttgtctttacatccacacctcctgaaccctgacttcggtatagttttaaaatgatacacattcgttgctgaaaattagattaaacggaggaaaaaaaattaactcacttcaaatctcagcagttaaccactaacattttagtatgtatttgtttagaccttttcttatgcaaatacatacgtttaaactttttttttccgagagttcacatcatacaaattttattttatgactcgtccttgcacttagcacggtctctcccccaacctatctctgatgccttgagaatccccccgccccgctgcagacccccaccacttccagctcccagcggtccggccttcccgcggtcccggttccggccccacctgcgggacgccggccgccccgccccgccccgctccgctgcggccggcctcgatccctagccccgcaccccgcgcctcgctgctaccgggcgcctttcgctcgcggctcctccgtgcggcccgcttccggtggggccagggcgtctccgccgcagctcggctcccgcgcgctcagcaccgccagcggcggccagatgcaggcggagcgaggagctcggggaggccgtgggcggcggccaggccgcggccggcctggcggagatcgccacagcgagcggcccggagccgcagcggcggtagccagaggcggcggcggaggcggcggcggggacggaggcggacgccggggccgtggccgtggccggggcttccgcggcgctcgcggaggccgaggaggaggaggcgccccgcgaggcagccgccgggagccgggaggctggggcgcaggggccagcgcgccggtaagaggcgacggctggtggggctgggaccgcgtgtaactggggcaagtggggccgaggccgccagtcaagagccgcaagagagcgtgccaggcgcgcgccagacgggcggcggcgccggcgcctgcgcgggacgggcggatggtggcgcgggggcgcgcctggtggcgggggcgcgcctgggtatgcgcttggccctcgtggcctcctggccgggctggcgcgagacagtgggggtaggagggcttcccagcctgccccagggtccgggttaggaacccagaggccaaggccgtgtgtcagggctgcaagtctcggcggcccgtgggccggctgggctgtctgtacgagtaccactatgggacggaggcgcggccacgacgtggtccctcggcagcctttacgggcacgctcctgttattaggagggaaaggattttttggtctgttttgttaactgtctgtgcaatgcctagtacacagtaggcgcataataaaaagtttgttgagtgaaagaatgacccctacgactggactctagtatttgggggcgggaccagatgcatagttctttgtaatagcgtagttctcttttattatgcctgtatgtgtagaaatcagcgagcactgggctttgtcgttttgaattttcaatttataaatgagcagtcaagttctgagttttaatagcaatatcatcagtcttattgacacattcatagaaggaagtttttggagattggagcaggggatgatatatatgggggcaaagctaaccatat

SEQ ID NO: 708 - DNA, 6000 bp, Homo sapiens
accgaaggaatgctcaggggcaccactggccagcctgagacactggtctgataggaaagcaaatgagaagagaaggatggaaggaaggagcggaagggagtcggtgcattggaaatcacggagggctgccggtgcccttcacagaggctaggtttggtttctgtatctccctacatgtagcaggagtgcaaggtcactctgaccagctcagacatgcacttttggccaagcctctgggtaaaataatatacctccttttggcttagtgccttttgctggaaatctatcaatttcgggggactgtgctactggctaaccttgactccccactctttcccttttccctctttgtcctttggagacagtatttttctattctagcaaccacagccctcaatatggctggttcattctgtttcaggtgacttctgagggagcaaaggaaagaatgatgggaaaaaggtacaaggagacttcaggctctattgggctgaaggtcccagctccactgaacttaaatctaagtttacaacccagagagcagctcggtggtcagagcactgctgagccctactgcccctggtgggtcagggttgttgcaggactggctccctctcactgctctctggactcatcattttatctttcctaaaactcaggcttggtcaagtcactcatctccaataaaatctttgctgcctcccctttataaaatacagattcttcagtctggcattccagggacacctctgtagtctgacctgaacccacctgcccatgcctaccgttcgtaaatctcagtgtgcacccaatgatccagtcaccaagcctccctctgctccctgcacaggtaagctctccagctcagcacttcagtctgctacccttaggcctgggctattcttttttattttattttatttttatttttttgagacggagtctcattgtcgcccaggctggagtgcggtggcgctatctccgcccactgcaaccttcacctcctaggttcaagcaattctcctacctcagcctcccaagtagctgggattacaggcatgcgccaccacgcccgcctgatttttgtatttttagtagagacagggtttcccgtgttggccaggctggtctccaaccactgagctcaagtgaaccacccgcctcggcctcccaaagtgttgggattacaggcgtgagacatgtgcatctggttttccttattgaaaaatatttcccattcaatttaaaagctgtctccctgaggccttctccagcctttgtattctgaatttttctgcattcctcaatagtcattatccttggaatgaatacaattccaataacttttcactattttcagggctacctctcctagtagactgtaagctccttgagggcagacgccaggtttctggcactcagcccaatatctggcacagagtaggtgctcggtaaatgcctgtgaagtagcccatagactcccttacgcggtctgcaggacatgctgctctcctggcagcaccagcacagtctctaaatgctgccatatgcgagatatgtgtcaaccgctcaagcagccccggccttcttgagcgctccgcttctcagccaggtgcttattttgccagtgcccacgcccagtcaagaagaggacctaagggctcccctggatgtgtttgtttcaaacacaccttcagctttggagctgcagttttcttccgacctgctcggcaggcgggagggagctttcccctgaggctgggatcccatagggacccgcaccctgcaccctgcacccactggacgcaccagcctcataaaaaaactccccgcctccttcccccctccctttgtggacgcgcagcaattattctgcccattgccgtgaaaaagaagacaaaagttactttggcgccccctctcccacacctaatacagaggattcagggactctctggcgcttccagagcctgtgttagggacagaatccgcactggcgacggcgctccgactgcgcttctggcgacggtcggaattttgctcggccccttgcaatgtttccatgggaaggttcgtacattcgtgaccgtccctggcagcggcccagcccgggacttggcgcttcactcgccattggtcagtcctcggcgtgacgcgcaggggggcggggcctcatcagctgtttgcgggatgccccgagcaggcgtattttggaaacaataccgcaccgtgcggagtggcctcctcccgccccggcctgtgcccgccgccgccgccgcccctgcctgcgcctcccgcctcctgccgcagcccggtgagcgcccgggtggccgccgggggccgggcggagttggatcgcagctccttggggaagtggggagcggagtcgcgctgcgcacgggggcccgggaagggtttgggctgcggacgtctggggtgaccatgaagaactggggcgctggggtgagggaacggggtgcagaacccacagttgggtgcgctgctccaagagggaacttgggggtagcatttgggactcgaaggagttgggtccaggtaggcaggggaacctggggtgcactgctgagcagacctgggcgcccgagaacggcccagcctctgggtctgactttgggataggacaggagctgtggggcatcctgcctctctgcggagtctgaaggctcctctccttaacagctgggctttttccctccttcccaatcgagtctgggcgtccagcccccgagtgctcgtcacgctggaccctggcgcggagccctggcatcacgactcggaggccgagactctctcctggagtcacccaggtctggggtgtgtgtgtgtgtgtgtgtgtgtgtgtgtgttcctagtcactgtcgaggatctgggtgtctgactactgccttctcctaagaggaggaggagtctaagttcagcatccctcttccagcccttaggggttgggatggctgcagcggggcttgagttcctttgctaggaataaagcattccctggccctgttctcaggaagtgccctcctcctcccaccgctctggacatcacctcttaagctcaggagaaaaatttcaccctctcttagtttacccttgaccttggccagcacccctccagaggcgcccacctacaggcaagccacctacagtttgtggagcgtgagaggggtccctggggcttgcagagccacaccttctggctgcacctcccccactgtccagtccaggcaaaggttgaactttggggctttgctgggagggggaggggaaggtgataggcttcaaaggaaaaaccaagacaatgactcgtgctggtgattggctttgagggccccttcttaggtcaagattgctagcctgagaagaggaggttggagagctggaggggagcccctgccaggtgactggcgggacagcacttggtcctttcatcaggaaattttgtttcctgttgttaataagctggagtgcaccacctcacccccctccccatacacacacacacacacacacacacacacacacacacacacacttgggaaacacggtccaaagaacaccacgtggctgcttgccatcctagcaggcatctcctcattctccagggaagagggcacagacaggaccatagacagctcagggacagggatgggatgggacgaaggcagggcccaagcaagcagctcacagcttgtgtttggcaaaggcagcattctgaattgaactgagattcttttagctacttcaccaatccatagaccatttggcttgttcttcaaaggcaagagactaggggacagaacccccaggaatctctaattgagtctgacaagaatgaaattcatctctttttatccttagctgttcaggtggttgctgcttctggctgctgcaggggccctaagcagttcctggtatgtgtagggagctgggttggaagcttaagatgctgagtagctccaagctcagactttcaagagccatcaggtggagcaagaggaacttctttatcaccaagaaactcatatcaataacttcagcagtataggcagtgagtgaggtcacagggagagggctgaatttcacttccttctgtaagaccagttgtaccagtctcaggttcagagctggcaggagcgggaggctgtggaatcagggatttgaagtcgtggagactagtgaggagacttagttgggagaggctggacctaccctctaggccaaactttggtgggcagacagctcaactctgctcaaagagagccgagacggcagctgcaatgactagcttgggtctttatcccctctcccaggacacattcttaccacactgcagagcctgtttgttgtgttgtgcaagcaaggggtggagattagagtagatgggcagcagggcggggcttagaggtttggagggaacctggctgtcctaggattgctggcttttgtttttgctgctgagcctggagctcagctcagactgagataagaatttccttgggacaatgactctgtatgtgtgtgtgtgtgtgtgtgtgtgtgtgtgtgtgttgtgagcactgtatgtatagccagtcacagcacccttgacagcaacttacagaggctagtcttgtttatattttcccaggtaccctgcatgcatatagctgctgattctactcctgctattgctcacaaccctcagagtcaaactttgtgaccggcctaggtcagaaaacgtgatcaagaaaaagggtggttccaggcgggcccagggaagaggtgtggagagcccctgaacattcaggcagtccacatttggggagtgaatgtcacccttagcagtgctttattaccagggttgtatgtcatcagtatgtggtccggccagctcaaataagaagggggagtatggtaggaagaagggaaggggagtccttccaggtatggccctggtggggcagcagcccagatgcctgcgttgccccctcacaggagagatggagccatctcagtgtgtggaggagctggaggatgatgtgttccaaccagaggatggggagccggtgacccaacccgggagcttgctctctgctgacctgtttgcccagagcctactggactgccccctcagccgacttcagctcttccctctcacccactgctgtggccctggccttcgacccaccagccaggaagacaaagctacccagactctcagcccagcctcccccagccaaggtgtcatgctgccttgtggggtgactgaggaaccccagcgactcttttatggtgagtgctctcagcctcaagactcctcccatagagactgggggaaaagaggggactttccctccccaaacctgccctttgctgtttccttcccccaaagtgatcagcggggctgttgattccttgacttccacctgctgcctctcggcttgttattgctcctcacctgtgcctcagaccccccaaagggcaaattgtcccctcctggagggatccttgggtccatggtatctccttttacatcttgtgccccttgagtggcctggcctttagtgtcctagcagtgacttgcctactataaagtggctcctgttgccctggagaagtctgggggatctgtgactggctgttgacaatgaagggaaaaacccagccggttctgggagggagggttcccaaaggcagaaggtggcccccagttgccacatgggactttctgtgtgtgaaaggggaactggagaaagaggttgggcctgcctgggcccaatgccaggagaggggatgcttccaaggctaagacaagaccccttcatttgtgggcttaaatagtttgttttatgagaaatatgccctcctctggcaaaagggcagggttagacagtctgttttcttctattagcactgcagcttatggagggagggtaaaggctaggagcgtggcttactgtgtctgacgagctgattgaggagacactgcagttactccca

SEQ ID NO: 709 - DNA, 6000 bp, Homo sapiens
gtggtggtgcacacctgcagtcccagctacttgggaggccgaggtgggaggatcacttgagcctgggagattgaggctgcaataagctgtgtttgcaccactgcactgcagcctgggaaacagagcaagaccttgtctcaaaacaaacaaaaagaacccattctctcagcttctttgccttgtggacccaattttaccatgcagggctgtgatgaagcacacagagctttagcatctcaggtgggtcaggagagctacgatggccccagccctcagggcctgtgctgtcccagagggcagattcagagctgctgtggccttgagtttcactcttgaaccgaaggaatgctcaggggcaccactggccagcctgagacactggtctgataggaaagcaaatgagaagagaaggatggaaggaaggagcggaagggagtcggtgcattggaaatcacggagggctgccggtgcccttcacagaggctaggtttggtttctgtatctccctacatgtagcaggagtgcaaggtcactctgaccagctcagacatgcacttttggccaagcctctgggtaaaataatatacctccttttggcttagtgccttttgctggaaatctatcaatttcgggggactgtgctactggctaaccttgactccccactctttcccttttccctctttgtcctttggagacagtatttttctattctagcaaccacagccctcaatatggctggttcattctgtttcaggtgacttctgagggagcaaaggaaagaatgatgggaaaaaggtacaaggagacttcaggctctattgggctgaaggtcccagctccactgaacttaaatctaagtttacaacccagagagcagctcggtggtcagagcactgctgagccctactgcccctggtgggtcagggttgttgcaggactggctccctctcactgctctctggactcatcattttatctttcctaaaactcaggcttggtcaagtcactcatctccaataaaatctttgctgcctcccctttataaaatacagattcttcagtctggcattccagggacacctctgtagtctgacctgaacccacctgcccatgcctaccgttcgtaaatctcagtgtgcacccaatgatccagtcaccaagcctccctctgctccctgcacaggtaagctctccagctcagcacttcagtctgctacccttaggcctgggctattcttttttattttattttatttttatttttttgagacggagtctcattgtcgcccaggctggagtgcggtggcgctatctccgcccactgcaaccttcacctcctaggttcaagcaattctcctacctcagcctcccaagtagctgggattacaggcatgcgccaccacgcccgcctgatttttgtatttttagtagagacagggtttcccgtgttggccaggctggtctccaaccactgagctcaagtgaaccacccgcctcggcctcccaaagtgttgggattacaggcgtgagacatgtgcatctggttttccttattgaaaaatatttcccattcaatttaaaagctgtctccctgaggccttctccagcctttgtattctgaatttttctgcattcctcaatagtcattatccttggaatgaatacaattccaataacttttcactattttcagggctacctctcctagtagactgtaagctccttgagggcagacgccaggtttctggcactcagcccaatatctggcacagagtaggtgctcggtaaatgcctgtgaagtagcccatagactcccttacgcggtctgcaggacatgctgctctcctggcagcaccagcacagtctctaaatgctgccatatgcgagatatgtgtcaaccgctcaagcagccccggccttcttgagcgctccgcttctcagccaggtgcttattttgccagtgcccacgcccagtcaagaagaggacctaagggctcccctggatgtgtttgtttcaaacacaccttcagctttggagctgcagttttcttccgacctgctcggcaggcgggagggagctttcccctgaggctgggatcccatagggacccgcaccctgcaccctgcacccactggacgcaccagcctcataaaaaaactccccgcctccttcccccctccctttgtggacgcgcagcaattattctgcccattgccgtgaaaaagaagacaaaagttactttggcgccccctctcccacacctaatacagaggattcagggactctctggcgcttccagagcctgtgttagggacagaatccgcactggcgacggcgctccgactgcgcttctggcgacggtcggaattttgctcggccccttgcaatgtttccatgggaaggttcgtacattcgtgaccgtccctggcagcggcccagcccgggacttggcgcttcactcgccattggtcagtcctcggcgtgacgcgcaggggggcggggcctcatcagctgtttgcgggatgccccgagcaggcgtattttggaaacaataccgcaccgtgcggagtggcctcctcccgccccggcctgtgcccgccgccgccgccgcccctgcctgcgcctcccgcctcctgccgcagcccggtgagcgcccgggtggccgccgggggccgggcggagttggatcgcagctccttggggaagtggggagcggagtcgcgctgcgcacgggggcccgggaagggtttgggctgcggacgtctggggtgaccatgaagaactggggcgctggggtgagggaacggggtgcagaacccacagttgggtgcgctgctccaagagggaacttgggggtagcatttgggactcgaaggagttgggtccaggtaggcaggggaacctggggtgcactgctgagcagacctgggcgcccgagaacggcccagcctctgggtctgactttgggataggacaggagctgtggggcatcctgcctctctgcggagtctgaaggctcctctccttaacagctgggctttttccctccttcccaatcgagtctgggcgtccagcccccgagtgctcgtcacgctggaccctggcgcggagccctggcatcacgactcggaggccgagactctctcctggagtcacccaggtctggggtgtgtgtgtgtgtgtgtgtgtgtgtgtgtgttcctagtcactgtcgaggatctgggtgtctgactactgccttctcctaagaggaggaggagtctaagttcagcatccctcttccagcccttaggggttgggatggctgcagcggggcttgagttcctttgctaggaataaagcattccctggccctgttctcaggaagtgccctcctcctcccaccgctctggacatcacctcttaagctcaggagaaaaatttcaccctctcttagtttacccttgaccttggccagcacccctccagaggcgcccacctacaggcaagccacctacagtttgtggagcgtgagaggggtccctggggcttgcagagccacaccttctggctgcacctcccccactgtccagtccaggcaaaggttgaactttggggctttgctgggagggggaggggaaggtgataggcttcaaaggaaaaaccaagacaatgactcgtgctggtgattggctttgagggccccttcttaggtcaagattgctagcctgagaagaggaggttggagagctggaggggagcccctgccaggtgactggcgggacagcacttggtcctttcatcaggaaattttgtttcctgttgttaataagctggagtgcaccacctcacccccctccccatacacacacacacacacacacacacacacacacacacacacacttgggaaacacggtccaaagaacaccacgtggctgcttgccatcctagcaggcatctcctcattctccagggaagagggcacagacaggaccatagacagctcagggacagggatgggatgggacgaaggcagggcccaagcaagcagctcacagcttgtgtttggcaaaggcagcattctgaattgaactgagattcttttagctacttcaccaatccatagaccatttggcttgttcttcaaaggcaagagactaggggacagaacccccaggaatctctaattgagtctgacaagaatgaaattcatctctttttatccttagctgttcaggtggttgctgcttctggctgctgcaggggccctaagcagttcctggtatgtgtagggagctgggttggaagcttaagatgctgagtagctccaagctcagactttcaagagccatcaggtggagcaagaggaacttctttatcaccaagaaactcatatcaataacttcagcagtataggcagtgagtgaggtcacagggagagggctgaatttcacttccttctgtaagaccagttgtaccagtctcaggttcagagctggcaggagcgggaggctgtggaatcagggatttgaagtcgtggagactagtgaggagacttagttgggagaggctggacctaccctctaggccaaactttggtgggcagacagctcaactctgctcaaagagagccgagacggcagctgcaatgactagcttgggtctttatcccctctcccaggacacattcttaccacactgcagagcctgtttgttgtgttgtgcaagcaaggggtggagattagagtagatgggcagcagggcggggcttagaggtttggagggaacctggctgtcctaggattgctggcttttgtttttgctgctgagcctggagctcagctcagactgagataagaatttccttgggacaatgactctgtatgtgtgtgtgtgtgtgtgtgtgtgtgtgtgtgtgttgtgagcactgtatgtatagccagtcacagcacccttgacagcaacttacagaggctagtcttgtttatattttcccaggtaccctgcatgcatatagctgctgattctactcctgctattgctcacaaccctcagagtcaaactttgtgaccggcctaggtcagaaaacgtgatcaagaaaaagggtggttccaggcgggcccagggaagaggtgtggagagcccctgaacattcaggcagtccacatttggggagtgaatgtcacccttagcagtgctttattaccagggttgtatgtcatcagtatgtggtccggccagctcaaataagaagggggagtatggtaggaagaagggaaggggagtccttccaggtatggccctggtggggcagcagcccagatgcctgcgttgccccctcacaggagagatggagccatctcagtgtgtggaggagctggaggatgatgtgttccaaccagaggatggggagccggtgacccaacccgggagcttgctctctgctgacctgtttgcccagagcctactggactgccccctcagccgacttcagctcttccctctcacccactgctgtggccctggccttcgacccaccagccaggaagacaaagctacccagactctcagcccagcctcccccagccaaggtgtcatgctgccttgtggggtgactgaggaaccccagcgactcttttatggtgagtgctctcagcctcaagactcctcccatagagactgggggaaaagaggggactttccctccccaaacctgccctttgctgtttccttcccccaaagtgatcagcggggctgttgattccttgacttccacctgctgcctctcggcttgttattgctcctcacctgtgcctcagaccccccaaagggcaaattgtcccctcctggagggatccttgggtccatggtatctccttttacatcttgtgccccttgagtggcctggcctttagtgtcctagcagtgacttgcctactataaagtggctcctgttgccctggagaagtctgggggatctgtgactggctgttgacaatgaagggaaaaaccca

SEQ ID NO: 710 - DNA, 6000 bp, Homo sapiens
gtaaatttgtctccaaagacttagtgagtgactcatgtgccaagcctggagcagagcagtcggagggtatcaaggagtagatggcatcacccttgtcttcttggaggatcatctcgctggtgagaagaaactcagtcagataagctgggtgcagtggcttgcacctgtaatcccagctactcaagaggctgaggtgggaggatcgcttgaggtcaggagtttgaaattagcctgggcaacacaggcggacccccatctctattaaataattttttaaaaagaaaaaaaaaagaaactaagataagaccaggcatcctaaatggcaaagccaatgtagacaggacatttatcgggaatcccccactgtagctttcttcccacttcctaatacagaactacttgtactttttaaacgtgtgaatatacattcatttactcattcaacaaatatttaccgagtagtccccccaaatgaaactgaacatatgctgttgtcatacttcatgggatcttggacttcacatcttatcttccaagctttcccagagggtagcatgccagctttagtccttagtttctgtatttccctttacatccaggtctctgaattcccagatgctttctcttgagtagagtacctgctttttctatttgaatccctctgaatcagcaattggcaagaagtgagctcattgactaggcaatcaaatttcttaacttgcccagttagtagaagccaatctgtctgttctggcgcacacacacacacacacgtgcgcgcacccccgccatacgtgtgtgtgcacccgcacacacgcatacacacacacccacgcacacgcgtgcacacacgcccacaaacacctaccagcgcacacacacgtgcacacacatgcacgcacacctacccacgcacacacacgcgcacacacacgcatacacacatgcacacacattcgtgcgcacaaacacacactctctacaactcagaagagaggaactatcctttgcagacagacggataacagataaagtccctttgatagggcaagtccggcaagggaaggacacccacgtcttgcagatccctggtctttcttacatatatgagctcttctggaagtagttaagggggtcaggcaccatgtgctcccccagcaagaccccaaccttacccataaatcagtttcccatctaacccctccctgggggttgagttacaaacctcagtaaccccagggcagcctgcctggtaattcctattattcagctgtcagctggttttttaaaaaccgccctttccagtgatccagttactggagttttagagccatttcttgtctcagagagaaatcctatagccaggtgagacaatggagagggctcctgcccgctttctacaggagctgggttttctctctggttgagagcagcctccccttaactctgtatccctccaagattgtcagggaaggccctcctccctatcagcctccgtgctgatgcctttctctggggacccttctcccagagccagcatcagttagcagaggagaaaacaaattgagacaaggtgcaggaagagaatgagagaaaggaaattctccaaaatagaggttgctgtgactgcactgtgtatttgctccgagcccagtcaaaagctcagggttcatctgttcccagggtgctgctattggtcagggggctcagagcccagatctgcagcacagcaggtcctgatactgctgagtccatgcagtgctgaaagggggaaaagggcatagagggaggagtctgctttgacagtgatgagaggtgggggtgaggctcctgacctccctgacccctttatccctgacagtccttctctggtccctctagctcagaaggctgggccccttgctgcttgaccttagagactgagagcgcaggaggcaaagccacaggtgtctttcagaaccagcctgagggagcaggctgtgaagacctgggagagaggtcttaaaataaatatcaatagtgatgtgaccctccccatatcttgcaaactgccagaccccctgagatactccctcctgttcctcagcccagttctgtcacaatgacgattttctgaaacctttatagggccacagaccactttatgaaactgttgtaagctatggatccaccccactcacaaaaatgtttgtgtgtacccacaaacacagtttagccagtttcaggggttcataaaccctaaagctcaggactctgatgagcctgatgagtacatagatcccatatcaatatcccattcttggctgggtgcggtggctcatgcctataatcacagcactttaggaggccgaggtgggaggagtgctcgaggccaggagttcaagaccagcctgggcaacatagtgagaccctgtctgtacaaaaataaaaaatttaaaaagtagctggctgtggtggtgcacacctgcagtcccagctacttgggaggccgaggtgggaggatcacttgagcctgggagattgaggctgcaataagctgtgtttgcaccactgcactgcagcctgggaaacagagcaagaccttgtctcaaaacaaacaaaaagaacccattctctcagcttctttgccttgtggacccaattttaccatgcagggctgtgatgaagcacacagagctttagcatctcaggtgggtcaggagagctacgatggccccagccctcagggcctgtgctgtcccagagggcagattcagagctgctgtggccttgagtttcactcttgaaccgaaggaatgctcaggggcaccactggccagcctgagacactggtctgataggaaagcaaatgagaagagaaggatggaaggaaggagcggaagggagtcggtgcattggaaatcacggagggctgccggtgcccttcacagaggctaggtttggtttctgtatctccctacatgtagcaggagtgcaaggtcactctgaccagctcagacatgcacttttggccaagcctctgggtaaaataatatacctccttttggcttagtgccttttgctggaaatctatcaatttcgggggactgtgctactggctaaccttgactccccactctttcccttttccctctttgtcctttggagacagtatttttctattctagcaaccacagccctcaatatggctggttcattctgtttcaggtgacttctgagggagcaaaggaaagaatgatgggaaaaaggtacaaggagacttcaggctctattgggctgaaggtcccagctccactgaacttaaatctaagtttacaacccagagagcagctcggtggtcagagcactgctgagccctactgcccctggtgggtcagggttgttgcaggactggctccctctcactgctctctggactcatcattttatctttcctaaaactcaggcttggtcaagtcactcatctccaataaaatctttgctgcctcccctttataaaatacagattcttcagtctggcattccagggacacctctgtagtctgacctgaacccacctgcccatgcctaccgttcgtaaatctcagtgtgcacccaatgatccagtcaccaagcctccctctgctccctgcacaggtaagctctccagctcagcacttcagtctgctacccttaggcctgggctattcttttttattttattttatttttatttttttgagacggagtctcattgtcgcccaggctggagtgcggtggcgctatctccgcccactgcaaccttcacctcctaggttcaagcaattctcctacctcagcctcccaagtagctgggattacaggcatgcgccaccacgcccgcctgatttttgtatttttagtagagacagggtttcccgtgttggccaggctggtctccaaccactgagctcaagtgaaccacccgcctcggcctcccaaagtgttgggattacaggcgtgagacatgtgcatctggttttccttattgaaaaatatttcccattcaatttaaaagctgtctccctgaggccttctccagcctttgtattctgaatttttctgcattcctcaatagtcattatccttggaatgaatacaattccaataacttttcactattttcagggctacctctcctagtagactgtaagctccttgagggcagacgccaggtttctggcactcagcccaatatctggcacagagtaggtgctcggtaaatgcctgtgaagtagcccatagactcccttacgcggtctgcaggacatgctgctctcctggcagcaccagcacagtctctaaatgctgccatatgcgagatatgtgtcaaccgctcaagcagccccggccttcttgagcgctccgcttctcagccaggtgcttattttgccagtgcccacgcccagtcaagaagaggacctaagggctcccctggatgtgtttgtttcaaacacaccttcagctttggagctgcagttttcttccgacctgctcggcaggcgggagggagctttcccctgaggctgggatcccatagggacccgcaccctgcaccctgcacccactggacgcaccagcctcataaaaaaactccccgcctccttcccccctccctttgtggacgcgcagcaattattctgcccattgccgtgaaaaagaagacaaaagttactttggcgccccctctcccacacctaatacagaggattcagggactctctggcgcttccagagcctgtgttagggacagaatccgcactggcgacggcgctccgactgcgcttctggcgacggtcggaattttgctcggccccttgcaatgtttccatgggaaggttcgtacattcgtgaccgtccctggcagcggcccagcccgggacttggcgcttcactcgccattggtcagtcctcggcgtgacgcgcaggggggcggggcctcatcagctgtttgcgggatgccccgagcaggcgtattttggaaacaataccgcaccgtgcggagtggcctcctcccgccccggcctgtgcccgccgccgccgccgcccctgcctgcgcctcccgcctcctgccgcagcccggtgagcgcccgggtggccgccgggggccgggcggagttggatcgcagctccttggggaagtggggagcggagtcgcgctgcgcacgggggcccgggaagggtttgggctgcggacgtctggggtgaccatgaagaactggggcgctggggtgagggaacggggtgcagaacccacagttgggtgcgctgctccaagagggaacttgggggtagcatttgggactcgaaggagttgggtccaggtaggcaggggaacctggggtgcactgctgagcagacctgggcgcccgagaacggcccagcctctgggtctgactttgggataggacaggagctgtggggcatcctgcctctctgcggagtctgaaggctcctctccttaacagctgggctttttccctccttcccaatcgagtctgggcgtccagcccccgagtgctcgtcacgctggaccctggcgcggagccctggcatcacgactcggaggccgagactctctcctggagtcacccaggtctggggtgtgtgtgtgtgtgtgtgtgtgtgtgtgtgttcctagtcactgtcgaggatctgggtgtctgactactgccttctcctaagaggaggaggagtctaagttcagcatccctcttccagcccttaggggttgggatggctgcagcggggcttgagttcctttgctaggaataaagcattccctggccctgttctcaggaagtgccctcctcctcccaccgctctggacatcacctcttaagctcaggagaaaaatttcaccctctcttagtttacccttgaccttggccagcacccctccagaggcgcccacctacaggcaagccacctacagtttgtggagcgtgagaggggtccctggggcttgcagagccacacctt

SEQ ID NO: 711 - DNA, 6000 bp, Homo sapiens
ggatcctttgtaaggattgccatgctaaaccacttgccctctcatccgtgaccggagagaattgggtcactcttccagacataccacagactcctgcttctagacagcacttggctggagccaggctggccttcagggttggtcagtctccacaggggactctggcctcccgtgggctgccacagggccaaccccagtgaaagaaatgaaatgactgaatatgttcatgtcattagaaaaaggatgcagcagggggtggggaggagttggttaatggaatcaaatttgcagcaagataggagtctagtgtttggcggcactgtagggtgactatcgctaacaataatttactgtgtattttcaagtagctagaagagagaattttgaatgttcctgtcaacctaaataacaaagacaggctcgctaaagatatttaatcaaaagtagggcattgcaacaggaatatgtgtgctgtagtaaactgtgtgcatattccaggaggtaaagaaaaacaaaggtgactgggcgcggtggctcacgcctgtaatcccagcactttgggaggccgaggcgggtggatcacgaggtcaggagatcgagaccatcctggctaacacggtgaaaccctgtctgtactaaaaaaaaatatatatatatattagctgggcgtggtggcaggtgcctgtagtcccagctgctcgggaggctggggcaggagaatggcatgaacccaggaggtagagcttgcagtgagccgagatggcaccactgcactccagcctgggcgacagagcgagactctgactcaaaaaaacaaagaaaaaaaaaaagaaaaacaaaggtttttaaaggaaaaaatgaggaggattacataatggttttgaaataattatccttggctacaaatatcaataacaaaggtcacaccagtccgaggttggacaggcagttgctaggcagatgtctttgcagaagtaatttttgtgtgaggttgcagcagcctatgtgcaaggttgtaatttttgcagaatcttttgtgatcatttttggtattaggcatacaagcatgagaatcccctcttcatggcctccccagctctatttgtcatggtttgtttttttaaaacactagtgactctatttgaattctaacaactttcacattcccaacacaaatgatagacatttaagggattaatatgctaattaccctgatcattacacattgtatacatgtatcaaaataacacactgtaccccataaatacatacaattatgtgtcaattaaagatcattatttttaaaaataggaccagaaaaaaagatgcagaccctctagtaaggagatgggatcaggagtgattccatggttaatttaacccacataaacaactaatcgtaagtatggtatgagcgtttatgtaaagactgtgacaacaggaaatgtctgtctttgaacccaaggttatctaaccagcacaccaatggtgaaagattaactttgtcagaaaccaggaaccatgaagcagaggtcactgtttccaacctgtgtgttttccacggtaattggcagcctccccaagggaaattaaaacatatgtccacacagaaatttgaatgcaaatgttcatagcagcattactcataatagcccaaagctgaaacagccccaatgttccacagtggatgaatcgatgaacaaaatatggcgcatccacagaatggaatacaaagaaagaaagcgtggacacatgctgcaacatggatgaaccttgaaaatattgtgccaggggaaagaaaccagagacaaagagccacatgttgtaggattccatgtatatgaaaggtcctaataagcaaactcataaagacaaaaagcagattggtggtcacttagggctagggtgaggagtgacggttagtgggcactgagtttctccggggggaactgaattagatggtggtgattgcacaattctgtgaatagactaaaaaccactggactgtaagagggtgaattttttggtatatgaattacatctcaataaagctgttacttaaaacgtggaaaaaataataagcagtcactagctattctcaataaaacagaaaccacataggtaagaccaatattgtcacattttggttttggctgataatggggcaagtgagcatagtcaccgttgccagaggatttaccatttacaaataaaagtttctgtggagtgacaaccttttactgtgtgccaggtactgtgctaagcactttgtatataccgattcatgtaatccttgtgacagccccgtgatgccccatttttagatggggagattgaggttaggagagttgaataacttgcccatagctgcacagcttccaagttgcagagacaggattttcaccgagtcttattacaaactgcctcatattgtgtggactggaaattctatgttgaggttaatttattcatttgttgtttagttcttttcatcattgttgagttaccaatggcagttccagaggatttatcatttaccccaaagctactgcaaatctaagagaaaacaatgttcttgctgctaaagtttaatgtacaaaaaggtaaaatcatgactgtcttgcaaataaaacatgaacatgtatccaagcttttaactcactgattaataaggaaaccagtaagacgtcaaaaccagttcaaatgggaatttgatgtacagaaatttatattctaacaacacttatttagttcactgtaagaaatcatttgctttggcagattaggcactcagcagaagcaccagccagctcagcctttggagggagaattccatgttgttggacccatacatatcctctgtccctgctgccaagagctctttgttcatcggcccgttgagcagacaccacagcagctgcatagagaggctggctgacagccacagagcatgtaattctgtccatctgattcagggtcttctctgcagtggatgccctttggtgggcattcaggtgagatgcagatatcttcagtctgcccattcggagggattcagccacatatctctttccaagattttcttgtcaccaatcttccagtcctgttctttttaaggccctgaccatccagctaaaccatcagcgactgtccatgaatcaatttaggtctgtattctggccatctctcactccagacatagtggacagccttgagtttctgctcactggaaggattctccttcaccactgcccttcacagtcacccctgagtgagtgtgagtgaatactgcagctgttctctttcatgtggtaccagcacatcatacagacccatctataatccaggctggaggtttttctccctcagtcaactggacataggcagcatcccaagaagccatagttgtagaatgagggagaggaggcaaagcaacaggagttgatgttggaagagtctgagccgcctgctcatacaatttacttataccttctgaacctgcctgggctgtttctaatacaccatttccatttgatgataggtggctgctgtatacatccaattttatggctacgtaggtcagatgacatccagttcatgatgggagctcaagcttcatggtcaggcattctgcctctatcaaggcctagtagcaaggcagaacctgcttctcagaaggagagtagttatcttcagaagaggttctagatttactttagaattctagaggtctgtactctctcctgtcagtgcttgccagaggctccatacagcatccctgttggacaaagtcccactggatctgttggatcacaagacccaagtggtagggcagctttactgcagcctgaaccttctgcagagtcttctcttattctgctcctcaatccaccagcctgtcaattgggttgaaatagcacaaacacagtatatgttgccttcaaagtccaaaatggcttactgttccaggctgtgtcccccaaaattcatatgttgaaatcctaacccccagtgtgatggtattcagagatggggcctttgggaggtattagatcacaaaggtggagccctcacgaatgagattattgtccttataaaagagaccccggaaagctactccacacctactgcaatgtgaggacacagcaagaagcctgttgtctatgaaccaggaagcaggtccttacaagacacagaacctgccagggcctcaaccttggactttttagccaacaaaactgtgagaaataaatgcctttatttataagtcacccagtctatggcattctgctatagccgcctggacagactaagacagctgccaagtgccgtgcctcttttgtagtgatgcaagatgcagcaactcatctttcaccctgggagggctatttcaacatgctccagacccctgaacccccagaaataccactgctagtatccattctgcatcagtctggatccaatcaggagaaagaagccacggagtaatatgaactgagaaagtttaatataaatattagatggccgggcgcggtggctcacgcctataatcccagcactttgggaggcagaggcgggcggatcacgaggtcaggagatcgagaccatcccggctaacacggtgaaaccccgtttccactaaacaatccaaaaaaattagccaggtatggtggcgggcgcctgtagtcccagctactcgggaggctgaggcaggagaacggtgtgaacctgggaggcggagcttgcagtgaaccaagatcgcgccactggagctaaataacccgagtctcacagtgcatctgattgctacgcgaacacgtgcgcaccaccaggccttgccttggggactggaacaggtgcaggtgggattcccatcaaaggctcttctctcagtcctgaaaaacaatataccgggggccgggggccgggggccggggcggggcacggcagccctaccctgggggaggcgcggccgggccaagaaaaccagcgaaggcccggccccccagcagaggccggaccatggttgaccagttgcgggagcgcaccaccatggccgacccgctgcgggagcgcaccgagctgttgctggccgactacctggggtactgcgcccgggaacccggcacccccgagccggcgccatccacgcccgaggccgccgtgctgcgctccgcggccgccaggttacggcagattcaccggtcctttttctccgcctacctcggctaccccgggaaccgcttcgagctggtggcgctgatggcggattccgtgctctccgacagccccggccccacctggggcagagtggtgacgctcgtgaccttcgcagggacgctgctggagagagggccgctggtgaccgcccggtggaagaagtggggcttccagccgcggctaaaggagcaggagggcgacgtcgcccgggactgccagcgcctggtggccttgctgagctcgcggctcatggggcagcaccgcgcctggctgcaggctcagggcggctgggtgagcacgcggcggacaccgggacacggggcgggacgggcagccgggaagcgcccacgaggctggcacggtgaggaacccaccgcgccaggcccctggaacgaggtttcgtgaaagcagaaaggctcgtttcagcgggcctggaacgttcgctgtgaagtctggggtttctcctcccctggcagaaaggccggcagaaatcggccttcttagacggccgtgaaccgttccgaagcagctgcgcaggcttaggtctgctcacttggaccttgccctggccttagccgtcggggacttttaggggggcacccacgttaggtctgaacgttttgctcctatagaaatccccaaccaatgaagtcagcaatggcggggccccagccaggtggggtgtttttctccttcgcctattaaatgcgcctttggagagactcagacccattgatcacaaccccctacgcctctcagcctggccagagaggttgtgga

SEQ ID NO: 712 - DNA, 6000 bp, Homo sapiens
aggtaaaatagcaagaccccatttctaaataaatatttaaataagtaaataaagatgtatcaaatgaatggatacttgaaagaagtgggtaatctaaaatgacaactttgaaagtaaacattcatttgactgagtcctaggtgagttcaagaattactggattattcaataaatgcttttacacaaactctttagtcagtttagtaaagtcagactccctattcatatcataagcacatacacaaaatgccaattggatttaatattcatatgtaaaaaaaaaaagaaaagaaaaaagaaaaagaaactataagaccaccagaagaaaacaacagtgatgggccgggcgcagtggctcactgtaatcccagcactttgggaggctgaggcgggcggatcacgaggtcaggagttcaagatcaacctggccaaaatggtgaaaccctgtctccactaaaaatataaaaattagctgggcgtggtggcaggcacctataatcccagctacttgggaggctgaggcagataattgcttgaacccaggagatggaggttgcagtgagccgagatcacgccactgcactccagcctgggcgacagagcgagactccgtctcaaaaaaaaaagaaaaagaaaacaacagtgactatacaattttagtgtgaggaatgcctatttaaacataacaccaaaaactacacaagaaaaggctgaccatggctctgagctaatgtatcactctccaagtgttacctgctatgtagggcataagggctggaagccatgcttttttttccacggaatttttccccaatttttaagagcttaaatatctgcctattcaaggaaacaataagtaattgtaaaaataccctaaatcttgtccaaaaagtctggaaacacagggaatacagtgggtttttttgtttgtttgttttttgagacagagtctcgctctgtcatccaggctggagttcagttgcgcgacctcggctcactgaaacgtccacctcccaggttcaaccgatttccctgcttcagccttccaagtagctgggattacagatgtgtgccaccacacccagctaaattttgtatttttagtagaggtggggtttcaccatgttggccagcctggtctccaactccagacctcaggtgatccgtccacctcagcctcccaaagtgctgggattacaggcgtgagcaccacgcctggcctacagtgtatatttaacatcgtattttggattaacaattccatttatttctttagagacacttacctaagacagtatgtggaagtcaaaggaaaatatattgagcaatattatttcgaaatgttactaatacattgtttgaaaataaattagtcctatgtttctgactttttgaacacctatgaagtgttgtccagcgctttgggaggccaaggcgggaggattgcctgaggtcaggagttcaagactagcttgaccaacatggtgaaaccctgtcgctactacacaaaaattagccaggcgtggtggtgcatgcctgtaatcccagctacttgagaggctgaggcaggagaatcacttcaacccgggaggcagagattgcagtgagccgagatcgcaccactgcactccagccagggcgacagagtgagactccatctcaaaaaaaaaaaaaaaaaaaaaaattgaacaaggccgggcgtggtggctcacacctgtattcccagcattttgggaggccaaggtgggcaggagttcacttgaggccaggagttcaggacaaccccgggcaacatggcaaaaacctgtctctccaaaagtacacaacttagacatggtggcacatgcctataatcccagctactccagaggctgaggcacgagaatcacttaaatcaaaaagtggaggctgcagtgagctgagaccatgccactgcactccagcctggcaacaaagtgagaccctgtctcaaaagaaaaaaaaaaaaggaacaatctaaaagttcaataaaggattgtttaatatatacattatccataatgaaaataatagcattggaatgtatttattgacttgaaaaagagttcataatatattttaattatttatttttataatatagattcccatatctttccatagactgtagagggtgaagcctcagaatctgtatttttatttatttatttatttttgagacacagtctcactctgttgcccaagctagagtgcatggtgtgattttggctcactgcaacctccacctcctgagttcacgtgattctcctacctcagcacccccaagcagctgggattacaggtgcccaccaccatacccagctgatatttgtaattttagtagagacgtggtttctccacgttggccaggctggtctcgaactcctgacctcgggtgatccacccacctcagcctcccaaagtgctgggattacaggtgtgagccactgcacccagctcatattttaaatgaaaagaagaaaatggagattataaaccactaagtacattatctgatttttataaagacttatatgtgcaatttatacataaaatatatatgtgtgtgaatatatatatatatataatctgaaaggctatacataaatatgttaataataattatctttttggcttacttgtagtttgtaatgtttcaacaataagtatggataattaacaagatagggataaaaagataagtaataggatggcttactcgaaaccaaagcaaacactgatcaagcttattaaataataaagttactaaaatgaagaaggaactgaagatcttaaaaaaaagaaatcacataactatatatgatttccagtgattttctgccaccctgtggggaattctgcacattgcagaactgaagaagcaaagtatgaaactacaaaaacttctgtaaatcaagatgaaatttcttggcccaagtagttgtttagctaaagctctgttgatcagttttgttttctctactagctatttagtgaaattgctagactaggataaaaagaatacctaatacttaaatgtgattacaatatgacaaccaaggtcctaatacatatatatgaattcatctcacaaaaaccctataaggtaggtactattttcttcccattttatcaaagagacggactttaatctaccaatggtgggtaaatgttgccaaagcaatgtgaaatccaggcagaatgctgcatttttagtcaatgatttaaaattttgagcttttctgttcccctcaggcctgatcgtaccccaatggaatcacccaaatacttgatgctgagcctttctatggatttatcagatgaaactttggaaagggacttttttttttttttaagacagggtttcgctgtcacccaggctggagtggagtggcgcgatcttggctcactacaaccgccgcctgccaggctccagagagtctcccacctcagcctcccaagtggctgggaccacaggtgcatgccaccaagcccacctaattttcttcttttctttctttcttcctttctttctctttgcttctttttctttctttctttctctgtctctttttttttttttttttttaagagatggggtctcgccatgttgccctgaggtctggcgatctaccgactcggcctctcaaagtgctgggattacagtcatgagccagcacgcccaactgagagagactatgatgttctccaaacaaatctcatttggttgaaactctacagctgagtatggtctaatttgagtagtttaccttgagtactctaaccatggtctatagacctgggctcttctgagaactgtttgcaaatggttcacagagagagagtagaaaactctatgtcaattttgcaggtaattttatggctgttaactctaacgataaaaagttttgacttggactttgtatgtcttttcatttttctgttttattaacttgtcaaaaactaattgaaaattgaaaaaaataaaccgaccgttcccccagtgaagagaagcactgctgtaaagcttttcacactcaaatattaccaaactctaaggtcgcttctgaggcctaactccccaaaatgatgcctcggatatttttcctcgccttatttcttttttttctttttctttttttttttttttcctttttccttttatttgagacggagtttttgctctgttgcccaagctggagtgcaatggcacgatctcggctcactgcaaactccaactccgcctccgcctccgccctcgcctcctgagtagttgggattacagacgcgcgccaccacgcccagctaatttttgtttgtttagtagagacgaggtgtcaccatgttggccaggctggtctcgagctcttgacctccggtaatccacccgcctcgccctcccaaagtgctgggattacaagcgtaaaccaccgcgcccgacctcctccccttatttcatccattttataattcacattattgatcgctgataattgcacctattgtaatgatactgataattgcacctgttgtaataatattgatattgataattgcacctattgtattacaatattattattgatatcgataatttcacctactgtaatgatcaataaaggcaggcagaaagaaaacaaaagtaactgaaactaccaggcagcgtccctgcgaacagcaaagagggaagaaacgccttgaggcgtagtaacgccaccaataaggagtcgacgcgacgggtccgcccacaggcaaggaaggccgaccccgcgagtgcaggcgcgagcgctagcccgtgacgtctgagggggttggggggatgctgtgtgggtttcaagaagacgccacgcctccgccgccgccacgcccccgccgcctccaccgccggctgccgcgcccggaggaggtcgggatgttatcacttccgccggggcttctcactgtgtccgggtcagctgctgccgccgacgccgtaccgctgcggccgggggattgggccggggtctccaccgccgaccgaggggagcgggctccgctcggccctgctttttgcgacctggccgtcagccccacgtcgccggcctggaggggcgaagaggacgagggggccaaggcttcctccggggtgagtgcggcctgggagaactcggcacggtggctccggagctggactgggaaccggcctaggggcgaaagtctgtcgggcgcgtgcccacgacgtccggggagaggaaacccagagagttacccttggtagggggagccatagaacctgctcgggaggtgcttcctggatccccgccctgcttaggtccccgcccttggcttgggtcctgtttgtatttggcagtttggccccccaccccgtcgcttttccgtttctggtagttgtgctcgggatggaaccttgcccctcctccgctcccccacccttttaccctggtgtgggtgaagtggctgggctacgatggttcagtatttatgaccagcgtccgtcctggtacagaacaaagaaacttggacttctggtatgcctcgtaaccgcggggaatagacacggaagcagcataagtaatcagggctttaatagatcttccctagtacgctaaaccaaatacagagtgtgtacgtcaaaagccgagtccccgcgtgaatctagacacaaccctttctgtttaaatacctggcaaaatggtttggatttctggatgcatttcatgccgctggagagttacttgtctgtgtcttgtgagctctttgacgaaacagcttttccggtgttgcatcaagatagttacggtgcctcctatttatttaattgaataaactatgtgattgcattttagtgttgcttttttcattctcaccttctcttgattaggatctctatttcacctaatacctgatttcgtattttcaattaaatgtagtttttctaacattttataggaatctctgcaattgtagaaacaaattctgtaa

SEQ ID NO: 713 - DNA, 6000 bp, Homo sapiens
ttcctatggtcctgagccagtgctctctcaaacatctgccacagtgtttgtgagtctggtcctcacatcagccctgagaaaaagacgtaattattcccattttactgatgagataacagaggctcagaaagtggatgagcaggaatacaaataggcctgtctgattcccgagcctaaagaagaaggtggttggatgttgtagccctaaaggtgggtatagtttgaggggtcctggccacacaatgtgtcaccagcctctgtcctgaatagaaggcaatggcatatgcatgggtcatgatcccatagcgtaggccctgtgctggctcaggtggaaataggggcggtgaatgacaagtggtttcatacctgcagccctttacatgcacagctgctcacaccccatgtgccctgcctcccttgccccactgtggacttttctgttctcccggtgatccctactcttctttcaagtttgaatcaagctttccttttctctggaggctccttctggagtagatctgaccttttatggcattgggtctttatttgcccctactccagcacataaccccaggaggtactattgaatgtttgcggagtaaaagagtgtgtacacatgtccaggaaatccccatcccccaggttctctagagagaggcaaggcctcccatcccccagctccttcctcccttctctcctccccttccctgccccatccctgtggtgctgagtccagcaaggctagaggctgaagcagctgcctctggctgcaagaaccagtgcccccgggggtggggggggtagcaggaaaggttgccaaaccaagcctgctccacacctcccatctaggagggcagatggcacagggcagagtgggcatggctgggaagggctgagaagccaggccaccaggtcagtttgggaagaagcagcttcctgccggccttccatccagtaggcaagccctctggggaggaatcacctgtgcactcccttggccgagagcctgagagtcaggacttgacccgttgtcaagaagactgcatttcagactgcatttggcaattctctgggccaggctaggggtgggatggggcgcagagatgaataagatccatttcctccccaggggagcttattgccagacatttagggaataataataacagttaataatcattgcggactttaccaagtgccagacactgatcgaattgaaaagtaactgcatgctcacaacaacccaagagataaatgctactataagctccatttgacctatggggataatgaggcacagagagatcaaatagcctgccccagaccacatggcacgtaagttgcatgctgggatgcctgagtgtgggcccaggcagtctggcatcagagtctctgcatttagccgtcacactacacatgctgtaagccaacccaggtgccatctgccatggccaacatgcagcatcttaatccccaccttgcccccttgtcaggaggtttttaggctctgtaaacttgccaggcaccaaagtatgctttaggatatcaccatgactagtgccctttgctgcctgccatggttacatctttatctatgggcttgtattctcatccctgggaagcacaggtcctgtgactctaccatctcacagtcccttggaatgtcttttacaaagcaggtactcagatgtgtttgtcattgagggggttgagaatttccctaggtctctgtgacatgaacagactgggtctcaacctgtgcactgggaatcacctggggagtttaacaaaaactgatacccagaactcatcctcagaggttctgatgtaattgatgtagggtgcagtctaagcatgggggattttaagcaccccatgttattctcagttattctgatgtactgcctggactgaaaagttccagattaacactgttttagaaatcttggaagtttcagttgagggaaggcagcagagggaatagcttcagagaccagtaggcaagattcatgtcacagctcagccacttacaaattggatgagtttgagcaaatcaaatttctcaagcctcagttacatcatctgtaaaagaggataatgacatccccctagaagtgaagcacttgaagtaagattattgagcatctactaagtgccaggtgcttgggtgctcttaggggacaatagaaaacaagacagctatggccccttgtgatatttaccttccttaattcagtttaagaaacctttactgggtttgggatatcaagcactgtatgggttcaaagatggacaagaaattgtacttgcccttgagaaaaggagaagtagacactaattaaaatagaggaaggaagatgacaagagatgtaccaaccaagagtggtgaggttcaaaggagagaggtatttagagggcagaccagggaagtttctgtggaagacatgatactttagaaggctcttagaggatagataagattttgtagaatgggatgaagggtagtggaaacgaacaaaagcatggaggcaggaacagccaataatccaacctggcaaaagagctggatgtgcatgcagaggagggaagggaatgtgcatacacagcaggaaaataagggttggggccttaaatgctagggtgaggcattaacactcgatttggtcagccatgggaaccatgcagggactggaactgagttggataattcttagctcttaatacctggactgcctctggcttcattctggaatttgtgtcttcattgccactgtcctcggggcctccccttttctgctgatggccaccttggtcctgtgttcagtgccctgtcgctgccctcaggtgagggtctgatgaactcacccaaccttaagcataagatgcatctccagatggtagcttcctagatagttgcattctggcaggtacagtggaaggggcaccagactgaatctggaggaggcctggttctaatcctagctctgtctctcaccagctatgtgatgttgggcaagtcacctcccttctccgagcctcagtttcctcatctgaaaagtggccagggtcaattgacaatgacccttccagctgcaatggactctgactaacttgtcaattgctaaacccaagaatgtctcttttgactcatgtaaggggctgctgctgctgacaatgaggtattaagcatgaggctcaagggaaagagatggagaggccacatgtaggtgatcagcagggtcagctgagcccagccttggattcatcacagcccaggtactgggtatgagaatggagaaatctccagatgatttcagcccccagctattcaggtgttcccagttgaaatcccagacactgcagagcagaaataagccatacacactgtgctgtctgaacttctgtccctcagaatgcatgaacatagtgaaactgttgtcctgtgccaccaaggctggtaatggtttgtcaccagtgataggtaaatggaaatggaggaagaggtgtttagggatagtttggtgggggacttctcatgttggtgaaacttcaccagtgggtgtcattcccttaggtccgttgacatcagaaaccacctctagtcttggatattactctatatatcatgctgctcttaggagaggaggctcgctggctgcactgttctgaattattgtgaagtttataaacaaggaactctttgccgaggatgtcctggacccggaggcactgctcagctggggggtggggtccatctgtatttgtcccaatgtccaaaaggctgaagggtgtgtgtgtgctcacactggtagaggtcctctaggtgcatcttacacactccatctcatctcagccccaccatagcttcattaggagctaccggaaggtgcgtttctcccactttactgatgaagaaagagccatgcccaagaacacacatgcggagtggcagggcagggctttgaacctggtggtaggactctgaatctaaggcccttttgaggagccccatgggtgacttagggatggaaattccaggggttggaggggtcctcatttgcttcctctaaacagcctcttgttttgaaataagacaaatgaacttggcttaagttctgttttcccttccttcctcccttcaccccctcactctcattccttttttcctcagggattttttggcagagggcagagagaggaacccattcccaagtcctctattagagaaggcgtgatggtgagaggggggcttcactcagcaaccgtgccaggacaaagggcaaacgagggcaggccgctctcaggctgggtcgggggcagtgaggagcagagcggcccttctcatcgcagcccccaccttgctgtacgctgtgggcttgaggtttccaggagagtctgcggtgtagggagcgctctggctgggagggaggagacggcctattcctcagtggggcttcctcgctcacggtgtgtatggtggggagaggagcacacaagtaccattttctgaggattgtgccagaccatgtcatacgtataagctcattcaaatcgatttccagataaggccgggggagggtagccgacttgcccaaggccacgcagcatgtgcgcggtagagccggtagggacgcgcagagggtcttgctaccgactctccccgctctcccgggagtctgggagccctgaggtgtcccctacccggccgggaagctgggctctcgccccgggactgtccggagggggctccagcagggggcgccccgagccccgtcccgggcagccgggcgcgcctccagccggcgcctgggacggggctggccgctccgccccctcggctcctaggctgctcggcgggcgggtgccgggcgctctgggaggagaggactgcagggccgagcccagcgcaccccgccgcgtcccccgttcccgccgcgcccgccgcgcccgccgcgcccgccgcgcccgccgctcccgccgcgcctgccgcggccgcgaccgcggcagctcagcctcccgccgtgagtagcacccgtctgcgggctcgatgggcgggacggggcgcgcggcctgacggcagcagcgcccgggtctggggctggcggggcgaagagatccggggcactcgctcgcagatcccgggcccgccgccccaatgcctgacgccgtggcccggggcattgtggccggcacccgagcgcgggagctgcccgccgctgccctggggcgccctccggagcctggcactttgacctgggagacagggtagaggcggcgggcagagccaagcacccagcagggagatgggagacagacgtccatcgagttaggccccctggaacgggcagagcacgcccggctcccggccaagtcttctcagcttgggctgactctctcacctcttgctcccgcctggcacaaggatgtgatgcgaggagggtgctcagatgtctgagcttcctctggggctgaatgaagctggggtccccgccgtcaggcgccccggcctggggtagagctaggatgggcgtgggggcggccagcaggtgtgctgcaggttggggtggaacggcttggaagggcgttgccaacagttgactaggactctgggctaggcattttggaggtcccaaggcttgcataggtctggctaaccctcaccgtaactctgcacggtggaaattggtattcttactttacaaaagagaaaacaaggtccagagaggtgagcctcgttgaggccgtgcaggtaatggtaaggcagtggtgcacactggaggagagggcaccatagctggctgcctcgggggcaagcgggcaggtgcagggacagcgcctgacatcttgtatcctggaatcctgtggagggcagccactctggtttctgacactgcgactcccaactgcctctgtggaagatattcctgggagagtcctgttgacctaagaggccgtggtgccttggcctcttcacagctaacttcacagccctgtccttcc

SEQ ID NO: 714 - DNA, 6000 bp, Homo sapiens
ctgacaggtgagcacagagcacggggctgttggggttttgctttgtggggtgaccattagttttgtggcgaaggagtagcagaaggatagaatctgatacatcaggtccggaggttttgatgaagctgccaaatgggtctctggggagaaggaagtaaaagtactataagggagaaagttgtagttggataagagaataatcaagtttaagatttaagaggcagaaagttttttctgataatgccaaggtccacagactgaacaggactgcaggcatgtggctaaaggggaatagaggcaaaggcattggtgtctaggagctgcaggactaggtggacagtgagtggtagaagtggagggaacctagatggtgccaggaggaagactgtgtgagaagtgctgtttctttttctttttctttctttctttcttttttttttttgagacggagtttcactcttgttgcccctgttggagtgcagtggtgcaatctcggctcactgcaacctccacctcccaggttcaagcgattctcctgcctcagcctccagagtagctgagattacaggcatgcaccaccacacccagctaatttttgtattttttttagtagagatggggtttcaccacgttggtcaggctggtctcaaactcctgacctcaggtaatctacccgcctcagcctcccaaagtgttgggattacaggtgtgagccaccactcccgccccaggagtgccatttctgagggaatatgttacattgaccagggagtgatcagtgaggggccgagagagatgtgggttggtggcccaggctcagcagcctacatctcttcatggggtctttaggctaacataggatgatggagtatctgtgtatttcgccatagacagattttagtagttgcaacagagactgtatggcttacaaaatctaaaatatttacctgtaaaggtaaagaaatgaaacaaaaccgttagattattataaaacagagtgacagcttaaatttgtcagtgtataagaattttgtgtatacttgaaaaacactggcctggcaacttagtagaagataaatttgagttgtagtgtttctgtagttgagaatgagtgaatggaaacctgtagaagcaaagcagttaggagaaaatcatctagagaaatgttagccttgagagtgagttccacaaccacttagctgtagtggttgaaggaggaaagaatcctacctccaaattacaactttacaagaaacagaactactaaccttgagaaaccattatttatgccatttatcagcccaaactgaaaatttagtgctcaaagctggcactattgtataacacaagttgcagcataaattgttaaaaccctgttgaagggccgggcatggtggctcatgcctgtaatcccagcactttgggaggccgaggtgggaggatcatgaggtcaggagatcaagattatcctggccaacatggtgaaacactgtctctactaaaaatacagaaattagctgggaatggtggcacatgcctgtaatcccagctactcgggaggctgaggcaggagaatcgcttgaacccaggaatcagaggttacagtgaggtgagatcgcgccactgtactccagcctggtgacagagcgagactccgtctcaaaacaaaacaaacaaaaaaaccttgttgaaaatcattcattcattgaagaagtatctattaattaccttctctgtgtcaagtgtttggtaactgagcaaatatatagcttttttaggaagcagtttagaacacagtttgttagtcttgaaagtattcacaaacatttccatttttgagaatttttctttctttttttttttttgagacagagtttcactcttgttgcccaggctggagtgccgtggtgcgatctcggctcactgtaagccccgctttctggtttcaagcgattctcctgcctcagcctcctgagtagctgggattacaggcacctgccaccacgcccggctaatttttgtatttttagtagagacagggtttcaccatgttggccaggctggtctcaaactcctgacctcgtgatccacccgtctcagcctcccaaagtgttggaattacaggagccaccctgcccggccaagaatttttctgatagaaatccctaggaaggaaaaaagtaacatgcccaagaatattcattgtatcacaatataataacaggacatttggaatagcttaggtgtccaggagtagggaacttgataagtatattctagtgtattgatttgatgaaataggatacagccattaaataattatgaagattggagaagaacgtacagaatcaacagggagaagtggaaattacatacatgtaacgttgaactatatgaagttgctaatacatggacaaaaagacctgaagagaatgtgagaaagtataaaatggttgattatggtaatgggattaggattttttttttctttcttgtatctggtattctttttttttaaatttatttttttggagataagagtcttgctctgtcacccaagccagagtgcagtggcatgatcttggctcactgcagcctccacctcctgggttcaagcgattctcctggcttagcctcctgagtagttggaactacaggcgcacgccaccatgctcggctaattttttgtatttttagtggatatggggtttcaccatgttggccaggctggtcttgaactcctgagctcaggcaacctgcctgcctcagtctcccaaagtgctaggtttacaggtgtgagccaccacgcttggccctgtatctggtattgctaaaatgcttgggtaacatattttcctttaaaatcttcaaggactgacaggatagatcacatccacatcactctacattgattcacctggaagcttttgtattacagggccattatggtagtgagtgcacaattgcagtccactcaaatattcattaagttaaaatctttttttcttatgaaactttatgaaacatttcacacatgcacaaaaatagaatacataaacactcatcatcaactatgataccattgtcacaccaaaaaaattagcagtaattctttgatatcacctaataacctgactattttctccactgtggctttagatatgttggctatactgttagctgacctcatagttaaatcaggataataaccatcccagttttactgggacttggggctttcagtgctacatgcaggcaaaccaaaacagttggtcagcctactgtcagcagcagactgcaaggtcagtgtggttgttttaagtgtatcttcctcaccatccaagtgtgcactcccaaaattcacactcagtcagaggaagaattgtttattaattagatctgggagttgatgctaagggaatttcacaaacaatgaagttaagacaagttcctccctttagtgagctcactgtttcaagtggaggatcaagaccattagaaataaacaaagtcgaagccaggtatggtggttcacgcctgtaatcccagcactttgggaggccaaggtgggtggatcacctgaggtcaggagttcgagaccagcctgaccaacatggagaaacatctactaaaaatacaaaaattagccgggtgtgttggtgcatgcctgtaatcccagctactcaggaggctgagtcaggagaatcgcttgaacccgggatgcgtggagtttgcagtgagctgagatcgcaccattgccctccagcctgggcaacaagaatgaaactccatctcaaaaaaaaaaaaaaaaaaagaaagaaagtcagaggttaagtggtgtggatgatccagagggaggagttgagaaagtcagggtagggtcagagtaattgaatactcagaaacatcaaattgagccttaaaagattgggtaaaatttctaaattttaaccgatacatactatagctaggacttttaaacttcctcattataacacaaattttgggataagaaaacgtgtgtaaaaggccatttgggctggatgcagtggctcactttgggaagccaagctggtaggattgcttgaggccaggagttagagattagcctgggcaacatagcaagacctcatacaaaaaagttttggtctttttttttggagacggagtctcactctgttgcccaggctggagtgcagtggtgtgatctccgctcactgcaagctccacctcccaggttcacgccattctcctgtctcagcctcccgagtagctgggactacaggtacctgccaccatgcctggctaattttttgtatttttagtagagacggggtttcaccgtgttagccaggatgttctcaatctcctgacctcgtgagacctcatacaaaaaatttacaaattagtaggtagggccaggcacagtggctcatgcctgtaatcccagcacttagggaggccaaggcagggggattgcttgaccaggagtttaagaccagcttgagaaacacagggataccctgtctctacaaaaataaaaaaaaaattggctagatgtggtggcacgtgcctgtggtcccagctacttgggaggctgaggtgggaggatctcgggcccaggaggtcgaggctgcagtgagtcgtggtcatgctgccgcactccagcctgcacaacagagtgagaccctatctgaaaataaaaaataaaaaataaaaaaaagccaggcatggtggtgcacacttgtacttgtagctacttgggaagccaaggtgggaggatgggttgagcccaggagtttgaagttgcagtgagctatgatcacaccactgtactccagcctgggtgttagagcgaggccttgtctcaaaaaaaaaaataaataaaatgccattttgtcctgtctgcccaggggtctgtcctccagcctcagcagatgagacttttacgcatcatcttcagcgactgagaaaactcattaaaaagcgctctgaactgtatgaagctgaagagagagccctcagagttatgctagaaggagaacaagaggaagagaggaaaagagaattagaaaagaaacaaagaaaagaaaaagagaaaattttacttcagaaacgtgaaattgagtccaagttgtttggggatccaggtatgttgctctataaccagtggagaaaatgaaaatactagattgacgctcttctcatcacgggtgatctcaagctaagaggtggtaggcaacaaatgacaccttccagatgcaattctgtgtcatagaactcatggatacagatagaacacattttctcattctgtcgtaatcataggctcagtcaccttgccttgagaaatacactgtggatatcaagcatgataacgtggtattgtgcttttctctttcagatgagttcccacttgctcacctcttggagcctttccgacagtattatctccaagccgagcactccctgccagcgctcatccagatcaggtcagaggggctggctctccatgttgtctttctcttaggtagcaggaagcacttgaagaagtgcttacattgtttaggtctattactgtctttttttttttaagttccataaggaacttaaaaaaaactatgggtttataatgtttccatgtttcaaggatgctgcatacatcttgtttagtcctcattagtccttgagaagttgatgtccctatttttataggtgaagaaaaaaactcaggttgtgacttgccctgtgttagtaggcacatatgcaaatacagaatctgtaaataatgaggattgactttatttgttatttggttatccataaggtttaagttcttcagagtttttcctctttttatatgtacatttaagaaatatagtcattttcttgattcctagaaatcaagttctgtaatagattagtatatcagtcatttgaaagctaagtcttagaatatgtagttgctgaacatcttatttggaataaaacagaaataaa

SEQ ID NO: 715 - DNA, 6000 bp, Homo sapiens
accacagccggctaatttttgtattttttttttttttttttttttagtagagatgaggtttcaccatgttggccagggtggtctcaaactcctgacctcatgatccacctgcttcagcctcccaaagtgctgggattacagccaccacacctggccagcaaaataaactttctaaattaactgagacctgtctcaaatttggggggtttacagtttcaatattgttactggaaaggggtcccaatccagatcccaagagagggtgatatgatttggctctgtgtccccacccaaatctcatcttgaattgtactcccgtaattcccatgtgttgtgggagggacccaatgggaaataactgaatcatgggggtggttccccccatactgttctcatggtagtgaataagtcttatgagatatgatagttttataaagaggagtttccctccacaagctctctttctgcctgctgccatccatgtaagatgtgacttgctcctccttgccttccgccatgattgtgaggcctcctcagccatgtggaactgtaagtccattaaaccactttcttttgtaaattgcccagtcttgaatatgtctttatcagcagcgtggaaacagactaatacagtaaattggtacccgtagagtggggcactgtttaaaagatacccaaaaatgtagaagcaactttgaaactgggtaacaggcagaggttaacagtttagagggctcagaagacaggaaaatgtgggaaagtttggaactccctagagacttgttgaacggctttgaccaaaatgctgataatgatatggacaatgaaatccaggctgaggtggtctcagatggagatgagaaactcattaggaactggtgcaagggggactcttgttatgttttagcaaagagactggcagcattttgcttctgccttagagatttgtggaactttgaacttaggagagatgacttagggtatctggcagaagaaatttttaagcagcaaagcattcaataagtgacttgggtgctgttaaaggcatcaagttttaaaagggaaatagaacataaaagttcaaaaaatgtgcagcctgacaatgccatagaaaagaaaatcccattttcggaggagaaattcaagccagctgcagaaatttgcataagtaacgaggagttgaatgttaatctccaagacaatagggaaaatgtctccagggcatgtcagagatctttgcggcagcccctcccaacacaggcccagaggcctaggaggaaaaaatggtttcatgacccaggcccagggtcccgctgctgtgtgcagtctagggacttggtgccctgtgtcccagccactccagtcgtgactaaaaggggccaaggtacagcttgggctgtggcttcagagggtgcaagccccaagccttcacagcttccacatggtgttgagcctgcgggtgcgcaaaagtcaagaattgaggtctggggccgggtgcactggctcacgcctgtaatcccagcattccaaatgattgtgaggcctccctagccatgtggaactgtaaatccattaaacctttttcctgtataaattacccagtctcaggtatgtctttattagcagcatgaaaacagactaatacagagggtccttggatcttgtgcaagaaagatttcagggcaagtccacagtgcaaagcaaaagcaagtttattaagaaagtaaagtggtgaaagaatatctactccatagacagtagggcgttcctgaaagtaagaggagaaacgtgtccaccctaggtagaatgcttgcttatatataggataaaaaaagatcatggggagatgtgctctgccacaagggtttgtgataaaggattaattttttaaattactatattttacaagaatcaacattattatctttaaagcaaaattaggaatgcttctattctcaaaatatcgggatctcaggacactcctaagtacgggtctgtttagtaaatgttattagtctgttcccttaaccataaacatctagaggctaggaatacctaacttcctgggaatgcagccaagcaagtcccagcttcacttttcctagccctcactcaagatggagtcactctggttcaaatgcctctgacaatactgtactacagttttacaagatgttacccttaggggaaactgggtaaagggtacacagaatctccctgtattactacttctcatattccatatgaatctacaattgtctcaaaatagtttaattttaaaaatctaatcaggtggcacaggcttctctttacctcttgtttaaaaccaatagtttcccactggtcacagtggctcacgcctgtaatcccagcactttgggaggctgaggcaggcagatcacctgagatcaggagttcgagaccaacctcaacagggagaaaccacgtctctattaaaaatacaaaattagtcgggcatggtggtgtgtgcctgtaatcccagctactcaggagtctgaggcaggagaattgcttgaacctgggaggtggcggttgtggttagccgagatcgcgccattgcactccagcctgggcaacaagagtgagacttggtctcaaaacaacaacaacaacaacaaaatagtttcccattgttcataagatatgagaccccagacattaggacttcacttcaccaggatcaccagactcctctcagagctccatccataactcgcattcttttttttttttggagacaaggtctcgctctgtctcccagactggagttcagtggtgtgatctcggctcactgcaacctccacgtcctgggttaaagcaattctcctgcctcagcctccccagtagctgggattacgggcacgcaccaccacacctggctaatttttgtgttttagtagagacaggaattcaccatattgcccaggctggccttgaactcctgagctcaggcaatccacccgcctcggcctcccaaagtgctgggattacaggccaaaactggcattctatcaggcttcccactagacatagtcctgtaacctaaggcaggtccagttccctgcagcttgcaaattcaaataacaagtaagagaatggtaaaaagaaagtgactgccacgggcacggtggctcacgcctgtaatcccaacatgatccaaggcaggcggatcatgaggtcaggagatcgagaccatcctggctaacatggtgaaaccccatctccactaaaaatacaaaaaaattagccaggcatggtggtgggcacctgtaatcccagctactcgggaggctgaggcagaagaatggcatgaacccaggaggcagagcttacaatgagccaagatcacgccactgcactccagcctgggcgacacagggagactctgtctcataaaaaaaaaaaaagaaagaaagtggccaggtgtggtggctcacacctgtaaccccagcactttgggaggccaaggtggacggatcacctgatgtaaggagtttacgaccagcctagccagcattgtgaaaccccctctctactaaaaacacaaaaattagccaggcgtggcagcaggggtctataatcccagcaactgactagggaggctgaggcaccaagaataactggaacctgggatgcagtggttgcagtgagtggagagtgcgtcattgcactccagcctgggtgacagagggactctgtctcaaaaaaagtggggggtgcacgggacttggttgacctggatggcatgcaaggggtggggagggaccaaggaggtgctgggtctatgggacttgctcctatgtatccatcagtgatctggttggcgccatggaggctggggcgaaggcggagggggggtggggggtagcggggagctaggttgtaaattgacagttgtccccaggcaatcccctggtatgggaaagttccagaggtccctggtttaagcttcggtccttggaactaataagcgaacacataattagataagcttacagtgtagagagtgtctggtggagagaaggtaaaggttaattggatttttttttttgacaggtgtcattctgtcgcccagggtggagtgcagtggcgttatcgtggctcattgcagtctttacctcccagggctcaggtgatcctcccacctcagcctccccaatggctgggactacaggccgatctcgcctgcctcggcctcccaaagtgctgggattacagacgtgagccacagcacccaccctataattgcattcctaaagagctaaataggaggtggggtgaaaggagaaaagtaaaaataattcatttttctaagaaaatgggtagttggtcacactcctatttactagggcctttgcacatgttctcatctgcactgtgcttccctctctttttctatttaactatttatcttccagatctcagctgcagccgcagtttcttaggataaccttctccaacttctcgaagatactcaccatgattaattgattagtgtgttatactaggcagatagttccacgaagagaagctctgtatctctcagtctcactgtatgcggagtgggtagctctgcacctaggatgctcaataagaacggtatttatgaactgaacgacagaaggttgaacgactgcccacttatgcactgagccttccggagggacgagtctacaggggtcgcgcgtcgtaacgacgtcacttccgtcggaaggttctcatgaggagccactcagattcctgtcacttctcaaagcatctccgtcgtgaacatggccctgccaccattcttcggccagggtcgcccaggcccaccgcccccgcagccgccgcctcctgctcctttcggctgtccgccaccgccgctgccctccccggctttcccgccgcctctcccccagcggcccggcccttttccgggggcctccgcccccttccttcagcctccgctggctctgcagccccgagcctccgcggaggcctcccgcggcggaggcggcgctggcgccttctacccggtgccaccaccgccgctgcctcctccgccgccccagtgtcggcccttcccggggaccgacgccggcgagcggccgcggccaccgcctcccggcccggggccgccctggagcccgcggtggcctgaggcgccgccgccgccggccgacgtgctcggggatgcggccctccaacgcctgcgcgaccggcagtggctggaggcggtgttcgggaccccgcggcgggcaggctgtccggtgccccagcgcacgcatgccgggcccagccttggcgaagtgcgcgcgcgattgctccgggctctgcgcctggtgcggcggctgcgcggcctgagccaggccctgcgcgaggccgaagccgacggcgcggcctgggtcctgctgtactcccagaccgcgccgctgcgcgcggaactggccgagcggctacagccgttgacccaggctgcctatgtgggcgaggcgcggaggaggctggagagggtccggcgccgccggctgcggcttcgcgagagggcccgggaacgcgaggccgagcgggaggcagaggccgcgcgggcagtggaacgcgagcaggagattgaccgctggagggtgaagtgtgtgcaggaggtggaggagaagaagcgggtgagagcagcggccgctcatgggggtaggagtggtggtggttggaacctggagcagcaggaggctttaaacttccatttcccagggctaagcctctgttttacgcgcaaaatgaagcgatagctaaccttcccagctcataccaccatgttaattttgtgttaatgatgtgtggtacacaaaagttccaggtgcactgtaaaatcctgtaaacacaaagtataggattacacggtggcactgcacgaatgacaggtctcccctatcctgctccaacattgtccacttactctcaaaaccagtaagtgtctagttccttgtgtcttgtactgcccta

SEQ ID NO: 716 - DNA, 6000 bp, Homo sapiens
atactggaatattgtcttctttcccatcatttcaggtcagttagcttagattactattcagctagaaaaaacaaatgatacccttgcaaggactctgaacaatattggaattcagctgttttgtttctaataaaacatggtttaactgttacatgaatagaagttccttataagtgccaattacttctttccagagaagcagtgctaaagattctgttcattggtacactaagtgttcttcatgacccagtgttttatttcctataagttagctttttttctcagatgatttaatgaaaattatggcagtctgctcattgttcagcaaaatccatttcctcttctccttgaacacaaagcttgactatgtttcctagatggcccttgcagttagttggggccatgtgactgggttctagcttgttgattataagtggaagtgatgctgccacttaaaggcttgaaagtgccactgcatactgactgagatgcagtggaagccctgtgtttatgaggtggaccccctctcaggctgaaatgtctcttaagagtcatttcagcaacctatttacttgcccaccaagagagaaattgtgactaagaaacttttatggggctgtgccattatatgcttgtatccatttgttactgtagcctatgctagtaactaacacaataataaaggtttttttcagtcttagttttctattcatttgtagaccaattgtaaatgtgaatattgtatttccattgtatcttggcttacatgttcaaagcaccataaaacagataaaaggattatattaacaagtacttaatgtagaaaagatcagtgcaagggagtctatggaataacatgcaaatatgtctctttcccccaaacttagtgcttggctcatagtaagtataaaataaatgcctgttgtttcatcaataagtagtcctcccctctcaagctgcagactgacattttaattgctcattggacatttccaaacaggtatcttacaggaacaaaccacatgacatttccaaaacgaatctcttccttgccagcctctgcctactctgcctccaccaaactacctttatccttctggctctcctgttttgattaatggtacccttggaattgtcctctgttgactcccataaccaaatggttaactcgtcctctaaatttccaactacctttcctcctatcagccccactttttcaccactctatccaagcaagctcgccccaccctttctcatgtctaaattggcaccgtgtgctaagagttcccaggctttgggttttctcaccaataacatttaaaaaaagggtttaggaccaacatagaattcccaacttttaattttgccagataaagacattctttaaaaaacttatcttttattgttctatagactatttttaaaatggcaatgtagggaggactcagctttagaatataggacactcctctacattgaatttaattttatgagaattcactaccttgttcaagattgagtagttggaaactcttgtctagatcagcactggccctgaggtcttgatgtggttttgtggccagatgaatgtttctgagttccagttccagtgctcctccggtcaacaacagcctctctggttccctgtggcctgctttcccccacctggcattaaaactccccaaagaaggcctcatactaccttccagtgttatctctaatttccaggcaaattagaccttctgttattcctttttcttttctatctttgactatgcagttcttgcacctgtacagtctatccttttttccccaccacgcaaaattctacccaaaatttaagaccacatttgatatcattgcctcctttgaaacctttgatgatccattttacccacacaaacaagagctttcctctccttgaacttgcataacatggtaaagtatagcacgtggctgctttcttccacatgctgtgcttatttacctctcccacaaaattacaataaatccttaaagataagaaaaatgtttgattcatttttattacccctccattatttgaacattaaatgttgaatatatatttaatgacttaatgaatactttagacatagtgaactccagactttaaaaagtatctttgaaacatttaaataactttaatcttcaatgtcaagtaaataacagtagggtattggggaaacagattgctaagtaacttctttattctttccaaaatgagggaaacaaaactaaattccagtttccatgatcataacacagaagcttttctactataaacattgtattttaggctcctacccaggaattgtcttttattttaggtggctaaccaggaattgaattgtcttaaaagacaatgtgtaggagaaatagcaattacagatcttcctaactctgatctaattttgtgtacaagccatttttagtgaaggtacttgggcacagcttttattcctttagattttgtattcatcaaaaagcgagaaaaaatggggtgacaaaactcatctatttccctcttatttcacttttgaaggaaatcagagcacttgtacttccatgttctgtctttgacctaagaaatatttatttctatagtgttctattaggaaaatcaatattggccgagcaccatggctcacacctgtagtcccagcacttggctgaggcaggcagatcacctgaggtcaggagttcaagaccagcctggccaacatggtgaaacactgtctcgactaaaaatataaaaattagctaggcatggtggtgcacacctgtaatcccagctactcgggaggctgaggcaggagaatcgcttgaaccctggagttggaggttgcagtgagctgagatcacaccactgcactccagcctgggcgacaagagccaaatgtctcaaaaaaaataatatgtaaattttaaagttttattccacttatatgaataatagaaaagtccacaaagattaggtcaaatatattctatcttgttattaatcgtttttgggtttttttgttttttgtttttttgagacggagttttgctcttgtcgcccaggctggagtgcaatggcacgatctcggctcattgcaacctccgcctcctgggttcaagcgattctcctgcctcagcctcctgagtagctgggattacaggtgcccgccaccacacctggctaatttttgtattttttagtagagatggggttttgccatgttggccaggctggtctcaaactcctgacctcaggtgatccacctgccttggcctcccaaagtgctagaattagagacgtgagccaccacgcccggccatttttttgcattttttagtagagacggagtttcaccatgttggtcaggctggtctcgaacttttaacctcagatgatccacccaccttggcctcccaaaatgctgagattaccagtgtgagccaccatgcccagctgttattaagtgttttatggaaggtatgaaaataaaagacagaaccctataaaaatatagaacttttcttggctcttagcactggccaggaaaatacaatttgtaatctgaattttagagcatgtggtaagaggctttttatgtgtagctgtgcactacaactagagatgggaaaaacataatggttttttaaatttattccttttaaaaaataaatttcttaacatccagttctagtcacgattgagtagctggtactggactcacctttctgatgtaaacaacaatagaagctagacacattacgtgaaatgacaacatgcgtcactggattattatccttcagaaaagggaagcacgtggccaacctcacattcatcccagcacagagagatggagcccaaagagagagcggcagtgtctctgggcagaagaaacaaagatcggagctcaggccttctaacacagctgggtttggagggcaaggtcacttagaggcaggagctacagaaaaggagccctcaaaaattgcattaaaatttccctcagctattcagcccactgttaagatctgtatttgcagggcaagacttcagaatgtctagcagataatagtttttgggaggctgagagctgaacagtgatttcagaggctgcacaataatgtggatatgcaagaggttaggctcattctaatgtagaatgtgtaaaccttcgtggatgtctaggtattcatggagactctagaaagcccacatcctaggattatggaccatgaatgaccagtgttacacagtaggagtgagggctacatttatttatttattatttatctattttttaaatgtaatactgtttatttaacttcaaaaacatttcaacattctaagcaaaaaataacaaaacagcaaattgtgtttaagtacagaaggttcttgaactttcattgatacagtggctcttcgctttgctgacaatgaagagttctacagtttgtttaaaaacaaacagttgaaaaactaccccacttaattaaaacaaaacaaaacgaaacaagaaaacttctcatgccagctgatcccccattgtccacggctaagatggcagcagaatgctgtcattatatacagaaacaagacaacctgaagctaaatggatgccactgcagagtcaacaggcccagcctcacagtgcaggttctgagctatcgcccctccaaaaggcatcttctccacagcctcgatgccaagcaaggagcatccgagttcgtctcgtttgttttgttctttttacaaatatatatatatatatacacacacacacacacacaattgataacttagaatttctagccaataaccatatagttaataccaccttaccaaaaaaaaaaaaaaaaaaacagaaacatctttagatgccttgtcacacaccaatagcaaagtgcacagagggaggagaacacgagagtgccttttcattttgaaaatgtttgtgtggggtcgacggctgaggagaagctgggagcgagcccaggcggcagtttttaggtccatcagcactgcactgcaggaatggcagattttgggatctctgctggccagtttgtggcagtggtctgggataagtcatccccagtgcaggctctgaaagatctggtggataagcttcaagtgttaactggcaatgagggccgcgtgtctgtggaaaacaaccagctgttgcagtctgcccacaaataatccagctttgacattattttgttgggtttagtcctgggaagcaccactctactgagtgctgagattttggctgaaattgcccggatccttcggcctagtggatgtctttttctgaaagaaccagtagatccagctgtagataacaacagcaaagcgaagacagcaagctgtgttcagccctgactgcttccggtcttgtggaagtgaaagagctgccatgggagcccttaagccctgaggaggtacagtctgttcaagaacacctgggtcatgaaagtgacagcctgctctttgttcagatcacaagcaaaaaaaaaaaaacaaaaaacaactttgaagtgagttcttctagtcagcttaagctttccatcaccaagaagtcatctccttcagtgaagcctgctgggtaccctgctgctgccaagctgtggaccctctcagccaatgatatggaggatgacagcatggatctcattgactcagaggagctgctggatccagaagatttgaagaagccagatccgacttccctgcaggctgctccttgtggggaagggaaaaagaggaagacctgccagagctgcacccgtggccttgccgaagaactggaaaaagagaagtcaagggagcagatgagctcccaacccaagtcagcttgtggaaactgctatctgggcaatagtttccactgtgccagctgcccctaccttgggataccagccttcaaacctggggaaaaggtgcttctgagcaatagcagtctttaccatgcctaggaggga

SEQ ID NO: 717 - DNA, 6000 bp, Homo sapiens
gtgtggggttagatgtatactagaaggaatacagggaaaatccaaggtgggaacagggagagtaggcagaacactttgctacactgaaaaacaaagtcaaacaggttaaaacaagatatggcacttgacgtgactggtcttcaaagatgatgccactcagtattagttactatactattgatggatatgcaaactggtacatttattttgacatagtggtttcacaatcaggaatttattgtctagaattacttgcatgatatacagagagaagaacagatgagaccacctgttattcgtttcacctggacttaaataatagagttaagacacttcgagatgaggagtttcttctggagattgaagattgtgctggaagttgtcactgtagctgggttagtattgttagctctttttaagggtctgtaaaaattctacaagattcccagcgatctttttaagattctataaaaattcccagtcttttgatttcaattgaactcaaatatgcatttattgagcacctgatgaatgcacactactttggctgggttttaggaggttgtgatgcagggataactcagatcagattccttccctcaaagaccttggtctagagaagcctggcttgtaaaaacataaaatacagaatttatggtgaaataatggctacaatacagcattatgaaaatatgggatagggaagatatgatacattctaactggagggatgatggaggggagattcccagcagatgtggcatttgagccttgaaacagaattttgacagctctaggggaagagggtgggggaaagtggggaaggattcttttcctttaggttggaagagcatgtgttgctatttattaagtctttattgagcaccagcaaggtgttgtgtaaaatagacagcataaaaacaactataaaggggagataaaatacatccctgaaaaaaagtcataacagtaaatgatactgtttgattacctatcaaaacagtctacagaatccagaggtgaagcagaaatgcaggctacttttctctgggtagtgaattagccacttcaaaaatatttcagtgaagtcagtaaaggaaaacatgaggcataataagacatttctaccactagccctcctttcttcactagattttgtaaaaagttactgtttctatttttaattacatgagtaatcttgcttcaaaaaattcaagggataagaaaaagtaaaaagcaaaattctcccttcaaaatcccctgttctcctccaatctcatttctctttctggaagtaagcactattatcagcttactgtgtttccttccagaatgatttcagatgaattcatggaaatatgtaactggtgtaattttgcataagtggatatatgtgtttttctgaacttttttactcaacaccatattttagagaattttatatgttagcacatagaccatggagtacagagctacaacatttttttttttaaactggaattccacaattaggatataccttggctatttcaccgtttcctttttaatggttaacaagatgaaaactgctaaagtcttattggggtttttataaccaaacaagggaaaaacgactccaactctgggcctaaaagacatcctacttgaacctctcacttgcagttcctcattcaatccccaaactgcagtgtgtttcacaaatccagtctcctaagtgaagggaaagcaggaaacccttgacgaattcagtagtaatacaatgagataagtatgtgctgtgattcttaactcctagccttctccaaagggaccagtgatcatctagggataaatatgcactgaaaaaaaaggaaaatcgcagtatgccacagtagttcactggttagagtggggtttacaggggtgaagtaattaaaggaattttaacccaagtccaccttacagtaagttcgatggaaccctaaacccttccagtgttttttccccaattcctgagtgtacatttaaaggacataaggcagaatcttcacattggtttcctaacctttagaacaagggtgagcaagatagaaaagactatgaagaatccacagagctttattacactctccaacccccaatcaaaatagtaatgcacaagttataacaatcccttgttgactagctatagtgtcaccctaaaatatctgaatcaattatcttaatttatacctgccttccagcttgactggtaatgaaaacagatggacctggaagaatgactgacaattattaactcaattaagtagtgtacccaactgcaggtgcctttccaagcatggtctctttcaaggaacaaatcaacagagacccttgtatgtagctattgcttacgcaaatgctttctcctcctccatttaacaagcacttactgtcttacagtttctgtgagtcaggaatctaagcgtggcttagctgggtgcctccatctctgggtttctcaggcagctacaatcaagatgtcagccgggctgtggtcaactccaggctcacctggggagaatctattaccaagttcactcacctgattgttgtcaggcctcaggtccttactggctgttggctggagacattggttcctcaacatgtgtccggaattggtgggttcttggtctaacttaaagaatgaagccgtggatcctcgtggtgagtgtcacagttcttaaaggcagcatgtccggaatttgttccttctgatgttcggatgtgtttggagtttcttccttctggtggattcgtggtctagctggaccaggagtgaagctgtagaccctcatggtgagtgttacagctcttatggtggcccatctgagttgttcattcatcccggtgggttcgtggtctcactggcttcaggagtgaagcggcagaccttcgcagcgagtgttacagcttataaaggcagtgtgggcccagagtaaacagcagcaagagttattgcaaaaagcgaaagaacaaaccttccacacgacagaaagagactccatagggttactactgctggctcgggcagcctgcttttattcccttatctggccccacccacatcctgctgattggttcactttacagagagctgattggtccgttttgacagggtgctgattggtgcatttacaatccctgagctagacacaaaagttctccaagtccccactagattagctagacacggggtgctgattggtgcatttacaaaccttgagctagacacagagtgcccattggtgcattcacaatcccttagctagacataaaggttctccaagtccccaccagactcaggagcccagctggcttcacccagtggatcccacacccaggcgcaggtggagctgcctgccagtccccggccctgcgcccgcactcctcagcccttgggcggtcgatgggactgggcgccgtggagcagggagcggcgctcctcagggaggctcaggcatggcaggctgcaggtcccgagccctgccctgcggggaggcagctaaggcctggcgagaaatcgagcacagcagctcctggcccaggtgctaagctccccccaactgcccgtggccagcggggacggccggccgcgctgagtgccgggcccaccgagcccgccgagcccacgcccacccggaactcgggctggcccgcaagcgccgtgcgcagtctcagtttccgccggcgcctctagtcttgcttccctccagtccattcttcatgctacaggaagagtgagttttctggaatacaaatctaatcacaaccgttcccagctcaaaacctagcagtactctagtactggtgcctcagactaaaatccaagccccttgcttcctgaggcagagatgagtgtacgtgaatttttaaaaataaccatacagaaaaacagattctttgggatgtgcagttctgcgaatttttatttttatttatttttttgaggtggagtcttgctctgtcgcccaggctggagtgcagtggcacgatctcggctcactgcaacctctgcttcccgggttcaagtgattctcctgcctcagtctcccaagtagctgggactacaggcgtgtgccaccacccacgcctggctaattttgtatttttagtagccacgaagtttcactatgttggtcaggctggtctcgaactcctgacctcaggtggtccgcccacctcggcctcccaaagtgctgggattacaggagtgagccaccgtgcccggccttctgtgaattttaacacatgtatagattcttgtggccactgccatctattagtccccaaaacaacctcatgctatcctttcatagtcgtactctccctcatccctacccctatctttttaagaaggtcaaagaaatggaatgtgatcttttgaaaaacaaaaacacccaagccccttagggcgtttttaatgcccttgcctacctctcctccctgtcctccaacaactgccctcccaagccccacaatgcaactcgccggaactatgctcagttcttggggtgctccaagctgtcctccacttagccaagctccccacccgcttccgggggtgggtttccactgtgcacaacagtacctagcgcttcccccactacagccccctttcacgctgtggtaattgccaggttatctgcctctcccattacagttccttcctcacagggaccgcgtttaaaccacggcggtatccctaccgcgcaggatgggccgagccccgcacgccccgaggcagcaccccgcacgcagtagccgggcgtcgaggcgttcccagcccacaccaggcgcggacctacgaaggcggagcgagcatgcgcactaggaaggggcggggcggggcgcgcgcgatcccccgccccctgcacgcggtcccaggaggggcgggccttggccgctcgctctcccctcccccatgccgctgcgcttgcgcgctggggacaaccgttgctgggtgtcccagggcctgaggcaggacggtactccgctgacaccttccctttcggccttgaggttcccagcctggtggccccaggacgttccggtcgcatggcagagtgctacggacgacgcctatgaagcccttagtccttctagttgcgcttttgctatggccttcgtctgtgccggcttatccgagtgagtgacgggcctgaggaggcagcggaccggggacaccctgggggaacttcccgagctccgcgacctcgaagcctggcccttccttctccctggtcctacatgcctccctcccccactgtccggggtcctggcctcgacgccgaggggtgtccctctcctctcctggtcagggaacgcagcaactgaggcggcgcggcccagatgagacgggaagcgcctgcgggccgtgggcgcgggtggaaccccctcacctcaccggaggccttcctctgcccacccgatccttccccagccattgggcgtgtgaccgtgcaggggtcgtgtgacagctgctggccagctaggaatgatttttacattttcttcctttttttttaattattatactttaagttctagggtacatgtgcacagcgtgcaggtttgttacatatgtatccatgtgccatattggtgtgctgcacccataacttgtcatttacattaggtatatctcctaatgctatccctcccccctccccccaccccacggcaggccctggtgtgtgatgttctatttttgcattttcaaagtaaatatgaaatgtactctttcatgacttgtggaaaagcatgacgctcacatttcattgttcgtgaataaagttttactggcacaccaccacgctcattcctttacgtattgcccatggctgctttcccacgttagaacaacggggttaagtggttgccacacagtctggtctgcaaagactgaagtatttactctctggccctgtacagaaaaaaaggttgacccgtacggtaaaatttggagagcatgtggattgt

SEQ ID NO: 718 - DNA, 6000 bp, Homo sapiens
ttcttattatttttttaatgcatgtttttctttcctttcttttttgaggattctaaacatgcttaaagtctatgattttcacttcttaaagtatgagttcttctccctatttttggtttgattggctgtctttcttagcattcttgatattctttttcagatcttttggaatgccagcttactggttcaccttgaatggtaattgtgtgagtgcatgtgtgggtatgcatgcgtgcatgtgtgtgtggaggcatgtgcatgttagtgttcagtcctcatctaaaagttttgcggtagctttcaccccacttcctgggctccctagttcaattctggctttgtattggtgtctcaaggctcctgtccatggaaatcctgaggctattgtgggtccaatcaccaaggagcagttggcctagtctacttcttcactatcaggctttgtgaatttcttcttctctcctagatacaagatataaatcattgtcccaacaatggccagtcctagctcttttcagtgctctgccataggcagggtcccctctgtggagggtgcatggcaatatattcaagcttatgtacaaggcatttgaggtcgaggaatggaaaagtaccgaggcactgtgtgcatgttgtttgtgcatgcgactgaaactccttgaccctgaaaacagggcaaggaaaggaatgtgtagtaaggagcgctgaaaacagcctcctgagactatggtctatgtgtatttccaaggccatatgtgcctcatggcccaactgcaaagagccgcctggtggatgccttttgtttgaattgtagtttaaacaagctctctcaataaatattcggtggacagaccttggagcggcactctctcagaggagctgctccccgccctgctcagctggaattgtctgagtacttcattcttggcactcactgcagccacaagctgcaccctcagatgaggggttcacatcccttcacctgcagcagcctctacttgcctctggacttggagctgcgcagaactgtagcttcagtttcacttgccattgcatatttctgccttatctctggtcaatagagatgtttatctgtttttcaagagcaggcagtcttttaaaccgggcgcggtggctcacacctgtaatcccagcactttgggaggccaaggcaggtggatcacctgaggtcaggagttagagaccagcctggccaatatgatgaaaccccatctctactaaaaattcaaagaattagctgagagtggtggcaggcacctgtaatcccagctactcgggagactgaggcaggagggtcgtttgaaccccagaagtggaggttgcagtgagtcgagatcacaccactgcactccagcctgggcaacaagagccaaactccatctgaaaaaaaaaaaaagactttatctctcatcgctttgtgtatggcacagatggggaggtctcaaagggtgaactcagagtaaacttgatgcatctcaaccagaagtcccgagtgaccacttcttacttttctggctccagcttgtgggtgtgaaggaagggacattagcatggatgtacccctttggctgactgcagggtctcaggctccctcagccaactgtcagttctccccagctatttcctgggtaggcacctcacaggcactcacaagccggccactcacatccagtcactctgacagcctttggaggggatctcttcttccattgtcccatagtttgtgtctctttggaaagcacctcccagtgcaggggctctcccctgggcctccaaaattcacgacccctgaataaccaaataataccagaaccacaccaaattccctgcaaaattagggagagccccccaccttctttcttcagggtctcagatcagagttccagggcaaagctggagaagagactcacactctcccttgttccccaggaactatctgaagccccccaatccaacttcctccttagtggcaaatcggcctcaacaaggcaaactagctcaggcaagtgagcttgtcagacacaaccccactctgaatcccacgctgggctaccttctgcatgcaactggaaataaacaaacattccattttagcagtgattttaatctgggcaagtggattacaccgatttttactctttttttgtgcttttaggctttttttctaatttttaaataataataattattattttttaaaatcaagatggggtctcactctgtcacccaggctggagtgcagtggtgtgatcttggctcactgcagcctctgcctcctgggctcaagcgatcctcccatctcagcctcctgagtagctgggactataggtgcacaccaccacacccagctaatgtttttgtatttttggtggagatgggttttcgccatgttgcccaggctggtctcgaattcctgagctcaagtgatccacaaaccttggcctaataattaatgtttataatttgtgtaattataaaaaagtgtcattgagagaaaaaaatctctccttccaaaagttttgttagaaaaaagacgcttttaaaaatacattttctggcgaggtgcggtggcttacacctgtagtcccagcactttgggaggctgaagcaggtgtatcacttgaggtcaggagttcgagaccagtctgcccaacatggtgaaaccccacctgtactaaaaatacaaaaattggctgggcctggtggtgcatgcctgtaatcccagctactagggaggctgaggcaggaaaatcacttgagtccaggacacggaggttgcagtaagccaagatcatgccactgcactccagcctgggcaacagagtgagacttcgtctcaaaaaaaaaaaaaattttttttcatgtttattacttccctttaaaaacttgcattttgtccagatactaggatatgaactagattgttgtcagaactttggcaagtattgatgtgttgctccattgcttagcattgcttactggcttcctagctcctaggtaatcctaggcctttagctctcttcctgccaaatttgtcatgacctgactcctgctccctgctccagttctgctttcaaatgtgtgcgtctccaggtcattacctgaactgcttatagttcccaggacacagaatgcattctcatttcatgcctttctacacgatcttctagctgcccagaatgtccttttccgtttccacctggcaaactcctactcatgttctaaaacccactacagatcagtcactttcactgggaagtctcctcggttctcccttcccaatgctgtctcacaacacacttctgtatcttcatttaccatgctggattatcttacttgtctctgtgtatacaatcagggcctggatatagtgtttcctaagtatttgttgaattgaggcaggtttattcattccacaaacatacatggaatgcccatgatatagtgagcactgtgctagtttcctgggattcaaaactaatgaggcacagatcttgcctttaggggctcacagtccagagggacagaaagagacacacacagatagttacaattacagtgggtaccggcagctctgtctcacatcttctcattcttgcttttttcccttaactggccataacttgaaagtataattcatatttactgcttggcttatttcctcaaaagaattttctgtttcctacatattattcctgaactgatttaatgaaatgtgtttgtatttctctctttactttgccaggaaaactattgaaacagtcaaagtagcctccaaaattgctgctctccaggcatgggagcaccccatttccagagattaccaaaagatcactgaaattctgtagaacttgtcttgggactggccccaaacaaatgagaactggctgaatctgtgggtagaaaaatatgtgagtgacagcaaagaggcttccagtgagcccctgctggttcagaagacttgacatggccagcaccaaaggatccctttagggtacccccaccatgagccacatactgggagaaatttcttgtagcactctgctttaaaacaaaaccataatgataactaatcatttccctgattttggaaattaaccagagacatctaaaatcaccactaggacatcccaatctgcaccagatggccagggttatcagccaaagctgatctctttccaggcaaaacaaaaagtataaacactttgaattttaatcgcagagcagtattacctaagtaattatacaatttcccttaagtttaaaacaaaatagcttgcaggtcccacttttttccctaggctctatgggctaggaacctctgcaggtgactgtttcaatatagttgtacacaatatgttgagactgagtatagctccatgggtggttaactatacaatctccacagtcagcccaatgtagttgtaaaatttgtgctgagcccactggacacattacttcacctctctgtttcacttccctaatcaatagaatgatgccaacacccaccagatagggctgtgttacgaattaaactgagcaatacgtgcaaagttcttagcacagtgcatggctcagagtaagtgcttaaacatttttgttgataattgatattattgttattggcgaagtcttgcttgacttataagcagggcctgcctggagttgttggtgatttttttcacagtatgttcctagataacctagcttcaccatagtatttttgaggaaaggaaagagaagatactgggccagatggaagacagctcatccttcctaataaaactcttgccccattgcattccatgcttcctggttgggatttttctagaccaactcagccaccagttttatgagggactgtgggtgtgagcaggtctttaggagtcaggaagaggaggagtcaggggggtggctacacagtgcaggcagctcaatggacagcagtctttctgggacctgtgatctagaagacaggagaagatgaacacatctggagacccagcccagacgggccctgaaggctgtagagggtgagtggctcatttgtccagctttccatgccagggacaagggaaaggtgggattatttgcctttgtgggatctacaaaaggtaactgtgtctgccttgggcagaaatcagaagatctgagctctattcttgccttgctactagcaagctgggcaatcttggataagtcaccagccctctctgggtctgttttctcatctgtaaaataaagaactggccaagtcagtgtaatagcaatacccagcatttgtacaatgctttccagttgtacttttccaaacagcatctcatttggtcctcatagccctttgttggagagatgcttgtgggctggtcattcagctggtgcaaagcaaggctggacctaaaatcctggtctcctggggtaaattctggcctctggtgagcacattgttccccttgagctctgaaatctgaagattcccgctccttcctgctacctacagtgttaccttccttcccaccctattccctcaccacctagatcactctggctgtcccagtctcttctcagccccttcccagagttacctctccccttgcacaggcccaccacactgatcttgtttctgaaaagtgggaggtgaacagcagatacctcctccctgccttccctgcgttagcacttgcatgcagccctttttccagaattctctctgctttgtggaatgccttcccgagggtcccgagagatgaagaaagtggaggctgtttaacccctagggcagcatttctccaggtgcatgggtgggtcacccatgcgtgggtcacaagatccggggtgcaggtgaaatgtgcagattcctgcctcctccccaccaaggttggcgagtcagaatgcacatttttacaaactctcatgtttctggcaagaacatattgcagtttgggaaccactagtcattaggtgagtgctcttttgggc

SEQ ID NO: 719 - DNA, 6000 bp, Homo sapiens
ttcatacaaagttccacgcgttgacagagcagctcagaggatggggaaccatgagctggtctttacaggcctgtacagtagaccctggcgaatgcagactcagattgtagtggcactgagagaagatatcccccatctcttcacacttggtccatggtcagctacttgcctctgacccacacttccctccactccgccccgcaccagtcctttcacatttcatataaaagaaagaaagaattttcccttttttggaaagaactttgtctttctctctcccacctatccttgaaaagtgataatttggaaactccccaaaagaaactaaagcaggccatgatatgtaagaatttttatttcttatttttatttatttatttttttgagagggagtttcgctcttgttgcacaggctgtaatgcagtggtatgatcttggttcactgcaacctccgcctcctgggttcaagtgattcttcttcctcagtctcctgagtagctgggattacagtcaccggccaccatgtctggctaatttttatagttttagtagagacagggtttcaccatactggtcaggctggtctcaaactcctcacctaaggtgattcgcctgccttggcctcccaaagtgctgggattaccaggtgtaagccactgcgcctagcccacaatatgtaagaatttttaaagcaactccttttggcatacagaagattagaaatataaagccctaggctgggtgtggtgactcatgcctataatcccagcactttgggaggctgaggcaggcggatcacttgaggtcagcagtttgacaccagtctggccaacatggtaaaaccccatctctactaaaaatacaaaaattagccagaagtgttcccaggcgcctgtaatcccagctacttgggaggctgaggcgggagaatcacttgaacccgggaagcagagattgccgtgaacctagattacgccatcgcactccagcctgggcgacaagagcaaaactccgtctcaaaaaaacaaaaacaagggtctatcttttttctatttccacccattgcccaagccaggacccagtgaaggcaggtagttgatctttgttgaataaatgaaatgcctagctaattattattatttttatttttatttttgagacagagtctccctctgttgcccaggctggagtgcagtggtgcaatctcagctcactgcaacctccacctcctgagttcaaacgattgtcctgcctcagcctcccaaggagctgggactacaggtgcgtgccaccaagcccagctaatttttgtatttttagtagagacagggtttcaccatgttggccaggatggtctcgatctcttgacctcgtgatccacctgccttggcctcccaaagtgctgggattacaggcataaaccaccgtgcctggtcttatacttttttttttttataagtagagatggagtttcaccatgttggccaggctggtctcaaacttctgacctcaagtgatccacctgccttggcctcccaaagtgctgggattacaggcgtgagccaccacacccagccaaagatgcttgattgcaattttaaaaccacatgcttctattattattattattattattattttgaggggacaggatctcactctgttgcccagactggagtgcagtggcacaatctcagctcaccgcaacctctgcctcctgggttcaagtgattctcctgtctcagcctcccaagtagctgggattacaggcatgtgcctctactgcctgtatttttagtaaagacgggctttcaccatgttggccaggatggtcttgaactcctgacctcaaatgatccacccgccttgacctcccaaaggcgtgagccagcgggtccggctgcttctcttatttttaaagaaatattcagcaccaaggaaatgtaatgagagagagaaaactcaatcttcccatcctttccctggttcttatgatgctcaaagatgatttaaggaggtacagcagcctgctcttggctttgtgctcctgtgggccaacgggcacagtctaggaggcacgggagaactttcccaggggaattcctggagaagtggcttgacaacatatctgtatgctcctttgtgctctacaggtcctatatcagtctggatactccaagaaaatgtcatgaggggattagacgtctaacagatttactggggtaaatgcctgtgagggaaaagagggagggaggcagaagagactacagagctgtcagactacaatgcaggactgacctctgcaaaggacagaaggaggaagatggggtaggaagtcttccatgactgtgcagtcgaaggaagtttcagcaaagcccatggggagtcattgaagcaaagttacctatcaaaggaagttgacttgcaggaaccgatcttaaggttcctgctttgctcagtcattggctgggaacagcctgtaggatgtgtggcctcagtgcaaagctgtggtagattcaaagcactgcggctggggcccttagtcaattaaaccaccacagtaggtctgaaagatgcattttcatggctgccacgctattaacgagcattctaagcagcacctctcctttcctccttaaccctatggtgatagttcagaaatgcaggttatatatgaatcatttttcctatttgcagctggtcatagacaggataaaagactcaaagtcactccatatgtggatggaaaaaaaaagtgaattcaatttctccagcgaccatgagttatctcctttttcttccatccactgcaaaccttttctcaggattgctgccatagctaaatcaaatgagatttgcatttcacctatgaagttatatccttgataggtaaagagatgattgggaggccaaattcctcattagtccacaaaagaacaatgaggaactagctttgattaggcacgtacgttttaccaggcatggtgatagaggctttacataggtcatctctttgaacttcacctcaaccctctgaggtcaacatgtattgcctcattttacaaattaagcacagacccaaggtacatactgagtaaagaaagagagatttggctgggactgagtccaggccctctgactgtaagtccagtgctctttctggtcctgcaatttctaatccacacatcggatagtttacctgagttaaaaatgtgaattaagtcaggcttaaagcagaattttgttttctatcagaaattctagagtaggtggaaggtgaagaccaaagaaggtattttctttttctttttcttttttttttttttgagatggagtctcgctctgtcgcccaggctggagtgcagtggcacaatctcagctcactgcaagctccgcctcctgggttcaaaggattctcctgcctcagcctcccaagtagctgggactacaggtgcccgccaccatgcctggctaattttttgtatttttggtagagatggggtttcactgtgttagccaggatggtctcgatcttctgatctcgtgatccgctcgcctcagcctcccaaagtgctgggattacaggggtgagccaccgtgcctggcccaaagagggtatttttttcttccctctcggtatcatccttactcaattacaaatgatcaagggcggtactgccagagtcacctcgagaggccctgttctctgccacccaggctgttttgtagtctccattccaaattgtcgttactccggtttaccccgtggatggcgtttaagacttttcttaaatttgaaattcacagaaccattttaaagtgaacaattcagtggcatttagtaccttcgcagtgttgtgcaacttccacctctatctagctgcaaaacattttcttttctttttttttttggagacagagtctcgctctgttgcccagactggagtgcagtggcgtgatcttggctcactgcaacttctgtctcccgggttcaagcaattctcctgcctcagcctcccgagtagctgggattacaggcacacgccacccgcctggctaattttttgtattttagtacagacggggatttaccatattgcccaggctggtctcaaactcctgagctcaggcaatccgcccgccttgtcctcccaaagtgctaggattacaggcgtgagccaacgcggccggccttgtaaaacattttcatcacacaaaagaaaaccttctacccattaagcagttactccttcctcttctcagcccctgtcaaccaccaatttgctttctatcctatggatttaactgtctggatatttcatagaaatagaatcacataatgtatgaccttttctgtttggcttctttctattagcctaatgtttttgaggttcattcctgttgaagcatgtatcagttcttcattccttttttgggatgaataatgttccataatttatttatcctttcgtctgttgatgaacatttgagttgtgtccacatcttggctattgtgaatagtgctgccatgtacattcgtatgtaagtatttgagtatctgttgggtgtatacctatgaatggaattgctgggtcttttgacaattctgtatttaactttttgagaaactgccaacattttcacaggggttgtaccatttcacattcccaccagcaatctacaaggattctaatttctccacatcctgcatttaagacttgcaaagctgaattaatcacaggatgaggaagtggcttctctgaaacattttcctctttcacattttaaactttctctttcatacatgacatgaaacacagcctacgcacgaaagtgactaggaggaaggatattataaagtgatgcaaacagaaattccaccagcctccatgtatcatcatgtgtcataactcagtcaagctcagtgagcattctcagcacattgcctcaacagcttcaaggtgagccagctcaagactttgctctccaccaggcagaagatgacagactgtgaatttggatatatttacaggctggctcaggactatctgcagtgcgtcctacagataccacaacctggatcaggtccaagcaaaacgtccagagtgctacaaaatgttgcgttctcagtccaaaaagaagtggaaaagaatctgaagtcatgcttggacaatgttaatgttgtgtccgtagacactgccagaacactattcaaccaagtgatggaaaaggagtttgaagacggcatcattaactggggaagaattgtaaccatatttgcatttgaaggtattctcatcaagaaacttctacgacagcaaattgccccggatgtggatacctataaggagatttcatattttgttgcggagttcataatgaataacacaggagaatggataaggcaaaacggaggctgggtatgtgtgatggaaaaattcttcattgttctttcctgtgaaatagaaattgagaatttccttgctagttaaaacaacaacaaaacactttacctaagaatactattttccttgggtggtttgttttaatttttaaaataaaaatatactttctggcttatttccaatgaatccttgaacttgaactttatagttggaaagcacttatgttttcagtttttattcttaacagtataaattacagtagtgagctttggggattaataaagcacctctctcatgcagcttcacaatcagctgtgcacacactctaatctagtacttagcttttgctagggttgtcatgacagtacagacagtacagaaatttctacaatcagcacagaaagttgctatcagatgctgttatttttaggtatttatgggttgcaaaagacaggtgtaaatttttgtaagttcatcgcttacaaattggtgtttttcagtttactaatacataataaatagtaacatatattaatatatagcaaattacattacatataatatataacacattattactaataataaattccgg

SEQ ID NO: 720 - DNA, 6000 bp, Homo sapiens
ccctgaggtcagacctgctcagccagagaacccacccaggctgagggtccacatgtggctgggggtcctcccccaccgcccagggtgtctggtctgtccccaaggctgcatgctgtcctggtggtcccacgtgtggtcaggagcccaggtccagcaggagatcagggttggctgtggtcaggaagaggcagatgcggcgggagaggtcaggccccaccctgcggggacgcccgccttcactgggcggcacaggaaggtcggccaggaggcccatgcgctcccgctccgtgctgcaggcctccagcgcctaggagcaggcaaaggcatgagagggcgcctggggacggggcttctgcacctggagggcttggaggaggcaggggcccacctgctgcagaaggcggggggaggggaaggctgtgacaactgcatcagccacggctgggctgacccgactgaactgcctgatctgcctccgccaggccgcctgcagccctgcgccgtctcttgccactggctcgccggctgcccagcgccctgctgtgcagaaggagaaggcctgggattcccggtactgcctggggacagagagaagccttttagaacctcatgtgagcagctcccaaaaggccggggaggcaccactaccttgaggtgatcctgccccccttcagccttggcatcacgcacttgaggggatactgggcgagagccttggtaacggcgcacacgtgccgactcagctcctgccaagaggccaccagtagcacgtccaggtttgcccagagctgcaggagtaccagggcctggggaggaggcaagctgatgggcacgagccagaggaaggctacccgggacacacagctgatagctgccccatgtaccacgctgggaaccaaacccagccagcagcccaatcactgggacccaggccacctgactcacccagctcagacaggccctcacctcttccacctccggccagctgacggccacctcggcaccggccaccttcgggctctctggctgctgtgtcccccgggaaacgtgctggcgagacctgagcagaggtgaccattcctccccgctccccatggggcctgccctgcccgagcttggcctctgccagagcccacctggagaagtgggatcagctgtgccacagcaaccccagaagtgtgcccacctcccctgaacccccgtcccagccagccctgctgtgggcatgagagtgagcggtaccacaggtaggcatccagcccgatgacagccaggtggggccgggcggtggtctcgggggagatccagggcacccagtgggttgggccagagatctgaagatgagaacgtgtggcacagttgttcacaggaggctgcggcctatggccatgggccaccaggccacagctggtttgcagaacagcaagcctgaaaaagagccagtggtgccgagaggagcctctgttccgttaccccttctgagaaaaccagctctgtgcctcccacgaggccaaagaggctaaggagaccctggagtggctgctcgggcacatgtcagttccattgagcccctcatcctggtccacctctgtactccagcctagctttgacctagcacaaagcagcagcttgagagacactgatcctgggacacagggacctggcagggggtctagcctaaccccacgctacctggcaccacagcacctgagcactgctccccgcaggcaggggccaggctgtctgctgtcagaggacgaagcctgcagcctactgcccggaccccggcctcctgacacttctcaggatcctctaggagcagctgtagcctccgcaggtgcccaggagctttctccatctcaccctagaaacctctacggctttggatcagagaggagtcctggcctgccccatgccccctccagccccgtctacaggggcagggaccggcggagcaggcgcctcccggctgggaacccacccctcctgattagagagggactactgccaccacccgagcacctgggtcagtgtggcgacgccctgcagaaactcctcgggctccagcagcagcagcaattcctgttcacctgcagcccacacttcaggaggcagctgtggggacatggggacgcgctgctgcctgtctcaaccccgggtgccccaggggccctgcctgggcagtccagcagcaaagcggttcgtggccccagccaagcccaggccctgacaggcctgctctacagaagcccagtgttccctttcctgccaaggccaagctcaggccaggtctctgtggctggcaggaatccagaccacagcctgaatcgagacggaaccttctccagccagctcggctctataccagcagaacggcttgggcacctccacttcccgttctccatccttgctttacccatccgcgagacgcgcacggcccagggcagctgcctcagggacagctccagggctgaaatcatggaagcaaaacagccaactcgcggctggccctcgggaacccgcgaccactcacgctgcgggggcaggggtcgggactcgctcgggtccaccgcaggctgcgggccgggcgctggggctcgatgcggcactcgcagcccagggcctccagggcctccatcaggacgtcggcaccggcgtcttccaggatggctgggaccgggggagaggagcgcggtcactgcttccttccaccctcgcgagcgccctacctgggcgggtggccggaccggggagtctccattcggcacaaacccccgactgggaggcgggcccggccccaggcccctcggcacgcgcgccccgcccagtcggacagagggcgccgcctggcggagaaaggcctttcctaccccgagtatcgcccgtgccctccgccgcacctgtgtccacgcacaccgcgaggcgcttcaggacctgctccggccgcagcagccgcaacgcctcggcagccgccctgcgctcacccgctgggtcccgggctctcgcggcggcctccgagccggcggagtcctcagcgtcggagtctgagatctcccaggttggaggtcgccgctgaccgctcccgccccgtccccggccccggccctggcaagagacccccgccctcccgggtccaacccgcgccatggccggaccgacctcttcctcgcttccggccgcgaccgaacactttagcctgggacaccggcctcttccggtgacttccggccggaccgctgaggacgcggacccgccatggcgcggaagaaggtgcgtccgcggctgatcgcggagctggcccgccgcgtgcgcgccctgcgggagcaactgaacaggccgcgcgactcccagctctacgcggtggactacgagaccttgacgcggccgttctctggacgccggctgccggtccgggcctgggccgacgtgcgccgcgagagccgcctcttgcagctgctcggccgcctcccgctcttcggcctgggccgcctggtcacgcgcaagtcctggctgtggcagcacgacgagccgtgctactggcgcctcacgcgggtgcggcccgactacacggcgcaggtgcgtgcaccccgtccgcaccccgcccctgcagccgcctggtctccccgcctcccctcctccctgcaggtttgcgtggctgaggctcccacctcctgacctcgggggccgagagctttgcgagctgaccccgcttccttctggctttgcagaacttggaccacgggaaggcctggggcatcctgaccttcaaaggtaaggctcgggagagcgggtgcccggcagttcgatgccgaccgccgacggcacagcaagtgtgtgcagacgcctctttttcttcatcagggaagactgagagcgaggcgcgggagatcgaacacgtcatgtaccatgactggcggctggtgcccaagcacgaggaggaggccttcaccgcgttcacgccggcgccggaagacagcctggcctccgtgccgtacccgcctctcctccgggccatgattatcgcagaacgacagaaaaatggagacacaagcaccgaggagcccatgctgaatgtgcagaggatacgcatggaaccctgggattaccctgcaaaacaggaagacaaaggaagggccaagggcacccccgtctagaatgccagaaccagcgggtggccttaggggctgtgaggcagtggggaccttattgatgaaagaaaccgtctttgcgttacacccgagtctgcctctcggagcagggagctcaccttccgcgacgtgttctgagggtctgcatcttaggggggagggctggggcaaatcgccacctgtgcctttcctctggccctgctgcccccacacccaactccgagggcccacgctggggaaagcgggaagcgctcgctccctttcccccattagtgctctctctgcctggatcccggcagaagctatgaaagggaataaagagaaaagaagtacccagggtcgtggtgtctttgcgctctgtctttaggaccggggagagaagggctgacgctgtggtcgtggccctggccgggggggcgcggggggggcggggttcgggcggtgcggagcagggcgccgcgtgggtggaaccacctgggcgggttgtgggggatacagttagtgtccgagctgctggaggagacttggcctccgcagctgccctccggccccccacggctgccgggttccggggtgcaagtgaagcagcctccccgcggaggccgcagcgccccgaccaggcctctttaagcgcaggccccgccccgggcgccaccgccccgccccgcggatcccgctcccgcaccgccatcatgatctgcctggtgctgaccatcttcgctaacctcttccccgcgggtgagccgcgcggcgcgggccgggggcgggtggccggtgctgggccggcctgacggcccgtccccgcctgccccgcagcctgcaccggcgcacacgaacgcaccttcctggccgtgaagccggacggcgtgcagcggcggctggtgggcgagattgtgcggcgcttcgagaggaagggcttcaagttggtggcgctgaagctggtgcaggtgggggcgcggtgagcgagcgggggcgcggtgtggggggaaggggagcggggacctggggacgcctaggtgccgggtgcgggcgcaggcggcctgacccttccgcaggcctccgaggagctgctgcgtgagcactacgccgagctgcgtgaacgcccgttctacggccgccttgtcaagtatatggcctccgggccggtggtggccatggtgagtatccgggaagcgggcgggcggctccgggacccccacccccgcgtgataccgcgcccgttcctccgcacaggtatggcaggggctggacgtggtgcgcacctcgcgggcgctcatcggagccacgaacccggccgacgccccgcccggcaccatccgcggggatttctgcatcgaggttggcaagtaaggcccgccccggggacggtcccagccccgtccggcctccccctgttcagcctgcgtggtacccgtgccggaggtctctttcccacgctcacacgcgcctcttccgcgcaggaacctgattcacggcagcgactcggtggagagtgcccgccgcgagatcgctctctggttccgcgcagacgagctcctctgctgggaggacagcgctgggcactggctgtatgagtagcccggcagatgcgcgtcacagaggctctcacactccagcctcctccagggcccaggtgggcgggcttctggccccaccccacagcgcttggagcatccctttggacgggctgctgaacatccacctgtctggacgttgcatggagggtggcgcaggcctctccaatccctggcgtacagggtttcctgcccgaggagctgctccaggagcctgcgcggctcgcctggaaacgtgccaggacactgtcctggtgcccagcccaacgtggtccaac

SEQ ID NO: 721 - DNA, 6000 bp, Homo sapiens
ttgaggaagcgcagcatccaccctggggaaggccagtgctgaccttcaggggcgaggtgcgtgggtcagcaccgtgcagaggggaagggcaggattggccccccaccgtcccctccagctggggccaacgcagggcagcccctccctgacctcgcctgaatctgggattcaggcccagggtctttgtccaccccacattcacgtaggagggattccggggccctgggggcacccactgtgcaataaggaagtggaagtcttcctcagcgcctcgctgcctccaccccagcccctcttcggcaaatccctcaggagcccctccctagctcccacaagctgggcttagagggctctgctggggcatcgccctgggggcatgtgggatgcggacacccacccctttccctggagacacacctggagggggtctgggtcaggggtccccgcccacttggcagcagcctggggggccctgctgagtgggggagatgggggcttccagatgcagctccctgctcgggccaggcccggccttaaagcagctcctccagcaacccggagcaggtggggtgtgggggtcccctgaacatgtgtggggcgcaagccatgggtgggtgtgcctgtgaggcctgcaactgccctgggaggagcctgggacggctccagaagcctccgccccgcctgccacagggctgtgtgtggccggctggctggactgcggccagagctccgagcgtggcccctggcatcacagagcctgcccagggcacccacagactgcccgccccagcccagcccctgcctcagccccctggcccaagcccaggccgctaaattctatagaaacaggcctggttgccatagcaaagccacacgcacttccgccgctgttccctgacgtcccttagaacgttttttccatcccaaataggcagggtgtgacgtcgaaggctcctggggtgccccggcctctgccagccttggtccttaggatcccctcagaaccccagcaggccctggtctgaggccggcttggccccgcttccctcctagcacggcgaacccccttgcctgtccctgcccccaacacccacagccccagctctgcagaggcctctgaactcctcccccagctctgctcctactgcatccactcagcctccaggcctgtcttgccctggccaagcctctccagcgtccgtatctccctctgctccagggagggggtccccacagctcggccaaggctttaccccaacttcacagtaaggatgccttttgctgcccctccgaccccttgggggctggcaacatctctcagtccttttttcccctgtatctcatggctgtctattgtgtggggacctggcccagtcgaggggaagtccagagggcttcctggaggatgaggctgctgggatccagagtggggagagtatcctggggcacaggaagagaccccagcttcacagctctgggctggggagtgcgttcctggctctcacccaagtcaagtgggcctcagactctcagaaacaggtcgtgagctttgcccaagagccaagggtggcagtgtcccccccccccccgccgagcccacgcttcccagtcccacgctgtgttctcatttgcttcctgtgtggctcggtctcccgggctccctccttccttctgccctgcagcagcagggagctgacataaacactggccatacatgggcccgaagaggcaacaggaatgtgagggcagagaccactgaccccctcagtcacccagcgccctcatgccagcgtgccaccgcactgccacctcctttcccacaccgtcccacggccctcagtcctggccctctgcgtcgctgccccctacttcccacctgggtgcttctggggttgggtcacctccaccccgagtttccaggcagccggcttcctccagccgggtgagggtgtccgggtctacacgtgaccagccccagcctccagtgcccgctttcccctttcacctgccccacctggctgcaccctcctcctccagggagcaaggctggggacagcagcggatctgtcaaagactaaggggttggtgggtccctctccacaggttccccccgcatgatccacacagagggcctggtgaagtcctcggtgcccacccactgagaaggccggactgagacacacgcagccaacagctctcggccctccccacatgccctccctgaccccgcagggtgtccatccaggagatgctgtgacaccgtggtcaaggccacaggcactgggctcagacagagctgggttcaaagtccacttctaccacttcacagctgtgtacctgccctcctggcctcgggcttctcgaaaaacggaatagagccagaaccctgtctggaaggagccgagagaagatggatccgtcaagagtgaaggcaccccagacagcagctcctctgctgagtggaccatggaggctgaggaaggcggagaggccggcccagggacacagccagcaggctgtgccgctgtgaccagagtcacattccttctgcttcgtccacggctgccacacatccaggagccccggcagcgcctgagccagtcccatgccaagccggggagtggctgcatcccagagccaggctgcccaggcctcctggccaggaggctcttcaactgcatcttcctcctttccccaaactgctcattccttgtccaaccagctggccgagagtcacaccaaccacggggtgccaggccccatgcgggagggtggggatgtgtgacggctgaacacgaatctgacccgggaggagctaggagccttgtgggggacacaggcagacagaggggcaggagccccaccaatcgccactcaatctgccaaaggcacttttcggtgggtgccaaagaccctgaacttttccattcacttccagaaatatcgtaacacttggccccagtgggccacggtggaagtcacttcaccagagaccctcaggttggggcgtcaggttggggtgctgactcccagcccctcccctccttaggccaggctgcccataccactgctccccctcaggacacggggcccgaggcttccacagagaactatgaatgcccagaacagtgaagtcaggatattcgcaacagagaggcacagggaaggggtctaggaagggagaggcccaaagagaaggaatgaggaagagggaggctcctcacttggcgagggctagggggcctgtgtgtgcccaggaaggggtctgaggggtagtgagaaaggtgggcagacaggctgggcggcatgaaattcctgagcaagccagcagcccctcacccccaagagcagggtgggctccagcaggcccctgcccctggactccagactcaaccccagctgaccactctggcctggctcaagacaaccgtatcttgacagcaggaccccagtggggactaggagacgatggcctagcctccctctctcctgcttccccagtgaactctgaagtctgtggtccacacacagttagaaagctctttactggacctagatcggaccgcctctccagcgcttcctcaaccccaagtcatttgccagcataataacccccccgccccaccccaccatgcaccctgtgagcctggtccggcctcatcgacttcacctctccacttgccagtgcttgctggggtgcgtcaggccccttctcaccccaggcctatgtacatctggctctttctacttggaatgctcctcctgcatgtcctgggactggctgcttctccaacaggcctttggctaacggtagcgccgcccctacccccggccagtactcactttttcagcaccctctttctttctttcacagcacataccgctgctccccatgattttaactacctattgtcaatcccaccaccctgtctgtctagatgggggatggggggagttgttccgcaggaggcatttgccaatgcatggagacatttgttatcgcaattgaggaaggggtggtgtttactggtatctagcggccaggagccaggcaagctgttccacatcctacaatgtacagggcagctcctcgcagcaaaaagcgacccgggccgcgtggtcgatggtgcggaggttggggaaccctgcagcagacgccgagcacaggagaactgggaccgtgttctccgcggtctcccggcgcccagaacagtgcctggcacccgggagtctcggggaatgcaggaagaaggaatgagtaaagaactgcgcgagaacaggacggagcgagggacggactactgactggcggacggacagcgacgcggaccccgaccctgaccccgaccccgaccgtctcagccccgcccccccctccccgccccggcccgacccctcgcctcgcctcgcctcgcctcgatctccacgcgcccgatcccgccccaccgcgcggtcccgaggcgcgagccccgggtcgggcgcgccgcggggacactcacccgcccgcggccgcccgggagcggcagcgccgccagcccgcttcatgatgccccctcggccgccggccgggaaagggactagacgcgcgagccggaagcgccaggccgctgcgcccgccgggacgtgtagttccccgcctctccgggcccggacggctgcctcacgcgccgcacttccgaaactacgacttccggcggcctcgtcgtcgcggggcgggaatggcagcttcagaatcactctatgttgcagatcgaagtctgattggctttgttcatccgtcactcaccgttaggcttcacggactctgcataagggaggagcttcgggtctgggtctgagagaccgtctccaaaagaaatgccacggtacgattggtggaaacaacgcggcagggagcggagcgtaccagcggcgggggaaggcgggcacttccgccaggatagcccaatgacagaggtgggacagtttctataaaagcttgagcctcgcccgcccctgtcttttcggggtcgagtccgagggggaagaggtttgttaatacgttcgccatgtgctacgatcttgggacgaactgagccacgagcgtggctttgagggccgtccgaacgctgcaggccggccaggtccctgggcgtccaggcctggcctacgcaccactttgtcccttagcgtttaaaggtttcttcccgaatctcaggccctcagctacctgcaggtaagactgggccgggcttgggttcccttattctcccagtctgtgatgaattgctttgacttctgacacctcgtatgaaaactgcacgtgcagtctgattatttagcaagactgaggcttgagggtgcgcactcctgacggggagctgagagtggaaacaggtgttgcccgaaacgaaggagtggggacttaatgtctgtattttggcgctgactttcaggtttcgtcgcgagccggctgcaagttttgaacctaagtaaacctcaatccggagggcctagcggtaaggtgggcgctgtgtctattgaagtgcttagcaataaagaaaggtagtgagttgattcggttttctctcaagtgtctttattttcctattctggcaccccagaggtctggctgatccacaggcaatcttggaaaagggtacagacatgaaaacggaagctcgttaccagtgacttttcatctcttgggattgccttctccatttctgcccgtgattttttttttttttttttgagacggagttttgctcgtttcccaggcgggagtgcgatggcacaacctccacctcaagcgattttcctgcctgagcctcccaaatggctggaattacaggcgcccaccaccacgcccggctaattttgtatttttagtagagacggggtttctccgtgttaggctggtctcaaactcctgacctcaggtgatctgcccacctcagcctcccaaagtgctgggatcacaggtgtgagccaccacgcccagtcaaatactgtttttca

SEQ ID NO: 722 - DNA, 6000 bp, Homo sapiens
tggccctgcctggttcccgggagacccagaagcactctgacagcaggagctcaggctgaaggaggtggcacaggttccagctgcccagggcctcagactgcggctgaagccccccgcccccaccccaacagatgggactggggctagaccactccctgccttacgtctaatcgttaactgggagggcccggctggggacgctgccaggcagttctgggatctgcggttactgccttgggtcagacaggcccaggcccagccctgacaatcccagcaaggagtggctttaattttttattcttttgaagcagggtctcactctgtcgccctggctggagtgcagtggtgatcatggtggactgcaacctccaacttctgggttcaagccatcctgagtctttcaaattagcaaaaagagctactgggaaggctgaggcgttgcagctcgttagttactgcacccatttgcagatgaggaaaccgaggcagtgtcagtaagaggcctggtggggtcatgagttcaaataagtcagcgtaagaggctctaagcaggaatagtgcagaggctgccgggagaggcctgcacttgcaggtgtgggtgaggtcaaattggcttaagggaagcctgcaggggctgggctggacctgggagctgggaggtctcaggggacaggaaggcagtgaagctagtgggaccagaggctgggctgggcccatgccagagctgcctggttctgtctgtttcagaacaaagttctggacgtggatggtgtgaaggtgaagctgcaggtaaggtgactggcagaggacaagttgggggacaggggacaccagggaagggctggacagcctgaccagtgcctgtcgctgcagatgtgggacacagctggtcaggagcggttccgcagtgttacccatgcctactaccgggatgctcatggtgagcccctgggtacctgggctggttggggcgggggtctgagcacctgagggtgcaggtgatggtggatgtcctcactgccctctgtccccagctctgctgctgctctacgatgtcaccaacaaggcctcctttgacaacatccaggtcagtggctttcctggtggggtgaaagggccctgatagggcctgacccatcccaacctccttctggtagatggcatcagggttccaaaggaccccgctgagagaggggagggggaaatgacagccttctgggctggaggtggcccaagtggacctgagtgccattccagctccctcagcaggaggctttgtgtaagggacctgtaaggtgggcttctgtatgtggtacacggggggttatcacttctaaagacaggtatcctggccaggcatggcggctcacctgaggtcaggagttcgagaccagcctggccaacatgaggaaaccccatctctactaaaaatacaaaaattagccgggcgttttggcacacacctgtaatcccagctactcaggagactgaggttgcagtgagccaagactgtgctacggcactccagcctggacaacagagcaaaactgtctcaaaaaaataaaatgggctgggcatggtggctcacacctgtaatcccaccaccttgggaggctgaggtgggcggatcacgaggtcaggagttggagaccagcctgatcaacatggtgaaaccccgtctctactaaagatacaaaaaattagctgggcgtggtggtgcgtaactgtaatcccagtcacttgggaggctgaaccctcccaaggttctctgaaccccaggagaatagcttgaacccaggagatggagactgcagtgagtcgagatggagccattgcactccagcctgggaaacagggcgagactcttgtctcaaaaaaaaaaaaaaaaaaaaaaagataaagacaggtgccctctacagtgtgacctggagggccaaagttctggggcatggggcaagccatgcagggagccccagcctggtctgctgcctcccacaggcctggctgaccgagatccacgagtacgcccagcacgacgtggcgctcatgctgctggggaacaaggtgggaggcccggctgtcctcacctgggccacagggcagggcaggtgagggggcaggggccaaccatgggccagctttcaccaagaccctgtgcctgggccaggtggactctgcccatgagcgtgtggtgaagagggaggacggggagaagctggccaaggtgagtcagggcaggggggtggtgagggggtgcccctggaggctgcgagcctaggctgtccccgccaggccaccacctggctggcagcagctgtttacaggagtatggactgcccttcatggagaccagcgccaagacgggcctcaacgtggacttggccttcacagccatagcaaagtaagtcctgccagtcaccaggactcccccagcccagggcctgaatcctcattagagtccaggccatcgtgtccccttgtcacccccactccgcagggagttgaagcagcgctccatgaaggctcccagcgagccgcgcttccggctgcatgattacgttaagagggagggtcgaggggcctcctgctgccgcccttgaacctggctgagctcagtcctctggaggaagccgtccagtccctagaaggctggacagagggtctccaggcccttctgactttgttgcccagtggccaacgcccgagtgtctgttttcaggagccccaggtcaagccttgtcccttcctcctcccagcaacagtcccaacaagcaggcttctgagagcccgtggccgcacactggccgccacggaaaagcagtcttctgcacgggacggggagcggcaagtggacagactttgccacggtgctctgctgccccctcctgggcacgtccaggtgagggagggctggggctggcaccacgcacagtgcctaaccctagaaaagccatgtcttcagccgcacatgctcaggcagctaagggaggacgcctgcccacgcctgggacagaaggcttcactgctaatcacatcgtgcatctgtgtgtcctgggagctgcctgctcccggcccaccctctaggaggctctggctcaaacagcaatagggtcttcctcactgaccttggaggatgcctgtggccttgtgataaaatgtgggaaatcacagaaaacaccagaaacaacaactgccagcccggcctggccacaggtgaggtctgtgatttccgagcacgctccaccttgcactcaacttggccttttgattgcacaagcctttgttttcagtcctagtgaataaagttgtgttttctggagcgtctgtctcatctgttgaaaaaaatccacttctagagcaggatgctggagtttgagagactcagcaaggcccagaaccctcagcaggtgtgtggctaccattcctccatggcccatggctgcctccctaaggaggcacatgggaaccctaggtggtgtcaacttccctccacaaatctcaaaagcctttttggactcaccctggggcaaaaggcatgaaaaacagtatttgactgggcgtggtggctcacacctgtgatcccagcactttgggaggctgaggtgggcagatcacctgaggtcaggagtttgagaccagcctaacacggagaaaccccgtctctactaaaaatacaaaattagccgggcgtggtggtgggcgcctgtaattccagccatttgggaggctcaggcaggaaaatcgcttgaggtggaggttgtgccatcgcactcccgcctgggaaacgagcaaaactccgtctcaaaaaaaaaaaaaaaaaatcacgggcagaaatggagaaggcaatcccaagagatgaaaagtcactggtaacgagcttccgttttcatgtctgtacccttttccaagattgcctgtggatcagccagacctctggggtgccagaataggaaaataaagacacttgagagaaaaccgaatcaactcactacctttctttattgctaagcacttcaatagacacagcgcccaccttaccgctaggccctccggattgaggtttacttaggttcaaaacttgcagccggctcgcgacgaaacctgaaagtcagcgccaaaatacagacattaagtccccactccttcgtttcgggcaacacctgtttccactctcagctccccgtcaggagtgcgcaccctcaagcctcagtcttgctaaataatcagactgcacgtgcagttttcatacgaggtgtcagaagtcaaagcaattcatcacagactgggagaataagggaacccaagcccggcccagtcttacctgcaggtagctgagggcctgagattcgggaagaaacctttaaacgctaagggacaaagtggtgcgtaggccaggcctggacgcccagggacctggccggcctgcagcgttcggacggccctcaaagccacgctcgtggctcagttcgtcccaagatcgtagcacatggcgaacgtattaacaaacctcttccccctcggactcgaccccgaaaagacaggggcgggcgaggctcaagcttttatagaaactgtcccacctctgtcattgggctatcctggcggaagtgcccgccttcccccgccgctggtacgctccgctccctgccgcgttgtttccaccaatcgtaccgtggcatttcttttggagacggtctctcagacccagacccgaagctcctcccttatgcagagtccgtgaagcctaacggtgagtgacggatgaacaaagccaatcagacttcgatctgcaacatagagtgattctgaagctgccattcccgccccgcgacgacgaggccgccggaagtcgtagtttcggaagtgcggcgcgtgaggcagccgtccgggcccggagaggcggggaactacacgtcccggcgggcgcagcggcctggcgcttccggctcgcgcgtctagtccctttcccggccggcggccgagggggcatcatgaagcgggctggcggcgctgccgctcccgggcggccgcgggcgggtgagtgtccccgcggcgcgcccgacccggggctcgcgcctcgggaccgcgcggtggggcgggatcgggcgcgtggagatcgaggcgaggcgaggcgaggcgaggggtcgggccggggcggggaggggggggcggggctgagacggtcggggtcggggtcagggtcggggtccgcgtcgctgtccgtccgccagtcagtagtccgtccctcgctccgtcctgttctcgcgcagttctttactcattccttcttcctgcattccccgagactcccgggtgccaggcactgttctgggcgccgggagaccgcggagaacacggtcccagttctcctgtgctcggcgtctgctgcagggttccccaacctccgcaccatcgaccacgcggcccgggtcgctttttgctgcgaggagctgccctgtacattgtaggatgtggaacagcttgcctggctcctggccgctagataccagtaaacaccaccccttcctcaattgcgataacaaatgtctccatgcattggcaaatgcctcctgcggaacaactccccccatcccccatctagacagacagggtggtgggattgacaataggtagttaaaatcatggggagcagcggtatgtgctgtgaaagaaagaaagagggtgctgaaaaagtgagtactggccgggggtaggggcggcgctaccgttagccaaaggcctgttggagaagcagccagtcccaggacatgcaggaggagcattccaagtagaaagagccagatgtacataggcctggggtgagaaggggcctgacgcaccccagcaagcactggcaagtggagaggtgaagtcgatgaggccggaccaggctcacagggtgcatggtggggtggggcgggggggttattatgctggcaaatgacttggggttgaggaagcgctggagaggcggtccgatctaggtccagtaaagagctt

SEQ ID NO: 723 - DNA, 6000 bp, Homo sapiens
agattttctctttgtctttgattttctgtagtttattgtatgcttacatgtagttttgttctgtttttgttttttgctatttatcctacctggtattctgtgagctccccagaactgtgtttggcatctgtcatcagttttggaaaattctcagttcattattgtttcagatactttttctgctcatttctgcctgtcatcatcttctggattcccattatgcatatttatgcctttctaattgtcccacagttcttggatattctgttccatcttgttcattcttttctctctgagtttcagtttgggaagttgctactgacattttttttcaagctcattgattctttcctttgactgtatctaatcgatgaatccatcaaaggcattcttcacttttcttagttttttttgtttctagcatttccttttgattctttgagtctttatctctgctgaaattacccatctgttttagcatatcatctactttttccattagagcccttagcatattaatcatagttgttttaaatcagagttgttagctgtgataattctaacatctctgctatttctgagtctgggtttgatgcttgctatatctcttcaaagtctgctttttaatcgtagtatgccttgtaatttttttgttgaaaaccggacttgatgtacttgttaaaaggaactgaggaggccgggcatggtggctcacgcctgtaatcccaacactttgggaggctgagcggggaggatcgcttgagcccaggagttcaagaccagcctgggcaacgtagagaccccgtctctactaaaaatagaaaaactaactgggcatggtggcacacgcccgtaatcccagctactcaggaggctgaggcacgagaattgcttgaacccgggaggtgcaggttgcagtgagccaagatcatgccacagtactccagcctgggcaacagagtgagactctgtctggggaaaaaaagaaaaaaaaacaggccaggcacagtggctcatgcctgtaatcccagcacttcgggaggccaacgcaggctgatcacttgaggtcaggagttcgagaccagcctgatcaacatggcgaaagcctgtctctactaaaaatacaaaagttagctgggcatggtggcaggcgcctgtaatcccagctacttgggaggctgaggcaggagaatcgcttgaacccaggaggcagaggttgcagtcagtagagattgagccagtgcactcctgcctgggtgacagaatgagactccatctcaaaaaaaaaagaaaagaaaaggaagtaactgaggaaaatcagcctttggtgtgagttttttagtttatctggctaggcgttaggctctgtctgctgtttgctgtaactataggtgtcagaactaaaatttcctcctgggtctgtttttccttccttgggtttccgtagagacttcttaaataaagtctgagatatgcaggtttttccgttctattctcttgttattatataggagccctatttatgtggtgggaaggaggggaagtgtcctaagtcctgtgactaggtctcagtctttttgtgagcctgtgcccctggcctgtgacttttaccagcacttctcagtttggggtttttgcctccttaggtgaaacaggaagggagagggggctggagttaggccctttctttcctgcctgtggaaggcttaggggtgcttaagttgggtcaacctttcccttaggctgatgaggatcttataaaacctaattaagttaggctcttgtaaaatagtttcctttgaggacaggccttgttaagaacaggaagctctagacatagtccacatggctgctttccccctcccccgccagaagtatgagaggatctttctctgatcttgactgtgagagtctggtagggctcatggaggtaaagtccacattgagtctccagcagttcatgaattgctgtgtaaattttcctaccctcgtttccactcctgggctcctgctcaggtaagctccagttcaccctgttgacatgtctcctgtgtcgggggcagtcatttgccctgtaacttcagttctctgatgcagctaaaaggggttgtttgccagttcagtgttgtttcttgtaaggatggtagtgacaacttctaagctcctgacatgcctcactgaagaatgaaagtcctttgccttcattttttaatgatatttttggtagataaaaataattccagttgaccagtttttgtgagtgtgtgtgtgtgtgtgtgtgtgtgtgtgtgtgtgtttttcccagtactttaaagatgttacttctttgtctttccgcttacagcagaagtatcatgtcattcttacctatatttatcagtacataatatgctttttagcttaactgcttttaagactttttaatttaacactggttttctacaacttgattatgatgtgtcttggtgcagtcttcttcaggtttattttgtttgggtttttcttttttttgaggcggagtctcgctccattgcccaggctggagtacagtggcgcaatcttggctcactgcaagctccgcctccagggttcacgccattctcctgcctcagcctcccgagtagctgggactacaggcgcccgccaccacactcagctaattttttgtattttttagtagagacggtgtttcaccgtgttagccaggatggtcttgttctcctgacctcgtgatccgcctgcctcggcctcccaaagtgctgggattacaggcgtgagccaccacgcccggcctctgtttgggttttattgactttcttggatgtgtgaattgacagttttcatcatatttgggaaattttgcttatttcttcaaatatttctgtctcctctttgtttttcttctaggacttccaattatgtgcacattagacagcttgatagtgtccaataattttttctctctgccttatttgagtagtttcaattgctatgtcttcaaattcatggatcttttctctttcagtgtttatttggtgttaatcccatccagtgcatcttttcatttcaggttttgtttttactgtctctggaagttccatttggatctttctatatcttccgtgttctcatcatgctcatgtttccctttaccttcttaaatatatgccgaactattgtccttgtctgctagttcctttatctctgtcgtttctaggtcagtttctattgactgtgtatggttataggtcatattttcctctctttcttgcatgtctgttatagcagttatcagtttattgcgtctcaactctaaatccacccttcattgccacttgtgatactggaacatttctcccttgccccatgctggtctttgtcagtggaaagcgttgagaggaaagggcatttcttggttctttgtgctttgcttacagctgtctgtgacatgagctggtatgtgggacatatagggtgctcaggcagctttcaggcaggtcccatagcaccccagctagccgcctggcagctttctggtgagttcaacagcacccccacaccaaccccccggctttccagcactcctcaagcagccttccagctcactgtgttagcgtcctcgcacgtggttcttggccctcagttctgtcctgggacagcccagtcgacgtcatcatctagtgcgtgcttttgatcacaccctctcctaggtctgaatccttcccttagttacctccctttactctaggatgttctgtggatttctcttttgttccctcttagtcaactccctgtaaatagttaataattcttatgctaaacttcccttgtttaagctaccatgtggtttctgtcccctggtgggaccctgactgataggcccggttattttttaaattggatgctgaatattgtgaatttcaaattgttggccaggcccggtgtggtggctcatgcctgtaatcccagcactttgggaggctgaggcaggtggatcatttgagctcaggagttcaagaccagcctgggcaacatagtgagaccctgtctctgcaaaaaatgaaataaattattggctggtgaattttgttgaattcctttgaataatgttgggtttgggtctggaatgcagttaagtcccttggaagcagcgatcctttagagacttctgaacttttcagtgggtccagtgctgctttagtctgcagttgacttagctctattactaagggtgatggccttctgcggagtctacccaataccccacgaattaggagatctctccacggtggcttgtgggaacacaaaatattccctgtgtgaactctggggattgttttgtttgctacttcctcaggagtctttcctgggccttctcatatagtttttctcacccaggcacagatctgttttcagctaaagactccaggagaccctctgcagatcctggctctgcctctgcagctgcctcctccccaggactctgccctgcaaatagcagcagccttggcctccctgagctctgaactctgtcttcccaactcagaaagactgcaggttccggctgagtttccctgcctgcgctgcagcctggaacccgcctcctggctgtaattggtgcagtcataggatgtgctctcttgtctcccttatcttggaatcactgtcctgcactgttttccaccaactgaaggcaaaagtatgttgtccagttttccaggtgttcagggttccctgttgctgcatcctacatgagtatataaacagagaacaaacaaaacagcctgtcaggagtttgctgaagtttcagaataggtggtgctgggtgagctgatgggcatgagtaacactccccttttccttcttttagtgaccacaatatgaatgggaacagcaagatggcaaaagcttgctgagtggtacagcgccagcctgggtagtggcctccccagcaagttgcatgtcactagcttcctgtggctgtcactcctgggcccaggcacctccgaagatcagcacctcctcatgggctcaagcgaggacaggagcccgtcacccatgagctctcaagggcagagccactgtcctgtctcgatggctccaccgtgactccagtggactttggacagtggggagcaggcccaacagggccactcggatgtggtcactctggatttgggtggatcagcaccaagctagactcatccccagcccccaggtgctgttgctgctcctgcgtgaggccccatccacagctgcagctgtggcagggtggctagtggtggccagcatggccctgctgcagctccacgctgtggggggcgtggccctgaccagcagccacccctccatgtgggccacaggggaggagcttaggaagccgccttggcaaggtgagtggacgcatttacgtagtgagaggtgagaaccagtgccgctccccagagccctgcgattcctggggaggctgaggcttgtagacgccttgcctgctctcctcctggggtgctttcctgttcacagggctgggaccttggagggagaatggaggcagagcctctgtctgcccccgctcaagggcccagcacaggcaggccctctggggagcccctcagtggctggtggggagtctggggcagggtgagggacagcatcttccaccgaccacaggcttgggcagcatctgtcctggaggccatccctgtgggaaggcctcttttgtatgactccttccctgtgaaatggcttctccatgtagttcagccccacaggtgccctcagaaaacacgaagtgctttctgcacgtgtcgcggcccccagagaagaatttggttacagagaaggtgacagctcatggcttcctgagggtggggcagtgggagaagtccccaggggagcttggggcccatggcctcccacaccctgggtggggctgcccactgggaggcccacattgcctcagtgtcctgcaccctacagttcagggtgcctgggggctgg

SEQ ID NO: 724 - DNA, 6000 bp, Homo sapiens
gggttgtttgccagttcagtgttgtttcttgtaaggatggtagtgacaacttctaagctcctgacatgcctcactgaagaatgaaagtcctttgccttcattttttaatgatatttttggtagataaaaataattccagttgaccagtttttgtgagtgtgtgtgtgtgtgtgtgtgtgtgtgtgtgtgtgtttttcccagtactttaaagatgttacttctttgtctttccgcttacagcagaagtatcatgtcattcttacctatatttatcagtacataatatgctttttagcttaactgcttttaagactttttaatttaacactggttttctacaacttgattatgatgtgtcttggtgcagtcttcttcaggtttattttgtttgggtttttcttttttttgaggcggagtctcgctccattgcccaggctggagtacagtggcgcaatcttggctcactgcaagctccgcctccagggttcacgccattctcctgcctcagcctcccgagtagctgggactacaggcgcccgccaccacactcagctaattttttgtattttttagtagagacggtgtttcaccgtgttagccaggatggtcttgttctcctgacctcgtgatccgcctgcctcggcctcccaaagtgctgggattacaggcgtgagccaccacgcccggcctctgtttgggttttattgactttcttggatgtgtgaattgacagttttcatcatatttgggaaattttgcttatttcttcaaatatttctgtctcctctttgtttttcttctaggacttccaattatgtgcacattagacagcttgatagtgtccaataattttttctctctgccttatttgagtagtttcaattgctatgtcttcaaattcatggatcttttctctttcagtgtttatttggtgttaatcccatccagtgcatcttttcatttcaggttttgtttttactgtctctggaagttccatttggatctttctatatcttccgtgttctcatcatgctcatgtttccctttaccttcttaaatatatgccgaactattgtccttgtctgctagttcctttatctctgtcgtttctaggtcagtttctattgactgtgtatggttataggtcatattttcctctctttcttgcatgtctgttatagcagttatcagtttattgcgtctcaactctaaatccacccttcattgccacttgtgatactggaacatttctcccttgccccatgctggtctttgtcagtggaaagcgttgagaggaaagggcatttcttggttctttgtgctttgcttacagctgtctgtgacatgagctggtatgtgggacatatagggtgctcaggcagctttcaggcaggtcccatagcaccccagctagccgcctggcagctttctggtgagttcaacagcacccccacaccaaccccccggctttccagcactcctcaagcagccttccagctcactgtgttagcgtcctcgcacgtggttcttggccctcagttctgtcctgggacagcccagtcgacgtcatcatctagtgcgtgcttttgatcacaccctctcctaggtctgaatccttcccttagttacctccctttactctaggatgttctgtggatttctcttttgttccctcttagtcaactccctgtaaatagttaataattcttatgctaaacttcccttgtttaagctaccatgtggtttctgtcccctggtgggaccctgactgataggcccggttattttttaaattggatgctgaatattgtgaatttcaaattgttggccaggcccggtgtggtggctcatgcctgtaatcccagcactttgggaggctgaggcaggtggatcatttgagctcaggagttcaagaccagcctgggcaacatagtgagaccctgtctctgcaaaaaatgaaataaattattggctggtgaattttgttgaattcctttgaataatgttgggtttgggtctggaatgcagttaagtcccttggaagcagcgatcctttagagacttctgaacttttcagtgggtccagtgctgctttagtctgcagttgacttagctctattactaagggtgatggccttctgcggagtctacccaataccccacgaattaggagatctctccacggtggcttgtgggaacacaaaatattccctgtgtgaactctggggattgttttgtttgctacttcctcaggagtctttcctgggccttctcatatagtttttctcacccaggcacagatctgttttcagctaaagactccaggagaccctctgcagatcctggctctgcctctgcagctgcctcctccccaggactctgccctgcaaatagcagcagccttggcctccctgagctctgaactctgtcttcccaactcagaaagactgcaggttccggctgagtttccctgcctgcgctgcagcctggaacccgcctcctggctgtaattggtgcagtcataggatgtgctctcttgtctcccttatcttggaatcactgtcctgcactgttttccaccaactgaaggcaaaagtatgttgtccagttttccaggtgttcagggttccctgttgctgcatcctacatgagtatataaacagagaacaaacaaaacagcctgtcaggagtttgctgaagtttcagaataggtggtgctgggtgagctgatgggcatgagtaacactccccttttccttcttttagtgaccacaatatgaatgggaacagcaagatggcaaaagcttgctgagtggtacagcgccagcctgggtagtggcctccccagcaagttgcatgtcactagcttcctgtggctgtcactcctgggcccaggcacctccgaagatcagcacctcctcatgggctcaagcgaggacaggagcccgtcacccatgagctctcaagggcagagccactgtcctgtctcgatggctccaccgtgactccagtggactttggacagtggggagcaggcccaacagggccactcggatgtggtcactctggatttgggtggatcagcaccaagctagactcatccccagcccccaggtgctgttgctgctcctgcgtgaggccccatccacagctgcagctgtggcagggtggctagtggtggccagcatggccctgctgcagctccacgctgtggggggcgtggccctgaccagcagccacccctccatgtgggccacaggggaggagcttaggaagccgccttggcaaggtgagtggacgcatttacgtagtgagaggtgagaaccagtgccgctccccagagccctgcgattcctggggaggctgaggcttgtagacgccttgcctgctctcctcctggggtgctttcctgttcacagggctgggaccttggagggagaatggaggcagagcctctgtctgcccccgctcaagggcccagcacaggcaggccctctggggagcccctcagtggctggtggggagtctggggcagggtgagggacagcatcttccaccgaccacaggcttgggcagcatctgtcctggaggccatccctgtgggaaggcctcttttgtatgactccttccctgtgaaatggcttctccatgtagttcagccccacaggtgccctcagaaaacacgaagtgctttctgcacgtgtcgcggcccccagagaagaatttggttacagagaaggtgacagctcatggcttcctgagggtggggcagtgggagaagtccccaggggagcttggggcccatggcctcccacaccctgggtggggctgcccactgggaggcccacattgcctcagtgtcctgcaccctacagttcagggtgcctgggggctggaaggagagcaggggccggggaccagtggctcacagggacctggggagaactgtggaaccagccttcccagccgtcccacccaggaaaggagtgggcagagttggaagaaatacagcactgccttggccttggcctcagacccgagggtctggctatagccatggtggtggctgtgtcgtgggggctgcatcatggcactggcagtggccccaggactgtggactagtgcagactagcacagagttcctgctgggctcggggtgggagcccctcctggccgtggagacaggcccacgtcagcccctcaggatctgttgcccaacagctctcagccttttgcttggggcctctttgcgtggaatggttctgagttctctgctatctggcagcatcatcttctgagcactgctctgacagatgccttagtccacagactgccatgccctcccattaggagccatccttgggcactcctgtgtcacccgtagttactccaccatcctgccaggccatgggatgtggaggctgaagagtccaaatgggacagaagcctgtcccctccctccttcctcagagaggccttggttgggctcacactgagtaggggcaaccagcagccggagagagtggagctcttaaactgtggctccagagcagaaggccccctctgacacacctttcatccagcatgttctccgtgagcacctgccacggcccaggccctgctctcggtgctgccggctgagcccagctctcgtggggctcgcatctaacaggagagggtaactacagtgtgagtgagatgtgattcgtggtgaggaatagaggaatagaggaatgaggatgcagaggtcttctgtcctagaggatgcttggctgggcagagggaaacggccttgtgtccctgggggactgtcattgtcgggcacatctctggatgggacatctgtggctggaagctgtccttgtggccgtgctagttggaccagcctggctggttatcagtccgtgtcctcagcccctccccttttcaatgactcattccaggttccgcaggctctgcgtctggtgtggaagagctcacggggaagcactcctgcccaggacccgaggagccggccaccgttcagaaggccccagcttgaaggcctggagagccgcccagcagcacaacacagggaagcttggggaggtgagccccacttcctgctcccgcacaggctcttctccctggggcactggctgggcgggatgctgagaagctgggcatgggcggctgctgagaggcagaggagccagagagctgcaggaaatatcctggggctgggagaccaagataggggctcagggctgccgaggcggctggacctgaggggccaagacccctgagcgaaggagccagagaagagagacggacattaggcactggtctctctagccatttgctgatgaagctgcttagggcagaggagcagaaagtggctgaaaagcagagtgggatttttggcagtttcgtggagttagggaataggttggggcctgtcaggtgcagggccctaagaaatatcccaggctctcatctgggaccaaccctgcctcgccgggacaagccacagctgggctgttctttccaaagactgcagaggagcttagtgtgggtggagttcctgattcactgtctcactgctgcccaccacggagcggagtgggtgagctgtccctgtcgggggacatgtccagaccctccgcccttctgtcacgcacagtccctgacactcagttgaaggcaaccaggtacactgggaaaggggaccaggggaagaaaggtgacagacccacaggagactgagatacggtttttggacatggactttagtatgttaatcacatctgttttatttttttattttattattttatttatttatttattttgagatggagtctcgctctgtggcccaggctggagtgcagtggcgcgatctcggctcactgcaagctctgccatccgggttcacgccattctcctgcctcagcctcccagtagctgggactacaggcgcccgccatcatgcccggctaatttttttgtatttttagtaga

SEQ ID NO: 725 - DNA, 6000 bp, Homo sapiens
gggcggatcacttgaggccaggagtttgggaccagcctggccaacatggcaaaaccccgtctttactgaaaatacaaaacttagccaggcatggtggcgcacatccgtaatcccatctactagggaggctgagggaggagaattgctcaaacttgggaggccggaggttgcagtgagccatgatggcaccactgtcctccagcatgggcaacagagcaagaacctgtctcaaaagaaaacaaaaccaggtgtgatggcacatggcaggaggctgaggcaggaggatcccttcagctcaggctgcagtgcactacaattgtgcctgtgaaaagccactgcagtggccggatgcggtggctcacgcctgtaatcccagcactttgggaggctgagatgggcggaacacaaggtcaggagatcgagaccatcctggctaacatggtgaaatcccgtctctactaaaaatacaaaaaattagctgggcgtggtggcgggcgcctgtagtcccagctactcaggaggctgaggcaggagaatggcatgaaccccagaggtgaagcttgcagagaatggtgtgaaccccagaggcgaagctcgcgtgaaccccagaggcaggctgcagtgcagagccaagatcgcgccactgcactccagcctagaaagaaaagccactgcactccagcctagacaacgtagtgagaccctgttcctaaaataatttctttaaaaacaaaacataaggaccaataagagccattacaaacttaagagtttactattaatacttcccagttatgggtcagtgttctgctttccctgattgcctcttacataatttgttacacaaatgtctgtttgcatgaataaaagattggatgttttataggatctaaggtccatacattttgtttatggatatatctcaagttttattatcatttaacatccatctcaaaatgtgaactttttttaacctatgagttctgcctctcttcttcttttcattttgaaatctattgatgagcctgtcctttgccatctacgatttcccagtctgggtcgtaccgtgtccccatggtgctgttgaacgtgagcctctgtccttgtatttgctttaagttgtcatttagatctagaggtttgatcagattcaagattgttttggcaagaactctcctaagtgctgctgtgtgtggtcttggattagaagggacagaggctgtcttttgtgatgttagcagccactacatcagggctgagattagggacggcaaaatggtgactttcaggtctagcattccttcctcgtgtattagctggagtccacctatctaaagagagccttctcgagctatgggttactgggcagtcctttttgcataggaaaggcagaataccgccttgatcctttgactttatttgcctttttgcagaagaacaagttgagttcctagcatccccctaaggtggctgataattattttatgtcaacatgaacttatgtattgaaacacagtgatatgtttaatctgttgcaattattcttttcagtagcaatttgtagaactgagaatttctttgtgacagaacgttgaagcagtggtgaatgatgaaggatagaaaagaagttatattcagtaaagtaggaaatctaactcaggcatatgcattatgtcagatcagaagcttcacactttctcagttgagagcactcttgattaaggttcaataattattttaatagtaagccaaaagaaatccctgatagtggtgccggaggagacaggttgtgtttttatcttgtggcctgggtagtgtcctgggaccctctgccccatctgagtcaagtgttgtgggataaaggaatctctcagggcgaggagcttcttaagttaaatcggtagaaatttaggcatgacatgggccttcaaatgtgtgaggagctgtatcattttatttctcggtgtgttttccccaacttctagttgataaaaaaaaaattcttaaagagttttcgtatgtgggagctaaggtggtcttgtaaaatttcaagtcatccttaaataaaatgacccgcctgagaacttgctcccgctaagtggcgaaatcaactggagttggttcctacaagttttgtttattctagttttgtttgtaagtaggttgtgtgagttaattcatggatatttactatatgtcttttaaattagaaaacatttgttattatgtatgtccttttagattttacctgcagctcatactttgaaatcatcacccagtagtgtcttactctagcatcgtctaaatctgagcatcatctggtggaatcttaaatttcagtagaaaccacgagttattaatacatcttccactcaagtatcaatttcagaaggaaacgtaaatgaatattctaaataaggctaatttgtattaatctgcctttatgtttgagggaaaaaaagctgagacattgcatgaaagatgatgcaggatatacgctgatcttttggccccaatgagctatttgaacattgtcctgtttattgttagttttcttcatcatttattatatggtcaatttttgaattcctgtaatatgaaaccttattctatcttttaacttactgttacctaaagttagtaagtccagattatatggtcattcaaaaaaaaaaaaaaaaagaaaagaaaaagaaatcccccacagttccatttattaaataagtaaaccccaataataagcatttgtgtcctggcaacttatagtggatgtctagaaaagtaatacataaagagaaatgttcatgttatttgtttagtcatgggatgtgtgtgcctgtcgagcacctcttcaacttggaatctggtagaacaccgccaccctcattgcctcatttttccacgtcgaccttcacagtaattgcttgttcagtgactgccacaacccagcctggcagagagagggaagataccctataaagcaaggtaacgttaatgttgagaccatgaatggccttgagcagagcagagtatcattgcttccttcaaaattcagaaggatctgatggtgctctgtgagttcatgggggtgcctccgtgcaggttggaaaccacagctgtgcgtccttcccgctttccctcttgatcagtagaagggtaccctccctggcctgcacgtcgctgggtcacacaacactggctgtcgttgcacaaagccacggccaccagcgttcctttgaggccatttgtttccagccatggtgcctataggatttttcctttatcctgtaatttcagccaaatcagagcatgtgacctggcttagatgtcaatataattgttgttatgtgctcttttcccttcctgtgtctgtgacaggtttaatttaacctgagaaggctgcagatcctcggggttggtgtaaaaacacctcatcctgatctgagaaggcggtcagcttttctcctcgttgccgttggctgccagcacccattctctgtggatgtgaaaatcccagaagggctgggcttccttcttgggcattccccaggcctatctccagagtggggcccagcatgggaggattgtaccccactcactcccctgatgtggggcttggacctacagctcgacagcacccatggaatgtgggcagaagcgacagcagccagctccgccttggccttagggcggcacgtgttctgcttgtgccctgggagcctccaccttccacactgtgggaagagggtgcccagggagctgcagtctctccagcccagccccaggacgaggcccaggcagcagagccaccccagcagacctggcagtgtgagagaaatgcatgtgtatacactgagtttgcaggtggctgttacatggcagcattgactgacacagacagaaaagagatccacgagggagaagtgagagtgctggagactccacaagccacaggctgcaggggcaggatggcttcttagaaggtgaaatgattgttctgggaatctatcagaggaagacatagaggctccagacggttgaaggcccaacagtgatcccagacgggccccatgtcagaccaggctcctccagggctgtgctgccctcaccaaagcccgtcctgagggcagccacacagcaggcagcactcgccatttgtacaagcgaggcccaagttccagccttccttctggcaggtagaggaagcaggggcactatgcctgggagttcctgaaagcagatggggcagcatttggtcaagagccaggaggggatgacagaccagaggggaaccctcgtcccacgtgctgagcacacgtagggggttgggcacttgctctgtgagctataattggtgtccctgtgccccgccggaagctgcaccaggcagtttcttggtggaggacagtggccgccctctagctttactcccttccccgtgatgggtcgctgtcagatgtgtgtccaggaaaggcaaacaccaaaggcagaggactagtccctacaccgaatactccggtggccttgcttgggggctgggttttgacgtgctggaggctgtcctagacttagagattaaaaacagggaagaaccattgctgaaacctttggaaaagcctgcaatggggcctctggcagcctgaggagtggtggtgtttccatctggtagacgccgtctcaataggagggacagatgagtgcaccagtgctgccagccagaggcgtctgttggcgtgtctttatggaatggggtgccagtcttgtggagggtggtttaccttcctgtttctagtccccactgggcctgccttctgcttcatggccagctggccagaccgagcactttcctgactttcgaccttggcccctgctgactcttgccgttgaggcctcctgcagaccccatttgtattcatttcctgcagttctcatacctgaatcccgcctggacttctgccaagccttccaggccctcctcccccagggggaccacagatgctacgtgcagggctgtccttggagggccagcacagccccttccaagtgggcaagacccaggggtggctcaaaagatagctgtgccctagccctggaacctctgaatgttgatttttgtagcaaaaaaggacttgcagatgtgagtaaaggctgttgagataaggacatcctccctgctctctgggaggaccccaaatgcaggtgcacagatcttaagaagaagaggcagagactggggtgatgcagccacaactaaggaaagccaaggattgctggcagcctgcagaaactggagggcaaggagcatcccccaaccgcccggagcctccaggaggcgcaaggtcctactgactccctgacttcagacgtccagtctccggaattttgagaggatccatttctgttattttaagcaaccaaacttgtggtagtttcaccagtctcaggaaatgaatacgaatggaaagtcaaagattccaagaaatgagtggcggggtgcggtggctcacacttgtaatcccagcatttgcgggaagattgcttgggctcaggacttggagaccttgtgtctgtgagaaacttaaaaaataggctgggtgcgatggctcacgcctgtaatcccagcactttgggaggccgaggcaggcggatcacaaggtcacgagtttgagaccagtgtgaccaacatggtgaaaccctgtctctactaaaaatacaaaaattagccgggtgtggtggtgcgtgcctgtaatcccagctactcgggaggctgaggcagaagaattgcttgaacccaggaagcagaggttgcagtgagccgagatagtattactgcactccaggctgggcagcagagcaagattccgcctcaaaaaaaaaaaaaaaaaaaaaaaaaaaaaaaaaaactgagcatggtagcatgcacctgtggtcctggctacgccggaggattgcctgaagccaggagttcaagaccagtctggacaaaagagcaagacccca

SEQ ID NO: 726 - DNA, 6000 bp, Homo sapiens
tagtacagcctggcacatggggccaacacagattgagcaatggctacgcatcaagtactataggaagcctttacatgattatgtcactcagatgaccctttgaggacattactattttttgttttgctttattttgagacagagtcttgctgtgttgtgcaggctggaatgcagtggcgtgatctcggctcactgcaacctccgcctcccaggttcaagtgattctcctgcctcagtctccccagtaactgggactacaggtgcgcgccaccacgcctggtgaaattttttttttttttttttttgaggaagagtctcactgttgcccaggctggagtgcagtggtgcaatctcagctcactgcagcctccaccccctgggttcaagtgattcccatgcctcagcctccaaagtagctgggattataggcacgtgccgctgtgcccggctcatttttgtatttttgtagtgacagggtttcaccaagtggcccaggctggtcttgaactcctgacctcaggtgatccacctgcctcggcctcccaaagtgctaggattacaggcgtgagccaccacacccggcaatttttgtactctttagtacagatggggtttcaccatgttggccaggctgctcttgaacctcaggtgatccccccacctcggcctcccaaagtgctgagattacaggcgtgagccaccacgcctggccgacgtcgttactattaagtcctcatttatttatttgacatatggtctccatttgtcacccaggctggagtgcggtggcacaatcatggcccattgcagcctcagcctcccagactcaagcaatcctcccacctcagcctctcaaaatgctgggattacaggtgtgagccaccgtgcctggcctatgtccccattctagagaaaaggaaacagaagaacagagtgaagtaagttgcccaaggacacacagctggtaagtggcacagctagaattcaatcccaggctgtctgactccagagctatactctttttttttttttttttttttttttttttgagaaagtgtcttgctctgttgctcaggctgcaatgcagtggcactatcatagctcactgtagacttgaactcctggactgaagtggtcctcccaccttggcctcccaaataactgggaccacaagcatgcgccaccatgcccggccaattaaaaaatttttttttgtaaagatgaggtcttgctatgttgccaaggctggtcttgaacttctgggcccaagtgattctcctgccttggcctcccaaggtgcagggattgacaggcatgagccaccatgcctagcacagaacccatactctttttctctttatttttgagacagagcctcactctgtcgcccaggctggagtgcagtgccgcaatcttggctcactgcaacctccatctccttgattcaagcaattctcctgcctcagcctcccgagtagctgggattataggcgcctaccatcacgcccggctaacttttgtattttcagtagagacgaggtttctccatgttggccaggctagtctccaacacctgacctcaggtgatccgcccgcctcagcctcccaaaatgctaggattacaggtgtgagccaccgcgcctggccacagaacccatactctttttttgtttgagacggagttttgatcttgttgcccaggctggagtgcagtggcgcgatcttggttcactgcaacctctgccttctgggttcaagcgattttcctgcctcagcctccccagtagctggaaatacaggcatgtgccaccatacctggctaatttttgtatttttagtagagacggggtttaactatgttggccagactggtcttgaactcctgacgctgtgatctgccctcctcggcctcccagagcgctgggattacaggcatgagccaccgcgcccagtcagaacccgtatcttttttttttgagacaaagtctcactctgtcacccaggctggagtacagtggcactatctcagctcactgcaacctccgcctcccgggttcaagcaattctcctgcctcagcctcccgagtagctgggattacaggcgcctgccaccattcccggctaatttttgtatttttagtagagacagggtttcatcgtgttggccaggctggtcttgaactcctgacctcaggtgatccgcccgcctcagcctcccagagtgctgggattacaggcgtgagccattgtgcctggcccagaacccatactcttcatcactatgctggtcatttaagtatttgctgaatgtattaaaggaactcttgctcacctcccaacacccttgttcatctcagtcctccccattccgtagcccaaactctctccaactattacttgcaatttacaatagcttggtcactgttcttcaaaggactggtggttttatttatttatttattattattatttttttttgagagggagtttcactcttgttgcccaggctggagtgcaatggcgcgatctcggctcaccgcaacctccgcctcctgggttcaagcaattctcctgcctcagcttcccgagtagctgggattacaggcatgcgccaccacatccagctaattttgtatttttagtagagacagggtttctccatgttggtcaggctagtctcgaactgctgaccttaggtgatccgcctgcctcagcctcccagagtgctgggattacaggcgtgagccaccgtgcctggcaggaccggtggtttttaatcttcgagtctcaatgcctgtggagaatttgacgaaagctatgggtatctacccaaattaacatccacgtacacaaaaatttggtgtacaatgctgggagtagcggggagggggagtagcacagattcccaggctttggggatgggggtgaagatttatgagcacagtttgttttaaatccaaacaagaatcctcaggttttttccccattgcttgaggtggttatgatggtgggagtgtgaaaattgaaagtcctttgcaagactaaccaggtcaggtctcccttcctagcctcatctcatcacatactttttttttttgagacagagtttcgctctttttgcccaggctggagtgcaatggcgtgatctcggctcactgcaacctccaccttccgggttcaagccattctcctgcctcagcctccggagtagctgggattacaggcatgcgccaccacgcccggctaattttgtatttttagtagagacggggtttctccatgttggtcaggctggtctcgaactccggacctcaggtgatccgcccgcctcggcctcccaaagtgctgggattacaggcgtgagccactgcgcccggccaccacttcttttctttttttttttttttttgagatggagtttctcttgcccaggctggagtgcagtggcgcgatcttggctcactgcaacctccgcctcctgggttcaagcgagtctcctgcctcagcctcccgaggagctgggattacaggtgcgtgctaccatgactggctaatttttgtatttttcgtagagacggggtttcaccatgttggccaggctggtctggcactcctgacctcgtgatccgccggcacctcggcctcccaaaatgctggaattacaggcgtgagtcaccgcgaccggcctcatcacatactcttaaatttagggtttaagcaaagaaggcaaacactttcatatcttagacatttgtttcttaagttcaggctacttggaatactccatccctacctgacacacttttcatcgatgttcagtttgaatcttacctcttagaagccctgacatcccaaacttcctctctcccattttagaaatggaatgactccttcaccttgtatgactgtaacagtgcttattcctgtgatagcatttaacattgttagttgctaaggagcctctctcgagtcattgtttgctcctcccgaacagggatggtgtatcaggcatcactgtatccccgatattctagaacatgcatgacacacagtaggcgctcacaagttttactaatttagtttttgggcagcacggctcccattcggaaccagcaagttcactgcaggtttggagaaggctaacacgcttaaggagagagctgaggtcggcgcggtggctctcgcctgtaatcccagcactctgggaggccgagacgggtggatcacgaggtcaggagttcaagacccagcctggccaagatggtgaaaccccgtctctactaaaaatacaaaaaaattagccgggcgcggtggcgcgcgcctgtaatccctgctactcgggagactgaggcagagaattgcttgaacccgggaggaggaggttgcagtgagttgagatcgcgccactgcactccagcctggcgacagagcgagactctctgtcaaaaaaaaaaaaaagaaaaaaaggagaactgagtcttgttagaggaggcgggtggggaatcagcctaagagacagtgagactgcggccaggattctgagggtggcgacgaagatttactagaagcgcgcggagacggcatgagtaaaactcacgcaattcgtcgtaagtctcagggtcagcaggaggaaaccacgcactacatgctgggagcggcgcgacggaggaccgcgttgtatgctgggacttgtagtctcgcccttagccagacccctcggaccacttaagttcggctacattcaaccacgtccttacaccgataacgtacacccattggttgtctagcacagaatagcgaggttctgcacggcgagtctacctaacaacactcttcagagcaaaccccgtttcggcgatggctacccggaaggcgcgttggctgcggctacgcgtacggtgcgcctgcgcgtgcgcgacgcatgcgcctctacgcgcgcccgccgttcccgcgaggcccacctagagccgggcggcgcaggcgcagagtccccgggccaagatggctgcgcggtgctccacacgctggttgctggtggttgtggggaccccgcggctgccggctatatcgggtagaggggcccggccgcccagggagggcgtggtgggggcatggctgagccgcaagctgagcgtccccgcctttgcgtcttccctgacctcttgcggcccccgagcgctgctgacattgagacctggtgtcagccttacaggtgagggcaggttccaacttccgagtggcggtttcagggcctagaaaagagtgagtctcctcgctgtgactacggctgcaggggtagtggggtggagggtgtcttccgacgcggatgcacaattgccggagacacagacaggcaggaggcggggaggccccagtggctgctcagccgtcaaggaagggagagaagcgtggagcccccggcggcggtgatgaaacgccccgtagatcgtgaaccttcacctctctgtcaacatttctggaggccgctgctccctcgtcctcttcctttcccatctctccaccttctagcccgtagcggaagggaagagctaactgccattcggagaggcctaggtactttgttacaacaaccctgcaagatgcctgccgtcatcaccattttaaagaatgagaaactgagattcaacggaggaatcgaccagcccaaggtcatggagttagactagaagagttgtctcaaacccaaagcagtcatgtcatagtttacgctctttctaccacgtggtgctaattgaagggcacagttaacaatctttttagaagtctttagttggtgattgtaataataacacagtcagacatttattgagcacttactgttggccaggcatggttttccccttacatcacatttccacatgataggcactgttattccattttataaagatactgaggcttagatgttaaaccacttataaatgtcacaaggaggtggaggcttgatatcattgcctgagatgacactgaattatacat

SEQ ID NO: 727 - DNA, 6000 bp, Homo sapiens
gtggctgtttgatctcaaagcaatgctcagaagatgcagtgtctcgaaatcccagaagataagatgttaccacatgaaagatggtctcaataaagggggagaggcggtggccgaggccttaatttccaaaacgagaaactggggcccacccatcttttaaaggtcgtcaaaagaaagctcccatcctcccatcccccacacctgtgtgttgactctgtaaagatgcagtttcctcactttgggaggagaggccgtggtttttgcaggaattgcgccgctgccgaattcagccattgcctcttggaggtttaggatgccccaggccttgttttccctcaaagcattccattggcaatcacgaccaaccatgctccttgaggatttctgtacacactggcttttcctggtcttgtaagtttttatacgagtcagttttcaccataaatcatggaggtgggtctggggctgtgacggcgagtcctcgacgttcaacccggatgtaggtcactccagacccccagggtgccctgtcgttccctttgctggaagtttcaacaaagccagaagcagatgtcaggggttcccggggtcatctgggagggatgtccgctgagtttaggggcaagctgggactgctgcatttctgttcctgtacgtcagaggaaactagcaacacgcctcaaaccactttacaccatgtctcagtgttaaaccagagcctgttttcacaaacacctcctgcgatctcattacagccccaccctgccctcctgcttctgtggccttctctactttgcttcttgctcctcttaaagaccttctgtctcatctgtcttttctggggttgggcctttccccttctctataaccttctgtgactcccacggctcacagctttgctgtatattaggagcagaaagcaagcttcattacatcatttaaaattttttagtagctacattttttttttttttgagatggaatctcgctctgtggcccaggctggagtgcagtggtgtgatctcagctcgctgcaacctctgcctcccaggttaagtgctgggattacaggcgcacgccaccagacctggctaatttctgtatttttagtagagatggggtttcaccatgttggccaggctggtctcgaactccttacctcaaatgatccacccatctcagcctcccaaagtgctgggattacaggcatgagccaccgtgcctggccgccacatttaatgtatttatttattgatttttgagacagagtctcactctgttgcccaggctagagtgcaatggcgcaatctcagctccctgcaacctccacctcccgtgttcaagtgattatcctgcctcagcctcctgagtagctgggattacaggcgcccaatatcacacctggctaatttttgtatttttagtagagacggggtttcaccatgttggccaggctggtctcaaactcctgacctcaggcgatccgtctgccttggcctcccaaagtactgggattatagtcgtgagccactgtgtctggcctcttttttatttattttgtttttatttatttatttttgagacagtctcgcccaggctggagtgcagtggcgcagtcacggctcacttgaactcctgggtttaagtgattctcccacctcagcctcccaagtagctgggaccacaggggtgcaccaccatgtctggctaatttttaatttttttgtagagacagtgtctccctatgttgctcaggctgatctagaatgcctgggctcaagccatcctcctgcctcagcctcccaaagtgctgggatgacaggtgtaagccaccatgcccggcctagtagccacattttgaaaggtacaaagaaacaggtgaaattaacaatacattttacttaacttcatatatctaagctgtggtcattttaatatatcaatataagaaattattaatgagatattttacattcattttttcctactaagttttgaaacccagggtgtatttttacattgacattctatcccaaattgaatgctaaatttttatcaaaaaacattttgatctatattcagtgttcatcaaatttaccattgaaaaaatgattcatatattcaagttgtcccagacttacataaaagcttcccaataattgaattgttagttttcacatttaaattgcttaaacttaaatacaagtaaaaattcattggcaagtaaaaagatgaaaaagaagctaaaacaaaaaaaattcagttcttcactcacactagctcatttctttttttcttttagacatagagtgtcgctctgtcacccaggctagagtgcagtggcatgatcatggctcactgtagcctccacctgctaggctcaagtgatcctcctacctcagcctcctgggtagctgggaccagaagtgtgcaacaccatgcctggctaatttttttaatttttaaaattttgtagagagagggtatcactatgttgtctaggctggtcttgaactcctgggctcaagtaatcccactgcctcgacctcccaaagtgctgggattgcagtcatgagcccccgtgcccggccacaagccacattttagacgcccaataaccttacgtgactggtggctgctatattgggcagcagatacagagcatttccatcctcacagaagattctgttggacagcactctgatagaaagaagtcttgaacacgtgttctccaagggactttcaaagttttctagaatgcagccccaacctatctttacttactgactttctttttatcacgttcactcccccgcctctattccactttgtttcgtttgtttgtttttgagacagagtctcgctctgtttcccaggctggagtgcagtggagtgatcatggctcactgcagcctcaacctcctaggattaagcaatcctcctgcctcagcctcctaagtagctgggattacaggtgtgtgccactacacctggctactttttttattcgttgtagagacagggtctcactatgttgcccaggctggtggtgaattcctgggctcaagtgatcctcctgcctcaacctcccaaagtactgggattacaggcatgagccactgcacccagcccttttgttttgttttgttttagagatgggggtctcaccatgttgcccaggttagtcttgagatcctgggctcaggctatcctgccacctcggctccacagagtgctgggattacaggtgagccaccgcacctggtctctgtttccactttgaggtgaataccctttcttcggttcctccagagaagtctcctctttggggcttggtttagaggcagggcttctgagaaggactctacccttctccctgcagtgggattaattgctgccttggcttcccacgagttctagaaaatgaggcagacagtgtcgggagaggggagtggtggttgtggctcgctgccccggagcctcatttcccatttctcccgagacaggtttgaatggctcttctaaggcagcctgaaccctgcccagttagaaaaacagccacacaaagaacagcactgtgtctgcttccagctgccccatggctgctggatcatggaacatcagacaggagcacactctgggtgcagggtgtaattctaggcgagcagcagctctgccagggctggagggaaatcctttctttgccctcacaaaagaaaatgtgtgcctggctgctctggtgctcatttttcaaaatgagaactggagtctatgtgtatttccttcttaaaaagctataacacagaggctgggcgcggtggctcatgcctttaatcccagcacattgggaagccaaggcgggaggttcacttgcccccaggagtacaagaccagcctagatagcaaagtgagacccccatctctacaaaaaatgaaaacattagccgggcgggggggcacatgcctgtagtcccagctacctgggaggctgaggcaggaagatcacctgagcctgggtggtggaggctgcagtgagctgagatcacaccactgcactgtagcctgggtgacagatcttgtctcaaaaaaataaaacaaaacaaaaaacaaaactataacacacatacaaaaaagtatatacattttaattgtacaactgagatttttacagactgaacatacctctgtaaccagcccccaggtgaagaaagagaacaggacccgccccccgcaaaggccccctcatacccctttccagattcttcttcctcttccaagagtaaccgctccatggattcattttgcctatttctgacctttatttaaatagcatcatacagtgtgcattttgtggcatctggcccctttgctatttgtgataatttgtggttggtttttgaatgcctttatcttttccgttacctgaaacagttagtgaaaaccacagtggtttaaaaaccaaaaaaaccacaaaaaaacaaacaaaaaaaaacaacgaagaagaaacaccagatatggaaggtacgtaggtcattgtctggtaatggtttaagatgtgaagaagaaatgacccttatttggttgatgtttccactttggattttccaggttttggtgattttgggtagtaattatttactttttgattaattctggggtcttgaagggacattaaccctcttcctagcttttggacaaagctggatggaagtcattttctcagaatttctgtttgccagaaagaaaattgaagacttaggtgaaaaagagagggagagatcaactgaatttcttatctggtatgttctgtttctgttttaggtaaaatgtcggttccaggaccttaccaggcggccactgggccttcctcagcaccatccgcacctccatcctatgaagagacagtggctgttaacagttattaccccacacctccagctcccatgcctgggccaactacggggcttgtgacggggcctgatgggaagggcatgaatcctccttcgtattatacccagccagcgcccatccccaataacaatccaagtacgtgtggcctcccaggccccccttaccattccttggccctccaccctgggaatcaggagagtgaccgaagtgactctgccaaagagtctaagtgaagtgccagtacgttccagttttacccccttaccttgaaattccacacgcagtcttttagattccatgttggtgaggctcacagcttttccgtaataaagtatggtttaggatctttcccatggtcatcatatacgaatcttttggcacatctcttggaggcacaaccaactttcttctgagaatgggagtttgtgtcttaagggcccgcacacttcctcctgaggtctgatgcagaacttctgccctgaggccagggccgaggtaggaatagggaggagaagaaaccgtcctgagcaatgtgtgattgtgttttcataccagctcaccctcaatgcaagttgctcttctgcttttgagcaactagatggtccctgtcctttggtgcttccttccgcccaagggtgccctggtatgtcactgctttagtatcacaggtagttctgaaagaaatctttagctcagagagggggcccgtgaatcagactgcctgggttcacataacctccttgtgcctcagcttccccatttgtaaaataggtttcatcaagtacctatttataaatatcagtgagttgttaacatgagaggaagttgtgtgtgccaaatacagagtactcgtttgataaaagtgaactcttattgttgtgttcaagttattttgagctggaagaggatgagataatgactttagattcttagaccatcctgtgatcaataaatagtttctttttctttttctttttttttttttttgagacagggtctcaccatgttgcccaggttggagtgcagtggtgcagtcatggctcgctatagcctggacctcctgggctcaagtgatcctcccacttcagt

SEQ ID NO: 728 - DNA, 6000 bp, Homo sapiens
ggatcgcttgagcccaggagtttgaggctgcagtgagctatgatggcactactacatcccagaatgggcaacagaataagactctgtctcaaaaacaaagtgtaaaaaacagaaacagtggatcctccaactttgttatttttcaagattgttttggctatttgaaatcccttgtaattccatattaattttaggatcagcttgtctatttttgccaaaaaaggcagctggaattttgatagagattacattggacctgggccgggcacggtggctcacacttgaaagcccagcaatttggaaggccgaggcaggtggatcacttgagtccaggagttcgagaccagcctggccaacacgatgaaactctgtctctactaaaaatacaaaaattagccaggcttggtggtgcacacctgtagtcccagctactcgagaggctgaggcaggagaatcgcttgaaaccaggaggcagagtttgcggtgagccgagatcgtaccactgcactccagcctgggcaacagaacgagactctatctcaaaaacacaaaacaacaacaacaaaaacagagattacattggacccgtacatcagtttgggaagtattgccatttgtgatcattacttttacacatcaacgtggctagcctatagtacccagttattcaattaaacaccaatctagatgttgctgtaaaagtattttgcagatgtggtttattttagttgacttcaggtaaaggagacggtctcctttacttaattcaatactttatcacaaagtattgaatatctcatgtaatttactgaatactatactaaaagttaaaaacagaatggttgtaagggtacttgaagtacggtttcttttgaatgtgtatcaccatcataaagtcaaaaaatcataattgaaccatcattaagtctggtaccatctatatatgtatatatctcctctctctttctttgaaagatttctgactgatataccactttaactatattaaatcttctggtccatgaatgtctttccatttatttagttttctttaatttctttcagcaatgttttgtagttttcagtgtataggtcttgtttgaacttccttagttaagcgttttcctaagtattacattctctctctctcttttttttttttttagagatggggtctcgctatgttgcccaggctagattcaaactctcatgctcaaggggatccttctgcctcagcctcttgagtagctgggactacaggtgtgtgccaccatacccagcttctatccttttgaggctattgtaaatggagccattttcttaatttcatttttggattgctcattgctagtatatagaaatgcaactggctgggtgtggtgcctcacacctgtaatcccagcactttgggaggcccaggcaggtggatggcttgagcccaggagtttgagaccagtctgggcaacatagcaaagccctatctctacaaaaaattacaaaaaaaaactagctgggcacagtggtacatgcctgtagtcccagctactgaggaggctgaggtgggaggatcgcctgagctcaggaggtcaaggctgcagtgagctgtgatcgagccactgtactgcagcctgggtgacagagaccctgtctcgaaaaaaaaaaaaaaaaaaaagcaactgatttttgtatgttaatcttaaatcccacaactttgctgaactggtttattagctctaataggtatttagtacattctttagggttcttacatataggatcatatcacctgtgaatagagatagcttcactttatccttttcaatctggatgcttttatttttcttgcctaatggcaatggccagaacctccaggacaatgttggacagaggtggccagagtgggcactttggcttgttcctgttcttaggggtaaaacttccagtcttttaccattaagtgtgtcattagctctgggattttcatagaagccctaaggttgaggaagttcccttctatttctagtttattattatttttttaatcatgaaagcattattggatttcttcaaatgctttttccgtctattgagatgatcacgtggcccagtttacttttaccccctggttggaagccttgggttggaaattcaatctctgtggttttttggggatcaaagaaaagagttacagtcttatagctctccccataaataattgcaagctcacagccgtggtaagtgtttaggatggataaaaacacaaagctggctcctgttgctgctcagcagttggggaaagaaaaacaaatgaagatgtggtagtattcagtaaaggacagaagaaaattcaggcttactactgctttttacaggaaggaagggaggaagcgaggaagggaggaaaggaggaagggaggaaggaaggaaggaaggaaggagaaaaggttgggagggagggagagacagaaaggaaggaaggaagaaaagcattcatacagggatgtttcttgaacgttatctctgagagattttccctaggtgttatgtctccctagcaatggtctgtgatattctgtcttaatgtcagtataataattggtacctttgcaagccttggttgcatcctgagaatggaggaatggcagaggttgggtgtaatccaatttcctgttcttctcttctccctccctccctcccttccttctttccttctctttcttttccctttctttctttctctttctttcttctttttctttcttttttttttctttctcttttccctctttccctctttctttctttgttgcttgcttgctacagtgcagtggctcgattatagctcactacagcctcaacctccggaggtcaaggaatcctcccacctcagcctcctgagtagctggcacatgccaccactccaccgctttattattattcttttaattaaaaaaatttttatagagatggagtctcactatgttgtccagcctggccttgaactcctgggctcaagagatcctctggccatggcctcccaaagtcctgagactataggcaagagccactgcacccgcccccttcatattttaaaagcagtaaaatgttgcccacactaataacatctacatgggaacctcctatgcttgggagaactttgaaatcccttccaacttggtaactcgtccacggctgagggtggcccgtcagtggacatggcgcaaggtggcaagaacttggggctggggacactttgctgagggacccgggacaagccacactccctatctgggcctcactatctttaggacctcgggtaaaggcatgggatttgggcaccggagggttctaagatccaggtctttgccagcatggggctcggaagctccctgtccaaatggcgtttgtttgtggatggccacatcatggttctgcccatctcctgactctgtgtactctgaaagccaggcatgcttcttaattccctctaatgatttcccagagagcctgctggatccaggctgctgctgttatcactgcagccggccgatggggctccaagcagacgggcagatggcacccatttaggggcggatgtgaaatggggctactgatttccagagcttgctttcagtgatggctgagaaaggcctacctggcggcacggaccaccctgggggcacaaagcggacaggcagctgataagccttacctaatacctatcctgtgctaaaaactttaccatcttcccagttcactcccagtcggtcttaggagacaggaccgctattgtgcccattttgcagacaggaagccgagctcagagaggatgggtaacatgcccgaaggcacagagagtgtcttggtctgtccggacgcgtctgtagagttacaggaagagaagggccgccctccagagggccgggagcgccccagcgcgggtccggggtcgaggttggtggtcccgccgcctggaagtggtggagcggcgcggggaggggggaaagtggggagagccgcgagcggcaaatcaggagggagggccaggctgtcgggggcggacgggtggggctggcaccgagaggcaggggcaggataggagagtgggggagacaccaggtccgcgccaggcgtctcgggggtaagcctgggaagctctggggtggcgagcgagccgggtgtgggatggagcctgggggcgatcagagtgaggcggggaaccggcggtggtctcgcctggggcccaggtgcgggccgcgggggcgggagaagccggaagcccaagccggccgcgctccgccccggcgggtccagcccccgcccccgtccccgccgcccggcccttttctcggggcgcccgagaggccagctcagacctcccggctcgacaggcggcgcgggcggcggtgagtgcggcgcggggacgccggggcgcggggaccagcgggagacagcggggggccggtggcgccagcacctgctgggggccccgggcactgagcccttggctggggcctcctgggatgccagggggcgcgggtcgggtcgcgggcatcgaggcgcggcggagggcgtgggggcccggccggggcggggtccggcctcccagcgctggtcccggccgcgtctccggttgggttcagctcctgcgtcccagagtggcccgatcgcgcgtggcggggtcgtccggcccccacccgaacgagcgcccttcgcggcccgccgcgtccccctccccggagaggacggcccctgggctttttagaaaaaggcgcgattctctctagtgactcaggttgagatttccagaaatatcccccgggggttcagaaacaaaaccaaaacaaacaaaaaaaccccaacgaattcccaaatgctatttgccaaacatttgacttctaggggcgcgggtacccgcgtttctctccctgcccccgcgacttcgcgcaagatccgggaaggacacccgaggcccctgggagaccctggggaggtgaaaatcagagagcgaagcgggccgtggcccctaggcctgacccctccccgcggggtaaggcgggcaccccgcgagcgcaggggtcctcttactgctgatggcacccagctctgggcccagacgccgctcaccgtccaccgccggtgctgggtaggtgctggtgggaccagctggtgactggtggcagaagtggatctcgcccctccctgccaagctaggcaaataccctccccgctctggtttgcaggtcactgtggataggtggtcagttggtggtgtgcccgaagctcttcggggtcagggagaggaggtgataggggaaaggtgtatgttctggaagggccagtcatgcttcagggaccaggctagttggaccttcactggttttctacttcccgacagtggagctgatgtcactggctgttggactgagcagtggtcactgggaaatctacagtttgtggaagccacggggtcttccaagctcctaccagtcttcccaaagaggatgcctccctccccttggcctggtgcactggtgctggttcaaagactgtctgaagcccagcttggggtcctctttaggaaagccatgatttgccttaatgtgtgcttggctgcttcatctgccctctcaccccctgccttctcagagtgactctttttaggacttcctatttaggactaacccagatgcctacagagagaagtgcaggctggtatctggaattccaccagtgttttggttttatcagttggagcaggatctagatggcgtgtgacttgctttacctggcatagagtaacacccatattgcacttggctttcttctccaccagcccttgctctgggaactaaatgtgcaccaaactctctaagaaacatttaattgtaatctaccatgagggaggcccatctccctctttcctgttactttaaggcatgaataattgatgcatttattcacatttgagaaagtatcttgtaatgttttcacagatta

SEQ ID NO: 729 - DNA, 6000 bp, Homo sapiens
cacttgtcagaaagactctcagctgggcatagtggctcatgcctgtaatctcagcactttgggaggccaaggtgggcggatcgcttgaggtcaggagtttgagaccagcctgtggtggtgcatgcctgtaattccagctacctgggaggctgaggcaagagaattgcttgaacttgggaagtgaatgttgcagtgagccaagatcacgccactgcgctccaacctgggtgacggagtgagactctgtctcaaaaaaaaaagactctttctccattgaatggtcttggcattcattgatcatagatatatggtttatatgtagactcccaattttatttcattgatttatatgtctattcttatgccagaaccacatgctttgattactgtatctctgtagtaagttttaaaatcagaacgtgtgggccaggtgcagtggctcatacctgtaatcccagcactttgggaggtggaggtgggaggactacttgagcccaggagttcaataccagcctgggcaacatagtgagaccacatctatacaaaaaatttaaaaattagctaggcatggtggtgcgcacctgtagtcccagccactctggaggctgaggtgggagggatcgcttgagcccaggagtttgaggctgcagtgagctatgatggcactactacatcccagaatgggcaacagaataagactctgtctcaaaaacaaagtgtaaaaaacagaaacagtggatcctccaactttgttatttttcaagattgttttggctatttgaaatcccttgtaattccatattaattttaggatcagcttgtctatttttgccaaaaaaggcagctggaattttgatagagattacattggacctgggccgggcacggtggctcacacttgaaagcccagcaatttggaaggccgaggcaggtggatcacttgagtccaggagttcgagaccagcctggccaacacgatgaaactctgtctctactaaaaatacaaaaattagccaggcttggtggtgcacacctgtagtcccagctactcgagaggctgaggcaggagaatcgcttgaaaccaggaggcagagtttgcggtgagccgagatcgtaccactgcactccagcctgggcaacagaacgagactctatctcaaaaacacaaaacaacaacaacaaaaacagagattacattggacccgtacatcagtttgggaagtattgccatttgtgatcattacttttacacatcaacgtggctagcctatagtacccagttattcaattaaacaccaatctagatgttgctgtaaaagtattttgcagatgtggtttattttagttgacttcaggtaaaggagacggtctcctttacttaattcaatactttatcacaaagtattgaatatctcatgtaatttactgaatactatactaaaagttaaaaacagaatggttgtaagggtacttgaagtacggtttcttttgaatgtgtatcaccatcataaagtcaaaaaatcataattgaaccatcattaagtctggtaccatctatatatgtatatatctcctctctctttctttgaaagatttctgactgatataccactttaactatattaaatcttctggtccatgaatgtctttccatttatttagttttctttaatttctttcagcaatgttttgtagttttcagtgtataggtcttgtttgaacttccttagttaagcgttttcctaagtattacattctctctctctcttttttttttttttagagatggggtctcgctatgttgcccaggctagattcaaactctcatgctcaaggggatccttctgcctcagcctcttgagtagctgggactacaggtgtgtgccaccatacccagcttctatccttttgaggctattgtaaatggagccattttcttaatttcatttttggattgctcattgctagtatatagaaatgcaactggctgggtgtggtgcctcacacctgtaatcccagcactttgggaggcccaggcaggtggatggcttgagcccaggagtttgagaccagtctgggcaacatagcaaagccctatctctacaaaaaattacaaaaaaaaactagctgggcacagtggtacatgcctgtagtcccagctactgaggaggctgaggtgggaggatcgcctgagctcaggaggtcaaggctgcagtgagctgtgatcgagccactgtactgcagcctgggtgacagagaccctgtctcgaaaaaaaaaaaaaaaaaaaagcaactgatttttgtatgttaatcttaaatcccacaactttgctgaactggtttattagctctaataggtatttagtacattctttagggttcttacatataggatcatatcacctgtgaatagagatagcttcactttatccttttcaatctggatgcttttatttttcttgcctaatggcaatggccagaacctccaggacaatgttggacagaggtggccagagtgggcactttggcttgttcctgttcttaggggtaaaacttccagtcttttaccattaagtgtgtcattagctctgggattttcatagaagccctaaggttgaggaagttcccttctatttctagtttattattatttttttaatcatgaaagcattattggatttcttcaaatgctttttccgtctattgagatgatcacgtggcccagtttacttttaccccctggttggaagccttgggttggaaattcaatctctgtggttttttggggatcaaagaaaagagttacagtcttatagctctccccataaataattgcaagctcacagccgtggtaagtgtttaggatggataaaaacacaaagctggctcctgttgctgctcagcagttggggaaagaaaaacaaatgaagatgtggtagtattcagtaaaggacagaagaaaattcaggcttactactgctttttacaggaaggaagggaggaagcgaggaagggaggaaaggaggaagggaggaaggaaggaaggaaggaaggagaaaaggttgggagggagggagagacagaaaggaaggaaggaagaaaagcattcatacagggatgtttcttgaacgttatctctgagagattttccctaggtgttatgtctccctagcaatggtctgtgatattctgtcttaatgtcagtataataattggtacctttgcaagccttggttgcatcctgagaatggaggaatggcagaggttgggtgtaatccaatttcctgttcttctcttctccctccctccctcccttccttctttccttctctttcttttccctttctttctttctctttctttcttctttttctttcttttttttttctttctcttttccctctttccctctttctttctttgttgcttgcttgctacagtgcagtggctcgattatagctcactacagcctcaacctccggaggtcaaggaatcctcccacctcagcctcctgagtagctggcacatgccaccactccaccgctttattattattcttttaattaaaaaaatttttatagagatggagtctcactatgttgtccagcctggccttgaactcctgggctcaagagatcctctggccatggcctcccaaagtcctgagactataggcaagagccactgcacccgcccccttcatattttaaaagcagtaaaatgttgcccacactaataacatctacatgggaacctcctatgcttgggagaactttgaaatcccttccaacttggtaactcgtccacggctgagggtggcccgtcagtggacatggcgcaaggtggcaagaacttggggctggggacactttgctgagggacccgggacaagccacactccctatctgggcctcactatctttaggacctcgggtaaaggcatgggatttgggcaccggagggttctaagatccaggtctttgccagcatggggctcggaagctccctgtccaaatggcgtttgtttgtggatggccacatcatggttctgcccatctcctgactctgtgtactctgaaagccaggcatgcttcttaattccctctaatgatttcccagagagcctgctggatccaggctgctgctgttatcactgcagccggccgatggggctccaagcagacgggcagatggcacccatttaggggcggatgtgaaatggggctactgatttccagagcttgctttcagtgatggctgagaaaggcctacctggcggcacggaccaccctgggggcacaaagcggacaggcagctgataagccttacctaatacctatcctgtgctaaaaactttaccatcttcccagttcactcccagtcggtcttaggagacaggaccgctattgtgcccattttgcagacaggaagccgagctcagagaggatgggtaacatgcccgaaggcacagagagtgtcttggtctgtccggacgcgtctgtagagttacaggaagagaagggccgccctccagagggccgggagcgccccagcgcgggtccggggtcgaggttggtggtcccgccgcctggaagtggtggagcggcgcggggaggggggaaagtggggagagccgcgagcggcaaatcaggagggagggccaggctgtcgggggcggacgggtggggctggcaccgagaggcaggggcaggataggagagtgggggagacaccaggtccgcgccaggcgtctcgggggtaagcctgggaagctctggggtggcgagcgagccgggtgtgggatggagcctgggggcgatcagagtgaggcggggaaccggcggtggtctcgcctggggcccaggtgcgggccgcgggggcgggagaagccggaagcccaagccggccgcgctccgccccggcgggtccagcccccgcccccgtccccgccgcccggcccttttctcggggcgcccgagaggccagctcagacctcccggctcgacaggcggcgcgggcggcggtgagtgcggcgcggggacgccggggcgcggggaccagcgggagacagcggggggccggtggcgccagcacctgctgggggccccgggcactgagcccttggctggggcctcctgggatgccagggggcgcgggtcgggtcgcgggcatcgaggcgcggcggagggcgtgggggcccggccggggcggggtccggcctcccagcgctggtcccggccgcgtctccggttgggttcagctcctgcgtcccagagtggcccgatcgcgcgtggcggggtcgtccggcccccacccgaacgagcgcccttcgcggcccgccgcgtccccctccccggagaggacggcccctgggctttttagaaaaaggcgcgattctctctagtgactcaggttgagatttccagaaatatcccccgggggttcagaaacaaaaccaaaacaaacaaaaaaaccccaacgaattcccaaatgctatttgccaaacatttgacttctaggggcgcgggtacccgcgtttctctccctgcccccgcgacttcgcgcaagatccgggaaggacacccgaggcccctgggagaccctggggaggtgaaaatcagagagcgaagcgggccgtggcccctaggcctgacccctccccgcggggtaaggcgggcaccccgcgagcgcaggggtcctcttactgctgatggcacccagctctgggcccagacgccgctcaccgtccaccgccggtgctgggtaggtgctggtgggaccagctggtgactggtggcagaagtggatctcgcccctccctgccaagctaggcaaataccctccccgctctggtttgcaggtcactgtggataggtggtcagttggtggtgtgcccgaagctcttcggggtcagggagaggaggtgataggggaaaggtgtatgttctggaagggccagtcatgcttcagggaccaggctagttggaccttcactggttt

SEQ ID NO: 730 - DNA, 6000 bp, Homo sapiens
cattttctcctcttctgtgggttgtctttttactctcctgatagtgtccttgggcgcacaaaagttttccattctgatgaagtccaatttatttatttcttattttattgcttgtgcatttgttttcatatttataaaacaattgtcagatccaaggtcatgaagatttatgctgttgtttccttctaagagttgtatgagtcaacctttgtatatgatgtgaggtagagatccaacttcattcttctacatgtggatatccagttgtcccagcaccacttgtcagaaagactctcagctgggcatagtggctcatgcctgtaatctcagcactttgggaggccaaggtgggcggatcgcttgaggtcaggagtttgagaccagcctgtggtggtgcatgcctgtaattccagctacctgggaggctgaggcaagagaattgcttgaacttgggaagtgaatgttgcagtgagccaagatcacgccactgcgctccaacctgggtgacggagtgagactctgtctcaaaaaaaaaagactctttctccattgaatggtcttggcattcattgatcatagatatatggtttatatgtagactcccaattttatttcattgatttatatgtctattcttatgccagaaccacatgctttgattactgtatctctgtagtaagttttaaaatcagaacgtgtgggccaggtgcagtggctcatacctgtaatcccagcactttgggaggtggaggtgggaggactacttgagcccaggagttcaataccagcctgggcaacatagtgagaccacatctatacaaaaaatttaaaaattagctaggcatggtggtgcgcacctgtagtcccagccactctggaggctgaggtgggagggatcgcttgagcccaggagtttgaggctgcagtgagctatgatggcactactacatcccagaatgggcaacagaataagactctgtctcaaaaacaaagtgtaaaaaacagaaacagtggatcctccaactttgttatttttcaagattgttttggctatttgaaatcccttgtaattccatattaattttaggatcagcttgtctatttttgccaaaaaaggcagctggaattttgatagagattacattggacctgggccgggcacggtggctcacacttgaaagcccagcaatttggaaggccgaggcaggtggatcacttgagtccaggagttcgagaccagcctggccaacacgatgaaactctgtctctactaaaaatacaaaaattagccaggcttggtggtgcacacctgtagtcccagctactcgagaggctgaggcaggagaatcgcttgaaaccaggaggcagagtttgcggtgagccgagatcgtaccactgcactccagcctgggcaacagaacgagactctatctcaaaaacacaaaacaacaacaacaaaaacagagattacattggacccgtacatcagtttgggaagtattgccatttgtgatcattacttttacacatcaacgtggctagcctatagtacccagttattcaattaaacaccaatctagatgttgctgtaaaagtattttgcagatgtggtttattttagttgacttcaggtaaaggagacggtctcctttacttaattcaatactttatcacaaagtattgaatatctcatgtaatttactgaatactatactaaaagttaaaaacagaatggttgtaagggtacttgaagtacggtttcttttgaatgtgtatcaccatcataaagtcaaaaaatcataattgaaccatcattaagtctggtaccatctatatatgtatatatctcctctctctttctttgaaagatttctgactgatataccactttaactatattaaatcttctggtccatgaatgtctttccatttatttagttttctttaatttctttcagcaatgttttgtagttttcagtgtataggtcttgtttgaacttccttagttaagcgttttcctaagtattacattctctctctctcttttttttttttttagagatggggtctcgctatgttgcccaggctagattcaaactctcatgctcaaggggatccttctgcctcagcctcttgagtagctgggactacaggtgtgtgccaccatacccagcttctatccttttgaggctattgtaaatggagccattttcttaatttcatttttggattgctcattgctagtatatagaaatgcaactggctgggtgtggtgcctcacacctgtaatcccagcactttgggaggcccaggcaggtggatggcttgagcccaggagtttgagaccagtctgggcaacatagcaaagccctatctctacaaaaaattacaaaaaaaaactagctgggcacagtggtacatgcctgtagtcccagctactgaggaggctgaggtgggaggatcgcctgagctcaggaggtcaaggctgcagtgagctgtgatcgagccactgtactgcagcctgggtgacagagaccctgtctcgaaaaaaaaaaaaaaaaaaaagcaactgatttttgtatgttaatcttaaatcccacaactttgctgaactggtttattagctctaataggtatttagtacattctttagggttcttacatataggatcatatcacctgtgaatagagatagcttcactttatccttttcaatctggatgcttttatttttcttgcctaatggcaatggccagaacctccaggacaatgttggacagaggtggccagagtgggcactttggcttgttcctgttcttaggggtaaaacttccagtcttttaccattaagtgtgtcattagctctgggattttcatagaagccctaaggttgaggaagttcccttctatttctagtttattattatttttttaatcatgaaagcattattggatttcttcaaatgctttttccgtctattgagatgatcacgtggcccagtttacttttaccccctggttggaagccttgggttggaaattcaatctctgtggttttttggggatcaaagaaaagagttacagtcttatagctctccccataaataattgcaagctcacagccgtggtaagtgtttaggatggataaaaacacaaagctggctcctgttgctgctcagcagttggggaaagaaaaacaaatgaagatgtggtagtattcagtaaaggacagaagaaaattcaggcttactactgctttttacaggaaggaagggaggaagcgaggaagggaggaaaggaggaagggaggaaggaaggaaggaaggaaggagaaaaggttgggagggagggagagacagaaaggaaggaaggaagaaaagcattcatacagggatgtttcttgaacgttatctctgagagattttccctaggtgttatgtctccctagcaatggtctgtgatattctgtcttaatgtcagtataataattggtacctttgcaagccttggttgcatcctgagaatggaggaatggcagaggttgggtgtaatccaatttcctgttcttctcttctccctccctccctcccttccttctttccttctctttcttttccctttctttctttctctttctttcttctttttctttcttttttttttctttctcttttccctctttccctctttctttctttgttgcttgcttgctacagtgcagtggctcgattatagctcactacagcctcaacctccggaggtcaaggaatcctcccacctcagcctcctgagtagctggcacatgccaccactccaccgctttattattattcttttaattaaaaaaatttttatagagatggagtctcactatgttgtccagcctggccttgaactcctgggctcaagagatcctctggccatggcctcccaaagtcctgagactataggcaagagccactgcacccgcccccttcatattttaaaagcagtaaaatgttgcccacactaataacatctacatgggaacctcctatgcttgggagaactttgaaatcccttccaacttggtaactcgtccacggctgagggtggcccgtcagtggacatggcgcaaggtggcaagaacttggggctggggacactttgctgagggacccgggacaagccacactccctatctgggcctcactatctttaggacctcgggtaaaggcatgggatttgggcaccggagggttctaagatccaggtctttgccagcatggggctcggaagctccctgtccaaatggcgtttgtttgtggatggccacatcatggttctgcccatctcctgactctgtgtactctgaaagccaggcatgcttcttaattccctctaatgatttcccagagagcctgctggatccaggctgctgctgttatcactgcagccggccgatggggctccaagcagacgggcagatggcacccatttaggggcggatgtgaaatggggctactgatttccagagcttgctttcagtgatggctgagaaaggcctacctggcggcacggaccaccctgggggcacaaagcggacaggcagctgataagccttacctaatacctatcctgtgctaaaaactttaccatcttcccagttcactcccagtcggtcttaggagacaggaccgctattgtgcccattttgcagacaggaagccgagctcagagaggatgggtaacatgcccgaaggcacagagagtgtcttggtctgtccggacgcgtctgtagagttacaggaagagaagggccgccctccagagggccgggagcgccccagcgcgggtccggggtcgaggttggtggtcccgccgcctggaagtggtggagcggcgcggggaggggggaaagtggggagagccgcgagcggcaaatcaggagggagggccaggctgtcgggggcggacgggtggggctggcaccgagaggcaggggcaggataggagagtgggggagacaccaggtccgcgccaggcgtctcgggggtaagcctgggaagctctggggtggcgagcgagccgggtgtgggatggagcctgggggcgatcagagtgaggcggggaaccggcggtggtctcgcctggggcccaggtgcgggccgcgggggcgggagaagccggaagcccaagccggccgcgctccgccccggcgggtccagcccccgcccccgtccccgccgcccggcccttttctcggggcgcccgagaggccagctcagacctcccggctcgacaggcggcgcgggcggcggtgagtgcggcgcggggacgccggggcgcggggaccagcgggagacagcggggggccggtggcgccagcacctgctgggggccccgggcactgagcccttggctggggcctcctgggatgccagggggcgcgggtcgggtcgcgggcatcgaggcgcggcggagggcgtgggggcccggccggggcggggtccggcctcccagcgctggtcccggccgcgtctccggttgggttcagctcctgcgtcccagagtggcccgatcgcgcgtggcggggtcgtccggcccccacccgaacgagcgcccttcgcggcccgccgcgtccccctccccggagaggacggcccctgggctttttagaaaaaggcgcgattctctctagtgactcaggttgagatttccagaaatatcccccgggggttcagaaacaaaaccaaaacaaacaaaaaaaccccaacgaattcccaaatgctatttgccaaacatttgacttctaggggcgcgggtacccgcgtttctctccctgcccccgcgacttcgcgcaagatccgggaaggacacccgaggcccctgggagaccctggggaggtgaaaatcagagagcgaagcgggccgtggcccctaggcctgacccctccccgcggggtaaggcgggcaccccgcgagcgcaggggtcctcttactgctgatggcacccagctc

SEQ ID NO: 731 - DNA, 6000 bp, Homo sapiens
agcgagaccttgtctctaaaacaagacaaaacaaaaaaaaaaatcacttcatggctaggtttgaggagaaaatactgcacttacaaaaccttaatgcacaagtttagtaacaatatttatcatttaacataaggaagactaacatgagaaagaaaaagatttcctagcacatccacttgcctttttaagcttctgatacctctcttctggagtgtcaaaaccatttgttaatgcagagactgaaggtccatcactgattcctagattttaagaaataaaaatttttagcttactaataaatactaacgtaaaaatgccagtcaatcattcagtgcctctataatgtcgtatcacgaattaaggttacttggaagcactccctaacttacttttttaaaataagcattaatttcagtggccaccaggttaaaccctctaataatgaacttagagatgcgaatgtttcaacatgagaataggcagttccagcgtctaaaacatgacttaaaacacagtaatcatgtaagaaaacaatctctatgcttgaataagttttgctgctttaaaagattcctgtataaacagacatcaataaatccctaagtatattattgccagagttccagtcttggtcaagagtttggagtggttaatatctatgcaaagaatgtatcttcaagattaagagaaaattatttctctaagtgaaaactcttagcttcctagggaagtgattccaactagacactacctaaagccaaggatactatttacccctgcatggattccttcatgattcaaacatggaaaatcagacagcaaaaatggatatccatatcaaagggagtgaaccgttcatattgacatcagcaatttaaaaactagtctttgctccccctaaaaaaggggaaaaaaaatttgcaactttaagtgtcagtgaagtatttcctgtatacacacctgttgaggcaggcaatgaacacgtccactaatgcataaagaaatatctcatttatctgcaaaaacctgaccctagccggtcacaaaagggcaaatattgtaagattccacttatatgagatgttaagggcagtcaaattcagagacaaatggcggttgctaaaggctgggcgaaaggagaaatggggagtttaatgtgtaaagagtttcagactgtgaagatgaagaagtcctagagatggatggtgatgtttgcacagcaatgtgaatgtacttaatgccacttaactgtaaagccacttaaaatggcaaatttcatgttatacctattttacaatcaagaaaaaaaacagtctgaccctaatcctcaagctctctgcaatgtacacgccgcactgttttaagcagcatcaaaaccatcatctctatctgagatcctgagtccaatcacaaacctacggcgtatcttcatttctttcgtgcttttgaaacgtttaaagggtaacactgagacctgtgaaacccgcccaaggctactaacagcaagaggccaccaccaagcataagaagttgggggctgggggattgaaggagccttggctatgcactgcaaagtgctagcctgagcttgcaagggagggatacctgaaaactccccatcgatggcgaagaagtcggcctcctctatggcctggtacactttgtgaagattactcttaaaatctgcggagaaaccgaaaagaggctcagaaccagtggcctgaattcctgctaaggggagagggaaggagggccgaggagctcccgaggctgagagccggaaggggaaaagtcccggaggtgtgcaccggggcgaggggaatcaagtcctcgaggggtgcatgggtcaggggggacaagccccggggggtgcccggcccggagaaggacaaggccccggatggtgccggggttggaggagtaagtacaaggctcctagggtgcacggtccgcagccggaaaagaccccaagaggcgcaccggcttaaggagggaaaagccctgaggggctgcctcagccccaggcccagccaaacacgccggccatggtctcggcctagcaggccaggggcagccgggtgtggggaggcggggaggtgtacggcggacacgcactgctcctgattatctccattctgcagagtggccggaaccttggccccacccgggcccgcgcccgcctcagcggttctactcgccgaattccgcggcgactgcggcagtagctgaggcagccgcagcggtgacgccggccgcgacttccggaaacagcgcgcgcctgctgcgcttgcgtcagcgcctgcgcggcggcgggggcggggccaaggctgggctcctttccctccttatagggacaggggaggggcgtggctatcgaagtccccaaggcgtggcctaatttgtgcgggctttcacttcagtagaaaaaatgtgcatgtctcgacatccagtcgaccaggaaatactgactgggtttctgtgatatgctagccactcttacaggggtggagatacagtgatgaacaggaagacgtgctccctgccccattgtagcttaaacttggggtaaggggaaattcaggcaggagtgaaacttgccatttggtaacacatgaaaatcgctattaagaaaaagagcggggcgatgtaatagagaataatgggatccgggtgcggtggctcacgcctgtaagcctaacactttgggaacccgaggcgggaggatccgttgaactgaagagttcgagaccagcctggacagcatagtgagacctgtctcttaaaaaaataaaattaggccggacccggtggcttatgcctgtaatcccagcactttggaaggccgaggcgggcggatcacgagatcaggagttcgagaccagcctggccaacatagtgaaaccctgtctctactaaaaatataaaaattggctgggcttggtgactcatgcctgtaatcctagcgatttgggaggcagaagcgggcggattacctgaggtcagaagttcaagagcagcctggccaacatggtgaaaccctgtctctattaaaaatacaaaaaattagccgggtgcagtggtgcgcgcctgtaatcccagctattcgggaagctgaggcaggagaatctcttgaacctgggaggcggaggttgctgtgaaccgagatcacgccactgcactccagcctgggtgacagaacgagacttgttttcaaaaaaaaaattaaattaaattaaaagaataataggggttgttacttaggtgatcacggaaagcaaagctgagacccttagctactgcattagcctctgggaatactatgtcgagtgcaacatatgaggcccggccctaatggaattgtatgttggtttggggttgctgttctccaatgcctagcactgggctgacacgtagtagacactcaataagcatgggttgaatgaatacattcaggttggtctttcacaaaagccaactatgaaaagttggttagtgccggatgcgatggctcacgcctgtgatcctggcactttgggaggccgaggcaggcggattgcttgaggccaggagctcgagaccagcctgggcaacacggtgaaaccccatctctactaaaatacaaagaattagcctggcgtggtggcgcacccctgtagtcccagctactcgggaggctgaggcaggagaactgcttgaacccgggaggcggaggttgcagtgagccaagattgtgccactgcactccaacctgggcgacagagcgagactccgtctccaaaacaaacaaacgaacaaaaggaaagttgattagaagacctattttcaaaatctatctcagccacttattagttctggaatgcattaaaccttcctaaacctcaatttcctgggattgtattgaggctcagtggtgctaatgaatgtgaactgggaagcagcgtattaataaatctgtataaataactgtttaatgggggcctggcgccatgactcacacctgtaatcccagcgttttcgggggctgaggcaggagaatcgcctgaacccaggagttccagaccagcctggggaaaagagcgagaccctgtctccataaaaataaaatgaaattttaaaatgagccaggcgtggttgtgcacgcccgtagtcccaactattcacgaggctgaggtgggataatcgcttgaacccgggaggcggaggttgcagtgagccaagatcgtgccactgtacgccagcctggcgggtgagagtgagactctgtctcaaaaacaaacaacaacaacaaaacaaaaccaaataatcagcataagttctagacgctgtgacctagacgctgggaaggggcgaaacgtggtgataagaaaaccatttcaagctgtacgaggtggctcacgcctgtaatcgcagcactttgtaaggctgaggcaggaggatcccttgacgccatatgttcaagatcagcctggaaaacgcagcgagaccccatctctacgaaaaaaaaaatattttaatagaaataaaagtcatttaattccgattcttaacaccgtaaattgaacgtatagtcctgtgattttctacataaaatgtgaaggcaaaaaataactgtagagagtacggtgcggccttgtaatattttaatttctaggcaaagcttgtatcctccggatacaagaacagccgcccaggaggagcggaaactgacacacacccgtcaccccttgggctgtgactgccgagcccgggtactcggtctctgggtgaagaggaaggggcgggaccggcggtattacgcatgcgcccacttcctccggctgggagtggccgctctaggcagcggggaggtcgcggggttgaggggggttgtgaaaggagagcggcctctcctctatggtcacggggccggggcacgcttcccccactctgtcttgttacttccggtagcgaagcctctccctcttcctctgctcccgcggggtctgtgctgagaataatggcccggttggcccgggacgagtggaatggtaagccgcgacacggctggggggtgctgagggggcgactcgggcttgatatcggggagtgatgtggaagacggagcgggaatcccttctgcggagcctccccagccgggtcgtaggaggcgcgcggggcctctcctcacgcaggcccgagtcctgagcatccccactcctggccgcggggttcggaccccagcttggccaactgcgctatcccttcccgagagccccacgtccgcacagccggtcgctgggcctcgcctgcgtcctttcgggggtcagggtcagagccactccctcctggggctccctagggcgggaaggaggaggggtcgcttccaaacaccttggaggggaaccacggggcgcctgcccgccaggagcgcttgccacaccctgcaacagccggaccagaattgatgaggcttctgatagtcgccacgctgagtttacggtctaattgtcgaggcacgttcctggcctaaggcggagcgattgtgcccattctttaaagtagggtgaccgaagcgcagaagggagaaagtgaaatcccaaagtcacactggggccaggcaagaactcggctcttctgattctgcgacttgcggctcggaaataacttaggcaaaagagaattttcttttttttctttttagagacggagtcttgccctgccgcccaggctggagtgcggtggagcaatctcggctcactgcaacctccgcctcccaggttcaagcgattctcttgcctcagccttctgagtagctgggattacgggcccgcgtaaccacgcccggctgatttttgtatttttagtagagacggggtttcaccatgttggtcagactgttctcgaactcctggcctcaagtgacccactcgcctcggcctcccaaagtggggagattacaggcgtgagccaccgcgcccggccgagaattgtcttttattaaaaaagccggcgggagggggc

SEQ ID NO: 732 - DNA, 6000 bp, Homo sapiens
tgggattacaggcgtgagccacctcgcccggcctctctctgcctttctgttttgagcacgcatgttctctctctctcttttctgagcacgcatgttctctctctttacctctgtctctctttgttctctctctctctctttctttcttttgagcatgcatgctctctctgtctctattttgagcacacatgttctttctctttacctctctctctctcttcatacacatgtattttttgagcacacgtgttttctttctctctctgtctctattttgagcatgcatgttccactttttttttttttttttttttttgagatggagtgtcgctctgtcacccaggctggagtgcagtggtgcgatattgtcttactgcaaccttcacctcccaggttcaagcgattctcctgcctcagcctccctagtagctgggattacagggattacaggcatcggccaccacacctggctaattttttttgtatttttagtagagatggggtttcaccatgttggccaggctggtctggaactcctgacctcaagtgatccacctgcctcagcctcccaaagttctgggtttacaggagtgagccaccctgcccagccgctatctctctctctattttgagcacacatgttctttccatctctctctctatatatatttttgggcacacgtgttctctgtgtgtgtgtgtgtctattttcagcatgcatgttctctgtctctatctccatctctattttgagcacacatgttctctctctctctttctgatttcaacacgcatattctccatctctatgtgaacatgcatgttttctctttatctctactaatcatctttctctctctctctctctcactccatcctccaagccactctcaggcactcaggcatgtggtaaacatccccacccgtctccatgtcacagtggacagtggggacccctctaacgggcccctctgccccaatacagaatgcagcttctcttctggagtcttcctgctttcccaggctctccccaggaagcaaaacgcagaacccctctgctcttggaccccacaaacccacatggggtcccctccttggatgaggggaggggctgcaggcctgggtctcccttccttggggacctggaacagcttctccctgtcccttcttgttctccttcctctcaaagtcgggaaaatcttttccagtctcgtttagtgtctgaaatctttttttttttttgagacagagtatcactctgttgcccaggctggagtgcagctcactgcaacctccacctatggggttcaagtgattcttctgcctcagcctcccaagtagctgggattacaggcacgcactaccacacccggctaacttttgtatttttagtagagacaaggcttcaccatgttggccaggctggttattgtctcaaatctagggtcctaacctgagttttctgaaaactcaaaaactagaagaattttcattttctctttctgctttctcatccatttgctgaggtaacaaaatttagggctgacttgcttgaatgggagaaggactgttggggaaaaggaaactctggagtggaaaaaacatgtaaatatttgaacataggatcccatcatacatacaggcacagggagaagaaaccattggcggaagtaggacagaatgttaacggggtgctgttttcaaacggtggacccatgaatgaactttttaaaaaaattttatttatttattttttattttttttatttttatttttgagttggagtgttgatctgtctcccaggctggagtgcaatggcgtgatcttggctcactgcaacctctgcctcccgagttcaagcaattctcctgcctcagcctcctgtgtagctgggattacaggcatgtgccactacgccctgctaatgtttgtatttttagtagagacagggtttcaccatgttggccaggctggtcttgaactcctgacctcaagtgattcacccacctcagcctcccaaagtgctgagattacaggatgagcccctgcacccagctgattattattaatatttttgagatagtgtcttgctctttagcccaggctggagtgcagtggtgcagtcacagctaactgcagcctccagctcctaggctcaagtgatcctcccacctcagcctcctgagtagctgggactacaggtgtgagccaccacacctgtccagatattttcttatttaaatttttctgaattttacaaagtttctagaatgtatattgcttttatcattacacacacacacacacacacacacaatttattccagttcatttgcagtttgtattttatgcaagtcaaattttttgcatgagaaatgcctgaatccaagcatagtaaacacaatgtacatttcaaaacaatgcagagtgtacaaaatatagagcagaaaggagggttcattcacacactcaatagcttgggttaggttctacaatggcaaacaatcacttttgttataaagttaggagtactgggccaatttaggggtgttggaacagctaagcatgaaagagcaaccaagtaaactaaagacttcataatgtacatatttctttgtttttgttttgttttgtcttgttttttatttatttatttattttgagacaaagtctcactctgttgcccaggctggagtgcaatggcacgatcatggctcacggcagcctccacctcctgggttcaagcaattctcctgcctcagtctcccaagtagctggaattacaggcatgcgccatcacgcccggctaattttggtatttttagtagagacagggtttcaccatgttggccaggctggtctcaaactgctgacctcaggtgatccacccacctcgacctcccaaagtgctgagattacatgcatgagccaccgcgcccagcctgttttgttttttagagacagggtctcactctgttgcccaggctggagagcagtggtgctacctgcagcctggatctcctggaatcaagggatcctcctacctcagcctcccaagtagctggggctactagtgcacaccagcgtgcctggcttattttttattttttgtagagactgaggtcttgctatgttgcccaggctgctcttgaacttctgaacctggtatggcttagtgtgaaataactttcacaaaaatcccaacctgtttcaacccagcctaagacagtggtgtagttccttcagatggtcagctaggaggtccaagcaggataaggacaaggaaggggctgacagagtggaagagagactgagggatgaaggtaccgtgtaggtcagggcacagggataaggagaatgaaagggtgaaaccgttgcatggagaggaggctgcaatcagagaaagggacattggaactaaagtggttctgagtgtgacaagggcccagtgcagttgtggcgtgggggataaggtctccaaagaggtacacccactgagaggctgcaatgctggctaagctgtaccttggacattgaagacaccaaggagagtggcaggatttgtgatggagatgaaggctaggggccaagctaccaagttttcagtaactgtgaggggatgaccaggagggccaaggatgacaaagaggacggggagaaggtggcagagctgggctgcatgaccctcaaatcagcagggatttttttttttttatttttacacaaggatgaaggagacatgaatgagttgaaacttgcaaacagggtggaccttaccttcaaggaccctggcagaccctctctgaacaaaactggagacatctaccaggagcaagggtggtcacggccattagaaggtgcccttccatgcggagttgtcttacatctaaggcataggaatctctaagctctacgaagacagggacctcatcatcttgttcatcaggcaggcatgtcatagcttataataaatgcatatttattggctgggcgcggtggcttatgcctgtaatcccagcactttgggaggacgaggtgagcggatcaactgaggtcaggagtttgagaccagcctggccaaagtggtgaagccccatctctactaaaaatacagaaattagctgggcatgttggcccacatttttaatcccagctactcgggaggaggattgcttggacccaggatgcaaaggttgcagttagccaagatagtgccattgcactccagcctgggtgacaagatcgactctgtctcaaaaaataaatacatgcatatttatttatttattttatttttggagagtgtgtctctctctgtcgcccaggctggagtgcaatggcacagttatagctcactgcagccttgacttcctggctcaagcaatcctcccacctcagcctcgcgagtagctggaactacaggtggacatcaccacacctggccatttttttttgtagagatggggtctcactatgttgctggtctccaactcctggtttcaagtgatcctccctcctaggcctcccaaagtgctgggattacagaggtgagccacttacctgacccataataaatatttattgaacgaacgactgaattcaccaattaatcgctatttcctgatagcccaccgggatccgctggtgcaatgataaagagcgcaggctttgagatcaggcggatctgtattgggactgcggctctcagcctccgcttgtacctgctgtgcagtgaggactccaggaactgatgatgaaccggcacggtcctcggcacgtggcaagttctccataagtgggctcagtaaaatccctctcccgggaaagcgccccaccgtgtttggtggggtgactgggacgcgaggatgcggctgggagtgtgatgagaagggcggggatcggcgaggactccaggctggggttgcaggcccagccaggggcggagccttctccgggtcgggcggggacagagcgctcccttggaggcacccagggacctggccagccgtgcagctgcccaggcgctatggcgagtgcggtcagggggtcgaggccgtggccccggctggggctccagctccagttcgcggcgctgctgctcgggacgctgagtccacaggtgagagccagggaccgacgccaagtccccaaagtctggtcgcggggcgcagggggcggcgtcgcacttggggcgagggcgcggcggggccacgggggcacctctccctccctcacgcctgggtggtcccaactcggccccaacggagtaaaagcctcctgggtttggggagccgccagttgcccccaacaaatacctagctggggagatctgccagcgtggaaaggcaagagtagacagagcaccccgcctcttcagcagggagaggtgtagtctggggtaggggggcacctgggcacgaaagccaggcctcttaaaacttctgggaatcctggcttcctttgaaaatatgattgacttcagggccctctgctgagaaatgagcctgcacgcccagttttgcaatttcagaggctttacaatacggtccccttacccatggctgcaccccaggttcagaacctatgggataaatgagctgggagtgtcagtatctgctcccacggtgccaggaatagcagagtcttacagaaatgcagccaggaggcaaaagtcgcctggcctaagaatccaggtgtcccgcctagaacccccatggggcaaaagcgatcaggtagagttaggcacctctcattcccggcttccacctcatgggtccacctcatggttgccagctaagaatgcaagcccagtgtggccagatcggatgtctctggaaaaattagaaatgagaaagatttgaaatcttggtttttttgtagaaatcatccaatttttaaaaaaattggcagctaattgaaaaatttttaagcactagatggtcaaacaaaattcatttctgggcaaccaatctgcagcctcttctccaaaccgttctccc

SEQ ID NO: 733 - DNA, 6000 bp, Homo sapiens
gccctagaggtcgaggctacagtgagcaaggttgctccactgtattcagcctggacgacagagtgagaacctgtctcaaaaataaataaataggccgggtgcgatggctcatgcctgtaatcctagcactttggaagccgaggcgggtggatgacttgaggtcaggagtttgaaatcagtctggccaacatgatgaaaccctgtctctactaaaaatacaaaaattagctgggtgtagtggtgcatgcctgtgattccagctactcaggagactgagacaggagaatcgcttgaacccgggacacggaggttgcagtgagccgagatcgtgccactgcactccagcctgggtgacagagcaagactctgtctcaaaaaaaagagaaaaaaagaaaaaagaaaagaaaattaaaattaaattaattaattaattaaaaataaaagaattagaaaacaagcttcacctcctccaggaagtgtgccttcatctccctatctccagagaggttaggtgccctcctgggagctcccagccctctgcgtttactccaagctgatggcgctgggttgtcataggtgtgcctagcaacgtcacgaaggtgtaactctaagcaggaagaaaataaacttcctcgtggcagattttacatgcacctggaggcttgaggatgggaaaatgaaaccatccctgtaaacctcatgcaattaatcagagaacagagaggagaaatggaaacaagccaggcttgcagcacacccagcgctgatcatgaggtcagctgccccctgatctgcttcctcttagttgtctggtgcctgctgttctagaatcacgtagacctggttacaagatcatagttccccttaactgcactagagatagcaacttgaacgttatgaaacattaaatgttacttttgagaaattccttcaggtcctgcgtgccggtgaagcgactgactccgccagcctgaaggaccccaccaggagctaactccccaaaaatgtctttttcacatcatgatgatttcatttcccttgctctgaccaatgaccccaattttctagcctctcaccctccataatccccttaaaagccccatcccagaattccctggggagatgcattcgcaggtctcctcctatccccttgcacagtgccctgtgatcatgaaactctctctactgcatccctgctgtccagtgtaatagggctgtgacagggcagcaggcatacaaatctgctgttcctgtaacaaaaagcacacctctacgtctagatggagccacgtctagagccctgcagatccatgctagaggggttccagcaggctggagtacaatggcgtgatctcggctcactgcaacctctgcctcctgggttcaagagattcttccgcctcagcctcccgagtatcttgaattacaggtgcatgcctccacgcccagctaatttttgtatttttagtaaagacggagtttcaccatgttggccaagctggtcttgaactcctgacctggtgatccacccgcctcggcctcccaaagtgctgggattacaggcgtgaactaccgcgcctggcccttttttttgttttgttttgttttttgagatggagtctcgctctgtcgcccaggctggagtgcagtggcgcgatctgggctcactgcaagctccgccttccgggttcatgccattctccagcctcagcctccccagcagctgggactacaggtgcccgccaccacacccggctaatttttgtatttttagtagagacggggtttcaccatgttggccaggctggtctccaactcctgacctcaggtgacccacccaacctcgtcggcctcccaaagtgctgggattacaggcgtgagccaccatgcccttcctccttctctcataggcttctttcttccagcacctgtaagatcaaggccagggagacctccttccctggctccatctgggacaatcacagtgtttctgtggtcccctgtgaggctacaattcgcctctcagttcctgcattgcagagcaggtggaagctgagcaagcaacactgatcttagcagagcctcatgtattcaactagacatttactgagctcagactgagtgccaggcattgaggatacaatatggcaggcaagattcctgccccgagaataatgataattaaaatagcaagcatttattgcacactgattatcttctaggcactgcgctaagcatttttttttttttttgagaccgggtctcactctgtcgtccaggctggagtgcagtggcgcgatcttagctcaccgcaacctctgcctcctgggttcaagcgattctactgcctcagcctgctgagtagctgggattacaggcacacaccaccacgcctaggtaatttttgtatttttagtagagacggggtttcaccattttagctaggctggtctcgaactcctgatctcgtgatccacccacctcggcctcccaaagtgctgggattacaggtgtgagctaccgtgcccggccccaaccttcttttctttttctttttcgagtgcagtggcacgatcatagctcaccgcagcctcaaactcctgacctcaagtgatccttccacctcagcctttcaaaacagtgggattgcaggtgtgcctcaccttatccagcctaggtgccattaatcccactgtatagacgagtaaacaaacatgcagactaagcttgtctaagagcacacagctaactagggggcagaaccaagctttagacctgagaagccctgttccagagcctactcctttaaccattaactaaactaaaccaacggttgcatgccagtggggacaaataatggtaaagcaaacaaataaaaaagatactggccaggtggctcacgcctgtaatcccagcactttgggaggccgaggcgggcagatcacctgaggtcaggagttcgagaccagcctggccaacgtggtgaaaccccgtctctactaaaaatataaaaattagccgggcgtggtggcacaagcctgtaatcccagctactcaggaggctgaggcaggagaatcacttgaacccaggaggcggaggttgcagtgagccgagatcataccactgcactccagcctggtgacagagtgagactctgtctcaaaacaaaaacaaacaaaccaacaaaaaaaggatggagtcttgctctattgcccaagctggccttgaactcccagcttcaagcaatcctcccagcttaccctcccagagccctggaattacaggcatgagctaccgcactaggccaatctttgcttaatttaagattattttcctctttctctgatcacctggtctgttattattggcccaatcctgttttcattcaagtatcctgtcttcactttcatttcctgggtgttaaggaactcatacatcatccaaatctgggaaaacaaaggctaaattcaattccggctcaggcaagggagaaacacaagcagaagttcagctttttgtgtttttgtttttgttttcagacacagtctcattctgttgctgaggctggagtgcagtggctcgatctcagctcaccacaacctctccctcccaggttcaagcgattctcctgcctcagcctcctgagtagctgggattacaggcacttgccaccacaccaggctaatttttgtatttttagtagagatgggatttcgccatgttggccaggctggtcttgaactcctgacctcaggtgatccacccactttgtggatctcccaaagtgctgggactacaggcataagccaccacgctcggcctcattgtgtcttctgcctcagtacatccatattttgaaatacatattattttattataatttgtttttgagacagggtctccctctgtcaccgggcactgtagcatgtgtctttcaaacattatctcatttgatcctctccccaactctaggaagaagatacaattattatcatccttattttacagaattggaaaccaaggcacagagaggtgaagggactcgcccaaggtcacacggaaagtggtgggtcaggggattgaactgagggcaactggctccagaccctgaactctccaaccctctgccaccctcctcctaggtgagggagattacattactggggaccctgtttcaggatattaaggggttttccaagatgtttctcatagaaaaaagaaaaaaaagggtgtggctcatgcctgtaatcccagcactttgggaggccgaggcaggcagatgacttgaggtcaggagttcaagatcagcctgtccaacatggtgaaaccccatctctactaaaaatacaaaaattagccaggcatggtggcagatgtctataatcccagctattcgggaggctgagccaggagaattgcttgaacctgggaggaggaggttgcaggttgcagtgagccaagatcacaccactgcactccagccgggcgacagagactccatttcaaaaaaaaaaaagaagacaagcaagatgttgagtgtgactgggtggaagccactgacttgtccctggcacaagtgtgctgatatcccttccccctccttcctcacgtcctgcatctcagcgagaattggggtgccggggttagctgtgtggccgtcatcccaggcccaggtgaagccctcgatcaggtgaggccatgatcccaacgagtgttttagcccagatcctgcctcttccctgctttctgccgagaagcgggacctcctctatggaaaatatccagctgggtgagcctgggagggaggaggtgagttgggctggactcagggaccgactcttcccgtctcatgactgtgtttactgggctggattttgggaaggggccagattgcatcagacagggcctgatgggctggagccagactgtggtctgaggaggagacacagccttataagctgagggagtggagaggcccggggccaggaaagcagagacagacaaagcgttaggagaagaagagaggcagggaagacaagccaggcacgatggccaccttcccaccagcaaccagcgccccccagcagcccccaggcccggaggacgaggactccagcctggatgaatctgacctctatagcctggcccattcctacctcggtaaggcccactcagccatctccacggtccttcctcctctcccgaaatcaggacccacccctcttgtttcctctcatttcctttcctttcctcttcgtttctttctttctttttttttgagagagtcactctgtcacccaggctggagtgcagtagtgtgatcacaacaactcaaacaactcaccgcagcctcgaactcctgggctcaagtgatcctcctgcttcagcctcctgagtggctggaacttcaggtgtacaccacctgcagtggtgagatggggtctcactatgtttcccaggctgatcccaaattcctgggctcaagcaattctcctgccttggcctcccaaagtgctgagattacaggagtgagccaccctgcccagcccactcacccttttctagccaacctgttccttggaccctcacgtcacccctgtctaatcccttatcccaggagtgctatgttactcagcctgggacctcacacacatctggggtcccacattccacagaggggaagcagcaggcttctccctgctcttcccatccccacaaccctgaacccctgcctctcctctgacagggcctctcatcatgcctatgcccacttcacctctgactcctgccttggttacaggaggtggaggccggaaaggtcgcaccaagagagaagctgctgccaacaccaaccgccccagccctggcgggcacgagaggaaactggtgaccaagctgcagaattcagagaggaagaagcgaggggcacggcgctgagacagagctggaggtaaggagtcggggggcccagagagctcaaggtggtgcttctgccatga

SEQ ID NO: 734 - DNA, 6000 bp, Homo sapiens
gggaggtacactccaggcaaaggcaccagcatgcgcacaggcctagagattgaaaagtgttcagccaggtgtcacatctgtaatcccagcactttggaaggccgaagcaaggagaatgcctgaggccaggagttccagaccagcctggagaacatagcaagacctcgtttctttttcgcttttttttttttttttttttttgagacggagtctcactctgttacccaggctggggtgcagtggcacaatctcggctcactgcaagctccacctcacaggttcatgccattctcctgcctcaggctcccgagtagctgggactacaggcgcctgccaccatgcccggctaatttttgtatttttagtagagacagggtttcaccttgttagccaggatgatctcaatctcctgacctcgtgatccacccacctcagcctcccaaagtgctgggattacaggtgtgagccactgcgcctggcgaccccatttcttaaaaaaaacatttttttttttaattagcagggtgtggtggtacacacctatagtcccagctactcaggaggctgaggtgggaggatcctttgatcccaggagtttgaggctgcagtgagccatgattgtgccactgcactccagcctggttgccagagtgagaccctgtctcaagaaggaaaaaaaaagaaagtgttcagcctttgggagcactccatgttgagaggcttaggaaggagaaaaggcaagagagaccacagggatttgatggagaggctctgtgaatgcaggatagagggctatgacctgatgctgaaggccgtgggggccactgaggagttttaaggaggagagagatgtgcttccctggtgctgggtggagaatggctgagtggaggagggccatcagtcaggaggctgctgcacactccactctcacatttgaaaataccccatgaggcacggtggctcacgcctgtaatcccagcactttgggaggccaaggccggtggatcacttgaggtcaggaccagcctggccaacatggtgaaaccccatctctactaaaaatttaaaaattagctggatgttgtggcgggcgtctgtgatcccagctactcaggaggctgaggcaggagaatctctggaacctgggaggcagaggttgtagtgagctgagatcatgccactgcactccagcctgggcaacagagtgagactccgtctcaaataaagaaaaaaagaaaagaccccatgaggagcacaacctgggacttggaatcagagatctggtttccagatctagcactgcttgcactttttttttttttttttttgagatggagtcttgctctatcgcccaggcgggagtgcagtggcgcaatctcagcttactgcaagctccgcctcccaggttcacgccattctcctgcctcagcctcccaagtagctgggactacaggcgcccgccaccatgcccggctaagtttttgtatttttagtagagatggggtttcactgtgttagccaggatggtctcaatctcctgacctcgtgatccacccacctcggcctctcaaagtgctgggattacaggtgtgagccaccgcacccagccacttatacatctttaaactgtggatcataatgaagtttcctatctcatggagttatgatggggtttcaggttgataattgggcaagaaagtagtttttaaaccatcaagacaaatgttcgagcctgggcaacatggtgaaaccccatctctacaaaaaaacacacaaaaaattagctgggcgtggtggcacacacctgtggtcccagctactcaggaggctgaggtgggaagatcgctggagcccaggaggcggaggttgcagtgagccgagattgcactactgcactccagcctgagttacagagtgagaccctgcctcaaaaagaaaaaaaaaaaaaagggccaggcgcggtgtttcacgcctgtaatcccagcactttgggaggccgaggtgggcggatcatgaggtcaggagatcaagaccatcctggctaacacggtgaaaccccgtctctactaaaaatacaaaaaatgagccaggcgtggtggcgggcacctgtagtcccagctacttgggaggctgaggcaggagaatggcgtgaacccaggaggcggagcttgcagtgagctgagatcgcgccactgcactctagcctgggcgacagagcaagactccatctcaaaaaaaaaaaaaaaagacaaatgtcagcttatatgaaaataacattttcccttcagttgctccctagatgtggagagccctctccctcatggaggctccttctatagcccttggactggattaacatgtcctcctcctcctctccctgtacccctccctaggaggagctggctctgtgtggctccaggctgctggtcttgggctccttcctgcttctcttctgtggccttctctgctgtgtcactgctatgtgcttccacccgcgccgggagtcccactggtctagaacccggctctgagggcactggcctagttcccgacttgtttctcaggtgaggttctttgctccagtcctgcgggagcagggaatggggtgggggtgggggttgtaaccggggtagagcagatccttggacttttcctcaaagactgctgcttctgagtccccgagaacctcttcaaccacagctctcccttagggactgggaacaatttgacaccgtcagcattcaatatttttctaattactttaacttttttattataaaatagttaacacttatgtagaaaagtccaatagtataaaaggacagcttggcaaattattataaagtggatacttataaataccactgagtagaatattaccagctgtccagaaaccccccatggtcccttccttcctgacaatgccctctctctccctagaaattactgtcctgctttataatgtattgccatgtatgtattcctaaataatatagtttggttttacttatttttgaaactatgtagacagaatcatacacattcttttgtggctgacttctttcaagcaacattgtgattttaagactcataactagttcacatccaagcatttgggtaacaatggtgagttaagagggttcacatttgatgatttgtcctgaatatgaaccatgtttgtcttgcttttgtcctgaaattccaatacccagttttatgatggaaattttgtaaaattcaacttgaaccgctcagaagagtctaactgatgatactcatttactggggacatagtatgtgcccaagaacttgacatgcaccttctgtcttccatttagtcatcgttacctttagaaaaagctgattccgttaacaagatctttggagggaatcagcttcacaaacgtagcagtgggtgggggtcatgttggttaaccagttcacacatcagctcactaaaggaaaaaatatttctgcaaaaaatcttcacttgtcagaggggggtgcatgaaatttgagagccatgtgttatgcatccagctcttgaactggtctcagcttcagctggctgcagtgccctaggaagttactatgggaaaagtggaaatagttgaggcccagggaactgatcaggccagaggaagtggaagctcaagatcaactgtgcttattttgctgatggctgggcctaaatgccccaaccacctacttgggacaggaaatgacaggaccctctcaaccttggactgggaaaggagggcttcctggcccctgacagaccctggggtcctgaggctaccttagttgggattaaatgcccgtattggtctctagctgtcactccctctgctccttcctcaatttctgcacacatctcagagcttcctctagcagctcttcgacctgttttgttgttttattttctttctccccaggtgtgaatcaacttcttgggccttggctctgagttggaaaaggttttagaaaaagtgaagagctggaatgtgggggaaaataaaaagcttttttgcccagtggcgtgtatggtgtttattgggggttggattgaggtggggattttagggtaggcaggcttagaagttttgggggactctttcctgttgactctctagtttggacacaggttggcatagggcataggttacttgagctctccccatggttgacttggctttggtaaacacctgtcttgttttcttctacgaaataaaatggataattacagttagttgggcgggtggggtgtcaggtcatggaaatgctgtgacataaatgcactgtgaccttggcaagtcttgcaacctgcagcgcctcaatttccgtaagagatttgaccgattgagttttcccagcgtcgacgcgcaaagattcctcgcacttggaggcccttttccaggttagatggttgctaacctcggagcagtctattttcccgccttttccgcgcccagcagcagcttcctttgcccctcccaacttccaccctgcgcgcagtcgcagatcgccgctgctgtccgtccacccgcgccccctcaaagcttcccctagcaacaagctcgggctcagagcgaaggcggggcgagcgcatgcgctgcagctctgtccaccgccagtcgtgggacagagtgccgggctcctccccttgcaagtctagctcttctccccgcctcctccggcctggggtccgcgtggcggggcgggcgcgcactcgggcttggcggctgccggtctcccaggccgcggcagtgaggagagagggcggggctgagtcctctgcgcccccgccccctttagcccggcgtccctaccgcgcctgcgcgctcccgcccggtctccatcttggaattgggaggaagagggagagggagaccgggacgagaccggggctgtggtgcggagagaggctgagacggagaagaggagaggcagagagggcgcggggaccgtcagcagcaccttagctacaatcgttcagctattctcggaagagagaagggagagggaggaggccggggcgggagtgggggctgtcaccctcggaccccggcgtgagaggggccgtgcggccggacgtcctcggggtgggcccccagtcggtggccgaagacctacagctcaggcccctgggtcccaaatttccaggctttgcccctcctcctttctcagatacccgggtaacagtcctcatagtccagatatccgggactcgggtcccaacctctctaaacctgggtctctgtttcatagaatttcaaatatcaggttcaggcccctgcgtgcaccagtatccggggttcattccccgggcgttcaaatatcggattcagtctccatcccgttcagatattcggggttcagaccccacaatcagaaatccggaattcggcagctgtcgccctcgacgagggggaggactggaccgcgaggtcagattaggttgtcaccccctcccctccaggggaggcttcccgggcccgcccctcaggaagggcgaaagccgaggaagaggtggcaaggggaaaggtctccttgcccctctccctgcttggcagagccgctggaggaccccaggcggaagcggaggcgctggggcaccatagtgacccctaccaggtgagacacggggtgcaggggcgcgggtccctgtgtctagttctgagaagaaagggtgcgcctttctgagaagctggacttgggtaggccctctcaggatggggaagcccagctgagcgagtggtcagcctctggctagccttgccttctgttgccacccccttccccttcctcttcccttcattgtgtctggttggtgggggacctcaggtgacagggtctctgatgtcaccggcgttcacaccctagggtgcttcagctaatcagatggatttgcacttcagtcttctctccttcactttgcccctcacagccacctctcctccctgatatgtcccgttctcctggctattctgtggttttga

SEQ ID NO: 735 - DNA, 6000 bp, Homo sapiens
tctagatgccagttattttcgttatttttaaaaattgacttcacattttttaaaacaaccaaatatgagtttcaaaaggaacatttacattaacatgttaaatggaaaaccggtgtcatttgctccggagaacagaagaatgtaaaataaaatatatttaatggaaacaaaaacaatgctattaaagctaattagatagtttcagagccaagtaatctaggcagtgctagaaaggtactcaaaccctattagtactaaactgagaaataaactccattcaacataaacggaaaaactgaaaggaaaatgaaaaaaaagaaccttaaatgaccagtccactcttacctaacatgtaacctgtcacactctggaaaagttttcctagttttggctgtgtgtgcgtgtgtgtgtgtgtgtgtgttgggaagtgaggcgtgtgttgggaagcgatgtgtgtgttgggaagcgatgtgtgtgtgttgggaagtggggtgtgtgtatattgggaagcatgtttgtgtgtgttgggaagcggtgtgtgtgttgggaagtggtgtgtgtggggtgtggtgtgtgtgtgttgggaagtggtgtgtgtgtggggtgtgtgtatgtgcacgtgtgtgttgggaagcagtgtgtgtggggtgtgtgtgtgttgggaaagcagggagtgtagtgtgtgtttgtgttggaaagtggtgtgtgtgtggggtgtgtgtgtgtgtgcacgtgtgtgttgggaagcggtgtgtgtggggtgtatgtgttgggaaagcagggtgtgtgtgtgttgggaagtggtgtgtgtgtgagtgttgggaagcagggtgtgtgtgttggaagtagggggtgtatgtgtatcgggaagcatgtttgtggtggggggaagcagggcgtgtgtgtgtgtgtatgtgagtgttgggaagcaaggtatgtgtgttgggggaagcgagggctgtgtgtgtattgggaagcatgtttgtgtgtggggggaagcgagggctgtgtgtgtgtattgggaaacatgtttgcgtgtgggggggaagcagggcgtgtgtgtgtgttgcgaagcggtgtgtgtgtggtgtgtgtgtgtgcgcgtgtgtgctgggaagcggtgtgtgtggtgtgtggtgtgtgtgtgtgtgtatgtgtatgtgttgggaagcgggttgttccgaggactccccgattccctcctggttgaaacgtggcccagaaagagaggcacactggctagggcacacagccagggccgtccagccccgcaggaagccccggtcctgccctgtcccaggtaagcctggccagccctggagccggcgctgcggggctgcggggctgcggggctgcggggccacgggacaggagcgggtgctgcggtcccggcagagcaggggcggggtccgggcgggggcggagccgagcgcccgcgcacccggagccgcagcccgagccggagccggagccgggagtcgtggcccggagtgggccttggagtcggcgcgcaggcggctcgcggtgagtgctgtgcccagcgcctgggggtgggctggggggagactgtgggcgccgagggtcccacccccgggacttgaacacttggcttctgagccgtcctggccgcagggcttgggcaagggttgcctcggtttctcctgggggagtcccagaatgtagatgggaagtgagacggaaagggggcatctcgaggttggggaggcccctgggccactcttttgatttccttcctctctgtgggactcagtttccccagcttcaccatgccagtgagtgggtgggtataagtgagagagtctgcctggaggatcctgctgctgctctctgtacctcttatgggaatctcctgcctcctccttctcccttgttgggtgtgagatctaagttcaaatccatcccttcccagacagcccacaccaggacctgcgaggccacatcccccagctgtttgctctcctatgcttctcaggttgatggagcagccatctggtcctgctttcattccaacaaactgaaaagccctccaccccaatccccctggggaggacctcctgaagctgcatgagggctgggggctggacccctgcttctgagtttgctctttctgagcctctcctgccatggccttggtttccccatgggctgtgacctagcctcctccagggtccttgttctacagaggggaaacacctgccctgtcaccctcccctgaccccttagtgaaaaagaccagagtgacatccccaccacctgtacttgcctgtcccgatcactcagccatggggctgctggggcccctgagtttgttggctgctcaaggcccctttgcctcgctgcaccctgggatctgaggctggaagcatcctcatccagcccacctccctcctacccagtgcagagcccctctgtgacacatgcccagtggtggggagcttattactgatgaggtggctttttagtgccttgcagctcttgtttcctttagctaaaatctgtggcttacagattctacaccttggttccatgtctgtctcccggagccatgcagagcaagtcagttctttcattctttccagcagtcatcattcatgcactggatgagacacgagacagagcagtaggaaaatcagacaaaaccccctgccctcatggagtgcacactctagaaaggaatggacagcaatgaaataagtaaatacatggcgtagcaggtggcgggaagtactacgagtaaaacaaagctgggaagcaggatggggtgctggggctgggtattgcattgtatatagcacaaccagggaaggcttccccaagaccacgatagctgggcaaagtcataaggaattgaggggtgagccacatgagtatctggggggctgggaggctttggttttcactctgagcatgatgggagcacgggtttggaacagaggagtcacctgctttgacttggggtctggcaggcccatctagctgtggggtggagaatggatcatggggggggtggggtaagggcagaaggagagcccgttgagcggatcattgctgtcattctcgggagagaccatggtgtcttgcccatggcccagaggtggttaaaaaaaagaaaaccagacattcagatttgggatatatttcaaaggccgtgtcgatagggtttggggtgcaagagaaaggtagagtcaaagatgattctgagtgtttggctcgagcttctggaggtttgaagctgccatgaactgaaatgggagttgcttagcggagagatcaagagtttggttttgtgcttgtggagtttgagctgcccattaggcatcaatgatgagtaagcagttgggaaaagttaagggcggaggttggagttgaaaataaaactttgggcatcatcaccatataactggtatttaaagccacaagagcaggtgggctcatctagggatggagtgatatggagaagagaaggggtctaaccattgagtgctggggcccccagtgttaggaaccagccaagaagacagaaagagtgaaaatcagagagttggggtgtcctggaggaaatgaagaaaatgccccaaagaggaaggagggaacaaatatgaccaatgcccctggcagagcaagcaggctgagggctgaggattgagcaatgggaggtcactggtgacagtttcactggagctggatggggaactagagggaatgggaggggatgggaggacttggggacagcagtacaggcaacagacaagggggcctgctgtaaagggagcagataaatgggattggagccaaatgaagaaggggagtgtcaagagagtgctttacttttacaatggagaattagagtgcattgtgcactggtggggggatttgatctcttagggagagaacagtgttagggagggagaatgcaggatagctgggggagggtggggggcttggccccagcagagactcaggacacttgggaagttgagcttccctgggcttcccctcctctcctgtctgcaaggggtcagtgggctgagatttcagcacttaagcaaagcatttgctcttggccccagagaaaccgggctggctgtggtctcaggaaggaaggaggtgtccaggctcaggcctgggcctgggtttcagggagggcccacgtgggtcgccccttgaccctctctttcagcaaggaagtgatcctttctctacatgggcctcaccttggggaggacaatggtgtctttgaagttgtagtaactgaagtagagatcaaaaggcaatgcagatagactgacagatttcgcctgaagaggggaagcccgaccaggtaataaaggagtaagaggaaggatgttaaggacaattttaggaaacagataatgagtgaatattttttctctctctttcccaatttaaactgaagcaggagaaactgaagctagacataatgattaacttcccaagctggtgagcttcctgagctggttagtgagaacagcactaaggccaggttctcctccccagatgtttaagatgagacaggacaatgcctgctcagagacagggcctggctgaattggccctcaggattctctctgctctgaggtttctggaagaaggccagggcagaggtgtggtgatgtagctgctgggaggacagagctccgagtcacgtggcttgggcgggcctccccttcctggtgtccacagaagcccaacgtcactagctggggtgtgtatggctcacacgtaggccaggctgccctaggcttggtgtgcaagggaggggcccctacttacttgtggcctgtcccctcgtgaatgtgtctcatgtccccagtggggtttttcagtgagggtcatggtctccaggatgcacaaggctttgtgccagaattgcttggaattgcctagttctggaaggctggttggccaactctggcctccggcttttcctttgggaatttcccttgaaggtggggttggtagacagatccaggctcaccagtcctgtgccactgggcttttggcgttctgcacaaggcctacccgcagatgccatgcctgctcccccagcctaatgggctttgatgggggaagagggtggttcagcctctcacgatgaggaggaaagagcaagtgtcctcctcggacattctccgggtaagaggagcaggcattgtcccgtcccagcttgatcctcagccttctttcatccttggccgcgacatgctcccaggcctggggtcagatggggagtgctgactctgtttctgggctgttttctggggagaatgggtcggcgggtttttttccccaggacctgggcagggtcaatggtgggggccgctgtcgcatccttggctggtgtttccacagctgagaaccactccagggccaagcccagagcttattctacccttttttgtcctctcttcccctgtcctcggccaccccaccctcttggctcctctgcttagatgtgggcacaaggaggagaactccttggcctgagagaactaccttagatcctggcttccagtggcctctgcaggggggtacaccctctctcccaagcagccagacacacaagtaacctcattgcctcagtttccccatctgaccagcacagggccccctgtgccccagcagcgttctgagagattggagctttctccttttgcttaccttggctaccgtatgaggacggatacagagtgttccccccacccccagcccaggggatatttgattcatgaacattccctcagtgtctttgtgggggacaatgctgtgccaggctcagggatgccaggacgagtaagacccaggctcccacgtggcccaggcagggagagagacacataaacaaccatcaggaaagaggtaaaatccccaggccacttggcatctgctcccttgagtgtctgggaatgtccctgatttataaaaagaagctgacggccctctttgttgtccatgcct

SEQ ID NO: 736 - DNA, 6000 bp, Homo sapiens
ggttgcagtgagccaagattgtgccattgcactccagcctgggcaacagagcaagactctgccaaaaaaaaaaaaaaaaaaaaaaaaaaaaaaacctctaaggtcttagtctaagtgtctagacagagcgttctcttgagggcagggaacaagtgtcttcttgtctgtctcccgtgtagggacaggcacatagtaggtttcttaggtctcatttgcaggttgtaattgtgccttcctaccattctgctaaagctggcagggaaactgaggcccagagaggggcaatggctgacttggattgcacagcaggctggttaggcccacttggtactggtcacccagaggccaggcagtgacatgtatgtgcacaagagcttcagttagttaattttatgtttttaatttaatttttttttattttgagatggagtctcactctgtctccctggctggagtgcagtggcaagatcttggtccactacaacgtccgcctcctgagttcaagcaattctgcctacctcagtctaccaagtagctgggattacaggtgcacgccaccatgcccagctaatctttgtatttttagtagagacgggttttctccatgttggccaggctggtcttgaactcctgacctcaggtgatccacttgcttcagcctcccaaagtgtgggattacaggtgtgagtcactgcacccagcccagttagttaattttaattaggattttcctttctgataactgtcagtattcttggaactcttttatgcacccgagttaaagaattttttgaactgaagcccaaacttcagtgttattttttgcttttgtcccctttcaccagaagagagaccaaatgcctcaagatttgatgcttactgggcacctaaaaaacagtctgttctcagacatccgcttttactgcctgccagtaacattttagaagggccatgcacatgtgtgtgcctcagtcagagttggagaggtacccaacaagctcagtgacgtgacaatgatgctacctcttattatgaaactgggtcctgactcacagcttctaagcatgttgtcttagatactggacactttttccttacgggtttttttgttttaaaagacaaattcacaacagcaacataaaattctgatgatgaaaagtatcacactttggctttagatatttaaaagaatattatctcctattttatttgaaaaatgctgactgaaagtagtggctatgcctgttttttgagggttgatgtttaatgaatgtagttcataagctcctcttgccataagattagttttgggagatacggaacgcaaagcattttacattcttctaatttactgacacagtcccactggagtactgtccaaagatcataaagcgcagctcttacactaattctaacaatgaaaaagcaggttcccatcactccctggagtgtcctcctatcaggcatggctaaggagaagcagggttttataggactgcttgaagcaaaggcaggtaaactagccacagagaagtggaagcccagagttctagaacattactttacagagctctgtgtgccagagcctgccgagtgccttgcttatttttatcttctcatttgcttcttacagcagcctcgcaaaatatgaggtttttatccctactttactgatgagaaaacaaattcaaagagtctagtaacttatccatggtcatgtgcccataagatccagtggtaaatagaaccctaggtcatctgcactcaaaacctgtgccctataaaagcctccgtaaatgttgctgaaaaggtctagacatttggcttgttttctctagctaataagtaagcttttgcccttcgtttcctttatgagggtttttctgtaagtacagtgcaaagttgtggtagtctagtaggtggggtctttttcatccctttctattgtcccaaggaagaacctattccaacatcattctagaaacaggtcattttttttttcttataacttaatgcccagcaatccatactcccatcttgcctggctggttcttaaatgggagattgatcccatattgcacaccttgaagtttgcaagggttcttcctcgacatcatgtgccagttaaaagtttcagttcttgattgtgtgctgtttagggatttaaaaaccaaaattggccaggcacggtggctcatgtctgtaatcccagcactttgggaggccgaggtgggcagatcacttgaggtcaggagtttgagaatagcctggccaacaactctgttgctactaaaaatacagaaattagccaggtgtggtggcgtccacctgtaattccagctacttgggaggctgaggcatgagaattgcttgaacgctgaaggcggaggttgcactgagttgagattgtgccactgcattccagcctgggtgacggagtgagactctgtctcaaaaaacagaacaaacaaacaaaaacaccacagaattagctggatgccgtggctcacacctgtaatctcatcactttgggaggctgaggcgggtggatcacctgaggctgggagttcaagaccagcctgaccaacatggagaaaccccgtctactaaaaaaatacaaaagtagacgggcatggtggtgcacgcctgtaatcccagctactcaggaaactgaggcgtgagaatcgcttgaacccgggaggcagaggttgtggtgagccaagattacactccagcctggacaacaagagtgaaactctgtcctccccaccacccccgcaaaaaaaaaaaaaaaacaaaaccagaattattgtctttttaattatttttttttctttttttttttccatttttacttgccctctgtcattaaggaaaacagagttaaatgactaaagaatcctacttgtctgataacacttagcatccttttaggggcgcttgcagttggatcatatggaaggagctagataaaaggcatgatgaggggaaaatgcaaagggttttcatagaataaggagggatcactttggaatggtgggagatacaggtagagccagattatggaggccgtggatccagaaggccaattgacatcagtctagcaaataaaacctttagtaactcctttaggaaaagagtgacaaatcaaagtgctatagtatttaatgcttgagtgttaaatatttaacatcctgagtatgttttgtaggcaaagaggagagttacttgaagtgaactttggtttttttgagacagggtctggaatgtagtggcacaatcttggctcactgcagcctcaacctcctgggctcaagcagtcctaccacctcaggccctctcctccaccccagtagctgggactacataagattactacataagactaccatagattctgtcaccacgcccagctaatttttgtatttttagtagagatggggtttcaccacgtcgcccaggctggtcttgaactcctggactcaagggatccacctgcctcgccttcccaaggtgctgggataataggcatgagccaccacgcccagctataattttttattttttatttatttatttattttgagacggagtctcgctctgtcaccaggctggagtgcagcggcacgatcttggctcactgcaacctccatctcccaggttcaagcgattctccttcctcagcctcgtgagtagctgggattacaggcatgcaccaccacacccagctaatttttgtatttttagtagagatggggtttcaccatgttggccaggctggtctcaaactcctgggctcaggcaattcgcctggctcggcttcctaaagtgctgaaattacaggtgtgagccactgtgcccagccgaagtcaacattttaaaagaaacaagagtgtagtgacttcgcttgaattcagtctgtatctgtggtggcatgattgccactgagttggccacctctgcagaagtctgaagtgttcaacataaaactaatccattttgactcctctaccacaaattgtttgtttcatttatttgagctattttaaattggaaactggtgtcattaatgtttaagaaagaaaggagaaactgagtagagtactatctcttgacctaatttctttgtgagcatattatatactcacctaagtatcaagtggaagaggaagttgatccctggagggaaatttccataggttaaaagcatgggatttacagtcagatgaatttgggttcaaatcccagctctcactttatccatgtagcactcactagctgtgtgacttgggcaacgtaaattgcctcagtttccagactgtaaaatggtaataatatctagtttaaggctgttctgagattcagttgagataatgtttagaagatgctttgaacaatgtagctaatattaaatggtacagacatagtaagtattcttgatcactgcagattcagtggaattaaattttcatattttgatgaaagggaaaataaccagtattcagtttgcaaatttaaatgtgttgtttctttttaaaaacattgaatctgtggttgggttatttctgtcaatttatttgccttccttgccaagtcacactttgcctaattgatgtcctgtgtgttttccattccgttcatgctgaattatcttaggtcaaagaggaaatcatctttctgcctccaaccttcttacttgcctctaatcccctttcttgactcttccaagtcaggattctcaccaaggaagctatctgccttctttgggaatgttgggcttatgaagacttgagataatggggttcatgtattcagactctttagcatatacagtagagtttctaatgttgtcagcattccctagtgggcggttacaagttaggttgggattctaatcatattttatgatatctcacagattaaattgcactttgtctctgcccagtcttgattcccttttggccagcagtttttaggtctgtcagtactgcactgcaagaatggcagattttgggatctctgctggccagtttgtggcagtggtctgggataagtcatccccagtggaggctctgaaaggtctggtggataagcttcaagcgttaaccggcaatgagggccgcgtgtctgtggaaaacatcaagcagctgttgcaatgtaagtacccacccacgttgtctttatgaggctggaggggtttccatgggagtgttgcatttctgtggttccttgatatctgagttttcatttagggtggcatgtgatagtggtggctggtcaccctgttgtttttcagttgagatatatcggaggaaccacccccaataattcaacgtaggttcttttctattttccctaagtgtcggctggtctgagaaataaagggaaagagtacaaaagagagaaattttaaagctgggtgtccgggggagacatcacatgtcggcgggttccgtgatgcccctcaagccgcaaaaccagcaagtttttattagtgattttcaaaggggagggagtgtacgaatagggtgtgggtcacagagatcacatgcttcacaaggcaataaaataaggcaaacgggggcagagcgagatcacaggactggggcgaaattaaaattgctaataaagtttcgggcacgcattgtcatagataacatcttatcaggagacagggtttgaaagcagacagctggtctgactaaaatttactgggtgggaatttcctcgtcctaacaggcctgggagtgctacgggagaccagggcttatttcatcccttatctgcaaccatataagacagacatcccagagtggccattttagagacctccccctaggaacgcattctctttctcagggctgttccttgctgagaaaaagaattcagtgatatttctcctattcacttttgtaagaagagaaatatggctctgttccgcctggctctcaggcagtcagacctgatggttatctcccttgttccctgaacatcgctgtt

SEQ ID NO: 737 - DNA, 6000 bp, Homo sapiens
agtatcaacgttttaatgccaacagagtaaaaactagatcatccttcccctccccataggcacggagaggaatccagcaaatgaggccatgtggtatgaaggcattgctgcaccctggagttccctgttttcagcccttagcacactgtgctcagagggtttcttcatctaaacttacaccagactacctccctgagggcaggagtaatgctatattactcacagggcctggcatgatagtagggcctcaaaaaatatttcttgaattgaaatgaaaagtactttagttaggaaatcagaaaaatgaaaaggaacacgctaatttcagatatagagaaacttttcaatggcaggattaggaaaaaaaaacactaatggaaatgtaaattagtattacctttctggagggcaactggcccacataagtaaaaaatctttaaatgtacatatcctttgactcagtgctcccacttctaaggagagattcacacactttatcatattatttcttatactagtgaaggaaatctaaatatccatcaataaaagacaggttaaataaattttggcacagctatttgctggaatgttatacaactattaagctatgaaaagacattacaaatgtactgttgagtgaaaaaacaggttctagaacagcatgtagagtttatacacattatatctattctatacaaaaatttacatatgaaataagcttagagaaacatctaaaaggatattcacaaaaatgttagcagggttatctctgtaattttggataaaactgctttatttttgtgaacttctctatactgtttaggtgttttagaacaaacaggcaccaattttataaaaacaataggttctttcctaagacagccttgtggctgggtgcagtggctcacacctgtaatcccaacactttgggagatctaggcggaggacagcttgaaatctaggagtttgagaccagtctggtcaacgtagcgagaagccatcactacaaaaaataaaaaattctaaaaaacaaagatggccttggaaatgaaggaaggtacaaaaggggatggagaggagagaggaagtgaaggaggaacagacataatgaagcatatgaagtggccagaaataggtggattggtgcctacctggggggtgaatgagaagactctggatcaggtttttctgccccctgtgtctcagaatgctgctgagaaaatgagttgggaggctgctgcttctgctcatctgaagaccttagccccacagctgaagcatggaaggcacgcggcaccagggcttgtcggcaacgggccactgaaacagaaactggtcagtcagggacattcaacagagaagaccctttcagacccagagtggtaacacagataaggaggaggaaaagcaggccagagactcctgtagaaccacttatccaagtgttgggtcccacacaaaaatattgggtaaactgggaactttgggacacgaagtggtagcaaaagtggtaagccaggaaaaatgatctacctagcatcttgacctgtttctaccacttgttacctgggtaactggcaaacaatttcaccccaatgtgcagatttttaaatctgcaaatttagagtaataatctctacttgctcaatgagagcactgtgtggcccaaacaaaaagtaaaagtggcttgcaaatgttacagatttatatatattatggcaagagctctggaatagtaatttaatgtctcagccctactcccccagtgtttatatggtatctttggacaagtcactaatctctatctgctttctcatctgcaatatctgcaacatctccatttactttaagaaagatgagaagtatgtttcctaagcataaactcatagtattttttatttcccaacattttttattctaaaaattttcttttttttttttttttttgtcagagtctcactctgtcggccaagctggagtgcagtgagattatctcggctcactgcaacctctgcctcccaggctcaagtgattctcgtgcctcagcctcccgagtagctgggatcacaggcacccgccaccactctcaggctcacttttgtatttttagtagagacggagtttcgccatgttggccaggctggtctcaaactcctgacctcaagtgatcgcccgtcttggcctcccaaagtgctaggattacaggcgtgagccatcatgcccagcctattataaaaattttcaaacacgcaaattgaaagaattatggaatgaacacctgtatatctgccactaggttcaacacatctgtcatgttcttcattcatccatcttgattttcagtgcatttgttgcagatatcagtattattcacctctaaacattttagcatcaaagacttctacgttcactgttttgttattcagatgccatttacacacaatgaaatgcataaatcttaagtgtaccattctatgagttttgacaaatgtatacacttgcacaacctaaacccaatctaaacagagaacattactgtcaccccagaaagttcccttatgccttttcagtcattccccattcatactgttctgaatttttcactctaggttagtttttgcttgtcttagttttgcctgtcctaagatttcatctatatgtacatgtttcagtaaagcttctttcacttaggactatatatgtgtgtgtatatatatatatttatttattttaagtttaaatagagacagagtcttgctatgttgcccaagatggtcttgaactcctcggctcaagcaaccctcccacctcagcttcccaaagtgctgggattacaggtgtgagccaccacacctggaccacttagtatatttttgagattgatccatatttttatgcctatcagtatatctggcaaagattctctccttgatcaggctctaaccaggctcctctgagccctcttcttatctaggcctcaaccttggcctataaagacttgaacacacactaacataagcatcactcagggccacatcccttaagataaccctacccccctttaaagtgcctgcctgagaaaactcaaggctgtcaaaaaaaattttactgtttgttcaggctaacacttaagaaggatagggcttgtctccctgtgggaaaacagaatcctaactttgttaactgccagctagcagaccaatcttatttataattattcactatcctgactctactgagtccccacctgccttcctccctcctccctcattttttctttgaaacacccagtgacttctgcatgctctaaactcaaggttgggctccgttcatgctagactcttttccctattgcaatagttattactgattaaaaatggtccttatcactttagtgtccagctttctctttgactgatttttagtttttattgcagaatagtattccataaaaaaaatactattctgttgctagacaactggactgtttctgtgtttggctactatgaataaaattgctatgaatatacttgtactaacttttttgtagacacataccttcatttctcttggtggatttgcggggtcatagacattacttttactacacatctttagtttggaattttgtataaatacaacaaaagggggctaggcggtggctcatacctgtaatcccaacactttgggaggctgaggcaggcagataacttgaggtcaggagttttggactagcctggccaacatggtgaaaccccgtctactaaaaataaaaaattagctgggcatggtggcacaaccccagctactaggaaggctgaggcaggagaatcacttgaacccaggaggtagaggctgcagtgagccgagattgtaccactgcactccagcctgggtgacagagtgagactctgtctcaacaacaaaattaagccaagtagggtggcacgcacttgtagtcccagctccttgggaggctgaggagccagaccctgtctcagaaaaaaaaaaaaaagaaaaaaaagaaacagaatagtatgtgccaaaatatcaatattttaatacatgtactgaaagatacggcacaaatatccgcaaaactttgaaaaggaaggagcagatgcaaagtatgactgtagtaccactgagggtcatgagaagattttaggtgaaatacaggtgaacgtttcatcagttatgtatgtatgctaaagtgttaatgcatacgttctaattaaggaaggcgatattagttttccatttatgacaatgatataaagtttcctctttaagaactcctatttaaaaataaaaatactgagtacatagtggcaaaggtggtaagagagtatcacagaattcgtgaagtggtgaggaaacggctggctttcgggaaacaatggactaggctctctgtggccgtgtccacctgtccttccagtggacttggcaatggacttgagaatgggtctgcgactgccagttctgtaaccaacaggctcaggctgcgtgactttcgtaccccgagccctctctgaggctctgccaactccatgaaatgggggtgacaggccctgccccgctgcatctgcccctcacagacagcggagcagggccgaagctagccaggcggctcgcccgagcccgcgccgatgcccttcacctcaccttgctcgtgggccgccccaacggcctcttccccccaccgtcgaacccagctgaagccggcctcgcgccccctccgcgctccccgcctctccccggcttggcagccccctcaccgggcaggcatcgcagctgcaggagcctccagcccgcccggccaagcgcaccagataccgccgccgccgccattttggaagcgggcacgtcgcccacggcgacgcgaccggtagctacgggaccacggccctaaggagggcggaagtcgtcgctccgtggagcctcctcctctcgcgagaggcgcaaggcgtggagtcgacggctggagagaagccgggagcgagcccaggcggcaggtgagagtggtgggggccagctgagcgccagagctccctcaactgtcccctcccggcccaccctcgttcccacatcctctcattttctcttcccaccccgttcctcgatgggaacgcagccacggccgccccgctgaaagccccggctggtttattcctgagaagtcggtgtgaggggccagggccggccctaacctccctggggtcctgactgggaatttctgccgttccccggctgcctcgtcccttgcgcagccggccctactctgaggccccggggacaccacgctgaggagaaacggctccgagcttgggatcggggagacctggttctgagacccggtcctaccagtagccaatcgttgtgaccttgggcctcagtccccgtgacgttttggtccctgggggttcctggcagcaaagcacgaaagccttggagtcggggggtacctgagctcacgattgtaatttcgaacctgcaacttgtccgaacccccagcgtgttgagttgatataattaagtatccagatcggaaggatgcttgttactagaacagacagctaggcctttgtccagaaggattgattgagtgggtctgggtgtggtccaggaatctcattttaaccactccctcgggtgatttgtaggatctgcaagttcgggaaaggctggtgcccttcattctgacattactgagtgccaagctctggatggctcaaggaggtcacggtctagccactaacagagcacttcacgggggtgtcatcagagaaggcttagtaggaagaagtaaacggtttttgggctaagagtaactgacgacaagagcatgtgattctgtcgattttgtgtttgcagtcagaccccatcattgtgtctgttaaagttgtgctttgcacaccccttgtcaaatctagtcttttcagaatatccggctcccccctgcacgggtgcggggaagacctcctaagccaaaactta

SEQ ID NO: 738 - DNA, 6000 bp, Homo sapiens
ggcgtggtgacagaatctatggtagtcttatgtagtaatcttatgtagtcccagctactggggtggaggagagggcctgaggtggtaggactgcttgagcccaggaggttgaggctgcagtgagccaagattgtgccactacattccagaccctgtctcaaaaaaaccaaagttcacttcaagtaactctcctctttgcctacaaaacatactcaggatgttaaatatttaacactcaagcattaaatactatagcactttgatttgtcactcttttcctaaaggagttactaaaggttttatttgctagactgatgtcaattggccttctggatccacggcctccataatctggctctacctgtatctcccaccattccaaagtgatccctccttattctatgaaaaccctttgcattttcccctcatcatgccttttatctagctccttccatatgatccaactgcaagcgcccctaaaaggatgctaagtgttatcagacaagtaggattctttagtcatttaactctgttttccttaatgacagagggcaagtaaaaatggaaaaaaaaaaagaaaaaaaaataattaaaaagacaataattctggttttgttttttttttttttttgcgggggtggtggggaggacagagtttcactcttgttgtccaggctggagtgtaatcttggctcaccacaacctctgcctcccgggttcaagcgattctcacgcctcagtttcctgagtagctgggattacaggcgtgcaccaccatgcccgtctacttttgtatttttttagtagacggggtttctccatgttggtcaggctggtcttgaactcccagcctcaggtgatccacccgcctcagcctcccaaagtgatgagattacaggtgtgagccacggcatccagctaattctgtggtgtttttgtttgtttgttctgttttttgagacagagtctcactccgtcacccaggctggaatgcagtggcacaatctcaactcagtgcaacctccgccttcagcgttcaagcaattctcatgcctcagcctcccaagtagctggaattacaggtggacgccaccacacctggctaatttctgtatttttagtagcaacagagttgttggccaggctattctcaaactcctgacctcaagtgatctgcccacctcggcctcccaaagtgctgggattacagacatgagccaccgtgcctggccaattttggtttttaaatccctaaacagcacacaatcaagaactgaaacttttaactggcacatgatgtcgaggaagaacccttgcaaacttcaaggtgtgcaatatgggatcaatctcccatttaagaaccagccaggcaagatgggagtatggattgctgggcattaagttataagaaaaaaaaaatgacctgtttctagaatgatgttggaataggttcttccttgggacaatagaaagggatgaaaaagaccccacctactagactaccacaactttgcactgtacttacagaaaaaccctcataaaggaaacgaagggcaaaagcttacttattagctagagaaaacaagccaaatgtctagaccttttcagcaacatttacggaggcttttatagggcacaggttttgagtgcagatgacctagggttctatttaccactggatcttatgggcacatgaccatggataagttactagactctttgaatttgttttctcatcagtaaagtagggataaaaacctcatattttgcgaggctgctgtaagaagcaaatgagaagataaaaataagcaaggcactcggcaggctctggcacacagagctctgtaaagtaatgttctagaactctgggcttccacttctctgtggctagtttacctgcctttgcttcaagcagtcctataaaaccctgcttctccttagccatgcctgataggaggacactccagggagtgatgggaacctgctttttcattgttagaattagtgtaagagctgcgctttatgatctttggacagtactccagtgggactgtgtcagtaaattagaagaatgtaaaatgctttgcgttccgtatctcccaaaactaatcttatggcaagaggagcttatgaactacattcattaaacatcaaccctcaaaaaacaggcatagccactactttcagtcagcatttttcaaataaaataggagataatattcttttaaatatctaaagccaaagtgtgatacttttcatcatcagaattttatgttgctgttgtgaatttgtcttttaaaacaaaaaaacccgtaaggaaaaagtgtccagtatctaagacaacatgcttagaagctgtgagtcaggacccagtttcataataagaggtagcatcattgtcacgtcactgagcttgttgggtacctctccaactctgactgaggcacacacatgtgcatggcccttctaaaatgttactggcaggcagtaaaagcggatgtctgagaacagactgttttttaggtgcccagtaagcatcaaatcttgaggcatttggtctctcttctggtgaaaggggacaaaagcaaaaaataacactgaagtttgggcttcagttcaaaaaattctttaactcgggtgcataaaagagttccaagaatactgacagttatcagaaaggaaaatcctaattaaaattaactaactgggctgggtgcagtgactcacacctgtaatcccacactttgggaggctgaagcaagtggatcacctgaggtcaggagttcaagaccagcctggccaacatggagaaaacccgtctctactaaaaatacaaagattagctgggcatggtggcgtgcacctgtaatcccagctacttggtagactgaggtaggcagaattgcttgaactcaggaggcggacgttgtagtggaccaagatcttgccactgcactccagccagggagacagagtgagactccatctcaaaataaaaaaaaattaaattaaaaacataaaattaactaactgaagctcttgtgcacatacatgtcactgcctggcctctgggtgaccagtaccaagtgggcctaaccagcctgctgtgcaatccaagtcagccattgcccctctctgggcctcagtttccctgccagctttagcagaatggtaggaaggcacaattacaacctgcaaatgagacctaagaaacctactatgtgcctgtccctacacgggagacagacaagaagacacttgttccctgccctcaagagaacgctctgtctagacacttagactaagaccttagaggtttttttttttttttttttttttttttttttggcagagtcttgctctgttgcccaggctggagtgcaatggcacaatcttggctcactgcaacctccgactccggggttcaagcgattctcccgcctcagcctcccaaatagctgggattacaggcacccaccaccacacccagctaatttttgtattctttgtagagatgcggtttcgccatgttgcccaggctggtctcgaactcctgagctcaagtgatccacacgccgcagcctcccaaagtgctgggattacaggcatgagcctggcccagaattttttttaaaaagtgagaatcaacaatgaaacaggaacgtctccaggcatttggcgtgtgtcaggaattagggtttcagaaaggatacccaaatgttagtttccacaggaaaggctcattcaaagatggatggatagaactcagaaacaaatccttatggagaggagtgttttacctaaaaccagaaatatggatctaaaattttaacctttggggtaagttttggcttaggaggtcttccccgcacccgtgcaggggggagccggatattctgaaaagactagatttgacaaggggtgtgcaaagcacaactttaacagacacaatgatggggtctgactgcaaacacaaaatcgacagaatcacatgctcttgtcgtcagttactcttagcccaaaaaccgtttacttcttcctactaagccttctctgatgacacccccgtgaagtgctctgttagtggctagaccgtgacctccttgagccatccagagcttggcactcagtaatgtcagaatgaagggcaccagcctttcccgaacttgcagatcctacaaatcacccgagggagtggttaaaatgagattcctggaccacacccagacccactcaatcaatccttctggacaaaggcctagctgtctgttctagtaacaagcatccttccgatctggatacttaattatatcaactcaacacgctgggggttcggacaagttgcaggttcgaaattacaatcgtgagctcaggtaccccccgactccaaggctttcgtgctttgctgccaggaacccccagggaccaaaacgtcacggggactgaggcccaaggtcacaacgattggctactggtaggaccgggtctcagaaccaggtctccccgatcccaagctcggagccgtttctcctcagcgtggtgtccccggggcctcagagtagggccggctgcgcaagggacgaggcagccggggaacggcagaaattcccagtcaggaccccagggaggttagggccggccctggcccctcacaccgacttctcaggaataaaccagccggggctttcagcggggcggccgtggctgcgttcccatcgaggaacggggtgggaagagaaaatgagaggatgtgggaacgagggtgggccgggaggggacagttgagggagctctggcgctcagctggcccccaccactctcacctgccgcctgggctcgctcccggcttctctccagccgtcgactccacgccttgcgcctctcgcgagaggaggaggctccacggagcgacgacttccgccctccttagggccgtggtcccgtagctaccggtcgcgtcgccgtgggcgacgtgcccgcttccaaaatggcggcggcggcggtatctggtgcgcttggccgggcgggctggaggctcctgcagctgcgatgcctgcccggtgagggggctgccaagccggggagaggcggggagcgcggagggggcgcgaggccggcttcagctgggttcgacggtggggggaagaggccgttggggcggcccacgagcaaggtgaggtgaagggcatcggcgcgggctcgggcgagccgcctggctagcttcggccctgctccgctgtctgtgaggggcagatgcagcggggcagggcctgtcacccccatttcatggagttggcagagcctcagagagggctcggggtacgaaagtcacgcagcctgagcctgttggttacagaactggcagtcgcagacccattctcaagtccattgccaagtccactggaaggacaggtggacacggccacagagagcctagtccattgtttcccgaaagccagccgtttcctcaccacttcacgaattctgtgatactctcttaccacctttgccactatgtactcagtatttttatttttaaataggagttcttaaagaggaaactttatatcattgtcataaatggaaaactaatatcgccttccttaattagaacgtatgcattaacactttagcatacatacataactgatgaaacgttcacctgtatttcacctaaaatcttctcatgaccctcagtggtactacagtcatactttgcatctgctccttccttttcaaagttttgcggatatttgtgccgtatctttcagtacatgtattaaaatattgatattttggcacatactattctgtttcttttttttcttttttttttttttctgagacagggtctggctcctcagcctcccaaggagctgggactacaagtgcgtgccaccctacttggcttaattttgttgttgagacagagtctcactctgtcacccaggctggagtgcagtggtacaatctcggctcactgcagcctctacctcctgg

SEQ ID NO: 739 - DNA, 6000 bp, Homo sapiens
agactgacctcgaactcctaggctcaagcgatcggcccgcctgggcctcccaaagtgctgggattacgggcatgagccaccgcgcccggcctgagaaaccccatcttaaccccgccggttagtagaaagtgactacagggttaataaggcgggagcgttaatgtaggcttttctttgtcagggaccatgagccaatcaggaagcgaggcgtgggcggggcaaagctggatccacccctggaggggaggctccttccccgcctccgcctcgccggggagatgtcccgggtgcttcctaagacagccccactggatgaaaaaaaacttgggtctctgggacctgacggttctggggcctgaggggctcaagatttaagttccgacccctgagcagccctggctcccgctgagcaatttgggttcggctggaactccgcagacccaccctggagcgcagcctttagagggggatgggttactggaaagtgtgcgtcctctttgaagttgccaatcctgtttgtttttgttttgttttgttttgagacggaatctagctgtgtcgcccaggctggagtgcagtggcgagatctcggctcactgcaaactccgcctcgcgggttcaagcgattcttctgcctcagcctcccgagtagctgggactccaggcgcgcgccacctcgccgggctaatttttgtatttttagtagagacggggtttcaccatattggccaggctggtctcaaactcctgacctcaggtgatccacctgcctcggccttccaaagtgctgggattacaggcgtgagccaccgcgcccggccgccaatcttgttttaaggttcttaaaggtttgtgtacacaaggcttcacactactcgccagttaatgttcccatatcttccgggctaacagtttctcccggaatttgtgccacgtgtttcctggggcttcagatacgttcggccgggcttgtacctgggacccatgggcaccccgttttgagtgcccactggtagcagcgatcttgaagccggatccccaggggtaccagaaaattctggtctccagggggcgcccccttgatttaccgaagtctggcagctgtagctcttacgagccccccgcctcgtaagaatcgcaaacccccaaagtcgggtcttcctgccgtctaaccttgggcgctggtgtcttacctgctcggcggaccagatgggctttgcccggggcaggggactggcagcagaggacagcggacgggaagcagccaccgggagcccgcggggcgggacgcgcgggcggacggggcggctcgggctagggcaccgccccagcgcctccgcgcacacccggaagcggcggagtagagcggagcctggcgggcgtgggaacccaggccccgccgaggcggccaggttagtgcagcaggtgggtgggtgggctccccggtgcgggcgggagaggaggtggatcttggctccgaagcgtgggcgcggcgcagatgtcaccggcggctgctccagccagctggtggcggcggtctactgagctgttcgaacaccgtgggaggcgggggacggtacggaatttggcccccgcaggctcctcgtccctgccagcactttcgaggtgcagtagggccctgcaggagagagggtgggggagaaggggctggttctgaatactttccttgagcggagacccccttgcccaccccagccgatcgcacgtgcgaaaccccagcttgagggtgggctagtgggagcctgggaagctcccctcaagcgctcgggagctgcgtagctgagtagggggtgtgcccggcgggtcgcaaggagtcacaggctttcagttctgggccacgcccacaggctgtctctgtccacccagccagaggtggggctgcccccgggactgttaggtgttcagggggcaccgtgcgtggctcgtccctggaaacaggcgcagaagttgttaggtcggtacctaagcgccccacagtctccggccaccaaactttctcaggacccagcctggaagcctcagccccgcccaaaaagggacgactcctggtgggtggggcgcggggcttcccaaggaggggcttccgtgaaagaacacgtaagaagagctgccagtcggcggatgcgaaactagggccctggcctctttaccctgttaactcgacctccagcctggttcaccttccccatcttctagtactagtgagtgtgagaaagcatccccagtctccaggttcccagtactccccacctccccctcgacccccacagacctgatgggcagacaatggtcctgttcggtccccacttccaccccttggggtgggaccataaccaagtcaagcactctcaagtcaaggggccagaaagacatgaaagagggaatgtttccaggggaagttcccactctctcctactccccaggccactttcgaaggactccccccttatctcacctccgtggctggctccctattatggacccacttgtcacctgcagagtttcctgttttttcttgttttgcttttaaagaaaacaaatttattttgctcttttaatacaaagaaaatatgtctacttcacataaagcagaaaatattgctaaatacaaagaaaataaaaatcacccacaatccttccccacccccacctaccttccttcatcctgcccagagataaacaaaatgcaaacttcctgttactatccagactgtggtttggcgtaagtacacaagtattaatgttttctatgaaaagattagaaggctgggtgtggtgcctcacacctgtaacccagcactttgggaagctgaggtgggcagatcgcttgagcccaggagtttgagaccagcctgggcaacatggtgaaactccatctctactaaaaatacaaaaactagccaggcatggcggcgtgtgcctaaagtcccagctacttgaaaggttgaggtgagagggttgcttgagctgggaaggtcaaggctgcagtgagctgcgatagtgccactgcactccagcctgggtgacagagcaagaccctgtctcaaaaacaagacaattgaaaaaacaaaggtcgagagtagtgccttactcctgtaatcgcagcactttgggaggccagggcaggaggacagcttcctgttcctcatgtaaacagatggcagctgggccaccccatctgtcctgccccatagctaacactcaacactcctcttagcccaccatatataaaccctgatgagagtacaggagtgtgactgatggggcaggaggtagggccttgagcccatgattataggaaaagggtgggtaggaaaagggtgaggtggggagaaagaggaggcagttttctacttgctgtctcacggggtagtaactgggagaccattgagctgtaggtcagtgcagtggttccttggctgggaattttgcccccgctggtccagagctaggtttttgtcagaagatggaggaaggagatactatactagcaccaaggggccctggctttttctggacagggaaggaatagagcaatttgtgttggaaatgactggagccgaactccaagggctttataacaaaaaggaattatttagctcacataactgaaaagtccagtgtgcaatggcttcagggacggctggatccaggggcctagtatgcttaggaatgcacttctccatctcttgactctttctttctgtgtcagcttcattcccagccaggctcttcccaagcagtgctaaaggagagctaccttttccttccagttcagccccaagggaagggaaagtagtgcctctttcctattggctcaaccagagtcgcagcgttgattctcatgggtccaacttaagtcctataccccgccctgaactaatcactgcagaaatgtgaatggaatatgcagattggccaggtctggtacacaagcccgacctggaactagggagtgggacacaggcacatggattgagaagagggaggagggaagtccccaaaggtaagtcaggcttggggagagaatctgggtagatgcaaactacaggtgcccttcgaagtgaagacaggaggtttagtcttaggctgaggtcctccagaaatgctgggctcaagtctactcagaaggcaaggccaggatatgggtctggttggctttggggcatgggcaccatccagaatgaagatgtctcttgtccgcattggtaagagagacacacaggcctgagaaggaagcagagaagccccattgcaggatctgcctctgctccccctccactgtgaccttgggctctttctccaagaaggcagtggagggacagtcctcactgcaagcctggggcgggtgggactctgtacagagccaggagctcaaggggcttcctgtgagatggtgaactcctgtcccaagtatgccaaccagtggtggggacaactgaaccatgtgggacttgaggctactgtggtggggacagctgaaccacgtggggctgggtagttgtctccagggtggagggaggggggatgaactggatacctgactgtctgcatctccaggaggtgagatggcagctgggcaaaatgggcacgaagagtgggtgggcagcgcatacctgtttgtggagtcctcgctggacaaggtggtcctgtcggatgcctacgcgcacccccagcagaaggtggcagtgtacagggctctgcaggctgccttggcaggtgcgtggatgggcgggcatgtggagaggaaggggtggcctggagcattttgtgggtgggcctgggtttagccacctttaagaagaagatttggggtgggaggagcaagacggaggacccctggctgtgcagactctcttctttgcttgtggcatgaccttgaggataggcgtgtgttctcgagtctgtgtatgatttaccaatttgtgcactaacgtcctttgctccatccccgcccccctccaccagccggctcactcctttctactaattgtggatgtctctctcctcttttcctctcttactgcagcactccttgctcaagacccctccccagtacctacccttccaggcccccctttcccatctcagggcagaggccacaggaggctgaagcgggttgggggatctgttcgtggcctcagagcggcgagagcccctcttcttcccgagcagtgggagtcgcgcttggtggaggccgaagacctgagacctctcgccctcctctgccctgctggccgcctacccagacggcttgtttgcccagggcacacgcccccttttctgtgcttcgaagtccctctcttttgccaaccctcatttggggcgtgagagcgggggttaggtggcacccactctgtcttagggtgctccctgtgacagatcctggtcttctttctgggttattgctgtttgtatcccaattttgcttcccagctgggtactctggggtaactgcaccctaggtcaggggatgggacgcggggcttcaccacgggcttcgcccctcctccggccgtttggagaacggccgagcttggggaccgcccggcgcctgaccgcccgcctccgcagagagcggcgggagcccggacgtgctgcagatgctgaagatccaccgcagcgacccgcagctgatcgtgcagctgcgattctgcgggcggcagccctgtggccgcttcctccgcgcctaccgcgagggggcgctgcgcgccgcgctgcagaggagcctggcggccgcgctcgcccagcactcggtgccgctgcaactggagctgcgcgccggcgccgagcggctggacgctttgctggcggacgaggagcgctgtttgagttgcatcctagcccagcaggtgcggccgggctagggtcaggatggggtagggcggggatccgcggttaagtcccccgtgacggcacgttccattcccctagcccgaccggctccgggatgaagaactggctgagctggaggatgcg

SEQ ID NO: 740 - DNA, 6000 bp, Homo sapiens
cccatagcttgccgaggaaggcaggcacggggctggggcctggctccgtgggcagcgcagctggcgcttcctgcatggtgcagtctcggcccggctctgcgctcgggcccggccgctgcgggctcgtcaaagccgcggaaagtgctgcgtttgccgcccgctccgccctactccgccccggggcgccgggtcaggcgggggccacgtgcaagcccgcggggcggggctcggacagcggccgaggcaccagcaggcagaaaaggctggctggatgggatgtgtggagtggagtggagtggaggggtggggtggggtggagtggggtggggtggggtgagatgagtgggagacttgggttcgagtcccacccctctcggtccctctatttccttctttgttctacaggagaaatcgccggtgcgcgacctggtgtgggctgggcaagtcctagaaggtaatggccagaggcacagtgaagccccaggcagggcaagcagataggaagggggggcagggaagcacgccccctcccgccgaaccccgggacgtagtcattccaagggtgtgagtgccccgaccctgaccccccgcagctgtgtcgtccagaggctcttgaggaaacccaacctctgccgggatggctcctccggtaccccgcgcgttccctgtccttccctttcagatccgaccccgcctttaataggacgcagaaacactgcaggatttgtttatttcacactcacccttgaggcccggcccgcgcccgtgccctccctctccctgcgccggggccgcggagctgcagagtccgcagaggggtggaggcaagagaggggggcagtgtgtccaggaccgagcgggtggggcgtctgcagagggtgagagcagcgagtggtctcagggcgcccaggactggtcccgatgccatcacagttcccaactcggtaaagacccggggggcaacaatcccaaaagaaggcactagcactcggggcgcgcctggacaccccccccgttccctctcagagcgcttacgtccacggggacgggggagagaagtcgcccaatcacgccacgagcgtaggcctccagggatgcggctcgcgcgtgagcttgagggtataggtgcgcaggcgcgggcagtgcgcgcggaaggcgtccagcaccgagtggctcaccacgcagaaacaatgcacctcgcgcagggccgcgcagcgcgccgccagctcctccagcgcggcgttcagctcggccgaagcggctgcgcgcacctcgagcgcgcacagggttgcggcgtagtggtgtgctgcgaagcgcactgggcctacggtgtcgcctgagaggttgaggcgcagcgcagccacggggacggctggctgcaggacgcgcgtcacgctctcagcgggcagcgcgggctccagctccagctccactgccagcccagggtggcggcggcgcaacgcgacccaggcttcgttgggcagcggggacgcgcgtgcatcttcggggcacgcgcaccgcagagccaagagcgcgaaaggcgctcggtctggcgccgccagtgcttcgaggatggcgtgcgacaaactggctaggtgcaggccgagagcgcgcaggcgcgggcaggcctccagtagctcgagcactgagccgggacccacgctgcccactagggtactgttgtccagaaaaaggctgtggagctcgggacagctgcgcgccgcctgcagcaccagcgcgtcgtccagtgtgaaggacaagcgccgcaggtcgaggtggcgtagctggctggccgccccgcatacagcgtgcacagcctccaggacgtcgcggcccgcgtcgaagagcggtttttctccgcggcactccaggcgcaggcctcgcagccccggggcacggcccgccagaaccatcagcagctcgatggccgcccggcggctcggcttcctcgatggctcaaattccagccgtaggttgtgaatgtggtcgaggcaggcggacagataaggtggcagcatgccttccagctcacattcgcaacttgggttagagccgtgcagaaaaggcctcagctgagtccctgcgaccagcggagaagcctctacccaccccttagctggggttccagctgccatcccatttcctgcctccctccccacgtctctgttcagaccacgactgttgccccaaaggagggaactcgcatcctatccttttagaagatttcagtggcgtctgccacaggatgaaacctggacatggagagccaatgatattttaggaactgggctttctcagctgtctctaaggagtcttggcatggcctccggactgctaggttcgaattctgcctctgccattccctagctgagtgacccgtgggaagtgattaagtctctttgcctcagtttcctatctgggcaatggaggtaatgataatacctatctaccacacaaggttttcataaggattaaattagttaatatatgtaaggcacttaaaaacaatggttggtatatactaggcagtcaatacgtcagcaattattattattattttgagataaactgttactctgtcgccaagctggagtgcagtggtgccatctcggctcactgcaacctttgcctcccgggttcaagcgattcttgtgcctcagcctcccgagtagctagaattataggcgcccaccaccatgcccggctagtttttgtattttagtagagacggggtttcagcatggtggccaggctggtctcaaactcctgacctcaggtgatccacccgcctcggcctgccaaagtgctgggattacaggcatgagccaccacgcccggccagcaattattttttaatatgggggagtcaacctgaatatctacctagcccacgactccacggagaaggtgagtgggcggtggggagaggagtgtggaggagcaggctcacctgatttttgtgtcgtgccacacggcgctgcaggtagcagcggcggcccaggccctgcagaccctggcggcggcagcacggtctctcagggacaggtggcggaagatgagtgccagcacctcctctggcagtccctctccaggctcggccatggcccagatccggctggggtgggaggatccgccactcccaatagctccggcctggagagagacggacgtctctgaggtcgggaaggcgcaaagtgttgcaggaagaccgagcttaggtgtacaaatgcttgtggcctgaggaactgagggcctctcagacagcgtggggcatcagataaccccgaaacttgttcacaaagcagatttcaccgcctcacctactaaatcaggctctccggaaagggtaaggcccaggaatctgcatttcaacaagcccctgtgactccacaggttccacgttgagaactcccctcccacttttttttttttttttctttttttttgagacagggtctcgctctttacccaggctggagtgcagtggcgcaatcacaactcactgcaccctcagtctcccgggctcaagcaatcctcccacctcagcctcccgagtagctgggactacaggggcacgccaccacgcctggctaatttttgtaattttgttgcagagacgaggtctcgctttgttgcccagactgacctcgaactcctaggctcaagcgatcggcccgcctgggcctcccaaagtgctgggattacgggcatgagccaccgcgcccggcctgagaaaccccatcttaaccccgccggttagtagaaagtgactacagggttaataaggcgggagcgttaatgtaggcttttctttgtcagggaccatgagccaatcaggaagcgaggcgtgggcggggcaaagctggatccacccctggaggggaggctccttccccgcctccgcctcgccggggagatgtcccgggtgcttcctaagacagccccactggatgaaaaaaaacttgggtctctgggacctgacggttctggggcctgaggggctcaagatttaagttccgacccctgagcagccctggctcccgctgagcaatttgggttcggctggaactccgcagacccaccctggagcgcagcctttagagggggatgggttactggaaagtgtgcgtcctctttgaagttgccaatcctgtttgtttttgttttgttttgttttgagacggaatctagctgtgtcgcccaggctggagtgcagtggcgagatctcggctcactgcaaactccgcctcgcgggttcaagcgattcttctgcctcagcctcccgagtagctgggactccaggcgcgcgccacctcgccgggctaatttttgtatttttagtagagacggggtttcaccatattggccaggctggtctcaaactcctgacctcaggtgatccacctgcctcggccttccaaagtgctgggattacaggcgtgagccaccgcgcccggccgccaatcttgttttaaggttcttaaaggtttgtgtacacaaggcttcacactactcgccagttaatgttcccatatcttccgggctaacagtttctcccggaatttgtgccacgtgtttcctggggcttcagatacgttcggccgggcttgtacctgggacccatgggcaccccgttttgagtgcccactggtagcagcgatcttgaagccggatccccaggggtaccagaaaattctggtctccagggggcgcccccttgatttaccgaagtctggcagctgtagctcttacgagccccccgcctcgtaagaatcgcaaacccccaaagtcgggtcttcctgccgtctaaccttgggcgctggtgtcttacctgctcggcggaccagatgggctttgcccggggcaggggactggcagcagaggacagcggacgggaagcagccaccgggagcccgcggggcgggacgcgcgggcggacggggcggctcgggctagggcaccgccccagcgcctccgcgcacacccggaagcggcggagtagagcggagcctggcgggcgtgggaacccaggccccgccgaggcggccaggttagtgcagcaggtgggtgggtgggctccccggtgcgggcgggagaggaggtggatcttggctccgaagcgtgggcgcggcgcagatgtcaccggcggctgctccagccagctggtggcggcggtctactgagctgttcgaacaccgtgggaggcgggggacggtacggaatttggcccccgcaggctcctcgtccctgccagcactttcgaggtgcagtagggccctgcaggagagagggtgggggagaaggggctggttctgaatactttccttgagcggagacccccttgcccaccccagccgatcgcacgtgcgaaaccccagcttgagggtgggctagtgggagcctgggaagctcccctcaagcgctcgggagctgcgtagctgagtagggggtgtgcccggcgggtcgcaaggagtcacaggctttcagttctgggccacgcccacaggctgtctctgtccacccagccagaggtggggctgcccccgggactgttaggtgttcagggggcaccgtgcgtggctcgtccctggaaacaggcgcagaagttgttaggtcggtacctaagcgccccacagtctccggccaccaaactttctcaggacccagcctggaagcctcagccccgcccaaaaagggacgactcctggtgggtggggcgcggggcttcccaaggaggggcttccgtgaaagaacacgtaagaagagctgccagtcggcggatgcgaaactagggccctggcctctttaccctgttaactcgacctccagcctggttcaccttccccatcttctagtactagtgagtgtgagaaagcatccccagtctccaggttcccagtactccccacctccccctcgacccccacagacctgatgggcagacaatggtcctgttcggtccccacttccaccccttggggtgggaccataaccaagtca

SEQ ID NO: 741 - DNA, 6000 bp, Homo sapiens
ccggtcccacccatccccacccggcaacgacccctgcccctccccagactccaacctcctggtgaccccgcctctccacctgcgcctcacctacaggctgaccctggaacagaaaagtctgggcaggtggcggcggcggcggcggcttcacctccgacagagagggcaccgggggctgcaagggggccgaagcgacctccccgtcgccaccccgggcccccgagccgcacttcagatttcgcagcgcatcctccagctcagccagttcttcatcccggagccggtcgggctaggggaatggaacgtgccgtcacgggggacttaaccgcggatccccgccctaccccatcctgaccctagcccggccgcacctgctgggctaggatgcaactcaaacagcgctcctcgtccgccagcaaagcgtccagccgctcggcgccggcgcgcagctccagttgcagcggcaccgagtgctgggcgagcgcggccgccaggctcctctgcagcgcggcgcgcagcgccccctcgcggtaggcgcggaggaagcggccacagggctgccgcccgcagaatcgcagctgcacgatcagctgcgggtcgctgcggtggatcttcagcatctgcagcacgtccgggctcccgccgctctctgcggaggcgggcggtcaggcgccgggcggtccccaagctcggccgttctccaaacggccggaggaggggcgaagcccgtggtgaagccccgcgtcccatcccctgacctagggtgcagttaccccagagtacccagctgggaagcaaaattgggatacaaacagcaataacccagaaagaagaccaggatctgtcacagggagcaccctaagacagagtgggtgccacctaacccccgctctcacgccccaaatgagggttggcaaaagagagggacttcgaagcacagaaaagggggcgtgtgccctgggcaaacaagccgtctgggtaggcggccagcagggcagaggagggcgagaggtctcaggtcttcggcctccaccaagcgcgactcccactgctcgggaagaagaggggctctcgccgctctgaggccacgaacagatcccccaacccgcttcagcctcctgtggcctctgccctgagatgggaaaggggggcctggaagggtaggtactggggaggggtcttgagcaaggagtgctgcagtaagagaggaaaagaggagagagacatccacaattagtagaaaggagtgagccggctggtggaggggggcggggatggagcaaaggacgttagtgcacaaattggtaaatcatacacagactcgagaacacacgcctatcctcaaggtcatgccacaagcaaagaagagagtctgcacagccaggggtcctccgtcttgctcctcccaccccaaatcttcttcttaaaggtggctaaacccaggcccacccacaaaatgctccaggccaccccttcctctccacatgcccgcccatccacgcacctgccaaggcagcctgcagagccctgtacactgccaccttctgctgggggtgcgcgtaggcatccgacaggaccaccttgtccagcgaggactccacaaacaggtatgcgctgcccacccactcttcgtgcccattttgcccagctgccatctcacctcctggagatgcagacagtcaggtatccagttcatcccccctccctccaccctggagacaactacccagccccacgtggttcagctgtccccaccacagtagcctcaagtcccacatggttcagttgtccccaccactggttggcatacttgggacaggagttcaccatctcacaggaagccccttgagctcctggctctgtacagagtcccacccgccccaggcttgcagtgaggactgtccctccactgccttcttggagaaagagcccaaggtcacagtggagggggagcagaggcagatcctgcaatggggcttctctgcttccttctcaggcctgtgtgtctctcttaccaatgcggacaagagacatcttcattctggatggtgcccatgccccaaagccaaccagacccatatcctggccttgccttctgagtagacttgagcccagcatttctggaggacctcagcctaagactaaacctcctgtcttcacttcgaagggcacctgtagtttgcatctacccagattctctccccaagcctgacttacctttggggacttccctcctccctcttctcaatccatgtgcctgtgtcccactccctagttccaggtcgggcttgtgtaccagacctggccaatctgcatattccattcacatttctgcagtgattagttcagggcggggtataggacttaagttggacccatgagaatcaacgctgcgactctggttgagccaataggaaagaggcactactttcccttcccttggggctgaactggaaggaaaaggtagctctcctttagcactgcttgggaagagcctggctgggaatgaagctgacacagaaagaaagagtcaagagatggagaagtgcattcctaagcatactaggcccctggatccagccgtccctgaagccattgcacactggacttttcagttatgtgagctaaataattcctttttgttataaagcccttggagttcggctccagtcatttccaacacaaattgctctattccttccctgtccagaaaaagccagggccccttggtgctagtatagtatctccttcctccatcttctgacaaaaacctagctctggaccagcgggggcaaaattcccagccaaggaaccactgcactgacctacagctcaatggtctcccagttactaccccgtgagacagcaagtagaaaactgcctcctctttctccccacctcacccttttcctacccacccttttcctataatcatgggctcaaggccctacctcctgccccatcagtcacactcctgtactctcatcagggtttatatatggtgggctaagaggagtgttgagtgttagctatggggcaggacagatggggtggcccagctgccatctgtttacatgaggaacaggaagctgtcctcctgccctggcctcccaaagtgctgcgattacaggagtaaggcactactctcgacctttgttttttcaattgtcttgtttttgagacagggtcttgctctgtcacccaggctggagtgcagtggcactatcgcagctcactgcagccttgaccttcccagctcaagcaaccctctcacctcaacctttcaagtagctgggactttaggcacacgccgccatgcctggctagtttttgtatttttagtagagatggagtttcaccatgttgcccaggctggtctcaaactcctgggctcaagcgatctgcccacctcagcttcccaaagtgctgggttacaggtgtgaggcaccacacccagccttctaatcttttcatagaaaacattaatacttgtgtacttacgccaaaccacagtctggatagtaacaggaagtttgcattttgtttatctctgggcaggatgaaggaaggtaggtgggggtggggaaggattgtgggtgatttttattttctttgtatttagcaatattttctgctttatgtgaagtagacatattttctttgtattaaaagagcaaaataaatttgttttctttaaaagcaaaacaagaaaaaacaggaaactctgcaggtgacaagtgggtccataatagggagccagccacggaggtgagataaggggggagtccttcgaaagtggcctggggagtaggagagagtgggaacttcccctggaaacattccctctttcatgtctttctggccccttgacttgagagtgcttgacttggttatggtcccaccccaaggggtggaagtggggaccgaacaggaccattgtctgcccatcaggtctgtgggggtcgagggggaggtggggagtactgggaacctggagactggggatgctttctcacactcactagtactagaagatggggaaggtgaaccaggctggaggtcgagttaacagggtaaagaggccagggccctagtttcgcatccgccgactggcagctcttcttacgtgttctttcacggaagcccctccttgggaagccccgcgccccacccaccaggagtcgtccctttttgggcggggctgaggcttccaggctgggtcctgagaaagtttggtggccggagactgtggggcgcttaggtaccgacctaacaacttctgcgcctgtttccagggacgagccacgcacggtgccccctgaacacctaacagtcccgggggcagccccacctctggctgggtggacagagacagcctgtgggcgtggcccagaactgaaagcctgtgactccttgcgacccgccgggcacaccccctactcagctacgcagctcccgagcgcttgaggggagcttcccaggctcccactagcccaccctcaagctggggtttcgcacgtgcgatcggctggggtgggcaagggggtctccgctcaaggaaagtattcagaaccagccccttctcccccaccctctctcctgcagggccctactgcacctcgaaagtgctggcagggacgaggagcctgcgggggccaaattccgtaccgtcccccgcctcccacggtgttcgaacagctcagtagaccgccgccaccagctggctggagcagccgccggtgacatctgcgccgcgcccacgcttcggagccaagatccacctcctctcccgcccgcaccggggagcccacccacccacctgctgcactaacctggccgcctcggcggggcctgggttcccacgcccgccaggctccgctctactccgccgcttccgggtgtgcgcggaggcgctggggcggtgccctagcccgagccgccccgtccgcccgcgcgtcccgccccgcgggctcccggtggctgcttcccgtccgctgtcctctgctgccagtcccctgccccgggcaaagcccatctggtccgccgagcaggtaagacaccagcgcccaaggttagacggcaggaagacccgactttgggggtttgcgattcttacgaggcggggggctcgtaagagctacagctgccagacttcggtaaatcaagggggcgccccctggagaccagaattttctggtacccctggggatccggcttcaagatcgctgctaccagtgggcactcaaaacggggtgcccatgggtcccaggtacaagcccggccgaacgtatctgaagccccaggaaacacgtggcacaaattccgggagaaactgttagcccggaagatatgggaacattaactggcgagtagtgtgaagccttgtgtacacaaacctttaagaaccttaaaacaagattggcggccgggcgcggtggctcacgcctgtaatcccagcactttggaaggccgaggcaggtggatcacctgaggtcaggagtttgagaccagcctggccaatatggtgaaaccccgtctctactaaaaatacaaaaattagcccggcgaggtggcgcgcgcctggagtcccagctactcgggaggctgaggcagaagaatcgcttgaacccgcgaggcggagtttgcagtgagccgagatctcgccactgcactccagcctgggcgacacagctagattccgtctcaaaacaaaacaaaacaaaaacaaacaggattggcaacttcaaagaggacgcacactttccagtaacccatccccctctaaaggctgcgctccagggtgggtctgcggagttccagccgaacccaaattgctcagcgggagccagggctgctcaggggtcggaacttaaatcttgagcccctcaggccccagaaccgtcaggtcccagagacccaagttttttttcatccagtggggctgtcttaggaagcacccgggacatctccccggcgaggcggaggcggggaaggagcctc

SEQ ID NO: 742 - DNA, 6000 bp, Homo sapiens
ccagagccgtttcgccaaggaagtgctgccccagtatttcaagcatagcaacatggcgagcttcgtgcgccaactcaacatgtgtgagtccctacggccgggcggggagcggggatgggggactcggtgccggggatggggcgacccacgcccccacgccccactccccagacggttttcggaaggtggtgagcatcgagcagggcggcctgcttaggccggagcgcgaccacgtcgagttccagcacccgagcttcgtgcgcggccgcgagcagctactggagcgcgtgcggcgcaaggtgggggcggcctgcgggaatgagcaaagaggaggaggggtgctgggactgcctgccttgctcctgcgacccagtcccgacggtgcctcccgcctgcaggtgcccgcgctgcgcggcgacgacggccgctggcgcccggaggacctgggtcgactactgggcgaggtgcaggctttgcggggagtgcaggagagcaccgaggcgcggctgcgggagctcaggcagtgcgggggcgggcggggaaagaggggacaggggtggggggttcgggatgagaccataactggccggccagcagttctgggcagccccttcctctctcctgccttggcgcctccatctagacttatgggcgatctctgggatggccagtcagcggggtggtctcctgggtccccagcctcgccattctgtggggggtggtgactgggcgaactctcagatgcctcagcaccctcccaccccttcctcaggcagaacgagatcttgtggcgggaggtggtgacacttcggcagagccacggtcagcagcaccgggtcattggcaaggtgttcctctccccaagcctcgcttctccctcccactcctcgacaccccattccaccgcccagtcccccggcgcccctgttaagccttcctccctcacctggaagtgcgggggtgggggggctgtgtccaaagtatgaattaaacctttgctttctcttcagctgatccagtgtctctttgggccacttcaggcggggccgagcaatgcaggaggcaagagaaagctgtgagtgagaaagccaagaaggcccacacccacttccaagaccccccagaagtccccttgcaaggaccccttctcctctggaaactccttcaccgggaatcctcattcctccccctgcgctacaggcttcctcaccccatctaggatccacttccccccaactctgccacctggtatccccactcccagatcctcccattccaggaccttattcccaaattcctaccccagcagccccttccccctccggcaaggcttcccaacagctgagaccctggggctcaaaccaggttccctccctcccctctctacccacaaagggcccccatctctagggggagccccttccacctccagcatgtgactgacaccctagcaacaggcctcagctctgctgacttggctgctggggcctgagggagggagggaagtgcaggccgaggtgcatgggggctgaccctgccccacccctgcctgtgccctgatcgaccacacaggtccctgatgctggatgaggggagctcatgcccaacacctgccaagttcaacacctgccctctacctggtgcccttctgcaggacccctacttcatccagtcggtaggtttgtcttcttcccccttcccaagggcatggctgggcttatggagagcctgttccttctccccatcccctaaaaggaagagaagatggaagccagccttccccccaaccagacccaggccctccagcatggactgagcctcctccctcaaaccttctcccttagacctggcccaggtgggtgttggtggggttctggctctccctgtgcctacaggccaagggctgggcctagccttctacttacagcctctcccagagacaaatttgggccttagccctcacagggccaggggccccatcatctctgacatcccagaagactctccatcccctgaggggaccaggctttctccctccagtgatggcaggaggtaagggggacagggctgcccctgaggggcctgtgggggagggcctggcagcccagatggctgtaggggtagagggagaagtcagtgccagggtctggttgaagcttttctctggtgcagggagaagggcctggcactgctcaaagaagagccggccagtccagggggggatggcgaggccgggctggccctggccccaaacgagtgtgacttctgcgtgacagcccccccgccactgcctgtggctgtggtgcaggccatcctggaagggaaagggagcttcagccccgaggggcccaggaatgcccaacagcctgaaccaggggatcccagggagatacctgacaggtgagcagagccccagctggcccatgagccctgtgatagaacagcccttaccagcccacaaagcttcctagccatttgactccatgatactcacctgatttcttggccccagcatcagagttctgtggaaagcagagcctcccagtcagggcactcagcatctgcggaagggcttaggaacctacatatgaaatgagttccctggggtgactgcaaagtacacaatagtttaagaagcattggtggctatgaggtggctcatgcatgtaatcccagcactttgggaggctgaggcgggcagatcacttgaggtcaggagttcaacaccagcctggccaacatggtgaaaccccccgcctctgctaaaaatacaaaaattagctgggtgtggtggcgtttgcctgtagtcccagctactcaggaggctgaggcaggacagtcgcttgaacttgggaggtggaggctgcagttagccaagacagtgccatagtgacatagtgggtgacatagtgaaactgtctccaaaaaaaagaaaagaaagaaagaaggaaagagagagagagagagaaagaaaaaagaaaggaagaaagaaagaaataaagaaagaagagaaagaagcatggatattgatacttgcatagggaggggaagggtcccaaagccccagctccaccacccaaacttcaggtcccaggtaggaagcagaggcactttctctgtgccatttatggcaggagtggggaggttgggggtggagagaggatggggatcctctcctatcattttctaaagattgggggattaaaatcttgatgcatctgggttccttgggaacttaatgcggggtggacactgcaggccaaaagcagttctgtctgcacagggggcctctgggcctggaaagcggggacaggagcccagagagtctgctgcctccgatgctgcttcagccccctcaagaaagtgtggaacctgcagggcctctagatgtgagtaccccttctgctgaaacaggggcatgagacctggtggggtctagctctctgtggagcctggggagggcaccactgacccagagctctcctcaggtgctgggccccagtctccaagggcgagaatggaccctgatggacttggacatggagctgtccttggtaagaagtgggtcggggagggcagaggccaggggtggctgagtcaagccctctggtccatagctgttctctgtgagccaaagccgtgtctctagaagaattgtcacagtgatttcccagctgtccccctcagctgctaggtcccctccccagctgctccctgcggttctcacgcagatgcagcccttggttccagagcggggtgagcctgagctggcggtcaaggggttaaattctccaagcccaggtaatggttgtgatgactcctacctgggaggacgccgtgattgggctgagctaccttgattgagtgagggggcaatctgcaatttgcagggaaatcctgagttcaggctgcactgcagagcgttccttgagccacccatgccctcaccattgggcgagagtggggaggttaagaatggatgttttatcctaactgagcagaaggcaggcgggcagggctctccttccctgaagaaaggagggggaacatttcccctggtgagcgcagtcccacttctcctagggaaggaccccacgctcggggccccactcctgctggatgtccaggcggccttgggaggcccagccctgggcctgcctggggctttaaccatttatagcactcctgagagccggactgcctcctacttgggcccggaagccagtccctccccctaagaccccgcgcctctgaaggggcttggaaccagtccgccgctgcacatccttcttggcttcctggcgccccctatcgggggtgagcgaagcccccactactaaatggcctctctccactaccccgactatccctgcacataaactccgttttttttttttctgtttctggtctcttttctctatcgaccagggagcacaggagttatgggtggggggtgattttgcatttgtagaagcgtccagatactaggtttttaatagaggaaccccaggagggtggaggtgcttggggatccggtgcctagctcccttgcttaggcccgggtccagggctggcgcggggccgctgcaatctctgggaagcgggggcttctgggtcgcgctcagctctgcaatgcatgcgttctgtgatcctggtgagttggtatccttctctgaacttcctctgtgacaggcagagaagaggggtcgatgacaagatagatggaaagcacctggaaattggcaggccctgagtgggcgctggacgtgtggggccgcgggccgaactgccccctcctggcctcatctcctggtgcgccccgggtggggagggaaagctgactacatgcacgtccccagccagcgcgcggcctccgcggtgtggctcctagtgcccggggaagaaccctcaccctccctattcccagcagccctggccgccccgcccccgccgcagctgctgcacccacccccaccctgcccggccctttctgcaccgtcatctcctgccccgccgaggcttgacccgtgagtggggacgcccaaaacgggccagaccgggagccccactcccggctgtgggagggaagggaaaccgagattgggcagaatcagcgccccaccacccgctgcggcgctcgggggtcgggggggcggggtgggtaggactgtgggccccgccctgccgcaggactctcaagctctgggactgggtggagggaggtaaggggcggggggggaaaatccgtgcagtcgcacatgcgcaaaggctcttcactgtcccaagaccctggcttcctggccaaagagcccgcgcagcgaggtggggttgggggctgggacccagctccgtgccccgccacctggctctctgggaagaatcggacctgtcaccctcgaaggactggccgctaaataacttcggtattgagagctgtgtgagcctcaaagggagggcccagaccagctggagtctctacccccagacaggataaagggcaggacttggggtcataggaggaggcggctaacatgaaaacaacttaggttggagagaaggaggggccaatccaatctgcaccctccctgtgtctgtcccgagtaggtgctgtccccctctcccttcctttgcccaccgattggagggacactctggaaaactcagttgaagaaagcggagagtctgcgtgtacacagtgcaatgatgtcagttaatgcactagtgagggcatgtgttgttcacggtacacagaagaaggaaccaccagcccttgggacacttaggcattggtgtagacaagggaacatttgagtcctggacgatggataggtccacggagcggagggaggagaaaaggattccagtcttagcgatcagcatcagcaaaggctccgaggtgccagaggcatagtgagttctccgatccctggctggtggagggaagctgggaagggcctggctgtccagggtggtgggaggaggctagagtagccagaccag

SEQ ID NO: 743 - DNA, 6000 bp, Homo sapiens
cccttggttccagagcggggtgagcctgagctggcggtcaaggggttaaattctccaagcccaggtaatggttgtgatgactcctacctgggaggacgccgtgattgggctgagctaccttgattgagtgagggggcaatctgcaatttgcagggaaatcctgagttcaggctgcactgcagagcgttccttgagccacccatgccctcaccattgggcgagagtggggaggttaagaatggatgttttatcctaactgagcagaaggcaggcgggcagggctctccttccctgaagaaaggagggggaacatttcccctggtgagcgcagtcccacttctcctagggaaggaccccacgctcggggccccactcctgctggatgtccaggcggccttgggaggcccagccctgggcctgcctggggctttaaccatttatagcactcctgagagccggactgcctcctacttgggcccggaagccagtccctccccctaagaccccgcgcctctgaaggggcttggaaccagtccgccgctgcacatccttcttggcttcctggcgccccctatcgggggtgagcgaagcccccactactaaatggcctctctccactaccccgactatccctgcacataaactccgttttttttttttctgtttctggtctcttttctctatcgaccagggagcacaggagttatgggtggggggtgattttgcatttgtagaagcgtccagatactaggtttttaatagaggaaccccaggagggtggaggtgcttggggatccggtgcctagctcccttgcttaggcccgggtccagggctggcgcggggccgctgcaatctctgggaagcgggggcttctgggtcgcgctcagctctgcaatgcatgcgttctgtgatcctggtgagttggtatccttctctgaacttcctctgtgacaggcagagaagaggggtcgatgacaagatagatggaaagcacctggaaattggcaggccctgagtgggcgctggacgtgtggggccgcgggccgaactgccccctcctggcctcatctcctggtgcgccccgggtggggagggaaagctgactacatgcacgtccccagccagcgcgcggcctccgcggtgtggctcctagtgcccggggaagaaccctcaccctccctattcccagcagccctggccgccccgcccccgccgcagctgctgcacccacccccaccctgcccggccctttctgcaccgtcatctcctgccccgccgaggcttgacccgtgagtggggacgcccaaaacgggccagaccgggagccccactcccggctgtgggagggaagggaaaccgagattgggcagaatcagcgccccaccacccgctgcggcgctcgggggtcgggggggcggggtgggtaggactgtgggccccgccctgccgcaggactctcaagctctgggactgggtggagggaggtaaggggcggggggggaaaatccgtgcagtcgcacatgcgcaaaggctcttcactgtcccaagaccctggcttcctggccaaagagcccgcgcagcgaggtggggttgggggctgggacccagctccgtgccccgccacctggctctctgggaagaatcggacctgtcaccctcgaaggactggccgctaaataacttcggtattgagagctgtgtgagcctcaaagggagggcccagaccagctggagtctctacccccagacaggataaagggcaggacttggggtcataggaggaggcggctaacatgaaaacaacttaggttggagagaaggaggggccaatccaatctgcaccctccctgtgtctgtcccgagtaggtgctgtccccctctcccttcctttgcccaccgattggagggacactctggaaaactcagttgaagaaagcggagagtctgcgtgtacacagtgcaatgatgtcagttaatgcactagtgagggcatgtgttgttcacggtacacagaagaaggaaccaccagcccttgggacacttaggcattggtgtagacaagggaacatttgagtcctggacgatggataggtccacggagcggagggaggagaaaaggattccagtcttagcgatcagcatcagcaaaggctccgaggtgccagaggcatagtgagttctccgatccctggctggtggagggaagctgggaagggcctggctgtccagggtggtgggaggaggctagagtagccagaccagatattttgggttgtctctgatgggcagtggggtgtgggggggaggtagataggtatttaggatggaattctgctagacaggaaaatatagttcagttcctcatagttcaggctggagcaagtaagattccagttttaccactgaatctctgagcctgtctcctcatctgtaaaatgggaacagcaatcctagcccagagggttgtcaaagtcactgtgctatcgggcctggcagaatgggagtgagaggggctcagagggactgttacaggacatgaggtgacgatggtggggtggcaaggcaggagctgatggagactcactgagaagtggagaagcaagattcatcacatacgggacataaagggagatggaggggcagggggtagtcctggtctcggcctggtggggaagggcttcaatgggaggaagccagggtgtgaagtgacgggggaggtatagtgtgacaccagagggtactgagaaagacctgggaggcaggatggcggctaggactaaatcctctctcccagagaaggccgagcctcctagagccagagaaggaggcagaggagggacagcaaagggaagaagagatgggaggatgccgtgtgaacaaagccaaggcggggaggagaagaagttattatcagggtgggggtgggctgagggcatggttcaaggcctgatgtctttgcctcctaatgccgggggtcttgctggctgggtcaggccactcacaggaatgggccataatccttggttgacaataaatggacaaagcagctgggtgcggtggctcatgcctgtaatcccaacactttgggaggccaaggtgggtggatcacgaggtcaggagttcgagaccagcctagccaacatagtgaaaccccgtctcaactaaaaacacaaaaaattagctgagcgtggtgcgggcacctgtaatctcagctactcgggaggctgaggcagaagaatcgcttgaactcaggaggcagaggttgcagtgatgagagaatgtgccactgcactccagcctgggcaacagagtgagactctgtcaaaaaaaaaaaaaaaaaatggataaagcagattgactctccctaatagccgctgttggtagagatagtctctcaagagccaggcatggtggttcacatggtggttcacaaagtgctggtaatcccagcactttggaaggctgagatgggaggattgcttgaggccagcagttcgagaccagcctgatcaatatagcaagaccaggacaggcgcggtggctcacgcctgtaatcccagcactttgggaggccaaggcaggtggatcacgaggtcaggagttcaagaccagcctggccaacatagtgaaaccccgtctccactaaaataaataaatacaaaaaatatatatagcaagaccccacctctaaaaaaaaaaaaaaaaaaaaaggctgggcacgagaatcacttgagcctgggaggcggaggttgcagtgagccaagattgcgccactgcactccagcttgggcaacagcgagactccatctcaaaaaaaaaaaaaaaaaagtctctcaaaatagtgcgatccatggaggaaaatcagtccaagttcggcaagtatttgtcggtatcctgtatgagctaggccttgggtacttcaagatcaaacaacaaatgtctgtaggtaattcccaggtcagcagggagccaggtgggtcagcagagagacagtcacattaggagttagggcttcagtagggagacaggtgggtctcaggtgatgtcaagagatcttggtcagagctaggcctgaagaagattctggtatctctgctcaggaatcaggggaccaggaagggccaggagactacattggggttgcactatggtggtggtgttggtgggagggtgtagaggcggggcttgtcctggaaagttggatatcagggtcaaggtaaggggagaggggcagggaggctctcagcactttgtgctctgggttcagaggggactggaggatagagtatggaagcagggagctctgatcctgggttctgcagggccaaagcaggaggcagaaggctggacttagtaagtggtgaggatggtgagagaaatattcagcagtcagactggaaaggacttgtctgcaagctgggtgtggagtatcagcatcaatcctaggtttttctgcctggttaggtggggaagcagatttgagagaaagaccttagtttggataaacggggtctgaactcgcctcggatttgccgggggtggagctcaggacgtcctggttggggagggcattcagagagtagatgccagtcctgggaaaggcaggggaggagaggagagccacggctgacgcttggggacagaaggaggagcctgaggaggagacaggacagagcgtctggagaggcaggaggacaccgagttccccgtgttggcctccaggtcctgtgcttgcggagccgtccggcggctgggatcgaggtgaacttaaaccccagcctgggtgttcactgggggcattgagggagtggtcagaggcggcgagggcagcggggagggcaaccccccattacttctctcccctttccccatgcagccccgacaatgggcaacgcgcaggagcggccgtcagagactatcgaccgcgagcggaaacgcctggtcgagacgctgcaggcggactcgggactgctgttggacgcgctgctggcgcggggcgtgctcaccgggccagagtacgaggcattggatgcactgcctgatgccgagcgcagggtgcgccgcctactgctgctggtgcagggcaagggcgaggccgcctgccaggagctgctacgctgtgcccagcgtaccgcgggcgcgccggaccccgcttgggactggcagcacgtgggtccgggtgagcgcgcggggcggggcctagggcagagcagggacggggctggggcagacaaaaggcccggggagggcagggttgtcgtctccgctagaagtaggcgagtgtgaaaccgcacaggggtaaattgagcctcagtcactcccacttccgccccaggctaccgggaccgcagctatgaccctccatgcccaggccactggacgccggaggcacccggctcggggaccacatgccccgggttgcccagagcttcagaccctgacgaggccgggggccctgagggctccgaggcggtgcaatccgggaccccggaggagccagagccagagctggaagctgaggcctctaaagaggctgaaccggagccggagccagagccagagctggaacccgaggctgaagcagaaccagagccggaactggagccagaaccggacccagagcccgagcccgacttcgaggaaagggacgagtccgaaggtgtgagtccgcccaaaccctgagccggcttggcgggagggcatggcctgggaagcggatgccggaccccacctctttgaccactgttcccgtcatctctagattcctgaaggccagagctctgacaggcggtgccccgcccatgctggataggacctgggatgctgctggagctgaatcggatgccaccaaggctcggtccagcccagtaccgctggaagtgaataaactccggagggtcggacgggacctgggctctctccacgattctggctgtttgcccaggaacttagggtgggtacctctgagtcccagggacctgggcaggcccaagcccacc

SEQ ID NO: 744 - DNA, 6000 bp, Homo sapiens
atgaggtgcctgtggccagtgatctttcactccacataattgaacccagatttcctggttactgaccctgggctctcaggaagagaagagctttagctctgcctggccactatgggggatgggtgaggcccactgtctagttcctcagggaccgtgatctcctgccttgctccaaaaggcaggcacctctgttcccagctcagattgagcccatgggctctgacccattctccatgtcattctaggagataccctcttggccatccgggccccatcaggcaccagcctggaggtgcccatcccagaggtgggtgcttagcccaggcaggcggggtcagctgagggcgggtgctggctgtggagcctgataagtcctgggtggggcaagtagggggaggcctggagtttggggttatctaggaggatgggcatcctgggtgggagaggacactgtggtcctgacccggagtcgggcaggagccaagcctgcttacaattctacccatctcccatcccttaccacccatctctagggtctcaatgggcagaagaagtaccagattcacctgaagagtgtgagtggtcccattgaggttctgctggtgaacaaggaggcatggagctcaccccctgtggctgtgcctgtgccaccacctgaagatttgctccagagcccatctgctgtttctacacctccacctctgcccaagcctgccctagcccagtcccaggaagcctcacgtccaaatagtcctcagctcactcccactgctgtccctggcagtgcagaagtccagggaatggctggcccagcagctgagatcacaggtgaggcaccatgggagcttgtgacagaggcccaagaggtagtatctctgtgttgtggaacaccatgctcagagttggaagagactcttcaggttggggattgtccttttcctgaccacctagccttcccttgctatggtaatgaatgagccttttttgtttttgtttttgagacggagtctcactgtgtcccccaggctggagtgtgcaatggcgcgatcttggctcactgcaacctctgcctcccaagctcaagaaattttcctgccttagcctcctgagtagctgggattacaggcgcccaccatgcgcagctaattctcgtacttctaatagagatggggtttcaccatgttggccaggctggtttcgaactcctgacctcaaatgatctgcctgcctcggcctcctgtagtgctgggattacaggcttgaaccaccatgcctgcctgaatgggccctttttaacagggaacctctgactgtgggaagagccattgctggtggcagttttctcccccagatccacatccactggtgtctcaattgccctggtagcccgtcttgaagtatggccacagcagacatgttgaccacgagtcttcttctgtaggtcttgtgtccctgtctcctgtggtgactaatttcaggttacttcctctgggggtgactggcaatgcctaattctccttgggtctgggaaccaggcttgtggtcctcctgtgtctgggttccagcacagccagtttcaacgacctcttcctgaccttgtatgactgggtttgggggctatcattgtagtgagtggcggccctgggactgatagcaaggacagtggtgagctcagttcactcccactgggcccaacaacactggacacccggccactgcagtcttctgccctgctggacagcagcagcagcagcagcagcagcagcagcagcagcagcaacagtaacagcagcagttcgtccggacccaacccttctacctcctttgagcccatcaaggcagaccccacaggtggtgagtacctgccccctgggggcagagagagagagtctagcctcagtccagtcctaggtcagaaaacagaattggggatggaacccagatctcctgtcaaccctgctggacacgagagctctctgccagcacctctgggtcagtgctggtgccccctctagcaccccatcctaggctaacacagaactccctgccgtctctcaagccctttcctgccaccccttggagcaccgcctcactaattgacacttctctgtatcactctctctcatcttctctgtctcctttctgtctggactccttgaaaaagtaatctccattcattagtctcctagtcacctttcaggttgcagcagtcacccccccagccccagtgttacagcggtgttactcttgagaagctgccgaaggcctgccgagcccagcagcctccagcgtgttttgctggtgctctcttggtctgtgtcaatattctttcctcctttggcatcatgatgccagcttttggctctcctatctcactggcttcttgaactcttccctggcgtgtccttaaacattgctgtttttgagggctctgtcccattccactcctggagagggctgcagctctgggtgaacgaatccccagcctccgcctggcctagatcttttcccaatctgcacacttcggtgtccacctgccgtcctgtgtacatccaatggacactttattcctgcatgtcctcaactgaacttagtttcctcccgaagcttgctttccacctctgcgcacccagccgtcagccctagttatccaggcctgacccttggctctcactctagttctagttccttatccctcctccttctgctgcccaccccatgccagctaactgaggtctgtcccagatgtcccctcctatcctctggtatcctcagcactcaggatgacccctggccacctctgtcctggattcttcagcatctttctctttaccctgactgacagactaatctttctgaaatgcaggcctgacagaaaaatgtggcatttctctgtttgcaaaagtacctttaatggctccttgagggccaccagataagatctgaactcctgagcctggcatgtgaaatccctcatagtcctctctggttgcattttcttctgcttcccctgtgtcctcctggccagaggtttgtagtggagtcatcaccctgtagcgccaccacctctgcctggtgacctgacccagggtctggtctcagtcttgcacagagcaggtgctcagcaagggtgggacagatggggtaccttctgtcagacagggggtgcatgctgagcccagaaagaggcttctgtggcctttccgagttagaaaagctgtaccaatcgcttgcagggggcctttggtaccctgggctcagcactgaggaattcaggtttagcaagtgaggccaacagacagtgccagcttggcctaggcaggacctacatctccttagctgtgtggagcctcagggtgggtggtataggatccgaggaagccagggggctgtagtggggccaggctggacctctgtgccctgagcatggctttcttgtttttcagttttggaactccccaaagagctgtcagaaatctttgatcccacacgaggtaggctgctgcattcctccctgaggctaggggtaagggacacagctcattgggtcctatggctgttttcttgcccttttgaggaccttgttgtggcgcttatggtaactggggcaaagggtgaagttcctgatgggcaggtggggttccctttcctgggctttggtgggtggagaggtgggagctggaatgttagtaactgagctccctccattcccagagtgcatgagctcggagctgctggaggagttgatgtcctcagaaggtgggtggccctggaaggtgggagtgggtgtgggcaggggttgggctgctgctaggggagccctggcccagggcctgagactagtgctctctgcagtgtttgcccctctgcttcgtctttctccacccccgggagaccacgattatatctacaacctggacgagagtgaaggtgtctgtgacctctttgatgtgcctgttctcaacctctgactgacagggacatgccctgtgtggctgggacccagactgtctgacctgggggttgcctggggacctctcccacccgacccctacagagcttgagagccacagacgcctggcttctccggcctcccctcaccgcacagttctggccacagctcccgctcctgtgctggcacttctgtgctcgcagagcaggggaacaggactcagcccccatcaccgtggagccaaagtgtttgcttctccctttctgcggccttcgccagcccaggctcggctgccacccagtggcacagaaccgaggagctgccattaccccccatagggggcagtgtcttgttcctgccagcctcagtgtcttgcttctgccagctccttcccctaggagggaagggtggggtggaactgggcacatgccagcaccacttctagcttccttcgctatcccccaccccctgaccctccagctcctcctggccctctcacgtgcccacttctgctgggcctttagccctagaacctgcaggtggtgggggcggctaccaagaaggaacagaggtctctggggaggagtctgggtggtccagccctgatgattggccccacctcctgctgccccataaccctctcttcatttcggctttttcatttaccctcatttagagccatttgcagagatttagaaagatttacagtaacgaatggattcctatataaagattatttttatactttttgcagcaaaaggaaattgtaatatttgtacagtgttcaagtgaataaaaaccatgcctaaggctagctctgatgtggttctttggggaccctccttgggactgtgctggactggcagtgtgattgggtgggtcaccttgctggaactaggggtggggcggcctccggcagcctgccctccccgcccccacctgccgcaccttggtgtggggcggggccgcctcggcggggcggggcaggcggagccgtcctaccttcctacccccagactccaacccggaactaacctcggctcccttgggaaggccgcgttgcatggccaggagcagcagtctgggccgcgagtgcgggacaccgaggtcaggtctcggaaagggaggacctcctcgtccccaggggccccaggccaggtgcacccttggccgcaggtgcacggtctccggaaagtgcaggcgcccacgtcccagctggaccatggcgcctccgcggaacgtggtgaagattgccatcaagatgcgtgacgccatcccgcagctcatccagctggaccaggtcacccggctggtcccgcctccatctgccccactgccccacctcccggtagccccctggccctcggggcagcccgccccacccctccccccaggctcctccccatccctccctgcccaggccgcgagaatgaccactccacttgcaggcgaagcccctggccgctgtgctgaaggaggtgtgcgacgcgtgagtgctgccgggccagggcctgcggagggcgggagggcaggaggggcggcgccccctgccggcctcgctgagcctcgtgcccctcaggtggagcctgacgcactctgagcgttacgccctgcagtttgcggatgggcaccggagatacatcaccgagaatgtgagtcccctctccccagccccaagctcggccttccgacccctctaacccacctggccccgataactctggctcttcatcccactaccggagcgcgatctgttattcacccccagccgccctcaccgacaccccagttgatcagtcctcggagccctccctgacctcgctgccttttctgctgtcttctccagaaccgcgcggagatcaagaatggcagcatcctgtgcctcagcacggccccagtaatgcccctcccgtcccgccttccccatccctgcccctttgctccaggtccagaggccccccgccccggaggcccccgccccagccctgccttgcgccacctagttgacgcccggggccgcacacttccaggtcccacccttaccatgc

SEQ ID NO: 745 - DNA, 6000 bp, Homo sapiens
ctgaagagtgtgagtggtcccattgaggttctgctggtgaacaaggaggcatggagctcaccccctgtggctgtgcctgtgccaccacctgaagatttgctccagagcccatctgctgtttctacacctccacctctgcccaagcctgccctagcccagtcccaggaagcctcacgtccaaatagtcctcagctcactcccactgctgtccctggcagtgcagaagtccagggaatggctggcccagcagctgagatcacaggtgaggcaccatgggagcttgtgacagaggcccaagaggtagtatctctgtgttgtggaacaccatgctcagagttggaagagactcttcaggttggggattgtccttttcctgaccacctagccttcccttgctatggtaatgaatgagccttttttgtttttgtttttgagacggagtctcactgtgtcccccaggctggagtgtgcaatggcgcgatcttggctcactgcaacctctgcctcccaagctcaagaaattttcctgccttagcctcctgagtagctgggattacaggcgcccaccatgcgcagctaattctcgtacttctaatagagatggggtttcaccatgttggccaggctggtttcgaactcctgacctcaaatgatctgcctgcctcggcctcctgtagtgctgggattacaggcttgaaccaccatgcctgcctgaatgggccctttttaacagggaacctctgactgtgggaagagccattgctggtggcagttttctcccccagatccacatccactggtgtctcaattgccctggtagcccgtcttgaagtatggccacagcagacatgttgaccacgagtcttcttctgtaggtcttgtgtccctgtctcctgtggtgactaatttcaggttacttcctctgggggtgactggcaatgcctaattctccttgggtctgggaaccaggcttgtggtcctcctgtgtctgggttccagcacagccagtttcaacgacctcttcctgaccttgtatgactgggtttgggggctatcattgtagtgagtggcggccctgggactgatagcaaggacagtggtgagctcagttcactcccactgggcccaacaacactggacacccggccactgcagtcttctgccctgctggacagcagcagcagcagcagcagcagcagcagcagcagcagcaacagtaacagcagcagttcgtccggacccaacccttctacctcctttgagcccatcaaggcagaccccacaggtggtgagtacctgccccctgggggcagagagagagagtctagcctcagtccagtcctaggtcagaaaacagaattggggatggaacccagatctcctgtcaaccctgctggacacgagagctctctgccagcacctctgggtcagtgctggtgccccctctagcaccccatcctaggctaacacagaactccctgccgtctctcaagccctttcctgccaccccttggagcaccgcctcactaattgacacttctctgtatcactctctctcatcttctctgtctcctttctgtctggactccttgaaaaagtaatctccattcattagtctcctagtcacctttcaggttgcagcagtcacccccccagccccagtgttacagcggtgttactcttgagaagctgccgaaggcctgccgagcccagcagcctccagcgtgttttgctggtgctctcttggtctgtgtcaatattctttcctcctttggcatcatgatgccagcttttggctctcctatctcactggcttcttgaactcttccctggcgtgtccttaaacattgctgtttttgagggctctgtcccattccactcctggagagggctgcagctctgggtgaacgaatccccagcctccgcctggcctagatcttttcccaatctgcacacttcggtgtccacctgccgtcctgtgtacatccaatggacactttattcctgcatgtcctcaactgaacttagtttcctcccgaagcttgctttccacctctgcgcacccagccgtcagccctagttatccaggcctgacccttggctctcactctagttctagttccttatccctcctccttctgctgcccaccccatgccagctaactgaggtctgtcccagatgtcccctcctatcctctggtatcctcagcactcaggatgacccctggccacctctgtcctggattcttcagcatctttctctttaccctgactgacagactaatctttctgaaatgcaggcctgacagaaaaatgtggcatttctctgtttgcaaaagtacctttaatggctccttgagggccaccagataagatctgaactcctgagcctggcatgtgaaatccctcatagtcctctctggttgcattttcttctgcttcccctgtgtcctcctggccagaggtttgtagtggagtcatcaccctgtagcgccaccacctctgcctggtgacctgacccagggtctggtctcagtcttgcacagagcaggtgctcagcaagggtgggacagatggggtaccttctgtcagacagggggtgcatgctgagcccagaaagaggcttctgtggcctttccgagttagaaaagctgtaccaatcgcttgcagggggcctttggtaccctgggctcagcactgaggaattcaggtttagcaagtgaggccaacagacagtgccagcttggcctaggcaggacctacatctccttagctgtgtggagcctcagggtgggtggtataggatccgaggaagccagggggctgtagtggggccaggctggacctctgtgccctgagcatggctttcttgtttttcagttttggaactccccaaagagctgtcagaaatctttgatcccacacgaggtaggctgctgcattcctccctgaggctaggggtaagggacacagctcattgggtcctatggctgttttcttgcccttttgaggaccttgttgtggcgcttatggtaactggggcaaagggtgaagttcctgatgggcaggtggggttccctttcctgggctttggtgggtggagaggtgggagctggaatgttagtaactgagctccctccattcccagagtgcatgagctcggagctgctggaggagttgatgtcctcagaaggtgggtggccctggaaggtgggagtgggtgtgggcaggggttgggctgctgctaggggagccctggcccagggcctgagactagtgctctctgcagtgtttgcccctctgcttcgtctttctccacccccgggagaccacgattatatctacaacctggacgagagtgaaggtgtctgtgacctctttgatgtgcctgttctcaacctctgactgacagggacatgccctgtgtggctgggacccagactgtctgacctgggggttgcctggggacctctcccacccgacccctacagagcttgagagccacagacgcctggcttctccggcctcccctcaccgcacagttctggccacagctcccgctcctgtgctggcacttctgtgctcgcagagcaggggaacaggactcagcccccatcaccgtggagccaaagtgtttgcttctccctttctgcggccttcgccagcccaggctcggctgccacccagtggcacagaaccgaggagctgccattaccccccatagggggcagtgtcttgttcctgccagcctcagtgtcttgcttctgccagctccttcccctaggagggaagggtggggtggaactgggcacatgccagcaccacttctagcttccttcgctatcccccaccccctgaccctccagctcctcctggccctctcacgtgcccacttctgctgggcctttagccctagaacctgcaggtggtgggggcggctaccaagaaggaacagaggtctctggggaggagtctgggtggtccagccctgatgattggccccacctcctgctgccccataaccctctcttcatttcggctttttcatttaccctcatttagagccatttgcagagatttagaaagatttacagtaacgaatggattcctatataaagattatttttatactttttgcagcaaaaggaaattgtaatatttgtacagtgttcaagtgaataaaaaccatgcctaaggctagctctgatgtggttctttggggaccctccttgggactgtgctggactggcagtgtgattgggtgggtcaccttgctggaactaggggtggggcggcctccggcagcctgccctccccgcccccacctgccgcaccttggtgtggggcggggccgcctcggcggggcggggcaggcggagccgtcctaccttcctacccccagactccaacccggaactaacctcggctcccttgggaaggccgcgttgcatggccaggagcagcagtctgggccgcgagtgcgggacaccgaggtcaggtctcggaaagggaggacctcctcgtccccaggggccccaggccaggtgcacccttggccgcaggtgcacggtctccggaaagtgcaggcgcccacgtcccagctggaccatggcgcctccgcggaacgtggtgaagattgccatcaagatgcgtgacgccatcccgcagctcatccagctggaccaggtcacccggctggtcccgcctccatctgccccactgccccacctcccggtagccccctggccctcggggcagcccgccccacccctccccccaggctcctccccatccctccctgcccaggccgcgagaatgaccactccacttgcaggcgaagcccctggccgctgtgctgaaggaggtgtgcgacgcgtgagtgctgccgggccagggcctgcggagggcgggagggcaggaggggcggcgccccctgccggcctcgctgagcctcgtgcccctcaggtggagcctgacgcactctgagcgttacgccctgcagtttgcggatgggcaccggagatacatcaccgagaatgtgagtcccctctccccagccccaagctcggccttccgacccctctaacccacctggccccgataactctggctcttcatcccactaccggagcgcgatctgttattcacccccagccgccctcaccgacaccccagttgatcagtcctcggagccctccctgacctcgctgccttttctgctgtcttctccagaaccgcgcggagatcaagaatggcagcatcctgtgcctcagcacggccccagtaatgcccctcccgtcccgccttccccatccctgcccctttgctccaggtccagaggccccccgccccggaggcccccgccccagccctgccttgcgccacctagttgacgcccggggccgcacacttccaggtcccacccttaccatgcccagcctcttcacctctgctcctgctccgttcctgccaggaccttgaggctgagcagctcttgggtgggctgcagagtaacagtcctgaagggcgccgggaagccctgaggcgccttgttccgctggcctcggacatgatctttgccagggaggtcatcagccgtaatgggctccagatactaggcaccatcattgaagatggggacgagtgagcacagggatgtgtgggctgggggagatggtgggtctttctggtcctggggtggtcctgctcagccccagatgtcccccctccagcctaggagaggtgctggccctcagcctgagggccttctcagagctcatggagcacggcgtggtgtcctgggagactctgagcatcccctttgtgaggaaggtgggtgggctttcctagggcagcgggtgggggcagtggagcagtggggcagtggtagacccggtcttccatgggggtgaggtggtgacacccccgccccttacaggtggtgtgctacgtgaacatgaacctcatggatgcctccgtgcctcccctggcccttgggct

SEQ ID NO: 746 - DNA, 6000 bp, Homo sapiens
tcctcacagtggtgggagggaccccggtggggctgtgttaggagaaatggaggcacaaaatcacagcagggaggagaagggaagctggacatgcgcacaaaggcccccgagtgtccacagcggcttcacccagcacaggcctcagatatccatgaacagatgaaggataagcaagctgcagtacgtccacgcaaccgagaggaaccaaccactgatgcacgcaactgccacccgaagcctaaaccgctgggctgagcaaaggcggccagacgcgaaggagctcctcctgcctgattccacctccctaacgctctggacgagactgcacaaatctgcagtgacagagcgggtcagtgattgcctgggcctgggggtgctgaggaaagatggaccacaaacgggaggcgggagtgttctaggctgatggatttggagggggctggtgcatttgtcaaaactcatcaaaccatgtgcttaaaatgggtgcgttttattgtatgcgaattacaccccaagacagttggatttaaagaaaaaaaaaaaaaaaggctgggcattgtggctcacgcctgtaatcccagcactttgggaggccgaggcgggcggatcacgaggtcaggagttcgagaccagcttggccaacatggtgaaacctggtctctactaaaaatacaaaaattagccaggtgtggtggcgggtgcctgtaatcccagctactccggaggctgaggcaggagaatcacttgaacccaggaggcagaggttgcagtgagccaagatcatgtcactgcattccagcctggatgacaagagtgagactccacctcaaaaaaaaaaaaaaaaaaaaagaaagaaagaaaagaaaagaaaaaaagaaaaagaaacagaaaaaaagaggtgagtgccagagaggaggtggatgtggccaccatgctggtgtagaggtgtcagcaggattgggagctggcggtgggcgggggcaggtctcccacctgagtgctcagcactgggtgtttgaggggcagggcccagcccagcccccaggagtcctctttatttttatttaattaatgtattattttgagacaggctctcgctgtgtcacccaggctggagtgcagtagcatgatcacggcttgctgcagcctccacctttcaggctcaggagatcctcccacctcagcctcccaagtagctgggactatgggcatacaccaccatgctcagctaattttttttctgttttgttttgttttgttttttgagactgagtttcactttatcccccacgctggaatgcagtggctcgatttcggctcactacaatctccctgtcctgggttcaagtaattctcctgcctcagcctccctaatagctgggattacaggctcccgccaccactcccagctaatttttgtctttttagtagagatggggtttcaccatgttggccaggccagtcttgaactcctgacctcaggtggtctgcccgcctcggcctcccaggcagctatgggctataagcatgctccaccatgcccgcctaatttttttttctgtatattttgtagagacaggatttccctatgttgcccaggctggtctcgaactcctgggctcaagcaatcctcctgcctcagcctcccgaagtgcggagattacagacacgagccaccagccctggcctcccaggagttctcttaatccagggcagagagaggccgaggatgaagggaaatggcccagagggatggaggaggaccaggagggtgggacattttaaacacacgggaggggggcttcggccaggtcacacccagagttgggggatagaagaggcctgagaagcagcccgggtccaggcaatgggagacgccaaacatgggggcccacgctgtactccccaggcctccccgtagctgtcggccctcccccaacctccccttgacagcctctgccaggctggcccagggccctgctccagtcagggtctaaggggctatgtggcattagaggaatctctggcccagatggcatcacggtttgactggggtatggttgcggcatcctcgggcccctgagtgactaaggagacctgttggaacccgtgtctgctccctcgagggctccagccggcctccagcctccacgctgcacagagccgctaaatttagccaggccggggaggctgtcccggggccgagtgcttggcagcagggctgtctccctacaaggcccggcccagtacccgagtcggccacccggtctttgggcttataaggcaggactggcggctctcaagtgctggaggcttcgagtgggcccggggccaagccctcagactttggggagcctccttctcagccaccagcagacatgggaactactcactgtgtgaccatgggccagggactcaatccccacagcctcagtctcctgatctgtcagatgtgggctctaggacctgcctcatgggcctgttgtgaggaaaaccctgccagactccagagggtggagctctggcctctgtcctgcccacctcagccccaaacacccagaacaaaggcaggtgtctgtccctgaggacgctggggcagggcccaagggtgagaaatcacagcctttggatcagaaagatgcattttagagccagtgaaagagacattgaccccgacagctggctgtcttgctcttgtggagttatcagcagcaggaaaataaatgtaggtccctggggtacactgtggatatgataagatccccaaatgagacggtgctccaggccagtccactttctcagggccagggccagggcctaggctgtaactgaatcacgtgtgtgtgctctgtcagtccatcaatctgtccaagcaagtctgtcagtccatccgtcaatctctctgtcagcaagtgtggctccttggaggaggaggaggaggaggaggaggaggaggaggaggaggaggaagaagacatggtggtgatgtgagaggaagaacttcctgatcttccttccttccctccctccctctctcctccctccctccctcttccttcctccctcccttttttccctccctccttcttctttcctccctccttccctccctccttccttttttccttccctccctccctccctccccttcccttcctttctcctccctccctcccttccttctttcctttactccttccctccctccctccctcccttccctccctccctcccctccctccctcccctccctctcttcccttccctcccttccttcccttccttctccctccctcccttcctccctccttcctcccttcccttccctttcctcctccctctctccctcccttcccttcccttccttttccctccctccctcccttcctccctccgttccctcccaccccacccactctctagaacgcatatcagggagaagggtggctgaaaagggacccagaatggcccacacagtctcagcacccaccccactccccatcacaagcagctgtgtcctggtgcctcccattccaatggccacaggggcagctgggaaaggaactgtctagggtcaaggtcaggccaaggggagacgtggccaccacagttctggctcccagcatctctggattttctttagaaaagcccatgacacccactggattagcagaaactccgcgaggggtgaggctgatctacttgacaaggagagactgacctgggtgctggaaggggccatgggcagccctctgtgggtgacccccattcagacaggctgccgggattcccagccccagggcctggctccctgcccagagcacttccagctcatggctcgccagcaagaagactccttatcagccttaagggtggggcggctccgacgacagggccgtgggggctcgccagggaggcccctgcttccagcttgaacctccagtaccaccccgggtgagcttgggcaactcatttctcttctctgagcttggttttctcatcttcaaaacgaggggtggggctggggaggcctccagctctgaggagccaacgtgggaccctctgcccaccccaaacccctgtgttcagggcccgagctgggggtgggaagggaaggcagggactgcagaggtgctgtgccccagactcaatggtggcctccagttctctgtcccgtgttgctgagacccatcccctgtgagcctcgacctagaaggaacagcccttattaccccaatttacagatgaggaagcaggctcggagaggcaaggtgacacccagcccccacagccaagaagtggcagagccagggatctccgaggtcaggctctctcggctggtcttgggccccccatggcactggtgacggatgtggtgctggtcttggctgggcacctgccacctctctccctctgatggtggccccggcaggacagacagtgggagaggagagctgggggatagagatgccagctcagcaccgaggttgaccgggcacaggccaggctggaactcagagcctccttcctctctgccttgctcgctgcagacccccagggacgaagcagccaaccctggtgggggagggtggagggtggtggatggggctggggatggaggtctcattttggcagtggaggggagtcgcggggagtcccctaatctgaggagactccagcttcccccaggccctggccagagctccatcttgccaggttttggggggaggataacttgaggagtcgactgagagctttatctttgcccctgtgacgggtggcctgtggtttcctgccaacaactcctgtttccggaggcccaacaaggcccacgcagagccaggaggggcagtggggctgggcctgggtggccccaccagccccgccccatctatctttgggaatttatttgtccatgggcgaggctggcctgcagtctgttgccttccaggggccaagagctgctctgatcacccagggattctctctccaacccaagtgcctccagctgacctctggctcctgtcctctggctccacctgcaccgccctgctcttcctaaggggccaggaagcccccagaagctctaccatcgacgtgggtggtggcacccggctcaccctgagagcagaggccgtgcagggggctcagttctgagccccagccggcccaccatggcacggcggttccaggaggagctggccgccttcctcttcgagtatgacaccccccgcatggtgctggtgcgtaataagaaggtgggcgttatcttccgactgatccagctggtggtcctggtctacgtcatcgggtgagtccgggcgcctcccgctgcctgcaccagcccctaccccgggcctgtcctccagactctgacatcccttgcgtgacaccagcgagcccctcttcctctccatccaggggaaggccttcctggcaagccactgtgcgagaatagaaaatcctgccaactcgctgttgagatggggacgaggccggaggggaagccctgcccgggggccttcggtgaacaggaggcagagtctctgggttctgaggagccggctcagtgttatggttcctttgagtggttagtggtgttcagggccagggcaccaccaaccacagccactgagtcctcgacctctgaccgcctgccaaaccaggccgccactgacacacagaggccataccccacacccgtcaccccatatgacaagttagagagagacagactctgctgccagcttccctgcctgagcaagggacatccagggacgtttgaggcccccggagcagagaaactctcacattctgaatacctggtgccttcatgttggcatgtcaggcggaggacagagattggttctggtcccagggatgatagttcctttctgggcatctccggacctgtcccaccgggctgggagtgcagaatcagaggcagcgtgggacgctcctgcagtatggttgtctcgggagccaagacaggcctggcag

SEQ ID NO: 747 - DNA, 6000 bp, Homo sapiens
tgaagctgagatgctggaagcgctaagttctctctagtgggagaaaacccactgtggaaagctaatcatttgatgtagaacctcaccaacgaccaggaagaagcaatcagtgcccagctaggctaaactgggcctgcgatagggtgtgagtagggccagcttcctggaagtgcaacctgtgcaatggcagtaggcccccatgcttggggtttaatgcgtggcagtcagtgccttgaaactcttaataattgtatctttgaatttgtgctttgtaagtgaagtttgatgggacctggagcatgcataggggcaggaagggagggtaggggggcttggagccacagctcatgtggaatcccacctgccaggtgccacctcacagcgcccagacaggttcttagcttcccactgtctgccccgtggagccccaggctttactcagcctccccttctctgccttgctcagcaaccattgctacccctaaccccagcaggggattgagtggagcacggggatgatcagcattggatgtgagctcccagaagcctctcagggtggggcaggcagctgaccctgcattgggctagaagtgccacagcaccttcagcaggtgactaggcttatccaggcacatcctagtgtagaggttgcaatacacttgcaggtttcccatcaactgtgggtttgggtagaggacctgtggaaaggggagattcctggcttgacttcccttctcccagccagggcacgcatataaattagaagttggcaggagaggaattcggcagccatggtttccaggataacaaatagctatagcccaggcagcagagattcccagaaggtccttctctcccacccacccactgacacatacaccccaccaccaccaccaccaccaaagcctgtttcctcagctgggcatgaacacttcgagctaaaagtggcctttgtgaattttgcctcttgctctgtgtacacattctaaagggaacaagtctgttttgctgcagggtgaggcccagaatgcggcctgggaaaggctaacagggcacagtctttgatggtgagcaagcctggggtgggtagctgaggggattgggaggtatacctcttacccttgggtcagagagatgtgggttagaaccccagcagtcagtgttttattctattctattctattctattctattctaatttttttgagacagagtctcagtctatcacccaggctggtgtgcagtggtgtgatctcagctcactgcaacctccgcctcctgggttcaagcgattctcgtgcctcagcctcccaagtagctgggattacaggcatgtgccactatgcccggctaatttttgtattcttagtagagagggggttttgccatgttggccagactggtctcgaactcctgacctcaggtgatccacctacctcagcctcccaaagtgctgggattacagatgtgagccaccacacccggcccccagcagtcagtattagtggcagattttagattccttcacctctcagcctcagtttcctcattggaacattggagaaaatactggtgcctaatttagggggtcatgaaaattaagtgagaccatctctgcagaaatgttgagcacagttcccagcacacagtcggtggccagtgattggctgctgctgctgctgctgctatcatccatgtgtgtcctaggattcctcatagagggggtcaccaacatgatcaactggccattgtccagatccaggctttggcctggcagactcaaatctctgattcctattgactcagacagtgtatctttcttccagaggcaaatacccctaaatggatgaaggaaacctatcaaagtatagcaccggagaaaagatccccctagaagaggcctctctcacctctgagaggggtatgtactctgggcaggtcccagaagcaggagctaaaggtagcctttgtccattcagggtttttttttggtggattctggctccaggccctggactcatgaggtttttcctggaacgctctggtgtcgagcagagtgtgaagttgtagcttgggatcttccagtatctgtcctgtcagggatgtctagtggtcctgaagtccctgggctgggacgaagttagctcttgttgctgggcataggcatagcttgcaccaggatgaggccatggagtcagccaagctctctcaattcctgacagacagagcccccaggggtcacctgggctgggaccagcactgttttgtgatatattcatttctgtacaggtagaccaggtaaaaaataataaggtgtcctagagacacctgggcctctgctgtctgagctccggatttagcctcacatcttctcaatatgcaaaggaccctgcagttactaaagcatttttaacacctgcactcctcactgacacccagctcctccccaataagcctttgcatggttctgcccgagaccctcttggttactgagacttccccactacctactcccacttaagctgcataggtaggtttgggtgactttctcaatgccacagccttacataaagctcttccatcccactctacacacccttccattccaccttgaaaaccctctcattgcaccctacacaccctttcattctagcctcacatccttccaatcatccatcacacaattccatttcacccttcacacccttccattccaccttgaaaaccctcccattgcaccctacacaccctttcattctagcctcacatccttccattcatgcatcacacaattccatttcacccttcacacccttccagtccattattcattcacaccatttcattccattcttcacgccattccattacaaccttcatattcttccactccaccttacacaccttatattccacccttgacactcttccagtccactacatgtccttccgtttctctcttcacatcttccatttcaccctaagcaacctcccatttcacccttcacacccttcaattccacccttcacacccctccatgacatccttcaagctcttccgtgccacccttaacatcctctcattccacttttcactctctggtccttccatgtccttccattctgccttctgcaaccttccattccattcttcacattctttcactccacctaaaccatccttccattccaccctccacacctttcaatttcacccttcatatacttccacccggcttggcgcagtggctcatgccagtaatcccagcagtttgggaggccgaggcaggtggatcacttgaggtcaggaagttcaaaaccagcctggcccatgtggtgaaaccctgtctctactgcaaatacaaaaaattagctgggcatgatggtgtgggcctgtaatcccaggtactcagaggctgaggcaggagaatcgcttgaacctgggaggcagaggttgcagtgagccgagaccgctccactgcactccagcctggacaacagagcaagaccccgtctcaaaaaaaaaaaaaaaaggaactgcaccattttacattctcaacatcacggatgagggttccatcttctcctcatccagccaactggaagcccttttagctgaggtggttaagctgtgagaaccagagtttgctgctgccgttattcactgcatcattcattcagcaaaaacctgagtacctaccactacctagtaggctctggccatgcaagaagtccctggcaacgctgtaggatagagaggaacagcaccctggttacagcgtttcagcatcctggccttggttcaccccggggcctttcacttgcaggaggcagggagttctctgatggcagtttgagttggatttgctgcaactaacaaagccggccagtggacctctccaatctactgggactcaaataaatccaagtgattgttctccctccattccaggaaggaacaccagccagccgtggaacctcaggtgcaacagagacgccaggagatactagtgcccagcagcctgcggcagtaccaatgaagccagagagggcttggtggatgacaaggaggcctgagtagaccgcaggtgggtctgagaaatgggcttaggtgaggcaggtctttgaaggatttgttcttaatcatatgcgagatgctcaaaaggctggatgcctgcttttgtgggtgaagagcaagaagagaaaacaggttgtacacatacagatgcagatggagagacagagaaaaaaaaggaagaaggcagagaaatgcaccaattcttgagctgtattatctctggaccttgggattgtgggaggctttattttactactgattttgcctacactgttttctcaatttctagttttctacaaagatgatgtgttagctttttcacgcattaagattaaaatttaaaacagaccacacaataaatatttcttttaaaaggagaaatatgccctggggaagctccccacgcagctgagagcctggctggttgcatttcggcttcttaggtgccaagcctactagtgccccggggtcccagccagcggctcgcgtttcctcccccttgcgccgccagtctggttgccatggagacaaaccttgctgcgcagagactgccgagccgcaggcagcggagctggaacccggcgagccagcctctgcaacaggctgggggcggaaggaggagccaggcgaagcggcgcctcagctgagaggaccggcggaccctgcagaggccccctgcccctctggctccgcccccacccgggtcgctagaaatacagccgtagccccgcccaccgcccactgcgctctgacccagacccggctgacccacctacccgcgatcctgcccatggctgacgggctctttcggcgcagaccctggggtctcgagcagattcgcccggaccccgagtccgaaggcctgtttgacaagcctcccccggaagaccctcccgctgcccgcgggcccaggtcggcgtcggccgcgggcaagaaggctggtcggcgcgcgggcgggagggcgcaggggggccgcgccgggcagcccccgaaggccgcatcgcgccccccgcccaagaaggaggcgcctccactggacgagggctgctatctcgaccattttccgcacctctccatcttcatctacgcagccatcgccttctccatcacctcctgcatctttacctatatccatttacagcttgcctgagtggccagcgcgggacggggtgggcgcaggaccgagcggggagggaaagggaaaacggggctcggcattttgtgttttagaacagcgctgcacccccttcatgtagctttcgatgcttgtttctttccgtctttgttgtcactatctttgtctatcagtacgaaagtacaaagtagctgccggcaatgaaataggggtgctgtttgcacctgcaggttaggggtggaggcgtttagaattttggggtgtgattgagccccgtttataattagaatgcccctggacccctaccactctgtgacgtgggggcacgcgcagggatcccatcattttgtgtttggggagctcagagtgcgcccaatcttggaatctttaagggatgagccagacccagacccgcggccttctagagagggtccggcagggagggtcggcgccctggcccggggtgggccggagccctgtgatgctgcatcgcccccaggaggagccagctgtgccccagagttggcgcggccgagagaggacaagagcgcgcagcaggcgaagctggagggcgggactcggtaagtggcgttcgtcggggtgtcgtgctgcgcccccaggggctccggctgaccacgactgtgtgtttttcctgccttagactttgttgtcgctgcccggaggagtcgagactggtacccggaggagctgtctcaccaggagaccacgtcctggaagtgtccgggactcgcgggacctgtggctgcagaccccgccggcacgcagg

SEQ ID NO: 748 - DNA, 6000 bp, Homo sapiens
caattctggctgatttaagcagaaaagggatacattgaaaggttattgactaactcatagacttagcaaaaggttatgcaacaaatctaagcgggggggaagatagtgacccaatgactcagagaaaccaagggcagagccaaggtcacatcaggaaaatacggagacaggcggcagaaaatacggagacagctactgtaggaccctcctgcccaggagccactgggctctttttctttctttctggtattttgttttttgttttttgttttttgtttttgagacagggtctcactctgtcacccaggctagaatgcagcagcacactcatagctcattgcaaccttgaacttctgggttcaagtgatccgcccacctcagcctcctaagtagctggaattatgagtgtgcaccaccacacctgcctctcactggactcttcacccaactgctactgccagaattctctctctctgcatctgtttcacccctctagacttgaggtcccagttagagacaaccacttagtcaagtcttggtcacacacctgtgtccttgctgccagggagtagtagcatcctgagtggggggcttggcttgcctcctgccaagacccacacagtgctggaggaggaggctcttcctaaaaagaagagtttgaatagtgagtggccaaacaccttggtcactctatgttcctactgccccttcctcctccttgttctctacctgcctagtcaaaccttccagcatcactcaatggtctctcatagagaatccacaccagcacaggcaactagaggttctatatctttcccagctccagggccaggggctgggtttgcgtataagtttggctcaagggtgatccttgagctccacttaggagttcagcactgctaagtgctcccacctggtggcacaatttcccacagcctccaaaggccccaggcctagaaatgccctcttccccatgctgggtgtcttagcctgttcaggctgctataacaaaataccataaactaggtagcttgtaaataacagaaatttgtttctcacagttctggagcctggtaagtccaagatcaaggcgccagcagatttggtgtgttggtgaggcccattcctcatacatggagccttctagctgtgtcctcacagggtggaagggacaagcaagctcccttgagtctcttttgtaagggcactaatcccattcatgagaattccacccccatgacctaatcacctcccataaaagcttcacctcttaataccatcaccttgggggttagaatttcaacatatgaattgtaggaggacacagacattcaagaccatagcactgggctcccccaagagggtacctgagcctaagccctgggatcctacagtgccagcaaatcctgactcagtaacaacactaaatctaggcctcttgggctggatgcagcggctcacgcctgtaatcccagcactttgggaggccgaggcaggcggatcacctgaggtcaggagttcaagaccaacctggccaacatagttaaaccccatctctactaaaaatacaaaaattagctgggcatggtggcaggcgcctgtaatcccagctactcgggaggctgaggcaggagaatcgcttgaacccaggaggcggaggttgcagtgagccgagattgtaccattgcactccagcctgggcgacaagagcgaaactctgtctcaacaaaataaataaataaaaataaacctgtgcctcttcaatccattcttttacagggggccatgtggacacatccctgttccaaatggcccactttaaagaggaggggatgctcctggagaagccagccagggtggagctgcatcacatagttctggaaaaccccagcttctcccccttgggagtcctcctgaaaatgatccataatgccctgcgcttcattcccgtcacctctgtggtgttgctttaccaccgcgtccatcctgaggaagtcaccttccacctctacctgatcccaagtgactgctccattcggaaggtgacactaagagccagaaaggctgggccacggtgggttgacggtaaacacaaaatgcagccagagagccccctagagggtcttcaactgggaccaaggatgggcctcttgtacaggagaaccttgaagtgggcaaacaattcgtcccctctcagtcttggactggtctcctgcctctccaaggtatccccctgctaggttcattgatcaatcactgatctttggacagtttcttacggcccctgtccaggaatcaaaggattggagtcctccatgcctaaaactgtagcctttcctcattctaacttccctaacaataaccctattcctatcctgaagacatcaaagaccaagtgcgggctgtctctgtagcagtgcatggggggagggaggcaggggtgatatagccccactctgtccacacaaacacacagatgcaccatcccccctattcaaaccacattccacggggcagaagcctcccttaatcattgttccctatgttctgtaggccatagatgatctagaaatgaaattccagtttgtgcgaatccacaagccacccccgctgaccccactttatatgggctgtcgttacactgtgtctgggtctggttcagggatgctggaaatactccccaaggtgagcagcccagtgtctgcctcttcactgcgaacagaagtcctacctgggaatgaatgcctgtggggcaggtctcagggctttctcagggacaggataaatcgaggttgaacagaaagtgagtgggatttagagaaagtgggaatgcttccaagactaggagaaagaaagttcggaggagggaggatcacatgcaggatgtgaaggatgatggggtttgacttgggggcactgggaagtgtttgggctataggtcatcaatgtccttcagtccagaccaccaggaacaaacctgtagttgaacatactggctttattaatcattgcagtggcagaacacatattatggggaaccatggggtgtctcagtaaagggtgtttgaaagaatctgctataggatttgggccttggttgcatacatttgaggaagatctaaggaaacgaagattttctttagattgggtgttggttcaggccacacggagatttgtggaagaacatttcaggcagaaggaatgtgtgcagaggcatagaggtgggagcaagcttgacgcctccagatgacaaaaaagaggtcagtatagcaaaagatgagtcagattagaggcagggtcttaccaggcctcatctgccctgttggccctggtatgcactttgcactttgttctaagtgcaatggcaagcttttgagggtcataaacagctaatacaagacctgatttacagccaggcgcggtggctcacgcctgtaatcccagcattttgggtaccgaggtgggcagatcacttgaggtcaggagttcgagaccagcctggccaacatggtgaaaccctgtctctactaaaaatacaaaaattagctgggtgtggtggtgtatgcctgtaatgccagctactcagggggctgaggcaggagaatcacttgaacctgggaggcagaggttgcagtgagccgagagtgcaccactgcactccagcctaggtgatagagcaagactctgtctcaaaaaaaaaaaaaaaaaaaaaaaaaagacctgatttactttcataaagatgcctctggctgctgggtgagaacgaatgataagcaggcaagagtgaaagcagagagacaagtcaaaaggccattatgggccaggcgcagtgggtcacgcctataatcccagcactttgggagaccaaggcgggtggatcacctgagatcaggagtttgagaccatcctgaccaacatagtgaaaacctgtctctactaaaaatacaaaaaattagtggggcatggtgagaggcacctgtaatgccagctactcgggaggctgaggcaggagaattgcttgaacccgggaggcagaggttgcagtgagccaagatcaccccccctgcactccagtgtgggctacaagagcaaaactctgtctaaaaaaaaaaaaaaaaaaggccaggtgtggtggctcactcctgtaatcgcagcactatgggagttcaaggcaggcagatcacctaagatcaggagttccagaccagcctggccaagatggcaaaacccagtctctactagaaatacaaaaattagccgggagggccgggtgtggtggctcaagcctgtaatcccagcactttgggaggctgaggcgggcggatcacaaggtcaggagatcgagaccatcctggctaacacagtgaaaccccatctctaccaaaaatacaaaactttagccgagcgtggtggtgggtgcctgtagtcccagctacttgggaggctgaggtaggagaatggcatgaacctgggaggcggaggttgcagtgagccaagattgtgccactgtgctccagcctgggcgacagagcgagactccgtctcaaaaaaaaaaaaaaattagccgggagtggtgatgggcacctgtaaaccctgatactcaggaggctgaggcaggagaattgcttgaacctgggaggtggagtttgcagtgagccgagatcgtgccactgcactccaacctggtcaacagagcaagaccctgtctcaaaaaaaaaaaaaaaaaatgctgttgtggttgggtacagtgactttcgcctgtaattccatcactttgggaggccatagtgggagaatcacttgaggccagtagctcaagaccaacctgggccatgtagggagacctcatctctatgaaaaatgaaaaaatgagtatggtgatgcacgcctgtagtcccagctactcaggaggctgaggcacttgagcccaggagttcaagtccagcctgggcaacatggaaaaaccccatctctctttaaaaaaaaaaaaaaaagaaacaaaaaagaaaaagagaaaaaaacaaaaggctgttgcaatactgcaagctacagttgaaggtcacttgactaggaaggtagcgagggagatggagaaaagtatatgaattcagggttgattttgaaggcagagccaacaggacctgctggattgcctgtgtagggaaggacttaagcatgattccgagtttggagcctgcatgctcagtggatggtcctatcctttactgagtttggggaaactggaaagggagcatgtttggaagacagtggggaatcaagagttctgtcttagctgggatttaggaaaggggatggatataaatttttgtcaatcgacagtgggtggagtttagggtccattgggaagacaggctttgggctggagaaatgagggtttggattcaagatgggggaggtgaaggaagaaggatctggcttaggattatgagcactacgtttaaggacaagccctgacttacccgtgaggtactcagttgtgtcctcatccttctgtggaaaattgggaaaagagcaatgtctgaaggtgatggttgatttcagtacagggatcatcagagtgtccttatggagccaagcagggccaagaaggtgtcaggtggggaaagaccttccatgcaagatgaacagggtggcaactcaactctttgcctcttcaggaactggagctctgctatcgaagccctggagaagaccagctgttctcggagttctacgttggccacttgggatcagggatcaggctgcaagtgaaagacaagaaagatgagactctggtgtgggaggccttggtgaaaccaggtaaatccaggacaattccagagaactcagaggtgggaggagaaagaaaatcaatgaaggagctgggcacagtggctcacgcctgtaatcccagaactttgggaggccgaggcaggcagatcacaaggtcaggagttcaagaccagcctggccaatatggtgaaaccccatctctaccaa

SEQ ID NO: 749 - DNA, 6000 bp, Homo sapiens
cagttaagatcaaatgagaatactcagagtgagagatgcgttctgttgtaaccgatgtaaattgactgtgacctttggctatcgtgtgttcttggaagatggtgatgcgggtatgtgtattcttgtccaagttcacaggacattaaagcagaccatggtaggggcaacaccaagtcctaatatttccttcacttcacactggaggaaagactagaaggaggaagaggagtaacagggagaggaggagggctggatgaactagactatgttttttaacaaaagatttcacctgttgatgttcaaagcaccgttttatctaagcctgaaacacaccaacttgggggaaatgaattgtcaaactattgagatgatcttgttgggtccataacactgttggatacagtgagttccttttcaaaggttccgcttgttcaattctctcattctttgtcctctattttcaaagcctaactgttctgcctccttgcccctagttacagtaaacaaccttccagccgttcccaatctgtaactcacatccattcccagtctgtaacccacatccattcacaatctgaaacaacccacatctgtaccttatttggccaaaactgctcttcccgctgctgtagcccccacccctgctccatttgaagtagccaatcaggatcagcttagactgcgcagtccaactccagccaatggggcccggacacagcatcagggactgactgggtcagggataaaaaccccttccctcctttgttcagtgtgctcttgcagtggccagaagggcaagcgagacccttctccagaagtaaatttgccttgctgaaaaaatcctttatttgagtgctcattttctctgtgactccgagcttttatttccaacaataccaagcacacacctgaagggactagatatttccatgtcgatcatcctggaaggaggataatcctggggcctgtgctaggagtgatgtgaatgtaggacagcttgttctctttctaagtattagagccagagggtcctggcctccaaagggcagaggaggctgcagaatcttgaggctgggcaatgacctgcctgtgtgtaatggaaagcaccagagctacagagggctccagctggaaaagggatagcagggatgatcctggaccagagagggctctgaggacagtgtgagccacagctacagagagtgatgccctgatgtatttactatccttcatccctgaaccttggggaagttcttgctcaaaatcatatcctcatgtcacggtctcagctgtgccgtaaattgggaaaatcttgtcccacatttcaggaatgggccagaaaagagccgtgccctaaaatggtggtgacagagaggacacctgggcccagcaacttcaggaggatagaaatggggtctgagaccaaagggacggcagcaaggtagtcaagaccagtcgatcagaggggaaccaagaactgacttcagaaccccatgaggcaatgcctgggacacgcttagaaataggtgggaggagaggaatttcaaggaggctgatttcaagttatccagatcttgattcaagtcatagtaatttgaacctaaagagaaggcctcactgtactctgctggagtactggccatacagatattcctcatgagttaagttttaattgaaaatagcatgacttgaataaaagtgagttttaatgtgttcctaaaatgcctcaaggaaaggaaacaaaggcccaaagcaccagaaacagggataattttaaaaattcaggctcagagagcgccagtgggtcctctccaccaaacccatgaggctgcttcaattctcagaaagtacttgagtgccatctagtggccagagtgagtagctgtttggaaggataagaaggaaagcattaaaggaaagcgttcaaaagacattcaatgtctgtggtattgattgtgctgacattgtgggccaggcactgatttaggcatagcggatacaacagcgaacaaaacaagccaagtcctgtctccagggacctaacatcctattggcaggagggggtgacagaaggtaaacaaataaacaagtctgtaacgtcaggcaataataagtgtcatgcggaaaaatgaagcacggaatgaaggaattctactttacagaaggttggatagcacacctctgaatatctggggaaaccattccaagacaatggaaagactagtgcaaaggccctggagtgagagtattcttggtgtattcaaggaacagggaaaagactaagaggatccagtgagggagggggatagggtaggatataatgccggagagatatcaggggctagatcatgcagcccccgggaaccattgggagggctctgggagatttggggagttgttgttgttgttgttgttgtttggtttggtttggtttgagactgtgttttgctcttgtcgcccaggctggagtgcaatggtgcaatctcggctcactgcaatctctgcctcccaggttcaagcagttctcctgcctcagcctcctgaaggaatacggcgtgcgccaccacacccggataattttttttgtattataattattagagatgggatttcaccatgttagccaggctggtcttgaactcctggcctcaggtgatctgcccgcctcagcctcccaaagtgctgagattacaggcatgagccactgtacctggccggatttgggaagttttttaatattatgtcatagggacagggtcttgccatgtttcccagactggtcttgaactcctggactcaagcgatcctcccacctcagcctcccaaagtgctgggattacaggcacgagtcaccacacctttggttggactttggtttttactcagagtgagatggagtatgggaaagttttgagctgagaagtgacctgacctaatttatgctttaagtggataattctggcttctagactgagagtagacagtaaaggggaagcatcagcatgggtggagaacatgtggaaggctagcacagtgatcccagtaagagacgactgaaggctggaccagcagccccagtgggcgtggtgggaagggtcaggtttctgatctatttaacaggttgagtggatctccagcggccagtgatttaatgaattatgcctgtgaagtgaaacctccgagaaaaccccacagtcttgtttgtttggggtttggagagcttccaggttagtgaagcagggaggggcagggagagtagggtgcccgggagggcaaggaagcgctgtgcccctcccccacccacaccttgacctcggcatctcttccgttgggctattcctgagtcgtatcctccatcatgaaccgataataataaataaagtgcttttctcagtcctgtgagtcatttcagcaaattattgaacctgccggggactgtgggaacccttgaatttgtcaccaagtcagacagagatgccagtggtctgggcaccccatttgcaactggcatctgatatgaggccagctcttcactgaaaccctaaacctgtgaggtttgatgccaactccaggcagtcagtgtcagaattgcactgtaggacaccagttggtgtctagagagttggtgccagaactggctggtgtgaggaggaaaaaaagcccacacagccctcctccaggccattcctcccgctacatggagtctcacggtccttcacggagtgctcagagcctcccgatcatcccacttttagcacagcacttttccacttctggtcaatctgatattagaatgtcctacaatgtgcttattagccattttttaaaactaacatttataaaatttatttaggccaggcacggaggctcacacctgtaatcccaacatttcgggaggccgaagtgggcggatcacctcggatcagactggctaacatggtgaaaccccatctctactaaaaatacaaaacaattagccaggcgtggtggtgagtgactgtaatcccaactgcccaggaagctgggctgatgcaggagaatcgctggaacccaggaggtggagggagcttgcagtgagccgagatcttgccactgcactccagcctgggaaagagagagagactctaagaccttttgctgaattgaagcctcttggtaaacctatgatgtcccatttaatagatgggcaaactgaggctcaaagaaataaatcaggcacataaggagtccttgtccaagcaagccgtgggttgaagcctgggctctgccagtccaagtgaaaccaaagcatctccagaaattcctggtggtgtgttacatcagcaaatgagtaggcaatgtcattcctcaacctgaagtcattggcatcttgcagattccacgaaagaggaagtctgcccctggctccccgaggcctgcttgcaggaatgaggaaggggctgttctgctttcaggtggaaatgttcaccagctaagtgctgggctgcccagaaggcaaacagccccctgggcctgggacacatgctttagtgcccctggtagcatggcaggacatgcagtgcaactcaagaagctcccaaaaccatgagaggctgggaaaaatgctccctggcccagttctaatgtttcccaataaggagctgcccgggcagacacagggggccccacccatcctgagaggctgggcctgggctgcagacacaactgctcggagagtctgcatcctggctctgcagacaggctctagatgatgggctggcggagtgcccatgtggaggtgcacacaccgtgtttagtatgggcctgtacctgctgcagcgtcagctggtctgggcctgtgctcctggtccgcctatagatgccatgtggcccatctgaatctgtgactctgagtctggcctacccaggcctggtttgatcctaccccctggccacgccccttgtgggtttcctctgggtgacgtttccttcctgctcttgttgactaggcgctgttcttgctggctggtgccccagggcctggagaggtctgaagaaacctgggagccagcagcccggggctccactctgggttctgaaagcccattccctgctctgcggctcctcccaccccacctcttctcagccttgcagctcaagggttgatctcaggagtccaggacccaggagagggaagaatctgaggaacacagaacagtgagcgttgcccacaccccatctcccgtcaccacatctcccctcaccctcaccctccctgcctggccctggaccccatcccaggacctccctatcagctgacttcttccagtgtcttgcaggcccctctgggctcctccctcccctggcttttcctaccactccccctctatcggcgtctatctgtaggtgccctgggatttataaaactgggttccgaatgctgaataagagacggtaagagccaaggcaaaggacagcactgttctctgcctgcctgataccctcaccacctgggaacatcccccagacaccctcttaactccgggacagagatggctggcggagcctggggccgcctggcctgttacttggagttcctgaagaaggaggagctgaaggagttccagcttctgctcgccaataaagcgcactccaggagctcttcgggtgagacacccgctcagccagagaagacgagtggcatggaggtggcctcgtacctggtggctcagtatggggagcagcgggcctgggacctagccctccatacctgggagcagatggggctgaggtcactgtgcgcccaagcccaggaaggggcaggtgagtggacagaggaccccactgcccgcgggacatcccctggccctcatgcctgccctgccctcttgggaccccaccactgagccctccctgccaggccttcctctgagcagtgacatggaactgccctctcaaagggggatccaggccccagactatgctggagccaggaggcttgctgggggggcccttgctgca

SEQ ID NO: 750 - DNA, 6000 bp, Homo sapiens
gtattttttagtagagacagggtttcaccacgttggcctggctggtcttgaactcctgatctcacatgatccacctgcgtcagcctcccaaagtgctgggattacaggtgtgagccaccgcacctggcctgaaacccatctctactaaaaatacaaaaattagccaggcgtggtggcgggcacctgtaatcccaactactcgggaggctgaggcaggagaatcgcttgaacccaggaggtggaggttgcggtgagcagagattgtgccactgtactccagcctgggcaacaagagcaagactcagtctcagaaaaaagaaaaagaaaaaagaaaattcatgattcaatggaggaagccaaaatatcaacataacaggagtttggaagaagttgattccaacccttatggatgactacaaggggttcaagacttcttggaggaactaactgcagatgtagtagaaattgaaagagaactagaattagaagtggagcctgggacgggcacggtggctcacgcctgtaatcccagtactttgggaggccgaggagggcagattacctgaggtcaggagttcgagaccagcctgcccaacaagacaaaaccccatctctactaaaagtataaaaattagccaggcatggtggcgggtgcctgtaatcccagctactcaggaggctgaggcaggagaatcacttgaacctgggaggtagagattgcagtgagccaagatcatgattctatctcaaaaaaaaaaaacacacacagaaggtaaattgttctgcaaagagaggtaatgggaatgtgggagttggcttggctactggcacagacagcagggaatcgggagtttgaaagaagatttacatttggcatacacgtgtgcccacgtggcctttcctactgcaaagggtgctgacaaaatcaagcccctgatccttcctgtggcatacataagaacaaaatggtagttgttagggacaaatcaaaatttaaaaataaaatggccaggtgcagtggctcacccctgtaatcccagcactttgggagggaggccaaggccagcggatcacttgagcccaagagtttgagaccagcttgggcaacatggcaaaaccccatctctacaaaaaatacaaaaattagtcgggcatgttggcacgggcctgtagtcccagctactggggaggctgaggcagtataatcaatcacctgaacctgggagatcaaggctgcagtgagccgtgatggcgcctttgcactccagtctgggtgacagagtgagaccctgtctaaaaacaaaacaaaacaaaaggctgctagtcagtttgggctactataacaaaacactggccaggcgcggtggctcacgcctgtaatctcagaactttgggaggccaaggggggcgggaatcacctgaggtcaggagttcgagaccagcctggccaacatggtaaaaccccatctctaccaaaaatacaaaaattagccaggcatggtggtgcgtgcctgtaatcccagctactcaggagactgagacaggagaatcgcttgaacctaggatgtggagattgcagtgagccaaggtagcgccattgcactcccgtctaggcaacagagcaagactctatctcaaaaaaaaaaaaaattaaaggcttagttctccatgttgaaagtaagggaagagacttctccaccctctcttttcttagaaaatttgctttagaaaacttgtaaaattttttttttttttttgagacaaagtctcactcttgttgcccaggctggagtacagtggcacaatctcagctcaccgcaacctccgcctcccgggttcaagcaattctcctgcctcagcctcccaagtaggtgggattacaggcatcctctaccacgcctggctaattttttgtatttttagtagagatggggtttccccatgttggccagactggtctcaaactcctgacctcaggtgatccacccacctcagcctcccaaagtgcggggattacaggcgtgagccaccgcacccagccagaaaacttgtaagttattttctgtgtcttcaaaacgtgtataaatatttttagaagccacacagcctcttgccagctttactacccagggatgtctttcacaaagacccaggagccatctccttgaaatgtaaacaccaagaaagatggagccttcatttcccagtttctgtgggagggtaggactaacttaaatggacactttgcttgagctgcaaaactatctgctgtcataaaaatctgaaaagctggctgggcatggtggctcacgcctgtaatcccagcactttgggaagccgaggtgggtggatcatctgaggtcaggagtttaagaccagcctggccaacatggcaaaacctcgtctctactaaaaatacaaaaactagccaggcttggtggtgcacacctgtaatcccagctactcaggaagctgaggcaagagaatcgcttgaacctgggaggtggaggttgcagtgagccgagatcacgccactgcactctagcctgggcaacagagcaagactctatctcaaaaaaaaaagagaagtttttcttctgattaagccagttagctaacatagatggtcatcacaattgccaggtgtctctagactgcactatatgtgacaaatggtgctatcgagtcctcctaaagattatttatagtttatcttgagaacacatatgtaatgggctgtatctgcttggctagataaaagtgagacttccttctgtctttgcagtctcttagcaaactgcctgtgatgtgctcacattctggtttaatgcttattcaataataaaactgttttctttcttcactactttcgtggagaggttttttctgggttgggagaaaattttgcttctaattatattctcccaacatagcgcatgtgcttaaaagggaaacaaaagcaggagggggaagggtctagagtgataagagctctagtgagaggctaggcctagagagggacatggagaaatagcatgcggagaggaacggtagaggagcaacgctaacattcagttgtaaataatacaatcatagcagctaatacatagagggactacacgccaagcactgttctcactgtttagccatattcactcatttagcatgcgcagtagcttgaatccggtttttcaattattcattccctctctctgcacgtggccgtagagtacactagagtgggcagaaaataagtcacaaaacagcaaagaaacagtgcttttggaagtaggtatgagacaaactcttttctaggcaaaagtaacccacgaaaatgtgtgtggaaaggccagatcctactattaggcaggatgggaatttgagccattttatttggatattacagaatggggtgaccccagaaaactggaagaactggggaccagcaaatggccgacctgcagtcctgagcagaggatgtaggccagagtggacctagaagataagaaagggaattgaatccagtaagggacagacactttatttttttatttttatttatttatttatttatttttgagatagagtctgatctggaggctggaaggcggggctaaaactcccactcacttacctctaccaacaactaggccaccaagtcatttctgaggactggctcaagaaagcagatttaacttacactggcctagcccaggccaccagatgcatccacggagatccaaatgcatataatcacttgaatcaagatctagacagggacgcgtgcagcaggcttcatctgactgattcctgacacgggagagaaagcctaagctccgaatcatccttcaatgtttacaaaggccctaaatagcagtgggctaattgctgttcctggatttccaggagacctgagacccatgaaggagcaggaaagagcttggggataaaaaattaatctggaacctactggagcggaaggggctgcactcacctggaaaagacaaagttcttgggaactggccacgtaggccaggtccctaagcaattccatcccgcaccctaacaccccgactggtgttcctgggtccctaacattgtctgtacccgcttcggaggttggacaaaatgagtttttcactgccctgcctcaggcctctctcaaaggtctggcccatgatatttggtgtacattgggaccccagcgcccagatatttgaaacggggtggggagcgggtgttgagctgctacatttccaggttctaggtaccctggggaacccctggtcgttgacggaagcacagcgttcaagggcggcagagctcaggtactggaggacacatgggccgcgccgggtctagccgcgggacatccccagaccccagcacggcctcccaggccgaccttccagaagccggcccactgccttccccgggtcccagcccagaaaagcggagaccttcccctccgtttggaagatggactcatcccctacttcctcctggctccccagaagacctggagacctcgggaagtgttctcatctatgttcgctccaacccgggggctcaggcccacctcgatcccgccttcccgggaggtccaggaaggtcccgccgcacccaccccgttggcctcaccctggctcgggcccctttatcatcctgcagctacgctccgaccaggaggcacagccagtccccacagccggctctaccgctctgctcgcaggtttgggctagtctggggcggggacttgggagcgcctaaaacttgcgaggagggcggggccgcagaccggtcctttaaaggttggaagtggccccgaggcgccggcagccctgggcggtcccgggaatcgcacaggacccggctcccctcgcctaagctgctggggggcgccatgggccgctaccgcatccgcgtggccaccggggcctggctcttctccgggtcgtacaaccgcgtgcagctttggctggtcgggacgcgcggggaggcggagctggagctgcagctgcggcccgcgcggggcgaggtcagcgcggggagcgaggggagctagggcagcggggaccccgggcccaggcccgggccgagctgggctcgcggcgggagggcgggaggctgggggcgaggtgacagcgcgacctcgcggactgggacttccacgaagctgggacgaggtgggcaagattagggacagggtccgcagctgggatcccgggctgggctcaaccccatctccctttcccgcccctggtcccggcagcccccagctccttctcccagtgacccagagccaatgtaagtatgaggccagaggtcagacgtgaagctcctccaagaaccggcgcggggagagctcagttaatgggacccacgtgggcgatgctgctccagcatcagctccaggcgctgcgggccctcgtcctccacccgactccgggcgtctgagacccaaagagcaggttgtgcgggggcgggaacgaggcgatgctgtctttggaggccctgagaaactgaggttgcacaggagcgcggctctgtcctcgaaacggcctcagtcgggtccctcctactaagtctggcctgggtccggcctgcacaggaggaggagtttgatcatgacgttgcagaggacttggggctcctgcagttcgtgaggctgcgcaagcaccactggctggtggacgacgcgtggttctgcgaccgcatcacggtgcagggccctggagcctgcgcggaggtggccttcccgtgctaccgctgggtgcagggcgaggacatcctgagcctgcccgagggcaccggtgagcaggcggcgtcggggaaggaggcacaaggtctcgggaactgctgcggggctaggagggcagagttaaggacggtcggagcagacttagaggatgtatgggcccagggcaggtgaaatgtagggatcccagggtgctggacagaaaacgggaaggagttatgaattcccaaagttttacaca

SEQ ID NO: 751 - DNA, 6000 bp, Homo sapiens
gcccgaggtggtgcgcctgcgccacctggtggactacgggaaagtagcagatcggtgagatgggttgaggcaccttcatttgcagatgggtaggcaataataacatgaatattatcagctaatgcacttatagggtgcctataagtgcattaactcctgcagaactcacaaaatctttatgacatatagtcactgttatctcctttttgcccatgaggaaaccgaggcaagtagtgagtagagaggcagagctgggatttgaagcctagtggactggctccacagttgctgcttttaatcaccctgctataagctgggcatggtggcacacagctgtagtcccagctactttggaggctgaggtgggaggatcacttgggccctgagatggaagttgcagtgagctgagattgcagcactgcactccagcctggataacagagtgagaccctgtctcaaaaaataataatacaattaaaaaattaatcagtctgctatggacttgcaagtagctgctctcttgggagacactattctgagagtcaaaggctgtactgtgaacatagggctgccttcagccatctctttcagggcagtagggttacaaagacagagagaaaggatggtgtgctcagtggctcacacctgtaattccagcactttgggaggccaaggtgggcggatcacctgaggtcgggagttcgagaccaacctgaccaacatggagaaaccctgtctctactaaaaatacaaaattagctgggcgtggtggcgcatgcctgtaatcctagctactcgggaggctgaggcagatgaatcgcttgaacccaggaggcagagatttcagtgagccaagattgctccattgcactccagcctgggcaacaagagcgaaactccatctcaaaaaaaaaaaagaagaagaggaggactagaaagagagtacctagtattaggacatggtaagatctagaagagtcttgccattgtatggaccatggcaatctttgtgcctactgtgtgaggagggtgtttcattcttttggcaatgaagggctctagaatggctgaatccctaattatgttgcaagcttcgtgaaggaaaagtacacattccctgttcacttctgtgtcaccagtatttaccccaggacctgacaggtattgaatgttcaataagtatttttatttatataacatctgtgttgagatattcatataccataaaattcatccatttaaaatttacaattcaattgtttttaatatattcacagagttctgcaaccatcactgtaatcaattttatcacccctaaaggaaaccaggttactattagaattcattccccgttacccccaactcctatctctagccctggcaaccacaaatctactttgtgtctttatggatttgcctattttggacatttcattataactggaaccatacaatttttttttgttgttgttgttgtttgtttgtatgtttttttgagatggagtctcgctgtgtcgccaggctgcagtgcaatggcgtgatctcggctcactgcaacctccgcctcccaggttgaagagattctcctgccccagcctcctgagtagctgggactacaggcgcgcaccaccgtgcccagctaatctttgtattttttagtagaggtggggtttaaccatattgaccaggatggtctcgatctcttgacctcgtgatccacccacctcggcctcccaaagtgctgggattacaggcatgagccactgcacccggcccacagtcgtattttttgactggctcctttcacttagcataatgttttcaaggttcatccactttgcagcatgtatcaattctttattcttcttaatggctgaataatattccatcgtatggatatattgcattatatttatccaatcattagttgatggacatttgggttgtttccagtttacggctattgtgaataattctgttatgaacatttgtgtataagtttttgtgtggacatgtgttttcatttcttttggatgtattcctagcattgcagttgctgggtcatatgtaaatatgtaactttacatttaacctttgaggaactgccagagtatttccaatggctgcaccagtctacattcttaccaacgaggtataagggttccaatttctctatatcctcgccaacacttgttattatctgtcttttttattacagccatcctaatcattgtgaattggtttttcattgtggcagggctgttgctttttaatcataggcaaataaacacccagcctattgaagctggatggtaccacaacaaccatgtggtccaatttgttcattttataggagaagcaacgaacgtgttaagagaataagaaactatctcaaggtcacacttagtaaaggaggcagtaacagaacctatagatttttttttcttttaagaaagaaaggaaattaaagccagatggcataaaaagagagatagagaaagagagtcttctataaaacctaggagaaatttctttaaccataaaaccagaagatgctgggtgcagcagctcatgcctgtaatcccaacattttggtaggctgaggcaggaggaccacttgagtccaggagtttgagaccgcctgggcaacaaagaaagaatcaaggctgggtgcggtggctcacacctgtaatcccagcactttgggaggctgaggcgggcggatcatgaggtcaggagatcgagaccatcctggctaacacggtgaaaccccatctctactaaaaaaaaaaaaaaaaatacaaaaaattagctgggcatggtggcaggcgcctgtagtcccacctacttgggaggctgaggccgaagaatggcgtgaatccaggaaggggagcttgcagtgagccaagatagcgccactgcactctagcctgggcaacagagcgagactccatcaaaaaagaaaagaaagaatcaaaaagattttttgattctacaaaaaaattgaaaaattagccaggcatgacagtggtcccagctacacaggaggcgacggttctctatttattccttcagtcattttaatggttattgggggaggtgtgtcagtggaccatcttggaccaaggtttggatcccttgggcccaagagttcaaggcttcagtgaactgcgatcgcaccactgagctccagcctggggacagagcaaggccctgtcaaaaaaaaaaaaaaaaaaaaaaaagcacaagacagacaatgaatcaataactaataaaggatagtcataaatagttagtcatggatcctctactacgtcttaggtgcagaacacggtaagtgctttacatttgcttccctgtttaatgctagcaacatgcctattttagagagttgaagtgtaaataaaggattatgaccctagactcttatatctaactactgtctgtgtataaagtaacagacaatctgagacatgcgaagactcaaaaaatccaccgtccatccacccttcccccaaggtttactcaaagtagcatttcagtggtgtgagaaattaatcaaagtaaggaactcaggaatgaggaagtcatttacgtaaatgaaatgacaataaacaatgtaggcagaaaaactgagttagaaggctgggtgcagtggcttacacctgtattcccaacactttgagaggccaagatggaaggatcacttgaggccagaagttccaaaccagcctgggcaactcattgagaccttgtctctacaaaataaaaagtgttttaaaaattagccgggcgtggtggcatgcacctgtggtttcagctactcgggagactgagatgggaggatctcttgagcctgggaggtcaaggctgcagtgagccatgatcccgccactgtactgcactccagccaggatgactgagcagggcccggcgcccccaccgccccccgcccccacacacacctgcgccaccaccgccccccacccccacacacacccactaccaaaaaaaagagaaaaactgagttaattatgaacgtagtttgaaatcacaatgccaatgtcaaaaaatgattcttcaaagagcaagcatatgatgtaaaattttaataatggcctgaagctaggatcctagtttatgccggcaaacctgtgtcctccagcagccttaagctcggcagagattcccaggcgccggcctcgcgggtgaactgtcacacgtacccagagcttggaggaggcgcgccgggggagtgttgtgctggggattcccaggccggctcctgcttctcgcctgatgaatgtggagttccttcagccatccctcggatcctcttaaacttttctaagtttcaggagtgtgaatgacgcattcccctagtgttaagtggcgacagttctccctctattttatctcttcagtcattttaatggtcattgggggaggcgtgtcagcagaccatcttggatgaagggcaaaaagaccagttagcatggaattgaggtttgtcgctggtgatggcagtggggacatgatcgcacgtccttgggtcagacttctcagctctctcctccccatttttacccccagcactcggtcaaacaaacagacaaacaaaaagacccctgcaactcccagacaaaccaaagctagagtgtgtaggttgggtggctttctgttggatagttgtgtgtcccaagttacacgcatcctatcttggcccagctccactggagcccgagcggcggggcgcagggtgcgagcgggaggctggtgttctgcccgcgatgggcaggggagccgggtggccgcggggcgaggagccgcgagggccgggccggcgtgacaccacctggcggagtctcggggaagagtcttaaaggcgcgcgctcctccgtgccccgcgcactcgaacgggagccgcggagagctcgcctcccgctgccgccggcgcctcggggaggtaagtgccacccgcggatcccgagtcgcggccgggtgggggcggcccgcggctgccccgcgctcgggaagctctggctggggctgcggtcggagggcggcgcccaagttttcttgaaggcctcggagggcagctggagcggcgtagagcctgcgcggggatggcgggggtggccgcgggccggggccgtctgggggcggccatcccgggcggtgcgtggaaaagtaggcactggtgcgcggcgaggggcgcacgccagagccccagccccgcgtcctgcgcacttggcgcgctctggccgcggtcccggcgagccccagcctgctccgggccgcgaccccggctccgcgccttcctgcccgcccgggtcctttgtagcccgctggccccgcggtcgcgcacggtcacgccggcaggtcgcgctcggcggccggccaagccagccccggccctgccgcgcccgcgccccgggccaccccgcccggccccctcggcgctgcacccctcgctttccccatctccagccgctcgctattttcacacctcccggtgccccggccccggcgcctgattcagtgcttagtaattaatttggcgtttcagaatggtcagcgggctggataatgggtgcattcatcccccgggctaatctgaacagaggtgggaagaaaggctttcacagacagaaaatgccattcgccgagcgctcaaaggggctgtcactcccagaataaatcgccgccgcgcccgccggctcctctggccatttccatacagctccggcccgcgccgcggacccgccggcctcggcctcggctcccgggaatcactcactcgagtgccttcgacgggaaagtcgggcgagagctggacccaggcgggggccgagggaaacggggaaactggagactcgggtgaaggccgcaggggacaaagagattgattagaaaatcaaacgcgcatctagaaggaggcgcaggcgactgctcaaggcgcggacggcggagctggggctcgggagcgtccgtccaaaa

SEQ ID NO: 752 - DNA, 6000 bp, Homo sapiens
tcctggaaaacactctcaacttgagattaatccaactgtctctttctctaggtctatccaaaggctgctgggcgctgctggggaagagggcatgtgtgtctcatggccttgctggctgccattctttctcatagatagtcacaaacttcaataggccctttaattctgcccagcaagcattatcctcttctctctaatgacctcaagcctccagtgctcccagctcctcccccatcctcagcagatggtgtcacttcctatttcattgaaacaagagacacttggagaccacctgaccaccagttttacaagcatagttttatctgtcttccacctctctcctcctgctggctccagttcctatcaacatttaggcatggtcaaatagccttatcttacaaacaacaataaaaaatcccaaccttccctcaatcctatgtcaccttcctgctgtgaccctctatctttcctgccacttatattcacactttcttgaaagttgtctacacctgctatttccactttctcacctcccgttcactccacaaccccagacagcctggcttctgtccctaccactccctgcaaccactagtcaaggtcaccaatgacttccttgtagtttgatccaaaggacttgtttcagatcttatcttgacctttaaggcatgtgactcaacactgctcagcacccctccttccttgcaacgctcttacccattggtttctataacacccgagtcccctggttttcctcctcctcctctggctacttaaaagttttcttgaaactgccgcattctccccctcctagggtgatccgtctggcttcacaggtaagacagtgtgccaggaacggtgtttccgcctctcaacgcattccttgcagaaacacctggtgatttgctttctcacccaaaatctgcactgttgcgttttgaactccagtttgctctgtggatcccgctgcttagagcctgacatgccttcacgggtgtgtatttatcaccgccactttaagaacttctcacgacacttggacatctgtttttttcatttgtcccctcaacagacaggctgcgttaggaaaggacactgatgaattagaagggatggaagaggctgcagagtggtcagaaaacaatgtcctatgggaaatcattaagataactgggaacattttgcccagaagagataaaactgagggatgatagaggactggtttcaagaatctgaagaggcagagaaccttgatctgggctgctgtgtagcgtagggtttgggccacctgcagacttaacagagaggggggtttggaatggacgtagaggagttccaccgtattacaggaggttctagacctcctggatacaaggtgagtaagacagtcctgctcaccaggaactactaaagatgataagcgtagacctaagtgaccacaataaaactggaaggtgaccccgctcatcctctcctgaagacccctggcctaagctcagctggcaatgtagaaaagccacactctaccaagagccatttcaaacttactgccatgcaagggccatcaaaagctctgtggacataggctgggcgcggtggctcactcctgtaatcccagcactttgggaggccgaggcgggcagatcacttgaggtcaggagtttgagaccagtctggccaacatggtgaaaccccgtctctactaaaaatacaaaaaaattagccaggtgtggtggtgggtacctgtaatcccagctacttgggaggctgaggcaggagaatcgcttgaacccgggaggcagaggttgagaatgcgccattgcactccagcctgggcaatagggcaagactccatcttaaaaaaaaaaaaaaaaaaaaaggctctgtggacagaaacaacattcaggaggaaggcttggaaagcacttctcaatccagtcttgtagatgctccaaaaggtaccccagtcagctgagcaccccaatttgcttcttttccattcctctttgctggaatgtcttttcctgacttgggttttgatgcgatgccatcagcttacattcagggggatcacagaaactgtccaaccgagctcactgttgtgactgttttggggatgttgtcagggacgtttgctcattaccccatactgtgttccctttctgggccacgcccccacaagaaattcctatctgattttagtaccaagaatagttgtaattcccttgagcagtaggtctgtttttatctcatggacactgggaattgtgtaatgaacatggtctcctcattttagctgcaggaaagcttagggacaaatttgtggcccactcagaagaggtgtagaggttggaactccagggtgcattggacctgtatcctcctctcgactttgtctcccttcttagcttttctttgttctcttacttcatattttactgtgcaaaactgagagcatacaagcaaagataaataaaaatcacctgtaatctcattattccgagataaccactattaactgtgttgtctttttatgcatactttttaaaaaattaaaatgacattatactgtgtgtttttaatttgcttttttcatattataatatgtcatgaacatctttccctgtaattaagtgttctctaaatgatttaaaatttctgtatagatcaagcgacctcatactaacagctaacatttctatatgcatgtactatgtgcctggttttatgcatatttacatttgcatacatgagaaagcctatttatatgtgttacagacctgcaatatgtatgtctatatcccatcagctataatattcaaatgtgtcaactcacgtgatgctcacaacccagtggggtagaaagtattatctcccttgtacagatggaggaaaccaaggcatagactttccatagtcacacagcagaggcagaatttgaacccaggtaccctggctccgaagcgtttcctcctaagagctatgctgcctttcagtataccattgcgatttcacaggtcaccatggttaaccatttcatttatttcctttgacctcacttttaatttgttattgtgtcatattttatgtacccttgtaagttacctgaaatcctttctgccacaaggtgaggtaaggcataaataaacagtgcagagtgtggtaaacggcacaagaaggcacagctaaattgctaccccggggtaagaagatgaatccaggctgtcctgcaatggaatggatttattttcttgagctgtggtgagctcccatccctggaagagctggcttgggtggccgtctctctgggaggctggggaaggccttcttccaaggagacggagctgggccagacgagccccgaggccccttcttagattctcagggtttatgaaaatgccaataagacaaactgaggcacttaatggagctaatgcagcaaggcagcccttgggccggaaccaggacctggggcttttcatccgggtctattactggaccacacatctacaagtaacaaataaacgagcagagattccgttccaaactctcggcccagtgtattcctttcccagagctctctggctgctgttgcaagatgaccaaaggatgctgtcactgtcctcagtctttttattggggcgatggagaatgaggcaaggaggggctgggtggccccgcagatgccccatgacaccatcattcggcaaggttatgcatttgacgaatgccctgcagtggaaggagcccaggcttctcttcctgtttttgatgtttacttgggggttgatcttgtgcgagtttcttcagctcccgggaccctcagtttcctcatctgcaaaatggagttaatacaacagcaaagctgctgtggaggtcccatgagctattacagggctttgcacccttaaaaatgcggttgaggaagtaccgatacgcctgcctcaggggatctggggagggctgggctgtccccatgcctgagaccaggcaggcccgtcttggaggggcggtggccagcgtccaggtgctgccagcttcctaccccttcagcctcctgcccaccactgctcccttggctagaacgaagccgcgttcccgacagacaggctcacgcacggtgatatccgtgggagtgcgggcgagcagcccctcctcgccggaccccgggggcttcgggcaaaaatggagagcaggcagaggtcacatcctcctcctcttcctcacgctcccgggctgcgtgcccacaggggcacagccctgtgcgcggtgccaccgggggccatcaggctgggttagaggaaggcccgacctccgcgcagcaaagaaaacaaacacagatgtgtttggctgggaccgggagggagaaagtggcccccttcccccgcccgcgcgctcccccgggcgtgaggctctccgggcggcgcggggcgcgggcgaggctgacagtccccggcggcccctcctcccccacggggtgcgcgcctggcccggcccagccccctctccggggtttccccgggtgctctcctcgctttctctttgtctctgctgttctttctcgggctcccgggttcccacccgcctgtgctctccctctcgggcgtccgggccggttccctttaactttcttctttcccggggtgaaaactttgctcggagctggcggcagctcgcggacgttattggccggcgccccgcccggcggccccgccccccgcccccgcgctcccctccgcccctcactcccagcgcgagtggcggcggcggcggagccttcgggggcgagcgcgcgtgtgtgtgagtgcgcgccggccagcgtgagtgtgtgtgcgccccgggcgcgggcagggcagcactccgagctcggcgggagcggcgggagccgggcggccgcgtagtcactcgggcgagagaggcggcggcggggccgggaccggggctggggctggggcagcggcggccgcgccgggcatggagctggcaagcccgcgctgaggcgggacgcgcctgctagcagcgagcgagaggctctccggcgaccggcgcgcgggctccccggaggggccaggcaaacttttctttctcttttgccccctccagaggtaaagtcccgaacgcggactttccggcggggacgcgatcggggggcatctgagagggaccccgggctgcgagacgaaggggcgcgggccgtgcagagtcggggtcccccagctctcctgcgcccgaaacttggggtgcgaggggggctggtcgcggacggggagaccggctcaggcatgcccctcgggcggcgtgggggcggcggtggcggggaagcagagcgttctcccgccgggcggggaagaaggggcgcgagcggtgcggacttggagggccccggcttcgccgcccgcgggactttgggggagagaggcgggcagtcggctgcggggtgggtgcccaggaagccgggcgttctcccgcatctccgctcgccaccccgccgagagctggagggcgcggggcgggctggctgagcgcagctcccttctctccgcaggcgccttctgcggcaggcggacagatcctcggcgcggcagggccggggcaagctggacgcagcatgatgcgcgcagtgtgggaggcgctggcggcgctggcggcggtggcgtgcctggtgggcgcggtgcgcggcgggcccgggctcagcatgttcgcgggccaggcggcgcagcccgatccctgctcggacgagaacggccacccgcgccgctgcatcccggactttgtcaatgcggccttcggcaaggacgtgcgcgtgtccagcacctgcggccggcccccggcgcgctactgcgtggtgagcgagcgcggcgaggagcggctgcgctcgtgccacctctgcaacgcgtccgaccccaagaaggcgcacccgcccgccttcctcaccgacctcaacaacccgcacaacctgacgtgctggcagtccgagaactacctgcagttcccgcacaa

SEQ ID NO: 753 - DNA, 6000 bp, Homo sapiens
agggaagggcggggaggggggaaggggcctagcaacccaggtggtttacaactgttcatgcattttgccttgaatgtacacacagccccaccatgcatgggtacttctttacacaatgaatgtgaatgcacatgtgtataaaagcatgtgaacactgctgatacatatgggcggaagaaagtatttagttattccactgagagctgtcaaggccgtaacattatacatcgtcttgtctttcatattgttttgagggttgtttgttccccccccccggaagaaatccaaaactgcatttaaagtataactgggctttatgaacgttcacattttattccatagaaagcttgaccttgaaacaacaccgaaaagaaaactggaccaaagaaaacatataggatatgtgcatttcttagtcatctataaggaccatggccctatgtcgaaggactgttcagtcaaatgataatattggtaaattggtaaattttagggggttttctttgcgggagggtggggcacagggttaacctagggaagggtaccatttcaatttattataaatcacatatcattattttataaaagcaaagaccaaacagcacagtaataggctcattgttattaagactgattatgggaattaaaaaatatatacttcttgactttgccatagttgtaaatactctgggtagcttgactttatatgtcaacagcgtgaaattcgcaagaagagattatgttgggaggaaaatctgagcctctgatagtccaaagttacttttgaaggatttattaatgctttttcctagcacagtgccctttagtatctcagaacacctgtcaaatactaattcattcacatatctccactacagggccttttcataaaaagctcaacctttaattgtaaatcacccctaaattgtccttgctgtctttctcttttacagaatgatggaaaaatcactaagacttcaattaagactttatgggaacttcaatctgatgttcccagctatatctacaaggtatcagaacatctattcaaaaaggaaactataaataactttaacatagttgaattggctttgcttttatgagatgactgaataattggcaagatttaaagatactttaactactgggaattaaaataacttcagtaaaacccagaaaaatattgttagccaatcatttgtcatgtagattatgtacttattaagcctaattaaactttttgaacaaaaacggttactaattacattcgttaatatgttgattgctcaatttagccaataaaaaaaaaggtcaatccaatttgtgtgcatagttagtgctttggtcaagagacaaaatcccaaactatagagattatttcaagtgcatgaccatcattataacaaacgcaggttacgtgtccacatccaaactgacggcaagacctgggggtgggtggtgaatctgaacaataccaacgctaaggcaaatcttcaagccagagaaatttcaccaccacatcaagtttattcgcctaaatgtattcacttgcatttgtccaattagaccctgatggtgacaagacaaagttatctttcatatgcacatacaaactaaaactgatagcaaaaccctgggaatccctttaaatgtcaataaagggcttttacgcacaaagggaagaaaagaaaagaggaaggagggggaaaagaagagatgggaaaaaccaacatttccgagggaactgagcagatcaaaggaattttattctagaagactactaagtcggagtgtaactacactctctctctctctgcgaaatcttgaaaagtgtcttcagactggaaactagttctgatccttaaaagaaaggggacaaacaattatgtctgcaagagcgggacacgagcgtaaaaatggaggcctcccttgcaacaggaggcgggaggcccggcgtcttcagaccaggacgcctgactgggcctctgcggcgatccggccctccaagacatgttttccattcccttgctcaaaactctgcatccacagtcatgaggcacaaactattcgacaacaacatgacacaattaatcagaaccagacctcaaaacgtgtgtttgtggggaccagcaaactttgaaatgtgcctaagaggggcaaagcaattgaagagcctcacactggctgtttgagatggggagatggagaggaaaaatctgtacgttcataaaggatgcacaccaaatgggacatttacagactaaataattttcgctcaaataaatgtgggctttggagctttacttcccatactgaaaaagtaaggtgtagtcttgctacctcccctcaccctttttttctttttatggggagaaactgatttctgagagcttctgcagcagcaaagtcgtccaattcagaagcagaacgtatccttttttagcttcatttctgacccagccgtattcacccggttttgtcagatttctctttcaggaaatgaaaccctatttaaaaagtgagaagctggacccttagttaattcaaaactgtttaatttcaccaaagcctgaagctaataaaaaaaatctggtatacttttttagaccagaattgaattcgtttaaaataattactgaacgctccgttgtaatcagcagatagtaattaattgaaatcacatcattcttcttttgctaacacaaacacgctgttcaaaagagagacaaaaatagtttcaaatcatgaaaagacaaatggagggcaggagtgatactcgtcgggtaccgaactgaccccaaactacaaacagttctttgccatctcccaagggatttgtaggtgtggagttggaacttcccaggaactgggccggggtccccaaccgcgagcccagctgcagccttgggaaaggggggtgggtgcaggtgaatcccagcgtccaacccaacgagggggaaggcaatgaatgtttgcgtttggatccagggttagcggagacctatctgcaaatgttctgccaaaccccctcccgggaacatttctcctgctgcttcttggcttcgcagagagcactgggcgcaaattcgggcgtccaccacgagcgccacgcgagcgagtggacctgctctgagccctcccgggtcccgggcatcggcgaacgcgcctcccgccgttccctcgacccgcgctcctatgaactcgccgctgcgaggcccagcagctcccgcccgcggccccacccgccgccggctccgccgccgcaccccactcacccacgcactcgttggcttcgcgggctgtggcgcgctgccagggccggtcgtagtggaagggcttgcagcggtcgcactccgggccggccgtgttgtgcctgcagtcgcacaccaggctgtcgtcgcggtcgcgcacgcagcgggccgcgtggccgttgcacttgcaccggccgcccacctgcaggtcggacaccgcgtagaagtacgagtcgcgcgccagctccgagtcgtcctcgttctcgtcgccgaacgtgtgcaggcggctgaaggccacgcggatgtctgtggccgtgacccagtcctgcagcacgggcgagttgtcgaagtcgtgcgccgagggccgcccgtccagcgtgctgaaggcgatgaggccgcccgagagcgggcgcatgtcggtgtgcgagtcggtgcacacggcctcctgctcgttctgcttggtgatgggcgcgcggtgcggccggttgtacatcttgcggcactgcgtggagtagaactggaagggcacccacgtgcgcccgtagtccatggacttgtagatggccatggactcgggccgcggcgagcagaactgcaggctcacgtaggtcacttcgaacttcttgccgagggacagtgtgagcgtgacgttgtgcgggaactgcaggtagttctcggactgccagcacgtcaggttgtgcgggttgttgaggtcggtgaggaaggcgggcgggtgcgccttcttggggtcggacgcgttgcagaggtggcacgagcgcagccgctcctcgccgcgctcgctcaccacgcagtagcgcgccgggggccggccgcaggtgctggacacgcgcacgtccttgccgaaggccgcattgacaaagtccgggatgcagcggcgcgggtggccgttctcgtccgagcagggatcgggctgcgccgcctggcccgcgaacatgctgagcccgggcccgccgcgcaccgcgcccaccaggcacgccaccgccgccagcgccgccagcgcctcccacactgcgcgcatcatgctgcgtccagcttgccccggccctgccgcgccgaggatctgtccgcctgccgcagaaggcgcctgcggagagaagggagctgcgctcagccagcccgccccgcgccctccagctctcggcggggtggcgagcggagatgcgggagaacgcccggcttcctgggcacccaccccgcagccgactgcccgcctctctcccccaaagtcccgcgggcggcgaagccggggccctccaagtccgcaccgctcgcgccccttcttccccgcccggcgggagaacgctctgcttccccgccaccgccgcccccacgccgcccgaggggcatgcctgagccggtctccccgtccgcgaccagcccccctcgcaccccaagtttcgggcgcaggagagctgggggaccccgactctgcacggcccgcgccccttcgtctcgcagcccggggtccctctcagatgccccccgatcgcgtccccgccggaaagtccgcgttcgggactttacctctggagggggcaaaagagaaagaaaagtttgcctggcccctccggggagcccgcgcgccggtcgccggagagcctctcgctcgctgctagcaggcgcgtcccgcctcagcgcgggcttgccagctccatgcccggcgcggccgccgctgccccagccccagccccggtcccggccccgccgccgcctctctcgcccgagtgactacgcggccgcccggctcccgccgctcccgccgagctcggagtgctgccctgcccgcgcccggggcgcacacacactcacgctggccggcgcgcactcacacacacgcgcgctcgcccccgaaggctccgccgccgccgccactcgcgctgggagtgaggggcggaggggagcgcgggggcggggggcggggccgccgggcggggcgccggccaataacgtccgcgagctgccgccagctccgagcaaagttttcaccccgggaaagaagaaagttaaagggaaccggcccggacgcccgagagggagagcacaggcgggtgggaacccgggagcccgagaaagaacagcagagacaaagagaaagcgaggagagcacccggggaaaccccggagagggggctgggccgggccaggcgcgcaccccgtgggggaggaggggccgccggggactgtcagcctcgcccgcgccccgcgccgcccggagagcctcacgcccgggggagcgcgcgggcgggggaagggggccactttctccctcccggtcccagccaaacacatctgtgtttgttttctttgctgcgcggaggtcgggccttcctctaacccagcctgatggcccccggtggcaccgcgcacagggctgtgcccctgtgggcacgcagcccgggagcgtgaggaagaggaggaggatgtgacctctgcctgctctccatttttgcccgaagcccccggggtccggcgaggaggggctgctcgcccgcactcccacggatatcaccgtgcgtgagcctgtctgtcgggaacgcggcttcgttctagccaagggagcagtggtgggcaggaggctgaaggggtaggaagctggcagcacctggacgctggccaccgcccctccaagacgggcctgcctggtctcaggcatggggacagcccagccctccccagatcccctgaggcaggcgtatcggtacttcctcaaccgcatttttaagggtgc

SEQ ID NO: 754 - DNA, 6000 bp, Homo sapiens
tttgcccagtttctccttgcttcctctcctctctagcccaccattgtggaggctttgctgggctatgaaatggtgcaggtggcctgtggggcctctcacgtgctggccctgtccactgagcgagaactatttgcctggggccgtggagacagcggtaagctccagcctttaggccccatctcacagcatcctcagccatgacttgctccccttcatacccaccttccacctcacagcacattctctcttccctcttttctctcaaattctcttcattcattcaacaaacctttattttacaccgactatgtgcacaccctgtgctgggtgctgagatgagatggagatgtggcttccttcaggtgtttatgaggtaatgaaggaaatttcattcatccacctagttttttattttattttgagatggagtctcgctctgttacccaggctagagtgcagtggcgtgatctcagctcactgcaacctccaccaccgggttcaagcgaatctcctgcctcagcctcccaagtagctggcattacaggcacccgccaccgcgcccagcaaatttttgtatttttagtagagacagggtttcaccatcttggccaggctggtctcgaactcctgacctcgtgatccacatgcctcagcctcccaaagtgctgggattacaggcgtgagccaccacgcctggcccatccactaattttttttattgaggtcctctttgggtcaggcatcaggctggccactgaaactagagatgacactgatgggttcttgtcttcctggaggactcagtctagtgggagaaagatgacattgccagcatgccagagaacagatagcatcagggctacaccccagtgcagaggcgtggaattcagtgaacagtaatgtcaactggaggagagagatgtcatttgaacagggctttaaaggaggaggattttgagccggcgtggtggctcacgcctgtaatcccagcactttgggaggccgaggcaggtggatcacaaggtcaggagttcaagaccagcctggccaacatggtaaaaccccgtctctactaaaaataaaaaaattagctgggcatggtggtgcatgcctgtaatcccggctactcaggaggctgaggcaggagaatcgcttgaacccaggaggcagaggttgcagtgagtgaagatcatacccttgtactccagccttggcgacagagtgagactcagtctcgaaaaataaaaataaaaaataaagaaggaggattttaaccagcagaggggcctaggaaaggcatttgggactgagagaacagagaactcatgctgttccctcccctcagtgggccctcctcattcgggcatcacccccactaaagctcaaattaactccttctgggtttcttcttgtaggcagactggggctaggcaccagggagtcccacagctgcccccagcaggtgcccatgcccccaggacaggaagctcagcgagttgtatgtggtatcgattcctccatgatcctcactgtgcctggccaagccctagcctgtgggagcaacaggtgaatagatcatcaggatgactaacctgcccctggctctccttggctgcaagtgctccgtccatcattgcctacctttcaccaaagaccagaattgagggggttgagggtgctattggttcaacccagggtgggatctgtctcctggtgcaccagctcctgcccaaactgtctgtcagttggatttggcttctggctctgccctcaggttcaacaagctgggcctggaccacctctccctgggggaggagcctgtcccccaccagcaagtggaggaggccctgagcttcacactactaggctctgcacccctggaccaggagcctctgctgagtatagacctgggcactgctcactcagctgctgtgactggtgaggaggacttgggctctggaggtcagagggggactcacggtctccttggtaccctgttgaagcacccctttccttcctctcccccatagcctcgggtgattgctacacttttggcagcaatcagcacggacagttgggcaccaatactcgccgaggcagtcgggcaccctgtaaggtccaaggccttgagggcatcaagatggcaatggtagcctgtggggatgccttcactgtagctattggggcaggtgaggactgagcatggtgggggcagacagtgccatgagcagtggggggtgggggttgctattcagggccactggactctggagcctcccaggggccatcctggcaatgtgggaggggagatcctgctcgggctgtgcccacttcccacttccctcctggggattcttcctggcagagagcgaagtgtactcttggggcaaaggggcgcgaggtcgattgggaaggagggatgaggatgccggactccctcggccagtgcagttggatgagacacacccttacacggtgacttccgtgtcctgttgccatggaaacaccctcctggctgttcgatgtgagttgtaacttttcccacttcaccacacagcccagctggcccctgtccacactcccatccccagtgttcacagatggccacatcaccaaaagcatctttagcccccagataaaaaaagcagaagctgcggttgaaaagcttcaagcttcctgcctggggtggccaaggctggtgcttcttgggcctcatggaagggctgcctccactgctccccagggctcacatgcattctttctcctactgctgagtcccgttgatgctgaaactctctttctggcctaacagggtccagaatccagggcccagtgggagtgggaggtgggtgatgatttctggaggcactgccctcagaagctgcaagggtttctcttcggtaccctccagcggtcacagatgagccggtccccccctgaggcacccggattcacctctggaccaccctgatattgcttctcctctgaatgctctgaaaagtgcaggtgcccaaggcatgacttgcagctgtctcctggattgtgtcatcatggggtatcagggctggcaaaacccctgctctgcttttggccttggatatggaaacctcaaccactttgttctcctaccacctctttgcccttcctaccccttcctcccttcagtcagtgtccccagggtccagcctggctagagttagaaggcagacctagcctttggaagcagggtggcctccagagccttgccataaaaaggctgaaggcagccgggcgcagtggctcacgcctgtaatcccagcactttgggaggctgaggcgggcggatcacgaggtcaggagatcgagaccatcctggctaacgtggtgaaaccccatctctactaaaaatacaaaaaaattagctgggcgtggtggcacgcgcctgtagtcccagctgctcaggaggctgaggcaggagaatggcgtaaacccctccagcctgggcgacagaaccagactccgtctcaaaaaaaaaaaaaaaacaaaaaaggctgaaggcagctgtagctccacacagaccctaccctttcccctagcccagttagaaaataagtctgggccggcggcggtggctcacacctgcataggcagtgctttggccaggaggatcccttgatcccttgtggccaggagttgggagaccagcctggggaccatagcgagaccgctgtctccaccaaaaaaaaaaaaaaagaagaaaataaggctgggtgcggtggctcacgcctgtaattccagcactttgggaggccaaggcgggcggatcacttgaggtcagtagactgaggccagcctggccaacatggtgaaaccccgtctctactaaaaatacaaaaattaaccaggcatggtgacgggcgcctgtaatcccagctactctggaggctaaggcaagagaatcccttgaacccgggaggtgaagtttgcagtgagccgagatcgcaccactgcactccagcctggatgacagagcaagtctccctctcaaaaaaaaaaaaaaaaaaaaaaaaaaaaaagtatttggtgcttaccgggactctatctccatactttggagcagggcaagccagggcctgcctggactggccattaggcctgcctagcttctgcatagcccggggctgggcggtccccgggagtgctgccacctcccctacactttcatcctgaggcaggatttgctagacgtcggcttgcctctcttccccagcaggagggcaggagtcactaagtgctgcagaaaagatccgcgctggagattgcccgtcccccccatgcctttccccagaaacagttgagagaatgggtagctggtgggaccagaccggtttcccagaggacaggaaggccaataaaaatatcagctgcctgcctggagtgtggtgtcttcaagggtgggggtggcgaccaggcaccccaggactgggctgggcccgacctcggtggcagggctgcggccaagggaggaatgtgggcgcagccggaggctggggccgaggttcctctggcccagcgcccagtccagcctccccgccccagctgggctccccggagctggttgccaggcttcggctgcctagcacctggaagctggggccacggttcctgggctgctcacggccccggaggccgagctgttgcctctggagaagaaaacctttgtggcgcggcccgtccccttttccgacccgcacttccccggggcccgcgggctctggggagaagcggagccacgatctctgtcccccaggggaaagaaaagcccatgatcccgtgggtgggcgagactggcggtcaccagacccaaaaaccatgcactcgggggtgggcggggccgcgagggcgcgcattaggaccgcgcggccgcggtccgccctctcttccggagggcgggcttcacagccgagccctggccgcgaccgccagtcggcgccgcccggagccgggagcgccgctccagcgaggcgcgggctgtggggccgccgcgtgcctggccccgctcgcccgtgccggccgctcgcccgccatgcctggcttcgactacaagttcctggagaagcccaagcgacggctgctgtgcccactgtgcgggaagcccatgcgcgagcctgtgcaggtttccacctgcggccaccgtttctgcgatacctgcctgcaggagttcctcaggtgctggccggggagcaggggacagcgggggcggggcggggcggggggcgccgcctggggagggtctcgggcccggggcaaggcgggcctttgtctgcgctgcgaccctgtgacctcaggggcgccccgtgacgtcacggggagggatgacgtcaagccccgagggaggccccccccgcaggaatccgaggggtccgggcgggtcccaactgcccggcccggggcggaagacctcggcgccttctcgtggggtcaggaggggaagaggcccttccccgtcacctgagagccggcgcggcctcagccttgaactttgaatcctgggggaagaggacaaaacccgctcccgcgtggcagtttgagcctccggagctttcccccatctaacctcttctgattcttcgaacgttcagagaacggtagctattgttctcccatttcacagatcatgaaacgagattcaaagaaaggctgcgacttgcccagggtcacatagttacttaaaggcttaactaggatttaaacccggactgcttatgatcacacaatggaggaaggactgaatcctcccccgaagaaggacccctctaggcggctcccctctctcccgggggctggagtaaggcgggtggtccataagtcatgaagaagggggtcgcactcgtgttgttactgaactcccgctgccctctcaggacgcaggttagcccttggctcttgggcatccatcaagtttctgggcgccctgtatgtcttgaatctcctgctcacgcagggaacccctcaggcccg

SEQ ID NO: 755 - DNA, 6000 bp, Homo sapiens
tgcccccacaaagctaccttcctctctggcatagatctcaagcctaggagtacaaggctcccagggctacagcccacacagcgccacaccctacagcagacccaggagatgcctgactccctccccagccctcccaccaaaggcccacacatgggcgtcaccttggttctactcatcttgtaaagttctaatgaatagaaattagcaactgctgagtgacagcctccccctggctctcctgcctcccccagctcttctccctgtggggagggagatctagcagttaggccctttatgcccacacccccaccatggaagaagggcagagcctgactcattggaatcccattgttgccagtttctctggtgcgtggtgacattttagatcaccctgcttatgtgaagctgtttttggcatgctgccctcccagggcaagcttgctgcttcccaggaggtatgtcccccgagtgcagcccctggggcacagacatttgtctcccagatgcatgaactaacacacctgtcgcatgcttgtgctgtggagcggctggacacctaggctgactttgaatggattataccaaacggactgatgtaagaccttttaaggaatggagcaagtggaatggctcagccctgctctgtcacttcccccatgcagcagatggttactgggtgctctgggaggaacaggaagcatctctgttgtaccaaggaaccagtgttggctccatagtaagacaagagtcagccgagcatggttattcacacctgtaatcccagcactttgggaggctgaggcagacagatcacctgaggttaggagttgagaccagcctggccaagatggtgaaaccccgtctctactaaaaatacaaaaattagctgggcgtggtggcgcatgcctatagtcccagctacttgggaggcagaggcaggagaatcgcttgaacccgggaggctcggaggttgcaatgaaccgagatcgcaccactgcactccagcctgggctacagagcgagactccatctcaaaaaatatatatatatatgagtcaatatttgatcaggcatctcagccttcctcttagcagccctgctaagtgccccacacccctagggcaggaagtcagctgatggacctgggagaggggtttggaaagcaaagagggccaggccttgttgcacactgcgcctctacccccagatggacatgggcctaaagctgggccatcccacactgactggcaactggcagatttcagaccccaatgccctcagcccaccatcacccttgaccccacaaccagcaataacaaaaagaccaaaagcctgtttcttccaccagccaccagcgcagttcctcttttccaccaggaaagctggagtagtcctgacgccatatataccacccgctccaaggaggattggattcactgttggtagagtggccatcaagccagaacctagccaaccaacacggagccagagggagaaggccaggggagggaggacctcagtggtgctcagcatcaactggctttggggtgggggcatgggatggagcagtcacttagcttcccatctggtgatgaggaccagcaagaatttgcaacaggaacgcagcttccatagcaaagtcaaggggaggggagctgccgccctgggcttgcctggcaggaattagcttatgtaccaaattgtttgtgacagtgctgagcaggagacgctggcttgtgaggaggaaggcttttttaaacaatttggttaaaatgttcaaattgccagctctgactcttgccctggagaggagggcagcggcctgctgttgactccctgatggctggagcagtggaagccactaagaatggctaaagatcacccaagctacgggcaagggcaatctcgtgggtccgcagcccaaggcagagagagacatggagtttaccacctccccggcagctcctgccactgcccagcgtcttgatgaaacagtatggaaacacggctgtcatttatccaggtgtctgcctagcaggtacaggaatgtgggcttggggactggagcccccaccttaaaaagaggtgaggcaatggaaaggaccagaggggccctgattcagcaatttacagtgccttggagctcgccagcagcacctcatttgcatctggattccagccctggcatctgcctcgccccgctctgctcacaaagtaaccccactgtctttccacaaagccaggcactccttagcctaacggcagatcctagccctgagtgcccagaaattctatgtaaagaatgagaaccaaaccaggctcccactaatttagaattcaaacaaccccaaagctaaaataaccccaatttttttctatattgcatagtcatcagtgagctttataattttgtcctagaaacccccccagagtccctaagtgcctttggcctatcaaagtaagactcatttatgttcagtctagtttgtgttaaatgtgttttgtgctatcctgattcctttaaaaatggtaattcattcatgagaaatacgataactattaaccagactgccccattcctgaaccattttgcataattgaacatgtattctatcagcctcttcctttcccccagggatagagaccgacctttctttacataacccctgggcacttgcccaagccagcaggagaattcaggtttggtcctttttttttttttttttttttaatctcaggtcaaccaatcgagtggcggggtgaagtcgtccaaagtctttgaggtctaagagtcccagattcaagtttacatactggctgtgtggccttggggaagatcctttcatctctttggactggcttcctcgtaatatttcatagggttattgtgaagagtaagatagcctatctcacatgcctaggccgtgtcttacacataggagtactcagtgaccaaatcttgccctctgcatctctcactgccaccttgggaaaagctaagaaggtggttcttgccgcagaacgctgactcctcctattttggtttggggatagaactttaaaagggctagtaaacaaaggtcccttttcagcttaagtcagaattataggcagcagggaacatggaactcctgcttgcccaagttggaactctaggatctggaggcagggctgcagctccagggaccacgccgagtgtggggcatcagtaggagaggagccacactgggctgtgttttctccaatggtgttgaaacgagagtgcacttgaactgacggaggcagtggaggcaggaggagtacgggaaaggtggccccaaggctttgggagaaagaaaagagaaggtgaatggagctgtgagatgaggtcccctcttccctgttcagtgctgtgatcctgctccatcagggggaagaggcctcttcacatctgggatagctggaggcctccagagccagaggcctgatgaagactctgagttatgttattgtaccaagaaaggggcttttccccttgggccatcctaaaacaggtcttcccagcctctccttcctgagcctccatttcttgttagtagatgatggcatggtcaaagctgaaaattctcacaggcctcagggagccatcattaggggaaagggttcagatctgggagtatttgacagggaaagcgcctcctcctcagaaggaatctttttaggaatcactcgcctaagagagcccctaccctagacaagttgtactcaccagacctccagtctccaagccaatgtggttcacggactgcctgcttcagagccttctggggaaggactgaaaatgcagaattactgggttgtacccaaaagccagcgattcaaggtttctaagaggaagggcccaggaacctgcatcagattcttatgcacgcttgagtccgagactcactgctctcagcatccctttcctcggagctttaaaagcttccagagtctccttcctcttagcattttgagtatcttctaagtaagccaaggaaggtttttacttaacaatgtttggcttttggggagtgctctgacgcagctttgtgggcctccagaaccaaaggcgtgcgtgcttaatggtaggagtgtcatttgtccctaaccttattcctcggtccctgcagccccaccagctactggaagtcccttgcccctgatcggtcagatgatgagcacgaccctctcgacaacacctccagaccgcgatactcccacagttatctgagtgacagcgacacagaggccaagctgacggagactaacgcatagcccaggggagtggttggcagccctctcaccccagggcctgtggctgcctgggcacctctcccaggaagtggtggggcaccggtctcccccacccgactgctgatctgcatgggaaacaccctgaccttcttctgtcaggggcactttccaggctatgggtgtctgatgtctccacgtggaagaggtgggggaaagaggagtttctgaagagaactttttgctcctctgtctcaaaatgccagactcttggcttctaccctgtgtcaccgtgggcagtggcaggtggcctggcactgcatggagccagcacgttgacctccctctcagctccctgctcagggacggtggacaggttgcctactgggacactctaggttgctgggtccatggggaggattgggggaggagaagcagtgccttccctctcgtgtggggtgggggctctctcttcttggtgcctgctgtctttctactttttaatttaaatacccaacctctccatcacagctgcatccctgagagtgggagggggctgtagtggtagctggggctcccaagaacgactcgggaatgtcatctccatcttcacccttcagagagcagtcctttctctgtgcagctggagacgctggtgaggagagccgggtccaggttcttaagaatgaggtgcggaggggctctccggtgctgctgggctgggttgagcaagcctacgcagacaagtgtgtgtgtggaccatccgcacctccagcccccaccccaccctctttgtctcagcgtgttatgtgcaatgacctatttaaggtaaacccattccaactacagcagttcagggctgatccaagcactgcctccctcctgctctgtccaggtggtctggaccataaactcaacttgagagggaaggcttggggttgaggacttgtgatcagaaaaactgaagatggaagttttggccggtgctcattagacatgagtcctcactctgtgtcctgagcccgtgtcattcttccaacctccctgcccccacacacttatcccagacacaacaccatgtggtctggaggtcccagcccccaccctaaaaaggttatccctgagaactccaccagacttgggagcccaagtgcagtgcctggtgctgctcccatctgccgccccccttctctcctgcaattggtttgtactcactgggctgtgctctcccctgtttacccgatgtatggaaataaaggcccttttcctcctggctgcgccagttttcctgcctgttccttcaggctcaggcaaagtctggattggtcctgggggtggtgggcagaggcaggattctgatggggaccgtgagggcatcaccctggtctctggcctgctccccaaagtgtcagaccagtgccacttaaagagcctaggcagctcattttggggcaggcagaggtagtggaatgaggggattggccaaggaagacacaagccccaccttttatgtgaagagcctagggactgtgattcaggttagcaagggtggcagagactccaagcctcatcctccctagcctccacaagggaatgttgaggtccctctgattgttaaatctcaccaattacagagattctcttctcttctcttctcttcctccttccgtccctccctctctccctctctctctctctttctttctttcattctctttctttttggat

SEQ ID NO: 756 - DNA, 6000 bp, Homo sapiens
ctgagtttctcgctgtcgggctcgcccggttcccgccgcagcacctcccggctcgacagcctctccaggacactcagcccttccctgagccgggcctctggcctaggccgggagagccctgattctcgcctgtccctgggccggagctgcctagaggagtgggatgatggagccagtatggccctgagcgaggcctgctcgcagtacagccacccgtcgctggcccgcagtctgtcggtgccaccccggccacgcagctctgcctcggcagtggatgagcctcccagctccagcgtccgctccgtcagccgtcactcctacctggacccagacctggaggctgccgtcaacgaggtcttgagctacaagcctgttccattccagcggagcagcctggagcccgactccgaggaggatgacaggaagagcatccaaagtgcccggagcgcccaactggaccccccggagcgagctgccagcatccgccgctccgcctctgctgctgatgtgtcccggtcccgcagcggccggaagagccggagccggcgaaggagcggaaggagcagctccagctccagctccagctccggctccgaagcttcctcagagcacaagaggcggaagaaggggcgctctcggaagagcaagaagtccaagtcgagaagaaagagaacggagacggagtctgagtcctcctcgtcgtcatccagcggctcgaccgtctccagccacagctgctccagtgtgaagaagggcccagctgcagaaagtgaagaaactgggcagacgcaccggccgtcgaggaaggaggaaaagaagcgcaagaaagaggtggacagcctgatgatgcggtacctgtaccggcccgagagcgactagtgcagtaggtggcacctggcctgggttcagcatggtgtgtcccacccggtgtgaactaacgtcctccctgcccctcaggccgccaccttagggcccacccgcactcctctcgggcatgcctggcctcggagagcctcctggctgccttgatgagcaggggccacccaagctggtcagtcatcctgagccctgagccctgtcagctgaactcgctggtgatgtcatagctcccacttacaagtcctgaccctgaaccagggactgtccttcataccttccacactttagtcacttatccctcacagtaactccgtaacaaagtctgattagctctgtttcatagaagatgaagctgaggcttggagaggttaagtcacttgccatgtggtcacgcacagctgggaagggttgttgccagggtctgaatggggtctgcccaactccagcactcttgcccttacccactcctccaggcagccagtgcagagcacatgggcaacatgtttactgtgtgtgcccagcagcacccattcaggagctttcattcatggccccaacaggctggggccaggaaaggtcccaagctataccccagctgtggttggtgcacatcagtggccctaagctattattgggccttttgcttagctctccctcccctaccctgcccccacaaagctaccttcctctctggcatagatctcaagcctaggagtacaaggctcccagggctacagcccacacagcgccacaccctacagcagacccaggagatgcctgactccctccccagccctcccaccaaaggcccacacatgggcgtcaccttggttctactcatcttgtaaagttctaatgaatagaaattagcaactgctgagtgacagcctccccctggctctcctgcctcccccagctcttctccctgtggggagggagatctagcagttaggccctttatgcccacacccccaccatggaagaagggcagagcctgactcattggaatcccattgttgccagtttctctggtgcgtggtgacattttagatcaccctgcttatgtgaagctgtttttggcatgctgccctcccagggcaagcttgctgcttcccaggaggtatgtcccccgagtgcagcccctggggcacagacatttgtctcccagatgcatgaactaacacacctgtcgcatgcttgtgctgtggagcggctggacacctaggctgactttgaatggattataccaaacggactgatgtaagaccttttaaggaatggagcaagtggaatggctcagccctgctctgtcacttcccccatgcagcagatggttactgggtgctctgggaggaacaggaagcatctctgttgtaccaaggaaccagtgttggctccatagtaagacaagagtcagccgagcatggttattcacacctgtaatcccagcactttgggaggctgaggcagacagatcacctgaggttaggagttgagaccagcctggccaagatggtgaaaccccgtctctactaaaaatacaaaaattagctgggcgtggtggcgcatgcctatagtcccagctacttgggaggcagaggcaggagaatcgcttgaacccgggaggctcggaggttgcaatgaaccgagatcgcaccactgcactccagcctgggctacagagcgagactccatctcaaaaaatatatatatatatgagtcaatatttgatcaggcatctcagccttcctcttagcagccctgctaagtgccccacacccctagggcaggaagtcagctgatggacctgggagaggggtttggaaagcaaagagggccaggccttgttgcacactgcgcctctacccccagatggacatgggcctaaagctgggccatcccacactgactggcaactggcagatttcagaccccaatgccctcagcccaccatcacccttgaccccacaaccagcaataacaaaaagaccaaaagcctgtttcttccaccagccaccagcgcagttcctcttttccaccaggaaagctggagtagtcctgacgccatatataccacccgctccaaggaggattggattcactgttggtagagtggccatcaagccagaacctagccaaccaacacggagccagagggagaaggccaggggagggaggacctcagtggtgctcagcatcaactggctttggggtgggggcatgggatggagcagtcacttagcttcccatctggtgatgaggaccagcaagaatttgcaacaggaacgcagcttccatagcaaagtcaaggggaggggagctgccgccctgggcttgcctggcaggaattagcttatgtaccaaattgtttgtgacagtgctgagcaggagacgctggcttgtgaggaggaaggcttttttaaacaatttggttaaaatgttcaaattgccagctctgactcttgccctggagaggagggcagcggcctgctgttgactccctgatggctggagcagtggaagccactaagaatggctaaagatcacccaagctacgggcaagggcaatctcgtgggtccgcagcccaaggcagagagagacatggagtttaccacctccccggcagctcctgccactgcccagcgtcttgatgaaacagtatggaaacacggctgtcatttatccaggtgtctgcctagcaggtacaggaatgtgggcttggggactggagcccccaccttaaaaagaggtgaggcaatggaaaggaccagaggggccctgattcagcaatttacagtgccttggagctcgccagcagcacctcatttgcatctggattccagccctggcatctgcctcgccccgctctgctcacaaagtaaccccactgtctttccacaaagccaggcactccttagcctaacggcagatcctagccctgagtgcccagaaattctatgtaaagaatgagaaccaaaccaggctcccactaatttagaattcaaacaaccccaaagctaaaataaccccaatttttttctatattgcatagtcatcagtgagctttataattttgtcctagaaacccccccagagtccctaagtgcctttggcctatcaaagtaagactcatttatgttcagtctagtttgtgttaaatgtgttttgtgctatcctgattcctttaaaaatggtaattcattcatgagaaatacgataactattaaccagactgccccattcctgaaccattttgcataattgaacatgtattctatcagcctcttcctttcccccagggatagagaccgacctttctttacataacccctgggcacttgcccaagccagcaggagaattcaggtttggtcctttttttttttttttttttttaatctcaggtcaaccaatcgagtggcggggtgaagtcgtccaaagtctttgaggtctaagagtcccagattcaagtttacatactggctgtgtggccttggggaagatcctttcatctctttggactggcttcctcgtaatatttcatagggttattgtgaagagtaagatagcctatctcacatgcctaggccgtgtcttacacataggagtactcagtgaccaaatcttgccctctgcatctctcactgccaccttgggaaaagctaagaaggtggttcttgccgcagaacgctgactcctcctattttggtttggggatagaactttaaaagggctagtaaacaaaggtcccttttcagcttaagtcagaattataggcagcagggaacatggaactcctgcttgcccaagttggaactctaggatctggaggcagggctgcagctccagggaccacgccgagtgtggggcatcagtaggagaggagccacactgggctgtgttttctccaatggtgttgaaacgagagtgcacttgaactgacggaggcagtggaggcaggaggagtacgggaaaggtggccccaaggctttgggagaaagaaaagagaaggtgaatggagctgtgagatgaggtcccctcttccctgttcagtgctgtgatcctgctccatcagggggaagaggcctcttcacatctgggatagctggaggcctccagagccagaggcctgatgaagactctgagttatgttattgtaccaagaaaggggcttttccccttgggccatcctaaaacaggtcttcccagcctctccttcctgagcctccatttcttgttagtagatgatggcatggtcaaagctgaaaattctcacaggcctcagggagccatcattaggggaaagggttcagatctgggagtatttgacagggaaagcgcctcctcctcagaaggaatctttttaggaatcactcgcctaagagagcccctaccctagacaagttgtactcaccagacctccagtctccaagccaatgtggttcacggactgcctgcttcagagccttctggggaaggactgaaaatgcagaattactgggttgtacccaaaagccagcgattcaaggtttctaagaggaagggcccaggaacctgcatcagattcttatgcacgcttgagtccgagactcactgctctcagcatccctttcctcggagctttaaaagcttccagagtctccttcctcttagcattttgagtatcttctaagtaagccaaggaaggtttttacttaacaatgtttggcttttggggagtgctctgacgcagctttgtgggcctccagaaccaaaggcgtgcgtgcttaatggtaggagtgtcatttgtccctaaccttattcctcggtccctgcagccccaccagctactggaagtcccttgcccctgatcggtcagatgatgagcacgaccctctcgacaacacctccagaccgcgatactcccacagttatctgagtgacagcgacacagaggccaagctgacggagactaacgcatagcccaggggagtggttggcagccctctcaccccagggcctgtggctgcctgggcacctctcccaggaagtggtggggcaccggtctcccccacccgactgctgatctgcatgggaaacaccctgaccttcttctgtcaggggcactttccaggctatgggt

SEQ ID NO: 757 - DNA, 6000 bp, Homo sapiens
tgcctgtcatcccgtgccaggccccatcaggaagtgcatcaaccagggcctgtgcaggaacctctatgtccctgccctcagcccccagctctgcctctccctcacttgcctcagctacacaaacacactctcctgactaatgtcgttaaactaccgtgccacttccatctcattatggtaatgatacaaaggaggggggtggccctcacaggagaaaatccagtctaaattaatttccggggctgggaatgaggatgggacgtcttcattagcagtactgaggaacccacacaccctaggaacagcagggcgccctggggagcgggaacagtgcccatttctcctctgcaggggaagggcttctcagcagaggcactggttgcctttgtgaaggggtatccccacacccacaacactgggagtgaggatggcagaacagaacctttccagtgaccctgggttacccccggcctcctggaccaaccaccatctccccagctggggaaaataggaaggttttctattcctcccacctgacaccatgaccaccacttccctcattctcatctctgcccccaccctacccctttacccaaaggctggcacccttagctcgaccccccttctgagcacccgatgacattgccagctcggcctagttactgtgctgccctgctccccgctgggcaacttattaggtttcagctgcccggagttttcttactttttttgatgtggagttggggtaaggggagcattcaacttccacaggaacctgattagctattcagggaaggtgttaagaggaatttgagcaatttgctccatatttagtgggaaatggaaggctggcaagtggaggagtgaagaacgaggccccctgtgtgcccattgaggcatgtggccagctgggcacagtgggaatgccagctctgaacccagtatggggtgtccgggtggtgtcctgccggcactgctggggtgcgtggtcctggccaaaggctggtgcccagaggcaggggcaaggagctagctattgcccttacagttgtcgaaccaaactgtggaaagtgagttagtggaagcagggtgctcatctctatccttttcccaccccaccctcacctgggtccctcattctttgatgtgttgaaatggaaaatgtagagacttaactcctgagggggcctgttaagcagtctgtgggtccctcttaggcctacttggtgaaagggctcacctgagtgctccctatcccaacccagttgctcaatagggcctcagtggcctgacctgccacctctaaatgtcaccgctaccttacaactggccccacgttagggctgcatgggtccccccacccctgcttgagtcctgtccatggcaccacctcctgacagtgtctgtgtgggggaccctggctcttccccatctgatggagccgccacactccctcgcaggtttgacagtgagctctcgcaggcgcatgaggaggcccagcgggagaagctgcagcgggagaagctgcagcgggagaaggacatgctcctcgctgaggctttcagcctgaagcagcaactagaggtgggtagggccacccaccatctgtgccctgtccccctcacaacctggggtcagccctgcaccagcctcatctcttttgctccaggaaaaagacatggacattgcagggttcacccagaaggttgtgtctctagaggcagagctccaggacatttcttcccaagagtccaaggatgaggcttctctggccaaggtcaagaaacagctccgggacctggaggccaaagtcaaggatcaggaagaagagctggatgagcaggcagggaccatccagatgctggaacaggtacaggagggcttggccaagggagaggtgaggtgcagcgaggccgccaccatccccacagccagcctcaggcatgggccagaggatcctgcctccattcattcgcgtattcactcactcacctactcacaaaatgtggagtgagcacctgatctgtgccagccacagtgtgaagacgcgctcgtggaactttccacaaaaacaaatctgatggagctctagtagggaggggctcaggatgcatggcagctgagggccacaggcccacccagcctgctacccagccaccaagtcagttcagggagctagagcctgcaggcagacggagaagctgcaggactgtccccaccccagctgcctctctgtgggcctatgccagacctctagtaagggagttcagctgctctggagaagctgctgccacgggagcaaggtgccagcaaagggaactggctggtggacgttctcggcccctgagcctagggagagccatgcacaggtgggaagggggtggccacagctggggagggaacccagaccctactccaaccacctccaggccaagctgcgtctggagatggagatggagcggatgagacagacccattctaaggagatggagagtcgggatgaggaggtggaggaggcccggcagtcgtgtcagaagaaggtaaggtatctgagtacttacctgtccagcgtaaacacctgttcccatcaccgctttaaagtaaggggctttccacctccctacctcagccacatcgtcttccattgtcattctgggccaggaagcgcctctcgggatcctagcattggcaggatgtattggctcagagtctgtagagaagcttgggcccctgaggaactatcgctccctgctttctgtgccaggggcagccccctgtgcccctgctgtgctgcgctgcactggtgctgcctgcagtcagccagcctggccgggcaggtctccaccatgcggcaaggtctctcctactctgtcttggctagccaccgcatgtggcctgccatccctcctcaccctcccaggctgctttgaaaccctagaaacctggaatttaggttctgacccctccaccaacatcattgtgctcaggcctgccccactgttttcctggagtggggaacccagaatggaaggggcctgcttcgcaccaggcactaaagggacggacgggtctctgtccccatggtactccagttaaaacagatggaggtgcagctagaggaagagtatgaggacaagcagaaggttctgcgagagaagcgggagctggagggcaagctcgccaccctcagcgaccaggtcaggggatgctccacccaccaagcctggccggctccctgcccatgcggcctgaggagtggggatcctagggatggggagccacgaacagagctgtcgggggtgggggtgctgcaaagagcccatcgtcatcccttgtgggatgggggcatcaccatacattggcacacccagccctttatcgctggttggcatgaccctggctcttccagcatccttatggggacactgataatgaggacgtggtgaggagggagcttggggaagataggaggaagccctgtgcagagcccagaaccccaactgctggtgcccacccaggtgaaccggcgggactttgagtcagagaagcggctgcggaaggacctgaagcgcaccaaggccctgctggcagatgcccagctcatgctggaccacctgaagaacagtgctcccagcaagcgagagattgcccagctcaagaaccaggtatccacagagagcacacggctgatccaggcacaacagagcttacctttccattctctttctctctctcgctcctctcagtggttcttgagtccttgggaaggaaagtgacaggaaagaggggagagccacgtgtagcagctagactccccaggctctgcgtgtgccttactgtctcaccgcccagcctgggatggtgtggatggggcctggtgcccaccagccatgtcacgggaggagatccccacgcgtgcaccaccacacagccatggccctggggtctgaagtgaatggaggaggagaaggagggcatccgagctccctctttcctgtacagccctcctgcccccaaggaatggctgacatctctccctggggcgggggtggtctgtgtccagctggaggagtcagagttcacctgtgcggcagccgtgaaagcacggaaagcaatggaggtggagatcgaagacctgcacctgcagattgatgacatcgccaaagccaagacagcggtgaggggccaaggtgcccggggcagagctcggggggctgaggcagaatagagctgcctctgtggctcccttcaccctagacaggtccctccacgtcaggacttgtgacaggtcctttcacgccaggacttgctgcaggaagagcgggcctcccctcctctgcgtctctccacactgagcagaggcctcggggaggagcgggcagaagagggagccagcaagggcccatctccctgtttaaccacctgcctacgggagcttggccgcaggccccaacaccataaataaaggcagctaatgtggctgagggatgtaaacaggtgcctagagattagcagaagcacagataagaggacaggatggcttggcttccttccccttccccctgcccagcccactgacaagcccaagcggcagctaattagagctcttatttaatgcctcccttttaatttcccacctctcccacggcccatccatcggcagagaattcattactgggatgcggccagtacaggcagctccttgagcatcactggtcctgggacccaccccagtgggcaggccccttgggcagggaatggggcaggggaggaggctgggctgggctggtggcttcatggcccctgagctagtcacctagctgctgagagatgccaatctcacgggcttgatttatccccatgacatttgtgctcctcagcagttctcaggtgagtaattcaaattccttaattgtgttaaaaaaggttgttataaaattaccattttatttaaatctgagttaataaatttcttggcggaggcttccccagctccccacagcccagtaacaagatggatggggcagagaaggagccaacacagtcattttggtttggaattacaggctaatagattcattcatttcctgaagctgctgttggatctctcttcccctcccccaaggaggggactggctgtcggggctggatgcccagggagtgggcagtcccagggaaaatgagagtctaagccaggagaccttcgcagacttgaggggtccttccctggggcctgaagggggcagagtgcacgcaggccagggcctggactgatagtgccaggatgatgggtcatttgttctgggcagaccttttctgccttctcattagcctcaaaggagctgccaggaagcagctgtcattcagctcagaggcccagggtctgcctgtactgcacacagccctttccctcatctccctggtccagagcgggacaggcagctccttgagcatcactagtcctgggacccaccccagcaggcaggctcagcccattatcatcttctctacaatgcccctgccattggaggcagctggagcccacaggcacactgggcctgaggccctctgatctgtctttgcctctctccagctggaggagcagctgagccgccttcagcgtgagaagaatgagatccagaaccggctggaggaagatcaggaagacatgaacgaattgatgaagaagcacaaggctgccgtggctcaggtacccctgccaggagtgcccgtcacactctgcaccgtcaccatccttgtggtcctcctcatgggtcccccgcacaaccgcttgttttgggaggtgatggagtgggaacctcggtcccctggtgttccagctgggctgggctggttgaatgcttatgggggatcctgcttctgatgctctcattcctttcccaggcttcccgggacctggctcagataaatgatctccaagctcagctagaagaagccaacaaagagaagcaggagctgcaggagaaggtgaggaccagg

SEQ ID NO: 758 - DNA, 6000 bp, Homo sapiens
cttccactcatccacgccaccaatgtgggagagcagagcagttgaagttgtcaccacacatggagatccccttgttccccactctattccagcccgtttattgtgcgtgcaccgttcagatcagttggttaaatccatatggattttcgtggaacaccttttgtgtgcctagtgctggggaacgggatgggatataaaggaagtaggaaatggtcccagctctccagggagagcaggcttaaacattcaacacgaatcgattatcattcagaacattagttatgctgtatagtcatggcacgtggacagtaaacttcaataagttcaactatatggttgtgaaagaaactatattactgtagcctaaaattataaaaataatattttgtgtgtttttactatatgctgtacatgactattatgctttcctgcagctatattataccaaatggcatactcaaaatcatgtgtactatactttgtgagcagtttaagggattttcaggagttttggactatattctatttttgccttacgtgctgactttggaatctaaccccacatagtgtgtgactccactgtatataatagagcaccatattgagtataaccaagaaccgtatgtatgtaatgtgttcaggtgtggacagtgagtgctatggtttatgataataatgatattaataatttaataactataatttgccaggccgcacatcagttgctttacatgtactgccttttctattcttataacagcctcataaggtggatatcatactattttaaggccaaaaaggtagaaactctaagaagtcaagtaactttcccttaggtcagacagcaagaaagaggctgggattcagacccaggtgtgtctggctgccaagcccacgttctttgcattgccgggtgggtcttgggtttcagggaaggcttcataagggaggcaggagttgagatgggcctggagagatggagagggtcagccaaggtagagacacattcgtaaggaatggctctggtggtgacaagggcaggcaaatgacggagagccaggctggctgggaagagggagaagagactagaaaagtgaaagtaaagtctgaggaggggccagattatagcttccagctgtccttggaggcaagctgaggggcttggggtggcctggctggctgtgggagtgtccacatggcctctggagccatcagttagactcatcaaagaaatggaccatgccctgatattgcaccaccacgctttgggcagcagagggactagctgtagttgcatgtgaagctgagtggagacaggcacactgacagacgagtgacagctgatggcctaatgaggtaggggacaaaagaattaaaaagcagacatatggccacaaagggcatctggccttcctaatataggcatatgcaaggcttcagcatggtggtgcctaagaggggctggtgcccttggagagaggctggggcattggtggggcagaagccaggctgctgtagccaggccaggaagtcaggagtcatcatggtggagatggcgtgcccttcagtacaggatggagcagaaatggattgggttcaagaaggaaagctcagagtgtgagatctttgagatgaattaggagtgttgtacttaaggaagcagggtatatatgttggttatttttaggattataaatagtatagaatttagaaaatgacttaaatcttttatcccttaaaaagggtaggctccagttacctggaaattttgcttacaatgcctcattttttcccccgcttatgatcataggtagataataatagttaaaatgtattaaggccaaatgtggtggctcatgcctgtaatcccagcactttgggaggctgaggcaggtggattgcttgagtgcaggagtttgagaccagcctgggcaacatagggaagccccatctgtgcaaaaaaaaaaaaaaaaaaaacctacatggtggcacggtggtgcatgcctgtgatcccagctactacggaggctgaggtgggaggatgggctgagcccaggagatggagatttcagggaaccaagatagtgccactgcactccagcctgggcaaaagagcttttgtttgtttgttttgttttaagtattgaaaatgaatgtgctggacaccgttctcagagctatgtatgaactaattcttttaacccatgtaataaccccatgtggtaggtgctattattttcccattttacaaatgaagaaattgaagcacagaggctgggcatggtgactcacgcctgtaatcccagcactttgggaggccaaggcgggcagatcacttgcggtcaggagttcaaggccagcctggccaaaatggtgaaaccccgtctccactaaaaatacaaaaattagctgggcgtggtggcgcctgcctgtaatcccagctacacaggagcctgaggcacaagaatcgcttgaacctgggaggcggaggttgcagtgagccgagatggagccactgtactccagccgatagagtgagtgagactctatttcaaaaaataaaatacaaatgaaaagaagttgaaacacagagagatcaagttgtgtagtttacttcatgcaagagccaagattaaaccaggccgtgtggccctggaggtcatactcctaaccatggtatgctgtgaatcattcctttcaagccgtgcttctcagactttaatgtgcctcagcatcacctggaagcctagttaaaacacagatgctgcaccccatatccagagttcttggttcagcaggtctgggttgggttcctggaatttgcatttccaacaagtccccaggggatgcccacgctgctggcctgagaacttggagaaccaaagccctttcacatacattatgtaccagtctcatactggttgggtaagagtcagtaaaggtgtaatcctcattttacagataagggaaatttaagtcacctgcctgtgttcacacagctaaatcattcattcattcactcattcatttaacaaatggacatttctgtgctaggccttatgctggccttagagtcttgcagttctcagccttggctgcatgtgagaatcacctggggagcttttatcaataaaaaatcccagtgtccagccaggcgcagtggctcacgcctgtaattccagcactctgggaggccaaggcgggcggatcacgaggtcaggagattgagaccacggtgaaaccccgtctctactaaaaatacaaaaaattagccgggcatggtggcaggcgcctgtagtcccagctactcgggaggctgaggcaggagaatggcgtgaacccgggaggcggagcttgcagtgagccgagatcacgccactgcactccagcctgggcgacagagcgagactccgtctcaaaaaaaaacaaaaacaaaaaaatcccagtgcccaggcccctgctcccagaccaattatgtcagaaactgagagggaaagggtgggctccaggcatcagtatttttttcaagttccccagtggatttcagtgagcagctgaggctggcaccattgttctaagtagccactgaagatgtgaagacctgtgacactgcacgtgcttcagaagggccagatgcttcccctggggggacatcccactccctagagagcaggacacaagcgccgtgtcctaagagtctgtgtatgtgactatatgacagtgagacttggacagcgcatggcaggtaggaggcagggctgggtttccatcctctctggcagtgcttaccaatcttttcatggagaaagtcagacaatgtatagaaccaatggcccttagagctggccaggggcaagaagcatggggtgtatgccagactggttaggaggcggttctgtatcagggcttcctagcaccacccccaccccattttttttttttcctaaagaggaagagggaggcaatgactgtttccttttttctgcagagctgacggcttctgagacttgctctccctgtcttttggccccttgacattctgttctccagctcccatttcagcgtctcagcgggtccctagtcctggtctaggcatcccatggtgctaactggagagccaggccaggatttctcttcacaagaaacactggcttttcacaggcagccatcactcattggctagacacccatgacttcctctgtctgcagggctgaggcccaccccaccctcctctctgcctgtgcagtccctggcgtctgtggaggggagagggatgtaaacaaagagagtgtaattgattctctgcatgtcccctgtgtgctgatggcagtggggcagtaagtgggcctgcccgtgtgggtctctgctcctgccagaccttacaggactgctttgcggctgctgtttgggcacagtgtgcagtgggccccgtgtgctgtcttggatgtgacgttagtggctgtcttggcctctgccgcagtaattagatggctagggtaggcctatgatttgggtgttctcaagaacactgtgttgattgaatgttcgtgcatgctggtgtgtgtgtgtgtgtgtgtatacgtgtacatgcacatgagtgcgcatgtgcttgtctcaagcttggcctgtggggccgggggctgcaggtctcaaattcctctgctatttttaggagccatatcagcccagctgtcccggagctggggtgtgtgtccataggcaagtctcaccctccctgtccttgccctaaccccctaacactgcctgccccccaccccaatggctttaccctaagagccttctccttcccttccacacacactgctgtatcaccctctccctcctggcatacctgatacccgaagtcctccgggctgctggctccaactagggctgggcagctcgggacgggaggggccggggagagggcgggaactgggcggggccacagcctgtgctattttgagctgctaacggagccagagcagcatcagagcggagtctccttgctctgggctgctccaggccaggccatgcgggtgagtgtccctctgaccccccaccccggaaatgtcccaggctcctcatgctatttcctcatttaggaaaggagggacctttttgtgatttccccagatgtggctgaagtaggtggggagaggggtggggcagccttggggctcctctccgagcttcttggtaagaagggagttactcagccccggaagcctcaaaacccctccgtggctaggagcagggcatcctgggcctgactcatgacttcaggagttttggaggggcactgtcttctgaacctcagtttcctggggttgcatccacccccaaggctgtgacacgccttccccaccaaccattagtgcttttttggccttcattccttagaacactgttttcttccaaagccccagccccacagcacccaaggtcctcggtagtcttgtctctgctttgttgctggtatagctctttcctctcttcctccttgagaggggatggtccttggagttgtcagggagcacccttctcgctgtccccaagagtagtcttagcatggccacctccatttctgtgcataggacacttgcaaggggcacagatggcgtgttggggatgctctgactggccctaagtctcttttttagtagagattactccagataagtaagttccttaaaaaagaaagtgaggagagacatagctgctcccagtccttcccgttcccctgactctacccctcccagccaccaagggtaaggttttcagttgtgtcagcagttggcagagtacgtgggctggcctggtgcggaggtgcatcaggagcctgagatgtacccgtgagtacttgtatctctctgtgctcaggactgccctgcctcagcccccaaactggcaccagggctgagttgtgtgggcagtatgcccgggggtgggggagaggtcagagagagctcctcaccctgagagatgggcgcttcctg

SEQ ID NO: 759 - DNA, 6000 bp, Homo sapiens
agctgctcttctcactcctcaagccaaataagcctcccatcatagcacctatctcatcatccaagtaatgccagcatggtgaaccctactactgtcacagctcaggtctacctgttccccatgtgatttccctggagatatgccatgtctgatctccttctgtgtcaccccaagtgcctggggctgcacttggcacttagcaggcagtttgttaaattgaatttgagttgcatgttattccaaaatgtgtatcccgcctgggtctattcctcaggaactccctaactcttactcaactctctgctttctgagcctccttgctccagccttccctggtctgtcaggttgggctgcccttgcctggagaagttcctgtttgggctgtctagggaggtagcagcatttgtctgctacacccttcttcctgcaccaccccactcagtttcttccacattctggcacaccccactccagcatggacactgcccagggaagtgtccccatttctttctttctccaaactctagacatagcacctatcttggaggcctggtatctggatgtcccttggcctctcccaggaagtataaactgtcttcttggtgggtacagcagctcacttgatatttacagcacacagtggacccagggacagactgcattccaaagagcttctgaaagtgttaatcttggcattggtgaactcctttagggagtgagtggcacttacagccatggctcccgggccctggtacgcctcttgatccactccattttgaggcagggctgtatcagaccaagctattgggagtctgtttttaccttggggagtgcattctggcagtgccatctcggacatggcaggcagtacctggtctggactgagcctggggcaccatccagcagggccctgtgtgtgcctctgcagagccaccttgggaggaggcggccagtaagacttaattgcttcctttagacagcactaccttgaacacagcctgcagagttcggtgcctgccttggacagcccctcttctatacgttcatcatgaccctggtgcctgtcctaggcagtgccactcagcccctttcggacccttttcggacagcctccagtgcccagtgcagacagaaactccaggcagggcctctctcagacacagcgagaggggcttcggagtccacagcggacggaggctgccagggcagcgcccggcccgcctggcccacgtctggcggcgcgcactggcgctgccaggcaggccgggcgtttatccccacagccgccagcagggagctccctttcggctcggcctgcgcggtcgctgggggcggcgctgagctgcgccgcgctgcgctctgctccatccctgaccgggccgaggctgctggatgccgcgtctccgcttctgctgcctgccgggcgggctccggtggccggtgagtgccggtcggcggcggcggccgctcggtggcgggcccggcttggtggggcggcggggcgggctccggccgggagggagggcgggcgggcggcggggcccgccggctcctcctcctcctcccccgtcccctggaagcagcggcccggactcccggctcccgtccctggcggcgccgtggagctcgacgcccgggggtgggggccgatcgggagcggcggggaagggggaaccaccggcccttccagccaacctggggggcgcagggaggcaggacagggtggccttcagtgtggggggatttggggcttggaggcgcccaggtggcccggagctgcggggtgggggctgcagcctcgagggtggggggacttctcctgcccccgtccaggccccacgatggagcgagcgagagagcggggcgctgaggaaggcagcggggaaggggagcacctctaccgacccttttatccctcccagcggccttcactctttcactgccgggcagactgcgggctcctctcaaaggagcagctgctagacagctggcaaaacaatggagaccccgcttccctgggccccctcctcttgggacagaagatgagagggtgaatggtggcaggctttggggattagggagtgcaggctgtgccctgagactgaatgctcacctcacctttccctgcagaggggtggggtgcgtgtgggaaggtcggacaagctgccccaggcctctggagagaccgccccgacgccccgccctgctaacctgtcatgccagttgtttcgccaatgggaaggggaggtggtaggggtggctgccccctcaccctgccccttgttagtgggggtgcgctccttggtcccaaacccggccaggagtgtgggtcatgttcctgggtgcgataaggcccgcagggacaggccaggcattggggctttgttttgggggtggagatgggggagttgccctactgcaaggcacatgtgtcttgctgattagttggaaaggttgcggccagaatgagctagaggtggggggtgggggagatggggaggaagacagccagtttgtttttgagcgggtattcattttgcctgaccactttgccaatggggcatgtgtttggcgctggcctcatagtttgtatttgtgtggggagggctgggggaatgcttcctgagagggactgtcctggctagggctttcattccctcagatggccaccccgaattaaagaattggattccctccctgcttcaccctgccaatgacttgggctagttagtgtgggttcgtcttgtcttttggagcccctggcgtgtctgtggccgagaaggcctcatcagtgcccctgtggcaagtgagctctgggaagtgtgtatgcactggggtgtgctggaagggaggggaggccacctgggtgattaagagcaagatcacctgagcaggacggtgagtacagagcccattgaatcagccgcctttcccttgtgctttggagcccttttcttgagcaggttggtgccctgttgttgtggcaacaggcctggcctaatgttccccaccctttttagttcaggggctactttctatctggagatattgaaagttgctctcctgaggtctctggcttcctgacaagcctcactggctctttgtccatggcttcccacctcctcagcttcctctctgtttttttgtgatgaagtctttccaggaaacatcctcctggtttctggatttgacatgacgggttatatatagcctcgggtggaggtgtgcttgtccattttgggttgaggacatgggggttgtggcctcaattccaggaaaaccatggctttgggggcagctattgtgttgagggattaggggaatgagaagggttgtaggtgggggtggagggtgggcatgggaggggccacaggctggcggtcacttcctttgggagctttgaactttgaacagttgatgacctggtgcctggtagctctgagtgtctagtttgtttactctctcctggcctggcccaggtgccagagtgtgtgcctgagggcttcctcctgcgccccagactttcctcatgtgggttatgcccttcctgactcccacctggtctctcagcctcactcctgggctgtctgggtagccagccagttccctggaggccccctcactggccctggtagtggctattcattgaggactgcatgtgtcttcagaaactgggcctgaaaactctgggtcccccagaggcaggtacctaaaggtggactgggtggggcagaactggggctcatgtgaaagggagaatccaccctgctgaggtggagctgggagttgttggaactcaggaagccttcatctggacttgctgtgtcacaggtcttcagggcagcagggctgttcttaatccttcaaaccagaggtctctcctcagccagatcctctcacctggggtggacgccacaggcaggagccagagcatccacgtgagctgggttttgttggtggcctggggtcccaggcctgagtgtggtgggaaaactgaggggctctggctggttgtagtttaaaggtttggggcagtaggagggcccagcccactgtctgctgtaattgacaggttcccacaggacttgggattggtagggcagcttgatggagtttaagttctgctttgggtcagacccccgggtgctttaagatctgcacaccccaccccatcaccatttcttccccctagcattttccaaggtggcctgaattagaggagttggggaggtgccgaggtaggagctggattgggaggggtggtgagcagacctggtgagcctccacttcccaccttcacttccctgcccttcttttgaggtaggaattgcagggcttgtaaaatgtcaatttcccttgacattttaaacagtttagagtcaggcagcagttttggttgttagactgatgattttacaggacccagggccctttctgtctgccaagtagtttatcatcacttacaagagattattgtgattattctctaatattcagagaggttggatgatgggctgaaggtcacacagcaagtcagaggcagagcgggattacaacctgcagtgtgtggttgagcagaatagctctccagcagaggctgagggccaaatctgagctgtcaggcccttgaagataactgtagctgaaatagtggaggcttagagaggggaggggacttgctcaaggtcacacggaaggggatgttagcggaactgagcgccaggcggtgcacctggaagagcagcagggaacctggcgaggccgcaggagctctcccgctcgcgttcctccatggcccgcgggattgctgccttccgggggagatgggatcgcagcgggaggcgccgcggggctgcggctgcgccggcccagccgcggggaaacgccaagggccgcccggctccccgcgcggcggcgtgagggctggctaatgtcacgtgagaagcgtgcagtcggcgtgagggagcacacctggagccagataagctccgtgtgacctggcagggagtcacccggcgctgcggagctcagcacagccggccgggaggaggctccccctggagcacggggccaggccaggtgctggctacccctccggccgctgctacaacccttggcgaggggcagagcgcggggagagagccggggtcccggggctggaggaaacggccgctcagggaggtcagaggccaagggagagaggccggctctctcgggaaagtatttcctttgtatttatttatgagtgtggtctgggggtgggggtgggaggactgacctaagtatctatccaccacagccaactctgggcacccttgtcttgggactctaacgttatagtttccatttcctgggttttttttttcttttgccagctgctaggtgacccatttaaatgtgtccccacttacagccacaagacaccagtgaactctattttaaccaagtcccccaagccactgaaactttttcaagacatgaaggcaatccttaaactgaccattaccctgtttgcagctttactgctggtggattgcctactagtttgtccatttttttttagtctggaaaaaagttgaatcattaggtagaaagctaaagcgttactaaagtgttacccttcttctcccctactctccagagatgaccactgataaatttttggatcgaatttttccagactgctgttttttttgagaaggagtctcgctctgtcacccaggctggagtgcagtggcgcaatcttggctcactgcaacctccgcctccggggttcaagcaattctctgcctcagcctcccgagcagctgggattacaggcgcccgccaccacgcccggctacttttttgtatttttagtagagacagggtttcaccatcttggccaggctggtcttgaactcctgacctcgtcatccacctgcctcggcctcccaaagtgctgggattacaggtgtgagccactgcgcctggccagactgctttttaaaagcttgttat

SEQ ID NO: 760 - DNA, 6000 bp, Homo sapiens
gagttgttgactggcatgtggtggctcacgcctgtaatcccagcactttgggaggccaaggcaggcggattacctaaggtcaggagtttgagaccagcctggctaacatggtgaaaccctgtttctactaaaaatacaaaaagttagccaggtgtggtggcgggcgcctgtaatcccagctacttgggaggctgaggcaggagaatcgcttgaacctgggaggcggaggttgcagtgagctaagatggcaccattgcactccagcttgggcaacaagagtgaaactcttcctaaaaaaaaaaaaaaaaaagagttgttaatatacctattcatttcactgccatggtgtagggaaaagaatgggctttggagccttagggacctcagtttgaatcctgactctgctactcttaggctgggtacaagtcacaaagctgtctgtgcttcatttccacaactatgagttaggaaagataaccaagctaacagctatagaatgcttaccatgtactgggcattgttctttttatatattaaatcatgtaatttttaaaaattaataaatacaaggccgggcaaaatggctcacgcctgtaattccagcactttgggaggccaaggtgggtggattacctgaggccaggagtttgagaccagcctggccaacatgatgaaaccccatctctactaaaaatacaaaaattagcctggtgtggcggcacatgcctgcaatcccagctacttgggaggctgaggcaggagaatcacttgaacctgggaggcagaggttccagtgagctgagatcacagcactgcactccagcctgggtggcagactgagatcctgtctcaaaataataataataaatattattttaaaaatcagtttaagttcacagccaaattgagcataaagtacagagatttcccatatgccccctgccccgacacatgcacagccttccccacgatcacactcttcaccagagttgtacatttgttacaatcgatgaacctacattgacacatcagtatcccccaaagtccatggtttacattaggattcactcttggtgttgtacattttgtgggttttgacaaacacataatgacatgtattcaacagtgcggtatcacacagaagagtttcactgccctaaaaatcctctgtgctttgcattttcatccctccctcaaccttaatccatggcaccactaacctttttattgtctccatagttttgccttttgcagaatgccatatagttggaatcatacaacatgtagccttttcagatcagcttctttcacttattaatatacatttaagtttcctccatgtcttttcatggcttgatagctcatttcttttttagtgccacataatatgccattgtctagatataccataggttatttgtccatttacctactgaagttcatcttggttgcttccaagttttggcaattatgaataaagttgctacaaacatcatgtgcaggattttgtgtggacataagttttcaattcatttggataaataccaaggagtgggattgttggattgtatggtaagaatatgtttcattttctaagaaaccaccaaactgtctttcaaagtggctataccattttgctaccagcagagaatgggagttcctgttgctctacattcttgctagcatttggagttgttggcatttcggattttggccaaaatccaaatttaggtaaataaagtagttttacctcatggtcatcttaatttgctattctcttttattttttatttattattattttttgagacggagtcttgctctgtcacccaggctggagtgcagtggtgcaatctcggctcactgcaccctctgcctcctgggttcaagtgaatctcctgcctcagcctcctgagtagctgggactacaggtgcatgccaccacaccaggctaatttttgttcttttagtagagacagggtttcaccatgtaggccaggatggtctggatctcttgacctcctgatccacctgcctcggcctcccaaagtgctgggattacaggcgtgagccactgcacctggctttaatttgctattctctagtgacatacaatgttgagtatcttttcttttgcttactactatctgtatatcttctttggtaaggtgtctgatcaggttttttacccatttctaaattgggtggttttcttattgttgagtttttaaaactctttgcatattttggataacagtcctttatcagatgtcttttgcatatttttagtagagacggggtttcaccatgttagccaggatggtctcgagctcctgatctcatgacacacctgcctcagcctcccaaagtgctgggattacaggcgtgagccaccgcacctggctttaatttgctattctctaatgatatacagtgttgaatatcttttcttttgcttactgctatctgtatatcttctttggtaaggtgtctgatcaggttttttgcccatttctaaattgggtggttcattttcttattgttgagtttttaaaactctgcgtattttggataacaatcctttatcagatgtcttttgcatatattttatcccagttgtggcttgtcttctcattctcttgacagtcttttgcagagcagacatttttaattttaatgaagcccagcttatcagctctttcttttatggtgcctttggtgttgtatctaaagagtcattgtgatactcaaggtcatctaggttttctcctatgttatcctctaggagacagttttatagttttgtgttttacatttaggtatataatctattctgagttaatttttgtgaagggtataaagtctgtgtctagacccccccctttttttttttttgcatgtggatgtccagtttgttgaaaagccccatgtgttgaaaagactaagcttatataattttcaaaacaaattttgagggagggagtcactgttattatcccaattttttggatgagcaaagtgaagcacagagaggtgatttataaaaaatcacccagagtaacacagctagtactttacagaactgagattttgaatccaggcaatccagctccagagtccatgcactcaacccctatctataataataatgtctccctcataggttcattgtgaggagtagagatagtgtctagtatataataggtactcaggaaacactaatgatagtcgttgtcctacttagcctgcaaggttccgctcaaatgtcatgtttttggggttttttttttttcttttttggagacagagtcttgctctgtcgcccaggctgaagtacagtggtgtaatctccgctcactgcaacctctgctccccaggttcaagagattctcctgcctcagcctcccaagtagctgggattatagacatgcactaccacgcctggttaattttttgtatttgtagtagtgatggggtttcgccatgttggccaggctggtcttgaacgctggcctcaagtgatctgcccacctcagcctcccaaagtgctgggattacaggcataagccaccatgcctggcctcaaatgtcatgtttttgaagctgctcttctcactcctcaagccaaataagcctcccatcatagcacctatctcatcatccaagtaatgccagcatggtgaaccctactactgtcacagctcaggtctacctgttccccatgtgatttccctggagatatgccatgtctgatctccttctgtgtcaccccaagtgcctggggctgcacttggcacttagcaggcagtttgttaaattgaatttgagttgcatgttattccaaaatgtgtatcccgcctgggtctattcctcaggaactccctaactcttactcaactctctgctttctgagcctccttgctccagccttccctggtctgtcaggttgggctgcccttgcctggagaagttcctgtttgggctgtctagggaggtagcagcatttgtctgctacacccttcttcctgcaccaccccactcagtttcttccacattctggcacaccccactccagcatggacactgcccagggaagtgtccccatttctttctttctccaaactctagacatagcacctatcttggaggcctggtatctggatgtcccttggcctctcccaggaagtataaactgtcttcttggtgggtacagcagctcacttgatatttacagcacacagtggacccagggacagactgcattccaaagagcttctgaaagtgttaatcttggcattggtgaactcctttagggagtgagtggcacttacagccatggctcccgggccctggtacgcctcttgatccactccattttgaggcagggctgtatcagaccaagctattgggagtctgtttttaccttggggagtgcattctggcagtgccatctcggacatggcaggcagtacctggtctggactgagcctggggcaccatccagcagggccctgtgtgtgcctctgcagagccaccttgggaggaggcggccagtaagacttaattgcttcctttagacagcactaccttgaacacagcctgcagagttcggtgcctgccttggacagcccctcttctatacgttcatcatgaccctggtgcctgtcctaggcagtgccactcagcccctttcggacccttttcggacagcctccagtgcccagtgcagacagaaactccaggcagggcctctctcagacacagcgagaggggcttcggagtccacagcggacggaggctgccagggcagcgcccggcccgcctggcccacgtctggcggcgcgcactggcgctgccaggcaggccgggcgtttatccccacagccgccagcagggagctccctttcggctcggcctgcgcggtcgctgggggcggcgctgagctgcgccgcgctgcgctctgctccatccctgaccgggccgaggctgctggatgccgcgtctccgcttctgctgcctgccgggcgggctccggtggccggtgagtgccggtcggcggcggcggccgctcggtggcgggcccggcttggtggggcggcggggcgggctccggccgggagggagggcgggcgggcggcggggcccgccggctcctcctcctcctcccccgtcccctggaagcagcggcccggactcccggctcccgtccctggcggcgccgtggagctcgacgcccgggggtgggggccgatcgggagcggcggggaagggggaaccaccggcccttccagccaacctggggggcgcagggaggcaggacagggtggccttcagtgtggggggatttggggcttggaggcgcccaggtggcccggagctgcggggtgggggctgcagcctcgagggtggggggacttctcctgcccccgtccaggccccacgatggagcgagcgagagagcggggcgctgaggaaggcagcggggaaggggagcacctctaccgacccttttatccctcccagcggccttcactctttcactgccgggcagactgcgggctcctctcaaaggagcagctgctagacagctggcaaaacaatggagaccccgcttccctgggccccctcctcttgggacagaagatgagagggtgaatggtggcaggctttggggattagggagtgcaggctgtgccctgagactgaatgctcacctcacctttccctgcagaggggtggggtgcgtgtgggaaggtcggacaagctgccccaggcctctggagagaccgccccgacgccccgccctgctaacctgtcatgccagttgtttcgccaatgggaaggggaggtggtaggggtggctgccccctcaccctgccccttgttagtgggggtgcgctccttggtcccaaacccggccaggagtgtgggtcatgttcctgggtgcgataaggcccgcagggacaggccaggcattggggctttgttttgggggtggag

SEQ ID NO: 761 - DNA, 6000 bp, Homo sapiens
gttgtaccaggttttgcatcctcactgaatctgactggcttttattttcctctccaaaatcaggtttttgttctcaacatctttccccatcatgtctagtcactgttttggttttggcaccatcagtatcaaatgtacaaacggttcttgctaaccaacaccaggtatatctgatgttcagatgagttccaataaaaataatttttttttttttcaaaaggtgtctttttcttgagtgctggagggcttccaagcaagtccagacagctctgtgtggccccacactagtctagctctcatctggccaaagctgttatctcatttgtgtaatgggagtccttaaggtaaatttggggtccaaacttggagggctttgggggcaagaaagttggtgtgtgagttctgaggttggaaatgagttcaggtgtcttcttccagggcagcatggtccagtgagcacatgtaagtttgggcagtagatcctctgagcctactttctcttctactcagtgaggatgctgcttccttggcaggtgattgtgatgtgaagcttagtaagtcatagacgtgcaggtgtctggagagtcctgacatgcagttgtggtttcgtttccttttggaatcttcaaaggcagcgattttcatattgcctcacaccctggcgggggcggggggctctgggaccactgggggacctgctaaatcctcttcagtctgagcagttcagccattgtcagttttagtattgtgtctctgtatttcacttgcagaaagagctttgcttctataaaggactttaaaaagtactccaaagagatctagttttggagtagaggggagatgttttctcaaacttagggcagtcctgagatgctcaggcagtagcccttttctcagttccctttgcgggtcttggtcagatgatgccctctagacccgtgctgtccaatatgtagccgctagccatgtgcagctgtcaggcccttgcaacgtggctggttcgagctgtgatacactgcaagtgtaaacacaaaccagacttcgaaggcttagtatgataacaaaagaaaaggagtgtaaaatatgtcaataacttttttatatatgtgttgaaatattttgggtattgggttaaataaaatatattattaaaattcacctgtttcccttttacttgtgtaatgtggctgctagaaaatataaagttacctatgtggcttctatctggacagcgcagctctagacctccaggaccagcagttgtgtcactgcctcctctcccaggcctctcatgacctgagtccaggcacagctgggaaggtcagctggccggtgggctggcctgggcccggctccctcacctcccttctgggctccagccttcatggtgccaggactttcttgtgtgttaatgagactctactggagttgggagcagaggctctggtcccctgctgtgtgctagttatgtaatctgtgctgctcagaagggccactagatgctgctctgtgatccctgaaagaacaaagccgacttcctcaggagtaagggctcaggcctgctctatttggaacccttcttggaagctgtagctggcccccgccttgacctccctccctcgggatgctatgggaagtggggcatgcaggaagagtggactctccggcagtccacgggcagcccagcccagcagggaagctaacaagcaggctggcccttcaggcagctagagataggcaataggctaagtaggctgattgatgggggtgggatttggaaatcttccctgcagttctatgatgaaggcagctaggaagaaaacagctctgcctcattcaactgggtctgccttctgggtccttggttctgccatttctggcagttgactgtcctttcttccttgcttccagttggagcagtgataggaactgggggtggggaggtggtggtgggttgaatgaaaagaggagctctgtggtgtctgaaaaccagcataacaggcatggcctgggtgataggagctcctggagacccctcccttagtcgcagcagcaagtgggctgccagtgccatcccattcctgctgtgctgcaactgtgactttgccttgggcaagtgtgaggaggctggtgttctgccgagagctctgtttgaaggtgctagggaaaggctggctggacaaaggtgagaagacacagggtatggcctggcttgaaaaggcccatgcagaggcatgctgctgcagagtgggaagcagggtagtggggtgagcttggtccgcctccccgtgaattggaatagctagaattgagattgagagttaaaggtaacagagtgggcccaggtttttctagggggtggatttttctttttttagccgaagtgtcactctgtcacccaggctggaatgcagtggcacaatctcagctcactgcaacctctgcctcccgggttcaagctattctcctgcctcagcctcccgagtagctgggattataggcacccgccaccacgcccagctaatttttttagtagagacgggtttcaccatgttggccaggctggtctcaaactcctgacctcaggtgatccgcccgccttggcctctgaaactgctggacacagtgtggccatcacgcctggccggggtggattataggcttcaaaatttggacatattttgggaagtggaaaacatttaaccttggctcaacactagaatctgaaggggggcacagagccaactcaggagctagaggctccaagtaagggctgaggaaaagaggctggggttcggctttcctttgagaaggaaaagggacacttggtcagggtctcgaagcaaatcgtttcttctggctttttttttttttttttttttttttttgagatggagtttcgctcttgttgcccaggctggagtgcaatggtgcaatctcggcccactgcaacctctgtctcccaggttcaagcgattctcctgcctcagcctcctgagtagctgagattacaggtgcctgccaccacgcctggctaattttttttgtatttttagtagagacggggtttcaccatgttggctaggctggtctcgaactcctgacctcaggtgatccacccgcctcggcctcccaaaatactgggattacaagcatgagccactgcgtcggcctcttctggcttcttactgttacatgcaggagggttgaggacagctccatttgaagagcaggtaggcttgtacactgaggaacattcacagggaggggcgcactgagctgggggcctgccttcctcttctgagttcccataacagctgttgtggatgttctgaaaggctgtggacaaagtagccctctgggtacagagcaatgcattttccactgtatgccttgccccccaaggttcctaaagcctggaattcctattgacagaaatctgagtggcacataaacaaaacccagcactttctgccttgattgcaccattttgaatgatgccagattccctttctgttccccctaggacagttgacagggctggtgaaagcctagtcggctggagtggtcaggtaactgggtggcatcctctcctctggagagccactccctcatctctaggtccagagataatctggattaagacagggcttaagtttcctgtttcccaggtttgtggtcagttttgactcgatctccagaaacaaggtaaaatagtaaatgaacaacagcctttgtgaaggatctggattcacatctgacaggaacagctttcagaaacagaattttactcaatttcgctagcatcaagttctcaaattatacatacttagaattgaaaacgtttaagagggtcagaaagctggccggaggggcagttgcttcagctttaatatgacaaataagagggcgagtgggaacttagaggtcatatttgtgacgggctcaggcttggctacgggccacgcttctctggcttggatctctgaggcccacttcggccgcggtcatctacccatgatgagggaacggaggccccggaggggtggccagaaccgattggactgtccactcgaggtgcgcgtggcactcgggaggcctcagtaaaggcgtcgcctctccccgcccagggccttcttccccgcgctccctggctgctttccacagggacggggatgtcaggtggaaggagggagctccggaccctggcctcggcggagggctcctcaccaggccagggcggcagcctcagagagggcgggccgcgcgctgccagggcagggactcggccgagagtgcccccgcggccggcagctgcgggcgccgcggcgggaacaaaggcagcacgtgtctgggcgggacgcgggcggggtcggccctcggctccgccctgctcggcgcccgccccgcgtcggcagagttgggttgcgcgggcgccgaggactctccggcggccgggctgctgttgggcggcggcgcggagcgggcggcgagctgtgcgggaggggcggccccgaggggcggggcgggccgacgccgcgtgtcccgccgcagccgcggagtccggctcctagatggggcccggcgcgtagaggtgcctcccgctcgttgccgcgtcctacccgcaccgtgcgcggctcgagctgaggacaccaacggccgcgactccccggcgagaccaggccggagcgtggacggcgcgcgcgccccgcgagggagggcgctgaggcgcgcgccggaagcgggagcgggagcgggagcgcggcggcggcggcgaaggtgcgggcggccgagcggggggcggggctgcggtgcctgcagaaccttggacagaagctccctagctgccgccgccgccgccgccgccgtcgccgccgccgagcgcgagcccagccgatccccgccgagcgcccccgagcgccgccgagcgccgggaccgcggcggcggggccgcggcgcgcattgcggagggcgcggagcgcaggagctgccgcctgccgggtaagcctgcgctgggcggccgtccttggccctggggagcggagaccggggtcgcgcccgtgcggggtgtccaggcgggggtcctcggccgcctccgtcggcgaccgggcccctcccggctgcgcctggggaccgcagcggcggcggcgggcgggggtgctgcagtggaggcggcgaggctgcgtcgcgggggcgcgggtagggcccgggactggggcggcggggtgcgccgaggcgcggggcggaggggcgcaggggcgcaggggcgcggcgcggagcccagcctggcgctaagaaccatcttgttttccaggcagatccaagggggcagcacgcttcccgggagcgcccccgcctcctctccggggccgccgcaggctcggtgagcggttttatccctccggccggcaggctgggcgcgcaggggcgcgagcccccgcccggcgcgcagcagcaccatgggcacggtgctgtccctgtctcccagctaccggaaggccacgctgtttgaggatggcgcggccaccgtgggccactatacggccgtacagaacagcaagaacgccaaggacaagaacctgaagcgccactccatcatctccgtgctgccttggaagagaatcgtggccgtgtcggccaagaagaagaactccaagaaggtgcagcccaacagcagctaccagaacaacatcacgcacctcaacaatgagaacctgaagaagtcgctgtcgtgcgccaacctgtccacattcgcccagcccccaccggcccagccgcctgcacccccggccagccagctctcgggttcccagaccgggggctcctcctcagtcaagaaagcccctcaccctgccgtcacctccgcagggacgcccaaacgggtcatcgtccaggcgtccaccagtgagctgcttcgctgcctgggtgagtttctctgccgccggtgctaccgcctgaagcacctgtcccccacggaccccgtgctctggctgcgcagcg

SEQ ID NO: 762 - DNA, 6000 bp, Homo sapiens
gtcagatgatgccctctagacccgtgctgtccaatatgtagccgctagccatgtgcagctgtcaggcccttgcaacgtggctggttcgagctgtgatacactgcaagtgtaaacacaaaccagacttcgaaggcttagtatgataacaaaagaaaaggagtgtaaaatatgtcaataacttttttatatatgtgttgaaatattttgggtattgggttaaataaaatatattattaaaattcacctgtttcccttttacttgtgtaatgtggctgctagaaaatataaagttacctatgtggcttctatctggacagcgcagctctagacctccaggaccagcagttgtgtcactgcctcctctcccaggcctctcatgacctgagtccaggcacagctgggaaggtcagctggccggtgggctggcctgggcccggctccctcacctcccttctgggctccagccttcatggtgccaggactttcttgtgtgttaatgagactctactggagttgggagcagaggctctggtcccctgctgtgtgctagttatgtaatctgtgctgctcagaagggccactagatgctgctctgtgatccctgaaagaacaaagccgacttcctcaggagtaagggctcaggcctgctctatttggaacccttcttggaagctgtagctggcccccgccttgacctccctccctcgggatgctatgggaagtggggcatgcaggaagagtggactctccggcagtccacgggcagcccagcccagcagggaagctaacaagcaggctggcccttcaggcagctagagataggcaataggctaagtaggctgattgatgggggtgggatttggaaatcttccctgcagttctatgatgaaggcagctaggaagaaaacagctctgcctcattcaactgggtctgccttctgggtccttggttctgccatttctggcagttgactgtcctttcttccttgcttccagttggagcagtgataggaactgggggtggggaggtggtggtgggttgaatgaaaagaggagctctgtggtgtctgaaaaccagcataacaggcatggcctgggtgataggagctcctggagacccctcccttagtcgcagcagcaagtgggctgccagtgccatcccattcctgctgtgctgcaactgtgactttgccttgggcaagtgtgaggaggctggtgttctgccgagagctctgtttgaaggtgctagggaaaggctggctggacaaaggtgagaagacacagggtatggcctggcttgaaaaggcccatgcagaggcatgctgctgcagagtgggaagcagggtagtggggtgagcttggtccgcctccccgtgaattggaatagctagaattgagattgagagttaaaggtaacagagtgggcccaggtttttctagggggtggatttttctttttttagccgaagtgtcactctgtcacccaggctggaatgcagtggcacaatctcagctcactgcaacctctgcctcccgggttcaagctattctcctgcctcagcctcccgagtagctgggattataggcacccgccaccacgcccagctaatttttttagtagagacgggtttcaccatgttggccaggctggtctcaaactcctgacctcaggtgatccgcccgccttggcctctgaaactgctggacacagtgtggccatcacgcctggccggggtggattataggcttcaaaatttggacatattttgggaagtggaaaacatttaaccttggctcaacactagaatctgaaggggggcacagagccaactcaggagctagaggctccaagtaagggctgaggaaaagaggctggggttcggctttcctttgagaaggaaaagggacacttggtcagggtctcgaagcaaatcgtttcttctggctttttttttttttttttttttttttttgagatggagtttcgctcttgttgcccaggctggagtgcaatggtgcaatctcggcccactgcaacctctgtctcccaggttcaagcgattctcctgcctcagcctcctgagtagctgagattacaggtgcctgccaccacgcctggctaattttttttgtatttttagtagagacggggtttcaccatgttggctaggctggtctcgaactcctgacctcaggtgatccacccgcctcggcctcccaaaatactgggattacaagcatgagccactgcgtcggcctcttctggcttcttactgttacatgcaggagggttgaggacagctccatttgaagagcaggtaggcttgtacactgaggaacattcacagggaggggcgcactgagctgggggcctgccttcctcttctgagttcccataacagctgttgtggatgttctgaaaggctgtggacaaagtagccctctgggtacagagcaatgcattttccactgtatgccttgccccccaaggttcctaaagcctggaattcctattgacagaaatctgagtggcacataaacaaaacccagcactttctgccttgattgcaccattttgaatgatgccagattccctttctgttccccctaggacagttgacagggctggtgaaagcctagtcggctggagtggtcaggtaactgggtggcatcctctcctctggagagccactccctcatctctaggtccagagataatctggattaagacagggcttaagtttcctgtttcccaggtttgtggtcagttttgactcgatctccagaaacaaggtaaaatagtaaatgaacaacagcctttgtgaaggatctggattcacatctgacaggaacagctttcagaaacagaattttactcaatttcgctagcatcaagttctcaaattatacatacttagaattgaaaacgtttaagagggtcagaaagctggccggaggggcagttgcttcagctttaatatgacaaataagagggcgagtgggaacttagaggtcatatttgtgacgggctcaggcttggctacgggccacgcttctctggcttggatctctgaggcccacttcggccgcggtcatctacccatgatgagggaacggaggccccggaggggtggccagaaccgattggactgtccactcgaggtgcgcgtggcactcgggaggcctcagtaaaggcgtcgcctctccccgcccagggccttcttccccgcgctccctggctgctttccacagggacggggatgtcaggtggaaggagggagctccggaccctggcctcggcggagggctcctcaccaggccagggcggcagcctcagagagggcgggccgcgcgctgccagggcagggactcggccgagagtgcccccgcggccggcagctgcgggcgccgcggcgggaacaaaggcagcacgtgtctgggcgggacgcgggcggggtcggccctcggctccgccctgctcggcgcccgccccgcgtcggcagagttgggttgcgcgggcgccgaggactctccggcggccgggctgctgttgggcggcggcgcggagcgggcggcgagctgtgcgggaggggcggccccgaggggcggggcgggccgacgccgcgtgtcccgccgcagccgcggagtccggctcctagatggggcccggcgcgtagaggtgcctcccgctcgttgccgcgtcctacccgcaccgtgcgcggctcgagctgaggacaccaacggccgcgactccccggcgagaccaggccggagcgtggacggcgcgcgcgccccgcgagggagggcgctgaggcgcgcgccggaagcgggagcgggagcgggagcgcggcggcggcggcgaaggtgcgggcggccgagcggggggcggggctgcggtgcctgcagaaccttggacagaagctccctagctgccgccgccgccgccgccgccgtcgccgccgccgagcgcgagcccagccgatccccgccgagcgcccccgagcgccgccgagcgccgggaccgcggcggcggggccgcggcgcgcattgcggagggcgcggagcgcaggagctgccgcctgccgggtaagcctgcgctgggcggccgtccttggccctggggagcggagaccggggtcgcgcccgtgcggggtgtccaggcgggggtcctcggccgcctccgtcggcgaccgggcccctcccggctgcgcctggggaccgcagcggcggcggcgggcgggggtgctgcagtggaggcggcgaggctgcgtcgcgggggcgcgggtagggcccgggactggggcggcggggtgcgccgaggcgcggggcggaggggcgcaggggcgcaggggcgcggcgcggagcccagcctggcgctaagaaccatcttgttttccaggcagatccaagggggcagcacgcttcccgggagcgcccccgcctcctctccggggccgccgcaggctcggtgagcggttttatccctccggccggcaggctgggcgcgcaggggcgcgagcccccgcccggcgcgcagcagcaccatgggcacggtgctgtccctgtctcccagctaccggaaggccacgctgtttgaggatggcgcggccaccgtgggccactatacggccgtacagaacagcaagaacgccaaggacaagaacctgaagcgccactccatcatctccgtgctgccttggaagagaatcgtggccgtgtcggccaagaagaagaactccaagaaggtgcagcccaacagcagctaccagaacaacatcacgcacctcaacaatgagaacctgaagaagtcgctgtcgtgcgccaacctgtccacattcgcccagcccccaccggcccagccgcctgcacccccggccagccagctctcgggttcccagaccgggggctcctcctcagtcaagaaagcccctcaccctgccgtcacctccgcagggacgcccaaacgggtcatcgtccaggcgtccaccagtgagctgcttcgctgcctgggtgagtttctctgccgccggtgctaccgcctgaagcacctgtcccccacggaccccgtgctctggctgcgcagcgtggaccgctcgctgcttctgcagggctggcaggaccagggcttcatcacgccggccaacgtggtcttcctctacatgctctgcagggatgttatctcctccgaggtgggctcggatcacgagctccaggccgtcctgctgacatgcctgtacctctcctactcctacatgggcaacgagatctcctacccgctcaagcccttcctggtggagagctgcaaggaggccttttgggaccgttgcctctctgtcatcaacctcatgagctcaaagatgctgcagataaatgccgacccacactacttcacacaggtcttctccgacctgaagaacgagagcggccaggaggacaagaagcggctcctcctaggcctggatcggtgagcactgtagcctgcgtcatggctcaaggattcaatgcatttttaagaatttattattaaatcagttttgtgtacagtatgtgtctagcaaagccaccaagggcctcacctttcccacagtctctccctggggtttttttcatccctgccaagaactctgggcacttttgaactcacgagccttgcgcaaaacccagaagatgtattcagagccacccaggccactgacctcccactttggggaactcaaaggactgacctgcccctgccgcctgtgcccttgctgggtccagggtaggcaaggctgccggctgcaccctgtatggagctagagaggggcctctggctgcctggcccagggaggaattggggtttctggttggaggcccttttctggctcctgtgtggagttattcactctcccagaggctcctggagccagccaccctaactgagctgccagtggggtcgtgaggcaagatccccgccacccggggacatcttcaatctaggcgaggcgaagctgagcgggt

SEQ ID NO: 763 - DNA, 6000 bp, Homo sapiens
gggcatgcaggaagagtggactctccggcagtccacgggcagcccagcccagcagggaagctaacaagcaggctggcccttcaggcagctagagataggcaataggctaagtaggctgattgatgggggtgggatttggaaatcttccctgcagttctatgatgaaggcagctaggaagaaaacagctctgcctcattcaactgggtctgccttctgggtccttggttctgccatttctggcagttgactgtcctttcttccttgcttccagttggagcagtgataggaactgggggtggggaggtggtggtgggttgaatgaaaagaggagctctgtggtgtctgaaaaccagcataacaggcatggcctgggtgataggagctcctggagacccctcccttagtcgcagcagcaagtgggctgccagtgccatcccattcctgctgtgctgcaactgtgactttgccttgggcaagtgtgaggaggctggtgttctgccgagagctctgtttgaaggtgctagggaaaggctggctggacaaaggtgagaagacacagggtatggcctggcttgaaaaggcccatgcagaggcatgctgctgcagagtgggaagcagggtagtggggtgagcttggtccgcctccccgtgaattggaatagctagaattgagattgagagttaaaggtaacagagtgggcccaggtttttctagggggtggatttttctttttttagccgaagtgtcactctgtcacccaggctggaatgcagtggcacaatctcagctcactgcaacctctgcctcccgggttcaagctattctcctgcctcagcctcccgagtagctgggattataggcacccgccaccacgcccagctaatttttttagtagagacgggtttcaccatgttggccaggctggtctcaaactcctgacctcaggtgatccgcccgccttggcctctgaaactgctggacacagtgtggccatcacgcctggccggggtggattataggcttcaaaatttggacatattttgggaagtggaaaacatttaaccttggctcaacactagaatctgaaggggggcacagagccaactcaggagctagaggctccaagtaagggctgaggaaaagaggctggggttcggctttcctttgagaaggaaaagggacacttggtcagggtctcgaagcaaatcgtttcttctggctttttttttttttttttttttttttttgagatggagtttcgctcttgttgcccaggctggagtgcaatggtgcaatctcggcccactgcaacctctgtctcccaggttcaagcgattctcctgcctcagcctcctgagtagctgagattacaggtgcctgccaccacgcctggctaattttttttgtatttttagtagagacggggtttcaccatgttggctaggctggtctcgaactcctgacctcaggtgatccacccgcctcggcctcccaaaatactgggattacaagcatgagccactgcgtcggcctcttctggcttcttactgttacatgcaggagggttgaggacagctccatttgaagagcaggtaggcttgtacactgaggaacattcacagggaggggcgcactgagctgggggcctgccttcctcttctgagttcccataacagctgttgtggatgttctgaaaggctgtggacaaagtagccctctgggtacagagcaatgcattttccactgtatgccttgccccccaaggttcctaaagcctggaattcctattgacagaaatctgagtggcacataaacaaaacccagcactttctgccttgattgcaccattttgaatgatgccagattccctttctgttccccctaggacagttgacagggctggtgaaagcctagtcggctggagtggtcaggtaactgggtggcatcctctcctctggagagccactccctcatctctaggtccagagataatctggattaagacagggcttaagtttcctgtttcccaggtttgtggtcagttttgactcgatctccagaaacaaggtaaaatagtaaatgaacaacagcctttgtgaaggatctggattcacatctgacaggaacagctttcagaaacagaattttactcaatttcgctagcatcaagttctcaaattatacatacttagaattgaaaacgtttaagagggtcagaaagctggccggaggggcagttgcttcagctttaatatgacaaataagagggcgagtgggaacttagaggtcatatttgtgacgggctcaggcttggctacgggccacgcttctctggcttggatctctgaggcccacttcggccgcggtcatctacccatgatgagggaacggaggccccggaggggtggccagaaccgattggactgtccactcgaggtgcgcgtggcactcgggaggcctcagtaaaggcgtcgcctctccccgcccagggccttcttccccgcgctccctggctgctttccacagggacggggatgtcaggtggaaggagggagctccggaccctggcctcggcggagggctcctcaccaggccagggcggcagcctcagagagggcgggccgcgcgctgccagggcagggactcggccgagagtgcccccgcggccggcagctgcgggcgccgcggcgggaacaaaggcagcacgtgtctgggcgggacgcgggcggggtcggccctcggctccgccctgctcggcgcccgccccgcgtcggcagagttgggttgcgcgggcgccgaggactctccggcggccgggctgctgttgggcggcggcgcggagcgggcggcgagctgtgcgggaggggcggccccgaggggcggggcgggccgacgccgcgtgtcccgccgcagccgcggagtccggctcctagatggggcccggcgcgtagaggtgcctcccgctcgttgccgcgtcctacccgcaccgtgcgcggctcgagctgaggacaccaacggccgcgactccccggcgagaccaggccggagcgtggacggcgcgcgcgccccgcgagggagggcgctgaggcgcgcgccggaagcgggagcgggagcgggagcgcggcggcggcggcgaaggtgcgggcggccgagcggggggcggggctgcggtgcctgcagaaccttggacagaagctccctagctgccgccgccgccgccgccgccgtcgccgccgccgagcgcgagcccagccgatccccgccgagcgcccccgagcgccgccgagcgccgggaccgcggcggcggggccgcggcgcgcattgcggagggcgcggagcgcaggagctgccgcctgccgggtaagcctgcgctgggcggccgtccttggccctggggagcggagaccggggtcgcgcccgtgcggggtgtccaggcgggggtcctcggccgcctccgtcggcgaccgggcccctcccggctgcgcctggggaccgcagcggcggcggcgggcgggggtgctgcagtggaggcggcgaggctgcgtcgcgggggcgcgggtagggcccgggactggggcggcggggtgcgccgaggcgcggggcggaggggcgcaggggcgcaggggcgcggcgcggagcccagcctggcgctaagaaccatcttgttttccaggcagatccaagggggcagcacgcttcccgggagcgcccccgcctcctctccggggccgccgcaggctcggtgagcggttttatccctccggccggcaggctgggcgcgcaggggcgcgagcccccgcccggcgcgcagcagcaccatgggcacggtgctgtccctgtctcccagctaccggaaggccacgctgtttgaggatggcgcggccaccgtgggccactatacggccgtacagaacagcaagaacgccaaggacaagaacctgaagcgccactccatcatctccgtgctgccttggaagagaatcgtggccgtgtcggccaagaagaagaactccaagaaggtgcagcccaacagcagctaccagaacaacatcacgcacctcaacaatgagaacctgaagaagtcgctgtcgtgcgccaacctgtccacattcgcccagcccccaccggcccagccgcctgcacccccggccagccagctctcgggttcccagaccgggggctcctcctcagtcaagaaagcccctcaccctgccgtcacctccgcagggacgcccaaacgggtcatcgtccaggcgtccaccagtgagctgcttcgctgcctgggtgagtttctctgccgccggtgctaccgcctgaagcacctgtcccccacggaccccgtgctctggctgcgcagcgtggaccgctcgctgcttctgcagggctggcaggaccagggcttcatcacgccggccaacgtggtcttcctctacatgctctgcagggatgttatctcctccgaggtgggctcggatcacgagctccaggccgtcctgctgacatgcctgtacctctcctactcctacatgggcaacgagatctcctacccgctcaagcccttcctggtggagagctgcaaggaggccttttgggaccgttgcctctctgtcatcaacctcatgagctcaaagatgctgcagataaatgccgacccacactacttcacacaggtcttctccgacctgaagaacgagagcggccaggaggacaagaagcggctcctcctaggcctggatcggtgagcactgtagcctgcgtcatggctcaaggattcaatgcatttttaagaatttattattaaatcagttttgtgtacagtatgtgtctagcaaagccaccaagggcctcacctttcccacagtctctccctggggtttttttcatccctgccaagaactctgggcacttttgaactcacgagccttgcgcaaaacccagaagatgtattcagagccacccaggccactgacctcccactttggggaactcaaaggactgacctgcccctgccgcctgtgcccttgctgggtccagggtaggcaaggctgccggctgcaccctgtatggagctagagaggggcctctggctgcctggcccagggaggaattggggtttctggttggaggcccttttctggctcctgtgtggagttattcactctcccagaggctcctggagccagccaccctaactgagctgccagtggggtcgtgaggcaagatccccgccacccggggacatcttcaatctaggcgaggcgaagctgagcgggtctagtggaaagattgtgtctggtcgtttgaccacacaccgccctgatttgctgttttctttttttagggagaagggcttttctttagtggagaaatggaactcgcccccctacccccttgtctgctgctcccagccacgttggtggtattggccgatgagctggtttgactcattaatttctctcaatttgggtcccagctaaagaggtggggtgaagctggggacagctttcctgggtgagtttttcttttgaataatgtagtgcagtcaccctgtggcaaatgccaggacagctgcaggtgcccattagcaacgcctgccttctgggcaaggtgagggatgccataccttgagaccaagccggtgcccacctaagggctaaggcctcttgctggtgcacatgacatttgtcctgcagagctggggggaaggcgatgtggtgaccccacccccacccgttaatttaaagctgtttctaaacagttgagtttcttctaaagaggaagccttgcccagcaaggaccagtgagacagccggatcttggagacaattacaagacggggagtgagactcctgattgctctggaagcctgctgatttctacaactgatcatttgcagctgctggttttggtttccaccttaccctactggctgtaaaaacacaaatgtgtactttattgattttctttctaattctcccgcattggtggcttgggactt

SEQ ID NO: 764 - DNA, 6000 bp, Homo sapiens
cgcctggctaattttttttgtatttttagtagagacggggtttcaccatgttggctaggctggtctcgaactcctgacctcaggtgatccacccgcctcggcctcccaaaatactgggattacaagcatgagccactgcgtcggcctcttctggcttcttactgttacatgcaggagggttgaggacagctccatttgaagagcaggtaggcttgtacactgaggaacattcacagggaggggcgcactgagctgggggcctgccttcctcttctgagttcccataacagctgttgtggatgttctgaaaggctgtggacaaagtagccctctgggtacagagcaatgcattttccactgtatgccttgccccccaaggttcctaaagcctggaattcctattgacagaaatctgagtggcacataaacaaaacccagcactttctgccttgattgcaccattttgaatgatgccagattccctttctgttccccctaggacagttgacagggctggtgaaagcctagtcggctggagtggtcaggtaactgggtggcatcctctcctctggagagccactccctcatctctaggtccagagataatctggattaagacagggcttaagtttcctgtttcccaggtttgtggtcagttttgactcgatctccagaaacaaggtaaaatagtaaatgaacaacagcctttgtgaaggatctggattcacatctgacaggaacagctttcagaaacagaattttactcaatttcgctagcatcaagttctcaaattatacatacttagaattgaaaacgtttaagagggtcagaaagctggccggaggggcagttgcttcagctttaatatgacaaataagagggcgagtgggaacttagaggtcatatttgtgacgggctcaggcttggctacgggccacgcttctctggcttggatctctgaggcccacttcggccgcggtcatctacccatgatgagggaacggaggccccggaggggtggccagaaccgattggactgtccactcgaggtgcgcgtggcactcgggaggcctcagtaaaggcgtcgcctctccccgcccagggccttcttccccgcgctccctggctgctttccacagggacggggatgtcaggtggaaggagggagctccggaccctggcctcggcggagggctcctcaccaggccagggcggcagcctcagagagggcgggccgcgcgctgccagggcagggactcggccgagagtgcccccgcggccggcagctgcgggcgccgcggcgggaacaaaggcagcacgtgtctgggcgggacgcgggcggggtcggccctcggctccgccctgctcggcgcccgccccgcgtcggcagagttgggttgcgcgggcgccgaggactctccggcggccgggctgctgttgggcggcggcgcggagcgggcggcgagctgtgcgggaggggcggccccgaggggcggggcgggccgacgccgcgtgtcccgccgcagccgcggagtccggctcctagatggggcccggcgcgtagaggtgcctcccgctcgttgccgcgtcctacccgcaccgtgcgcggctcgagctgaggacaccaacggccgcgactccccggcgagaccaggccggagcgtggacggcgcgcgcgccccgcgagggagggcgctgaggcgcgcgccggaagcgggagcgggagcgggagcgcggcggcggcggcgaaggtgcgggcggccgagcggggggcggggctgcggtgcctgcagaaccttggacagaagctccctagctgccgccgccgccgccgccgccgtcgccgccgccgagcgcgagcccagccgatccccgccgagcgcccccgagcgccgccgagcgccgggaccgcggcggcggggccgcggcgcgcattgcggagggcgcggagcgcaggagctgccgcctgccgggtaagcctgcgctgggcggccgtccttggccctggggagcggagaccggggtcgcgcccgtgcggggtgtccaggcgggggtcctcggccgcctccgtcggcgaccgggcccctcccggctgcgcctggggaccgcagcggcggcggcgggcgggggtgctgcagtggaggcggcgaggctgcgtcgcgggggcgcgggtagggcccgggactggggcggcggggtgcgccgaggcgcggggcggaggggcgcaggggcgcaggggcgcggcgcggagcccagcctggcgctaagaaccatcttgttttccaggcagatccaagggggcagcacgcttcccgggagcgcccccgcctcctctccggggccgccgcaggctcggtgagcggttttatccctccggccggcaggctgggcgcgcaggggcgcgagcccccgcccggcgcgcagcagcaccatgggcacggtgctgtccctgtctcccagctaccggaaggccacgctgtttgaggatggcgcggccaccgtgggccactatacggccgtacagaacagcaagaacgccaaggacaagaacctgaagcgccactccatcatctccgtgctgccttggaagagaatcgtggccgtgtcggccaagaagaagaactccaagaaggtgcagcccaacagcagctaccagaacaacatcacgcacctcaacaatgagaacctgaagaagtcgctgtcgtgcgccaacctgtccacattcgcccagcccccaccggcccagccgcctgcacccccggccagccagctctcgggttcccagaccgggggctcctcctcagtcaagaaagcccctcaccctgccgtcacctccgcagggacgcccaaacgggtcatcgtccaggcgtccaccagtgagctgcttcgctgcctgggtgagtttctctgccgccggtgctaccgcctgaagcacctgtcccccacggaccccgtgctctggctgcgcagcgtggaccgctcgctgcttctgcagggctggcaggaccagggcttcatcacgccggccaacgtggtcttcctctacatgctctgcagggatgttatctcctccgaggtgggctcggatcacgagctccaggccgtcctgctgacatgcctgtacctctcctactcctacatgggcaacgagatctcctacccgctcaagcccttcctggtggagagctgcaaggaggccttttgggaccgttgcctctctgtcatcaacctcatgagctcaaagatgctgcagataaatgccgacccacactacttcacacaggtcttctccgacctgaagaacgagagcggccaggaggacaagaagcggctcctcctaggcctggatcggtgagcactgtagcctgcgtcatggctcaaggattcaatgcatttttaagaatttattattaaatcagttttgtgtacagtatgtgtctagcaaagccaccaagggcctcacctttcccacagtctctccctggggtttttttcatccctgccaagaactctgggcacttttgaactcacgagccttgcgcaaaacccagaagatgtattcagagccacccaggccactgacctcccactttggggaactcaaaggactgacctgcccctgccgcctgtgcccttgctgggtccagggtaggcaaggctgccggctgcaccctgtatggagctagagaggggcctctggctgcctggcccagggaggaattggggtttctggttggaggcccttttctggctcctgtgtggagttattcactctcccagaggctcctggagccagccaccctaactgagctgccagtggggtcgtgaggcaagatccccgccacccggggacatcttcaatctaggcgaggcgaagctgagcgggtctagtggaaagattgtgtctggtcgtttgaccacacaccgccctgatttgctgttttctttttttagggagaagggcttttctttagtggagaaatggaactcgcccccctacccccttgtctgctgctcccagccacgttggtggtattggccgatgagctggtttgactcattaatttctctcaatttgggtcccagctaaagaggtggggtgaagctggggacagctttcctgggtgagtttttcttttgaataatgtagtgcagtcaccctgtggcaaatgccaggacagctgcaggtgcccattagcaacgcctgccttctgggcaaggtgagggatgccataccttgagaccaagccggtgcccacctaagggctaaggcctcttgctggtgcacatgacatttgtcctgcagagctggggggaaggcgatgtggtgaccccacccccacccgttaatttaaagctgtttctaaacagttgagtttcttctaaagaggaagccttgcccagcaaggaccagtgagacagccggatcttggagacaattacaagacggggagtgagactcctgattgctctggaagcctgctgatttctacaactgatcatttgcagctgctggttttggtttccaccttaccctactggctgtaaaaacacaaatgtgtactttattgattttctttctaattctcccgcattggtggcttgggacttgggagagggagcaagccttcctccatggcccatcactcggctgtggagaacaaagaccaatgtgaagacactacagaggattctgtcttccaggcccagtccactggggagtgctggaatggggacctggggtggggaggcagagggtcactttacataggattaagttcgaggtggctaccgatttcagcacatgcactactgaaatttacacaaaaagaaagctgtgaaattgaagtcccaatttaagagtcctgaggcagaacctggtggctggaggcattcccagaggtggggaagagagcctgcccggccggagaacatctgccttgctgcacctgaggcccagcagagccgttcctgggactgtcagataatcggtgcagcggtggaaggagcctgcggctgctggcacagacttcacacagcacctcctctctgctgggtttccacacagcctgtcttcagatcctgctgccgcgtgcgaccagaggtgggaggcccctggtggcatggaagagggagggtcagtgccaagtctcaggaggagggcgcatgtgtgtatcaccctcagctggcggaacctggctgcgaactgtgcagttacgttgcatccacaggattccagttgcgtgtctgtttccttctctttctccgtatttatttttttattcttcggaggaggtggacatttcggaagtggtggggactaagggaagaactctctagttccctcagtgtgaagcctgtcgtgttctctccccttgcactggtcatcagtattgtgtaaaggaacaactgatatacttgagtgtgcaagcaaagaacccatttgccatgctgctatgaagactacttttagatcaacaataaaaaaaaacctacaaaaaaacctttattctttaattgttgcttttacggtgatattgtgcatgcaaaccaggagcattttgtgtcttaagaaaaataatcttagaacagatggctgtgaaaattacacccatgcacagaacaagccacaggaataatagttcaggatttggtttttctctttttcttgtaaacctggagggttgatatattctttccatgcagttattagaacttagttttgttccaacagttaaacttgcaatgaaaagaaaatgtgccatttttttcactcagaattattcatagctgtatatttgaaactgctaattacacacgtgtgatgtatgttggttttttagtgcaatttcttctgtagctattctttgaccaaactgtgggtattgttaatattaatttatatttgtctcattttgtatgtatgtgtagtgtgtttgtgagtatgtgtggtttataatctgacaaagtcatgaagctcagtttggctgtaatttaat

SEQ ID NO: 765 - DNA, 6000 bp, Homo sapiens
atccaggaggcgcaggttgcagtgagcagagatagtgccactgcactccagcctgggtgacagagtgagactctgtctcaaaaaaataaaataaaataaaaaatgcagactgtgattcagcaggtctgggttgaagcccagaactctctgataaattcaatggcacttaactacttggaggtcatggatgcctttgctaatctaatagaagctactgaccctctctccagaaaaatgcacaaaaacataaatgtggaagacaactcctgatggatctgggagcctatccaagggccacagacaagagtcctggtctggacaaaatgagctgctcagtattttcccacctggccagcatttcctatccaaagacaaatgttaaagttgttctagcagagccatgcaccagcagcagtatcatcacctgggaaccggttagcaatgcagaaccgcaggcccaccccaaacctacagtcagaatctctactttagcaagatcctaaggagatgggtaagcacattacaatttgcaacctttgtaagtttgcccaaaatgtgacccctccttcacccaccgatcgccaaggttcaaaaatctgcccaacccttgagcccatcttaaatgtaccatcacgagccttccctgggcccctcagctgggactctcaccgctctgtatctttctggttaatgcaattattctgttcccttagatgaccccagcacaggtgctaaaggagtcaacaaaaggctattgtcaaaaaagtgtttctgtctccactccatctgatctctgtttccctaagacctgcccatccccctctcccagttcggcaccttgaccccctcatcacactgctcaggccaccttgtacaatgcaagccccaaatgaggaaagcattttctcccccaatgtgtaacacgaaagtgctgtagagtggctcacgctgcctttagcctaagaatttatttaactcttacccccaacccacatcagtctcctccctctagggctcaggtgctaatctgtgagggctggctcagaagacaatctaaagaacaagcctcttgcttcctcaggcatcactactcctcaccaccatcacccccacccaccaactcaggccactactctttctgttctcatatgctatgcccatcgccacccctattcccatgctcaggagtattcttggctactgcatgcaattagacctggggcagatccaatccagaaagcaagaaatcttagatgctggaagcttggggtaagtactgatcagatttattcctaaattcagtcctactttccatggattcttactttagcatctcttctgaaaaggaagcatcatgtctaattcacttctccctccctgtgcagtcctctacctggtgctctgcacagggtatgtgctaattgtatgaatgttataataaagagatagtgcagtagatgacaaagggcactacattgagagcccagaaataagcaaaccagcacaaatgtagccattcgtcttctatctcaccttgagcctgtcactaacctgttcatggcctcagtctccccatcagagaaacaggtagatggtctctaaggtctcgttcattttctgacattctgtgaaaaattaaggaaagattttcatccttgacaggaaagggattgcagagtagcggccctgggaaaatgggctctattctacctggagctagcctggaggagaggccttgagtgggggttgtctagaaaggacatggtgagtgcagagctacggtgcatctctcttgaaggctgagtgaagggagcaccagcaagggagcctgcactaggtggggagggacaagtgaaccgcagaagttggtgggagcccaggcagtggcttcagatctttccagagagctcacttttacttcctctttttttcacccctgacactgagtgggagtctgcagcgatgaccaaggttcatgcagaggatcttagtggtggggtcagaccccgggaggaatgaagaaagcattattcaccaagaggagcttttccattctttatctatgagttgatagagaggaggccccggggtaactgaggattctggacagcatcagagcattgaccctcattttccccatagcccctctgggggcctttcccttgtgtgtccccaagcgagagtccaacccaggtttgtgccagagcctaacccaggcttgtgccgagatgttcccagcacagccccatgtgagagctccctggctccgggcccagtatctggaatgcaggctccagccaaatgcattctcttctacgggatctgggaacttccaaagctgcctcctcagagtgggaatttccactcacttctctcacgccagcactgacctcccagcgggggagggcatcttttcttgacagagcagaagtgggaggcagacagctatcactttccagaagactttcttttctgattcatacccttcaccttccctgtgtttactgtctgatatatgcaaaggccaagtcactttccagagatgacaactccttcctgaagtagagacatgcttccaacactcagaagcctatgtgaacactcagccagcaaagctgggaagtttttctctgtgaccatgggctaattggtctccttctctggattgtggctttatcagataaaaacaagtggtcatgccacaggatgtctataagcccattgattctgggattctatgagtgatgctgatatgactaagccaggagagacttatttaaagatctcagcatctttcagcttgttaacctagagaaaacccgaagcatgactggattataaagggaaattgaatgcggtccaccaagttcatggtaaaggatgcactaactgattagagagaggtttcccctgatatgaggaaaacttcttggaagatgaggtgagatggcctaggaagaaattcctacacaaagttgcacagtctctagtcctggaaacattttattcattggataagaatggattgaggcatgagcagaggactgagacaaacacagagaagtttcaacactggttggggagaaaaggagtaactagtgagattcaggcagaacaagaataaggctcctcaagaggcacaagcaaagcagggctcgagttgatttgttctctcttcatcctgctttttgtaattccaccagagtctgaaatggccactccatagagtctctgctctgggattctccaggaaaccaatatccatcatgagacatcaagtctagtcccaggaagaagagattctggaatggaaacatcctgggtgggagtctcagcacatctactattctgtctgagttactggacaaataacttcagttttaacctaacgaaagctgggttggttggaggactgggcaggcagcgctggaaagtatgtcagcaccatacctgactccctgaatgcactcaacaatgccattactgaccacttactagaaataaaacagtcatttgttgaatacaacccgtttctttttacaagtgtagtgaaaagtgttttctttcaagaaaccccatgcatttatagacattgcctcagtgaccctttatgaaagaagtcactagtctttgtatgcccattgggcaagggcaccgcaaggctcagaaggaggaggcagtgggctaggagaatcgagagatcagaattttaaactcagcccagccattaacatgcctcaagtactcctatcatatttgtaagagacaacagttcactgaaatgaattctaaggtctttgggtttttatcagtgtgcttctgtagtttctgaggaaatctaaggcacaactgaggaatgaagtcaggctttccaattcccgaaatactcctccactgcttactcatgtcccttggaaattaagaaggaagccaggagaatagctgccataaccagggatgaacttcttgtccactgctgcctgctatgctagcaacagcctcctaactcataatgacttagccatgaggaatgtttctagattctcctttagctgtctgcccatttggaagatgctgaggacagagagaggacccaagcaggcaactagttggaggacttgtacacgtttccttccagcagtatgtcagagaggtggcagcccactggggacagggctgcctgggttctgtgctcgaggggaccttgagcaggctatttaacccttctgtgcctcagttgcctgatctataacatgaaaattagcaatccctactagataaagttggggaatttacagagttaatatttgtaaaggtctgagaatattcctggcagagtaagcactctgtgagtatgacactggcatttcttctgcagcactacatgctgtctatgcctttgtccaagtctgaaaccctagaactcttagaattcagttcaatgtttacacaatcctacagttctgctaggcttctatgatgctactattctgcatttgaatgagcaaatggatttaatgcattgtcagggagccggccaaagcttgagagctccttcctggctgggaggccccttggaatgtggcctgaaggtaagctggcagcgagcctgacatgctttcatctagtttcctcgcttccttccttttctgcagttttcgcttcagagaaagcagaatccttaaaaataaccctcttagttcacatctgtggtcagtctgggcttaatggcaccccatcctccccatttgctcatttggtctcagcagtgaatggaaaaagtgtctcgtcctgaccccctgcttccctttcctacttcctggaaatccacaggatgctgcatttgctcagcagatttaacagcccacttatcactcatggaagatccctcctcctgcttgactccgccctctctccctctgcccgctttcaataagaggcagagacagcagccagaggaaccgagaggctgagactaacccagaaacatccaattctcaaactgaagctcgcactctcgcctccagcatgaaagtctctgccgcccttctgtgcctgctgctcatagcagccaccttcattccccaagggctcgctcagccaggtaaggccccctcttcttctccttgaaccacattgtcttctctctgagttatcatggaccatccaagcagacgtggtacccacagtcttgctttaacgctacttttccaagataaggtgactcagaaaaggacaaggggtgagcccaaccacacagctgctgctcggcagagcctgaactagaattccagctgtgaaccccaaatccagctccttccaggattccagctctgggaacacactcagcgcagttactcccccagctgcttccagcagagtttggggatcagggtaatcaaagagagggtgggtgtgtaggctgtttccagacacgctggagacccagaatctggtctgtgcttcattcaccttagcttccagagacggtgactctgcagaggtaatgagtatcagggaaactcatgaccaggcatagcctattcagagtctaaaaggaggctcatagtggggctccccagctgatcttccctggtgctgatcatctggattattggtccgtcttaatgacacttgtaggcattatctagctttaacagctcctccttctctctgtccattatcaatgttatatacccattttacagcataggaaactgagtcattgggtcaaagatcacattctagctctgaggtataggcagaagcactgggatttaatgagctctttgtcttctcctgcctgccttttgctttttcctcatgactcttttctgctcttaagatcagaataatccagttcatcctaaaatgctttttctttgtggtttattttccagatgcaatcaatgccccagtcacctgctgttataacttcaccaataggaagatctcagtgcagaggctcgcgagctatagaagaatcaccagcagcaagtg

SEQ ID NO: 766 - DNA, 6000 bp, Homo sapiens
tattggataccttttctgagctatgaagtattacaccatagtggataataaagtactcacaattgcattatagaatagattctggtaactgcaccagtggggacagactgggttagcatgccctcacacaactggggggttgttttgcagcaaagtgctgtgaagcaggttgagcctcatgcagtgccagttcctgtatctaaatgtgaaagtggcttgttaaagattaaagggactgcctggtccttctggccccaagatggaatgatctctgccatggcgacagcctctatctcccaggagaggccattttatacagcacatttgtgcttccaaatgttactgtaagcctgcactggctgatactctggcgataagttgacatttgggcactctcaagacatatgagctatatagcatcccatggtttgaatttctgggcaaaattggctcatcaggaagtcaaaagcctctactttcaacctgttcctttgggttttctcctttgttttatttgactattctgttgagtcaaatgaactttaatttttagccataaaaattccattaagccccttgtatcatatccaggtgtgaaaatgtctcagtataacaagactgtgggtgacaggtgaaatccttaatggtagttaggataattgtctctgaaggcttgaagaaaataatggtccaaccaacaaagtgaatacagtttgtattttttgtggttcttgtgggtgagcggacttatgtttaggacctgctcagtgtgactactgttcagcttggaggtctttgaaaaaactttttttcattttactctaaacagtgcttagggaacatagctgtgtcctttttctcaaaacatgatccaaggcccatctgtatcagaattgcttggaaggccgggcgcagtggctcacacctataatcccagcactttgggaggctgagacgggcggatcacttgaggccaggagttcaagaccagcctggccaacatggcgaaactccgtctctactaaaaatacaaaaattagccaggcctggtggtgcatagtaatcccacctacttgagaggctgaggcaggagaatcgcttgaacccggaggtggaggttgcagtgagccgagaaattgtgccactgcactccaacctgggcgacagagcgagactctgtctcaaaaaaaaaaaaaaaaaaggcttggaagagagagatacttattaaaaattcagttttggccaggcatggtgactcacgtctgtaattctagcactttgggaggctgaggcaggtggatcacctgaggtcaggagttcgagaccagcctggccaacatggcaaaactctgtctctacttaaaatacaaaaattagccagacatggtggcatacgcctataatcctagctacttgggaggctgaggaaggagaattgcttgaacccaggaggtggaggttgcagtgagctgagattgcaccattgcactccagcctgtgcgatgagagtgagattccgtctcaaaaaaaaaaaaaaaaaattcagtttctggggcctccctccatgtctgctaattcagagtgtctgagggactgggatgagaaatgttcattttcaataagcacccctgttgattcttaagtacccctagagttaattgttgagtatcataaagtttacttcatttttcatgtttaatttctgtgatttattagatgataaatatttggttgccatcatattgtttttcttaaatactatgttctatagttaaaaaaaaaaaaaggctgtgaggtcactgaacaccaagattagaatttggcaatcattaattatcaacaaggtgagacaggcactgattcctggaaatgtgcatttatccattcaccgacttctcagttagaaaaaggatgtggacacaagtaagattaattttgttaaaaacaagaaatgtgcagtatcatttaggatgctgggggtagggaagtagataaaagggagatgttgagaggaaagagtgtgaagagagagtaaagcagtttgtaagtgatacaaactttaaaattttaactgaattttaaactaccaagtcatatttgaatatatgcttgttgtaaaaaaattcatgatttttggggggtaatttggataaagctaaacatagctatttgatctttattcccattacagtgctctccctgctgtgtgcatcctcccagatcttctgtatgtatttggtaattttctgtggatttggaagactacagaatcctgagaaatggatattttaatttctcttttgaaacctgcttattgtttataatgtcaagatctattgcagaaaagaaagtaaatctgggatgtcaatgacatcacatatgtctgttcaaatgaaacaatgggcacatacacatatgcacactcattaaatatctgttgagaccaccctattaaaaaaagcataaatagttttgggtgttaagttacttgagttttaaaataacgtattttctgtttttgttgttttttgttttgagatggagtctccttctgtcgcctgggctggattgcagtggcgcaatctcggctctgcaacctctgtctcctgggttcaagtgattctcctgccccagcctctagagtagctggggttagaggtgtatgccaccatgcctggctaattttaaaataatgtattgaaagaacttagtcagaaagccacagttattatttctcccatagcctcatattctcataattttcatgtaacctcataaatcctcaagtgcctgaaaccactagttcaaacgagtacctttttaagctctaaaatgtaatcctcaacctttccactttaaaaggaagaactaggatggagtgtggctataatttggggcagttggttaaaactgtatcagagtcccaaagaggggaatgataagctgcagcagctctgttcacttgctcaatggtgtttctcttagtcaacttaggagttccatgcctttggccttcaggctgctctttatatagttcgtatctgtctcctgggcatagtactgtctggattttctctttctttttttttttttttttttgagacgaagttttgctctgttgttgcccaggctggagtgcaatggcacaatcttggctgactgcaacctctgcctcccgggttcaagcgattctcctgcctcagcctcccgagtagctgggattacaggcatgtgccaccacacctggctaattttgtatttttagtagagatgggggtttctccatgttggttaggctagtcttgaactcccgacctcaggtgatccgcccacctcggccttccaaagtgctgcaattataggcgtgaaccgctgtgcccggccctcttatttaaagttcgcaaatacagaacaggtcaggagcttttctaatcattttttttttttctgaaggaggttccatatttgtctgtaccttgagagttgtttcatactagaatttgtaacttatcatcaactacagaaattttttttaaagtgtggttgaagagataatggttgtcagctgctataaagatgtgtttatcattcagaaaggactaattaacatgtactatagggaaacttctttaaacaaagccattttctgaaaggaaaacactgaaggggaggaaataaaacagggaacattttataataccttatcaaagctcagcgtggctatcctactggaataatgtaattaaggagaattaagtgagttggataaataactttttaaaactagccccttgaatagaaaattaagtagtatagtttttaaactcaaattctgtctgcacgtacattttaattaacctaacattattgaatgacaagctgagttggcagctacatccagagttcatgccatgtgagacctaccttaaaggatgaacgaagctgggtgcagaggcctcaaatgccctgctaagaaatagctgatggccttggggaactgtcatacattttaagcaggaaacagaaggatctaataggaactttagtttctctcttgtcaaattaaagcacacaaaaagcaaggacttgatcttttttttttttttttgtataacaccaatgtcaattctagcctgtcagggcaaattcagtaattaatagctgttgatgagccagtcattctagattgattttttaaataagcaggctaataaatgagaattgacataaatttagggatgtctcttttcagagcaagtgttaaggtgattttcatagtcttctgtattccctatgcatccagtaggtgtgatggtaaatgatttggctttagcatagagaatgtggcagctgattaaaaaaaaaaaattccagtgcatctatcttaatgagagaacttgagttgtctgaagaaatagagaggtcagaggaggcctagtgggaaaaaagaacaatgagcctggttagaactgacaaaaattcaccctaatgatttgactggctaatgatgactgggcaagttccctgagtccactgacccagatgttctaatttgtaaatgcaaagtgacttatttatcagcctcctggggaaatcttcagagctgtgaacctgctatgttcagtaatcttgctggccccagccccagcctgttctcagatgaaattttagaaactggccactggaactttttgggtaagggctctggaggtggccaagttaccagtagtgggggaatgaggtttacctgcccccagtaatcagcacttgatttaaaacaatcagtgagctgcctcttctttcctaggttgcagttgactgcggttggttcaggctgagttgtttgggaagtacaaattttgcccagcgtgagtcagcactgccctgggtaaactccctgctgtgttgcaatcttgcttaccaaagatacatccccaggcggcaccattcacttcacatgaaagccgctgctcttggttcctgagatgatctcatctgaacatggctccagcgacctcagccacaggaactagagacagcttgctttctgtcgtggcaatgttttgaaactggcaaaatcaggtaacctcaaactgttttcttaagtttcattagctagatgaagctgcattagaaactgggaaaatcctgtcttcagaagtgagtcaggttttttttttttttttttttttttttttttttgagacggagtttcactcttgttgcccaagctggagtgcaatggtgtgatctcggctcactgcaaccttcacctcccgggttcaagtgattctcctgcctcagcctcccaagtagctgggattatagatgtgcgccaccatgcccggctaattttgtatttttagtagagacagggttttgctgtgttggtcagtctggtttcgaactcccaagctcaggtgatccaccctcctcagcctcccaaagtgctggaattataggcatgagccacggcccccggccagaagttttctttcatttgagttctggatgtggagttaggtccaattaaatcactgattatataaatcttagaaaagtaaaacgttaggtttacagctttatccgtcatttgctcttgtattttgtttttttgtgtgtatcttgtgagaaacactttagtcaaactaagccattgttaaaggaaaagaagtgaaggcatttggttgccttcctaataactaaatattgagttgtggagaacactgtcttatcagtgagtttgttcccatattcctttctgaattaataggaagaacctccctcatctctaattctactaggctactactctatctccctcctgcttttcatcgccaaacttttgagtccttcacctaatcagactatgatatctctaggtagtcgtcaccctccaaattacgtttctgctccttataattccaacaaattgcccacgttctctttcacctcagaccttagcatatgtaagcgttcttttacacaccttccccaagc

SEQ ID NO: 767 - DNA, 6000 bp, Homo sapiens
tccagtctgggtgacggaacaagactccatctcaaaaaaacaaaacaaaacagggcctatgcatccctgagatgtgaagcagggggagataagggatttagatgtatatcctactaggtttttgctgtgttctgccatgcagttgtctgggcaggatttatttatattttaatttatttcaggggccatgctaatcatctttgtattgttccaattttagtgtatgtgctgctgaagcaagcactgggtaaggtttaaactgtctagttctgtgtgctggggtttggcattggagaaggctctgtgatgcatagaccttaaattagagttaggtatattattaatccaaagtgatcctgaatgctttctatcatttttttcttgtcctattgcactggctaaactgacttttagtactacacagaatagaagcaacaataacaatcatccttgtcttgttcctaactttagtggactatttacaatattttactgagttagatgccttaggttccacgtagctgctctttatgaaagacctcactgggttacccttcagtcttggaggagtctgggtattggccatgacatttgccatgaatgatggagttctctctgccaggtcctcatgccctggagctgtacggctgcacttcagctgctgcacatttgactttttgagtagcccttgaatctctgctcttccttggcctctctatagtttttggtataatagcctcagcttaagtttgagttttgtaggaaaacaatgggcctgtgctgacaaagatacaaagtcaaggaacaggattttttatatctcaactaacttggtcctagctttgacatttacttgccatataacaatggatgaataacagtctctttaagccttagtttcatccaccgtgaaatgggaaaaataatatctgtttcatagagttgttttaggatcatgtaacttatgtaaaacactgaatagttttccaggcatgatataggcactcaatctcatattatgaataagcttatgatgcatgggggatactgatgacagctttcttctgtccaggcaggcccagctacatggtggtatgaccagtgcagtcacacagccccatgcttagcagggctctgcacttagtttaatgctctgctgttgccatcttgaagttcttaatttttaaacaagcatcccatattttgcactgtttcttgcaaacagtgtagccagttctgtctccaggaatggatccagcactagtactggcccttctctttgggaaacatccttccattgatttcttagggagtaaatcccttgaagagtaacctcccatagaaaaattagggttagcaccctgtgtatgtttatctctaactgttccattctcagtaacctacacatcctctctcattaaaaaaacaaaacaaaacaaaaaacactttatattttacagaagctattagatccagagaggttggtaggggtgctggtgaaatggaatggtgatttgggattttggaatcaggaaaaagatctaagttcaaaaccctgctagtccctttctggccgagttacttggacaaggtaatgtctctgtcctactggtaaagtgtatgttgcaggggaattacattctttgttggtaaaatatatgcctcaggggaattaaacagataatttatgtaaagtgcctttcacagagagtctggcacatagtaggtggtcggtcactattaattcttccagctcttgccagaaataactaaaatcagggcactaggacttccaagccgtgctgctactaataaaagaaataatatgatttattttttcacaactgtttggggaaaggcctgtgcttcataaatatgcgttggaaagtacttagcaaatgagtagaaataataaaaatatgtccaagtaaacagctcctataaatatgtcacttggtagacaaattagtgttttatcactactaaatactattgctcgctgaaaaggatttcggattgcttgcacaatgggtacattattgaatgcctctgtggaagggcatgataaagatgaaaaatagtgacggtggtaatgcctaaggtggagaaaggaggagcgtggataaacgcagctcggaggcctctgtgctgcagtgatatgcacattatttagcagcattccaatgatttgcttgtaatatggaccagagggcccagaaaaaaatgatttccacaggatgtcatgaatccaaacttcaattattggatccaatcagtggattaagtgcaccccctttcagaactgaaccttcaggttgtaaactaagtttatgaaaggacatccccaggtctcaccccacccttgttctggacctattaactttttttctgtttgtttgttttttgttttgagatggagccttgctctgtcacccaggctggagtgcagtggcacgatctcggttcactgcaacctccacctcccgagttcaagtgattcccctgcctcagcctcccgagtagctgggattataggcgtacgccaccacgcctcgctaatttttgttatttttattagagatggggtttcactacattggccaggctggtctcaaactcctgacctcaagtgatcaggtctcccaaagtgctgggattacaggcatgagccaccgcgcctggcctggacctattaactttctataactatgatttctatcaagagaaagagtgatgtggtggaaaaggctgtgccttcatcacagctaggaatctatttcagaattgagaggatggacaaggtcctggcatatctagggaaaaggaattagagggaaaggaggagaccataaatgcctttggagggtagggctggaaatgaagacttagagagaagcaaaccagacagaattgcatcagggaaagttacaaaaatagccaggaaggaaaatgaagggtacatttaattcggatgtgggaggcctttagcaggtcagtctttccgtgcattccaggtgattgaaaaaatcagttttaaattccagctttttggggcgcagtggctcgtcctggtaatcccagcactttgggaggccgaggcggcagatcgcttgaggttaggagtttgagaccagcctggccaacatggtgaaactctgtctctaccaaaaacaggcaaacaaataaacaaattagccaagcgtggtagcgggtgactgtagacccagctatagggtgggaagatcctttgaacctgggaggcggaggttgcagtgagcggagatcacgccactgcattccagcctgggtgacagtgagactctgtctcaaaaaaataaataaattgcagctccgtgtattcaagacactgctggttgaaagaaaaaaaagcaatacattccagctccacctttttctaaccatgtagttttgggtaaattacttaatatgtagatcctcattgataacatgggaataatagtactcagtttgctgggttgtgaggattgaaaataatacttgtaaagtgacagagtctgatatgtatacgtgatcttattgttattatttctgaggcgtcgtctcgcccttgttgcccaggctggagtgcaatggcgcgaccttggctcactgcaacctctgtcttccgagtagctgggattaccggcacccgccaccattcctggctaattttttgtatttttagtagacatggggtttcaccatgttggccaggctggtctcgaactcctgacgtcaggtgatccacccacctcagcctcccaaagtgctgggattacaggcatgagccaccacgcctggctcatgatcttattttccttacgatattccttgtttgaaaatacaaattgttcagaaaaactaggagttctcaatagaacctaaagcctaagaaaattgtgtcactagacaccatttaaaagaaggattagaacttaatattatgttcatgactaggcatcgtagcccacgctggctaaccatcccctgggccgccctgctgcttggcggtttactaaccacagctacatgcatgcgctcactaaatcctcacgccaacctgcgtttctgggatgagaaaaccagagttcgtaaaggttaggtaccttgctgaaaggtgcatgggtgaaaggcagggatggatcctcgctgagtcattctcattctaccacagccttcctcagcagcttcctgactttcctgaggggaagtagctagtcctagcggtttagactgggcagtgctagagtgagtgggacaagcatgggtttttaggtcccacagacccggcttctaatacctcccagttgtgggacgctgaataagctcgtaacccctagtggggctgggtttctgcaatcatgaagcgggggaaaccatcgcctgctcatcgcaccgaggagagagtcaatgagacatgaaagtcaggcacctttcaaagttttatgacatgcgttcagaggtgttgagggactcgctcaaggtcaccaagccgggtcttgacccagctgaaacttggacctggacccttgggcgcctcccgcagagttgtgtgaccaaggtaaccagcagcggccgaccccacgactttggggaaacgacgcctcctacggccccacggctcaggccagcccggccccgccgtcgggagcctcagctccgccagggggcgcgagcggaggccgcgctcgaggccgccgggcgcctcgctcttctctatggtggctcgggcgcggcgggagcggaggcgcgatcccgagagggggcggggccgagtcaggggcggggccgcgcggagggcgggagcggccgggccgggccgggccggctggggatgggtgggagggggggccgacttcctggggccgcccgtgaggatgtcgcgaccgcccccgggtgcccctcagccccagagacgccgccgcggcggagtccgcagcctccctgcctgaggcgtccgcggccgggatccggcccctcccctcgcctcctctcctaggtgccggccgggagggcggccgcagcaggtgaggaggcggcggcggcggcgctgggggccgctgggcgcccggcctggggaaggacgggaagggggacggtcgggtgccgtcaggctgtggtctgggggcccttcctctgtgtggggcgcggcctgggactctccctgccctacaggggtggggggaagcccttggctggctggaagtccccgccttcagggcagcccacacctgtcctttgaaaagtcccctcaaagaaagcgtttcacctgtgggggcagtaacaggagacgtgcgtcctcgattatccccaagcgccctgcagaccggcaggtctagttggcttgtggggaaaagatacctctttgtacgtcagaagaaactgaggcaggtccgcggcggcctgcttacccctttaaaggaaccagcccgtccctatctccgtcttagaggaggcggctggaggagggaggtttggagtttggaggtttgatggagaagtttgggaatgcggttctccccgcagggtccactgttccctcgcttgggagttgtcctctgttcgcgatgtgtgtgaggtcgccactgtgcggcagcggtcaagaccgagagggaaatggggcctctcttcagccggctgcccaggagacagttgaccagacatggggaagtctggcgaaccaggggagccagagcctccgctggcacgtctgctcagagcttgagttcaggctggcagaagagataaacaacagcatatcattttctcctttttgttggtctgtcatttgttctaggggggaagaagactgcttgtgtaatcaagagtgtaccgtgcaccccccagtctaccataaggaaggataattgttagcttggaaatagggttttacccacaactgtctctttgctccctggttaaaggccagagtgacgtgatgagcaaacatcccggggtgcatgtggccttctaagaaag

SEQ ID NO: 768 - DNA, 6000 bp, Homo sapiens
ttgttcgaaaacaaaatgttttgagcaatcaaccaaaattgttccttttcttttcctgtagatgttctgacagatttgcagggctttcggctcactgtgctagtatgtaaaaaggtgttgtttacacgaggcaaagagaaaacatgctattcagacagttgccaaatagaataattatagcacaaatactgtaaaggtgcctggcaccagcaacctgagaaagtgttaaaaaaaaaaaaaaaaaagtgttacaagatttaaaaaaaaacatctttgctaatttttttgtcctgttgaacattcatggaattgttaatatgacttatatagacccacacaggttttatttttgtgtctttaaaataaaagtccaaaatatttaaattttatggtcaaatatgcagtcaacagctgctactttttctttatatattaaatttctcatatgtcttttattgttctaataaacctaagcttgtgtgacctccagtgcatattagaccattcactgtatgaaagaaaacatgttgaataaatttgtgagtttttaataaaaatagaaaatctgatgtttagataattggtgtgttatttgatgttttcaaaggggaaccctgatggggagctgaatgggtcctcagaagccaggtggaaaagagaggcaggattgggatgatatatctgtttttgccttggctatggctgaaaccttttgctaatgccagccaagcttttctctgtggcttcctgctgttattagctacagatttacatcctgtggatttaactgataccgttgaagagatgtttgctgataagttaatatagaatttgaaatagaaatcaaatccatggctaaaaaatgagtggtccaggtctgtgattaggcataagatccaaggcattccctctttcactctccctgcacatgcaaaactgggcttgtatcagatacttgtaatacatagttagaggtggtccttttcagtttcaattcatttcctatagataatccggctttctaatttggtagtttgaaagataatgtaaaggctttctaatttggtggtttgaaagataatgtaaaatgaatgtatagtacagctagaaatgaaatactttaatccctttcacagaactgatatgaaattgttgttttatagtatttgttacctttgaagttccccagaaggaaaactattttgcctggcacaagatacatattaagtttctctgaaagatgaacaaaaataactaatatcaaaatcaaatttcaactcaaaaggttctaaaagtagctcgattctttccagtccttcattagacttggaagaaatttgaatattttatctactatgaaatattcttgtggatgtgtgtgtgtttcagtatcagatgctattagagttccaggatttcttttccatatcacctagatttcactctggattatttatttccttatttaaaaagtcaaaggtttgacattaaatggtatataatttccagtgctgttttcaaattttgttaagacacagccaagtttatctttcctgcagagaaggctttaaaataagcaatatttcactgcatccatatgatggcttatctaatgggggaggaggctatccgggaggaatctggcagtgttctttcagaaataaaaatgtatgaaatacagaggagacttttgaaactcccagcctctgcatgcagcacatttctttatttgctttatatgcaatcactggatcggcttgtttttacctttttagcatttatacacattaaatcctagctaacttattcattatagcctctactccctagccccctttaaagacattcatttaaatgaactgcgctcactgggaagctgcattttcctatcaaggctgctgaattatttagcagctttattgtggaatcggggtatttgataagaagcgttttcgagttgggcacacgatgtggattcgattcttctaacaacgtggttgtggcgcagtctctcccctcgtcgcgggattcagaatcctggcgaaaacccgaacaggtggcaacgctcagcagtcaaatttggagccgaaggccccaaggaggaggcctggaaatgtcagggcctgttctccttcccatcagtgctgtgccgcccacctctggccccgaggtgcggggacgtgcggcaccatacctaggcggagctcccgcaggaggcgcagcaggagggaagcgccactgcagtcccctctcgcctgggagggcagcctggtttctccctgtggccatcttaaagccaccacctctgtgcctctcgccacctgccttcagggttccagcagcagggagccaccatctgctctggcgagggagctgaagctcacccacccaacttctccgggctggctgccgctggtaagctgctctaggtgaggcacttggggaagtattacctgtggagagccaggataggcattgccagggctggcacctgagggtggacagcatctgaagagaggcaagtgggaacttggttttcccaaactcttgaaactccttgtcaagtgagcagacagttgtttgggacaattggaaagtgtcaccccttgcccatcctctgctgtgcctaatcgcctgccactttgcagcccttggagggcagggagagggattgtggactgggcgcccctccgccttctctggagaaggccattctgttagggaactgctcacccttattctcctctccctgttcctctcatctgctctcatctctacatcagtcagaggttgaaactcctcgccacagtccactctccatctccatccctaccccatcaataagcccttcccccaccatctcaagacactggaatgcaggtagggagaggcccccagagggagtatttgagaatttgctcccctgtcccttgcctcaactactctcagttgcatcttaattcctagaattacttcctcttccctccactcctggagtcctctttctaccttcagtataaggtcaggcaaacattttggggggccctgggatgtgtgtgacagtagaacggtcttgattccttgctaaaatggcttcccaagtcagtagggaccaggacagagaagggagagtaagtaaacaggtctatggcattttctgctgagtgtttgcccagcacagcccccaaattgaccagcagtgtcctgtttgcatgacagcttagaggtggtctctgcagtgactcacctccctttctcttttcttccttctctttacctcaaaggccaggtttctaagcattgtaagtacccaacatagcaaggggataggattgcaggaggtagtttcttaaatgtggggtgggagaaacatttttgtcctttgaagccccatggcaccttgtcaaggagcaaggaacacacttttgcttgggaggcccggacacaggcacaagactgcaattatagaggataaacgaaaaactgttctcttaggctaagctctcttatggatggtaaaaagccattttcttctcctgagtgccctgcctagcctggcattcttttccttccatgtctgagggggtttaccctcagacaggttctccttcccctctgcagccctggttgtcttcattcttcaagggccactttacagggacatggaacaggctccactaaagtggtgtcctcttattgctcttggccctgaggacatatgaagattgtgaaagtcagagatcctctcttcccttggttttcatgggagacagtagagagctgagggttccccagttgttcagctgtgggatccaactggcccgggctgtacccaaggggcactgccacagtgcaccactaacatctcttttctggatccttttgaggcagattctgtttagaggggtctaggtctctacaggcaacctccaacagataccataagaatagaccactttgtagtcacacttatcatcccttattgcagtttctgtttacatgtttgtctaccctcctaggctgattaccgttggggggagaatccaacttacttatcttgtatcttatctagcagtgcctgccacatagtgggcagtcagggaatgcttgatgaaggaaagaggatgtaaagcgattgtgtctttccgtgtgcggggtgcaattacatttatactattaagtctttatattttgagtctgtccctctaacggtagacctgtatttttctgcatttgtgcacctgcttaagctgcctgagcatgccctcatctctgaacagcaaagataatcaataccgaggggtatgcagtggagtaatccacaccccaccccctttcccttgctcaggcaagggtacttagagacgctactgaaactatctttagccacagcgattcctaagtattcccattaagaaagacgccagcagtccgccacacacttacacgtgcgtatccctgacataggattcccaaatcctggccgctgaagggcgggaggcgtgtgcccggcctcagactactataaattgcgaaatgacaaacctgctttgggtcccagtctctgcgtgcccgagtgcgcacccgcgattcgagcagcttaagccctactccctcctccttcccaaatcagccaccgtgggccacggctacgctatgctttattcctaagcgaatctcgcacaaatctcgaggcatattttgtacaaggggacactggccgcgcgcatcgcaatcgcatctcagcgacagaagcggtcacgtgccttggcgcgcttccgcaccgccccttcccgcgcactcgcacgcgcacgcgcacacgcgcccatacggctccaatcccttcaaccttctgcgcgcttccgccttcatgctagcaacgcccgcagtgacgcgcaggccccgccccctcccgcgcgcctcccggaagtggccggtccagagctgtggggtggcctccgcgcggtctctggcggagtcggggaatcggatcaaggcgagaggatccggcagggaaggagcttcggggccgggggttgggccgcacatttacgtgcgcgaagcggagtggaccgggagctggtgacgatggcggggccgcagcccctggcgctgcaactggaacagttgttgaacccgcgaccaagcgaggcggaccctgaagcggaccccgaggaaggtgaggccggactggggcaggccacgtgcggagcggtgggccaggccctgtggggcaagggggcggcgtgggaggggcgtgcgcgaggccgccgggcctgcgctccttcgcttggcgcagaggaacgtcgcctcccgcgagggtggtcccggcctcgggaggagggcttcggcttcttttcacacgcactcgaaacttggtgctcggctggatgggcggaacagatcgagggctcaggccgagaggagctggtcttcaggtttacttgctccaggcctgttggagggagccagagagtctgctagcaagttggaagttagctttgaggatgccctttctggtattgcgttagaaaggaggagaagaaagtcgcatgtttttaattcaggttgcccttcaaaactaagttggagactgatggaaggattttctggtgctgtttaagtctcttgaagtctcaagacacttgttcagtggctgacgactgagactcctgttctgtaagctgatgttcagagtctagctgggagtaatcccgctttagacttgagtcggaagtgtgagaaagggataataaggagggataaatgcgagtgctgaaccgtatcttaggaagatcagttgaagaaactcgggactgtttagccagaataagcaaagaaaactccccaaagaatgggacagagtgaggggagaacgtgatgactgatttaagatattggagcgactgtcacacattgaagaggaattcaactagtttgataggatccaagtcatagaaatagatcccactagtagatgccaggagtcaactttctgtt

SEQ ID NO: 769 - DNA, 6000 bp, Homo sapiens
ccactgtcatcctttgctaggactattacaataggctcctatctggtctctccatttccactcttgccaccccccaccaactgtcacattctgttcttcactcagcaccaaaatttatcattgattgattgactgactgagacagggtcttgctatgttgtccaagttggtctcgaactcctggctcaagtgatcctcccgcctcagcctcctgaggagctgggattacaggtgcacaccaggccagctcaaaataatctgctaatatgtcagccacagagatggtagcatctactcaagctgaatatacctaaagagagagagagaaagagaaagagagagagagagatcccagaaacctcaactctagggacccacccaagagaaatgcataaatatattcaccaaaagacatgaacaagaatgttcatagcaacactattcacaatagaccaaactggaaactacccagatgcctcttaacagcaagagagatatctatattttaatatagtcacacaatggaatactacaaagtattgagaatgtatgaactaaaactacacaaggtgggtgaatctcatgatgagcgaaaggaaacaagagtatgtcatgtatgattccatttacatgaaattcaaaaaacagtcaaaactcaatctagggtgttagaattgacaatattgtttgcccttagggtgggcatcaattagagggtggcatgggagagggagttgggtactggttacattgacgtgttcattttgtaaaaattcattgaaaatacatgtatgatttgtgtcttttcccctatgtattctatccccccgtaaatagtttctttttaagtcagccagtcaagtctcttccctacttaccaccctcagtggtttccagataacataggccttcctgaatcccccagttgaagcagctcctcccaccctgcccccacttactctctatcacatcaccttcttacctactgtattagctttctagggctgctgtagcaaagtaccacaaagtggatggcttagaaccaaagaaatatattgtctcagagttctggatgccagaaatccaaaattaaggtgtcagcaggaccatgttccttctaagggagccagagaagtatctgttccagacctctttcctggcttttggtagcctcaggtcttccttggcttacagatcaccctgtgtctctttacatcatcttccctcagacacggtacatgtctgtctctgtgtccagattgcccctatttataaggacgcagtcatattggtctagggctaacatcaatgacctcatctgcaacgatcctatttccaaaaaaggtcacattcccatgtgttagtcccagatgttaggacttcaacatcttttgggggacatcattcaacccataatatctgccattatctgaaattatcttattaacttggttacatgtttactgtcaaattctctcctctggaatataaactattagagcagttcaccagtatatcctctcagacctagaatagggactggcacatagtagatgctcaataaacatctgttgaatcgatgactgaggatatgttgtgtattattcacaatccctcaagcactacatacactgattacatatacttcccaagtgtgaggatacacagagcattcactatgtaacagtcattcccctccattccaaatgtatcagctcatttatcacactaccctttatgatatttactactgtatactattaatctcattttgtaaataagaaaacaaagcacagaacagttgaataaattgcataaggtcacatggttagtggatggtaaagaaccaggtggtctcaacttccaaatcctcagttgtaacactataccccctacctctctagaagcccgttacttctctatgcgtttctgagatgttagggacagccaagcaggaagaaacgcaggactatgaagcagccacaccaggactaggtgagaattctttggggatgattccagtcacctcccctaaaggggctttcatgctgaaagagccaagaggaagaaggattgtaaacactatccctagtcacaaaaccgggagaaaaatcaatctagttccacatatcacatccaataccaactataagaaaccacatacatttaaaagaaaagaaagacacttctggaggtgggaataactttctaagcagtataagtcatcaagaaaaataagcagatttgacttgaaaatttaaaacttcctgaacatctggaaaataattaaagcattcatgaaaaattactaaaaatactgagaaaaatactaataatccaatacctaaataatcaaagaatgcaaacataattcagaaaaaagtaactactgcttgagcccgggaggcggagattccagtgagctgatattgcaccactgcactccagcctgggtgacagagtgagaccgtgtctctttttttttttttttttaaaaaaaggccgggcatggtggctcacacctgtaatcccagcactttgggaggccaaggcgggcagatcaggaggtcaggagattgagaccatcctggctaacatggtgaaaccgtctccactaaaaatataaaaaattagccgggtgtagtggtgggcgcctgtagtcccagctactcgggaggctgagacaggagaatggcgtgaacccaggaggcagaggttgcagtgagccgagatggcaccactgcactccagcctgggcaacagagcaagactccatctcaaaaaaaaaaaaaaaagtaactacaataagcaaatacatagcaaaaagttcagccttaccagcaatcaatgatgctaattaaaataacaaggaagtgccattttttgcttttgttccccaaatatatgatacccaatactggccaaggcaatatgaaaacaggcttcctcatacattactggaagcagaatatagttatgtgcaagcactttggaaaatgattcccagtgttaaggaagagacattaaatagctgacacactcttaattctgtagtcccagttatgagtctctatcataagtagccagctcttcattgcaggattattgtaatcacccacaggggaaatagtagaatttccagcggtaaaaaaatacactaaggcagtacatttagtgtagtgtaatgtagccatgataactacaataactgtgtagcaacatagaaaaatgttaaatttaaaaagcagaagcctgggcaacaaagtgagaccccatctctttttttttttgagatggcgtctcgctctgtcaccgaggctggagtgcagtgtgagaccacatctctacaaaaaattttaaaaattagctgggcatggtagtgatcacctgtggtccctgctacactggaggttgaagcaagaggattgcttgagccaggaagtcaaatctgcagtgagccatgtttgtttgttccgcttcactccagcctgggtaacagagtaagacactgtctcaaaataaaaataaaatagacaatactacatacaattttgggttaagcagtggtttcttttacaccaaaagcataaacattggactttattgaaatgaaaaacttttggccaggcacattggctcacacctgtaatctcagcactttgggaggccacagtgggggattgcaaggggagatgggaaatgttctaaaactggattatggtgatagttgggcaactgtgtaaatttactaaaaattattgaactgtacatttaaaaagtgtgagtcttatggtatgtaaattataccccataaagttgtttttaaaaatgaagtaagtccctctgctcaagacccagtcatctcatctcattcaaagtgaaagccagagctttacaatccctataagagcctaggtggtagctcaacactcttacctccctcaccccattttctgtatctcttttcgttgcccatcttctagccacaccagcctctgctaatccccaaacaggtaccctctgtgctcttgctgttcccttggcctagaatgctcttccttaagatgcaggtaagaattccttcctcaccttcttcaagcttttatttgaatatcactttctttttttgttggttttgtgtgtgtgtgtggggggggggggtttgagatggagtttccttctgtcgcccaggctggagtgcagtggcatgatctcgactcactgcaacctccgcctccgggggtcaagcgattttcctaccccagcctcctgagtagctgggattacaggcgcacgccaccatgcccagctaattgtattttttagtagagacgggatttaaccattttggccaggctggtctcgaactcctgaccttgtgatccgcccgcctcggcctcccaaagtgctggaattacaagcgtgagccaccatgcccggccttttgttgttgctgttgttgttctgagatggagccttgccctgtcgcccaggctggagtgcagtggcccgatctcggctcactgcaacctccacctcccaggttcaagcgattctcctgcctcagcctcccgagtagctgggattaagctgggattataggcgtgccccaccacgcccggctagtttttgtatttttagtagagacggggtttcactgtgttggccaggctggtctcgaactcctgacctcacgtgatccgccctcctcggcctccccaagtgctgagattacaggcgtgagccaccgcgcccgccgccccctgaatttagagaatagcggagcctccccattctctgcggccttggctcctacacttcccgtggtaaccttgttcatccgctgaagcccgctgcttttcccagcccggcctctgggggccgctgccgggcctgtgagcctgtggaccaggagctcctgctgccgtcgtagcgtcacgtccggtctcggcggaagttttccggcggctaccgggaagtcgctgaagacagagcgatggtagttctggaggcctcgctccggggccgacccgaggccacagtgcctccgcggtagaccggacttgggtgacgggctccgggctcccgaggtgaagagcatcgggggctgaggtgggaccttagaagggagtctgggaaccctcacggctcttattggagtcccttccctgaccctgggctctaaactgcctttgctcaggctgtcccggaagcaggtcctccccgtatcataccattcctagagggaacggcgcaggttgggacttccctccctttaccatcgtcaccaaggcatgtggtaaccccgggccggaggtcaagggcgtcgcttctccctaatgttgcctcttttccacggcctcagggatggaagggtctaagacgtccaacaacagcaccatgcaggtgagcttcgtgtgccagcgctgcagccagcccctgaaactggacacgagtttcaagatcctggaccgtgtcaccatccaggaactcacaggtcagcgagacccttggaaagagggtggtcaagaatgtggaaggtgggcagctttggtgatataattcttatggtggctgtgtagtctgccacaaactcatcgtgtgaacctaggaaagtcacttcatctggctccctgttttctccttggaaacataaagcattctgacattgtggacttctgagagctttccgaccgggcgcggtggctcacgcctgtaatcccagcattttgggagaccgaggcgggcagatcacctgaggtcaggagttcgagaccagcctggccaacatggcgaaacccctctctactaaaaatacaaaaattagccgggcgtgatggcacgtgcctgtagtcccagctactcgggaggttgaggcaggagaatcgcttgaaccggtgaggtggagtttgcagtgagctgagatcgcaccactgcactccagcctgggcaacagagcgaggctccgtctcaaaaaaagagagctttcagtagcaaaag

SEQ ID NO: 770 - DNA, 6000 bp, Homo sapiens
gaaagggccaaaaggctaggtgatgatgcatctctatcacctggctccaggtctcgattcctggatttaattaaaattctactagcctttggcaaggaatgggggctgagaagtagtaggcacctggctggggggatgaatctgcgagagacaccatcctggcgaggagtttcaataaatggctcctgggaaagaaataagagggcattacaactctggcagcttagaggtagagttcatctcccaaacagcctcagaactatatggctttagtcttgataaccacaagacttgataaaccacagagacttaaaaaatgggtattatcgaagcaatccttgtgtatgtggactaagaaaggacccacgatacagacaaaccttaagtcccatttgattttttttttgtggggaacagcatttcctaactatgttacactctatgtatggttaaatttgcatttctcaacacttagcagtcaggggcagaggacagaatgccctaaatcatagtacaaggaaaaagccagatcagactgcaatgaagtctgccacagtacaaagtagaaaatttatatgttttcagtattttgagattactcatatgtgaccaaaatctcacagcatctattgacttcaaatgccagacccctttgcctccttgcttaaaggcttctctggctcctggactcttcactgcctgcagggggcgctggccagaattaatgacctccactaaacctgacatcagcactcccccagtgactggcagctgtgggtaaataaatactccagctcccttgctacttgagaagaaatctcaggtgtgtattcaatagtatctcacaggatgttgctccacaggatccctgatattatcacagcttaaaatgacatgttctctaacactgacaattctttctgtccagggcaatcatacaattcactgtcctaaccaggatgcttttgagaatggaaaggagtggatattaacaactagctagaacaacagatgcaaatcaatgctctagaacgacctggacacacaggtcatcccatctccaacctacaataatttataattctgcttcaaataaagagccctttccaacattttaaaatgactaattcagtaaccctgtgacctcaggtgcagatctgtacctccaatggtgcatagcagcctgatcatgtagaatgtctcattacccagagatcccaaaagtccgggagctctagaagcgccaagtagcctgcagaaaccaagcctgcattcctgttttcatatcatatctctcatttggaatgtttactacatgaggaggataggggagagggcacttctattacctctcctgagttagtctcttcctcctgggtctctcctggtttcgcctgggctgtggtaagtaatggagctaagggcaaggaaaatattgggtcagaaacagtcttattaaagcaggagggcatctgaaagtatgggaaaagaatgtgaaatattctcatcaccaccctcacctccaatttttcttaaagtaccatttacaccaaaagaatctgtggtcttcctcacccccattaaatcagattaaagaaatgttcaattttttaaggcataatggtatcattattattattattattattactttaagatggagtcttgctctgtcgccaggctggggtgcagtggcacgatctcggctcactgcaatctctgcctcccgggttcgagtgattcccctgcttcagtctcccaagtagctgggactacaggcgtgcaccaccatgcccagctaatttttttgtattttagtagagacagggtttcaccatgttggccaggtcttgatctcctgacctcgtgatccacccgtctcagctacccaaagtgctgggattacaggctgagtcaccgcgcccggccggtatcatttatctttaagaatccttatctgtcaaaaatacagaaatatttacagtatttatgtttgggatttgcttcaaaacaattcagagtgggaaggaatggatggggctgtagacaaaacttgattaaatatgtgttgataattgttgcaactaggtgatgggtacacaggagttcatgatatactctgaaattttccatcacaaaagcaaacatcctgtttcccccagaatagcaaggagggaacataaggaaactttctaggaagatgaaacattgctaaattgcaacgatccagattacatcagtgtatccatttgtcaaaaatgtacagctaagattcatacatttcaagtcatgacaatttacctttctaaaaaggtgtgaaaaacataataattgagcagaggatgggaggtgaatggaggtgtagacaacataagaatgtgagaatatggctgattattgaagctggatgatgaatacaaggcaggctatgctattctcttgactatatatgtctcaaattttccataataaaaagtcaaaaattgttattaaaagagtttaagaggcgcggtggctcacgcctgtagtcccagcactttgggaggctgaggcgggcagatcacaaggtcaagagatcgagaccatcctggccaacatagtgaaaccgtctctactaaaaatacaaaaattagctgggcgtggcggtgtgtgcctgcagtcccagctactcaggaggctgacgcaggacaatcacttgaacccgggaggcagaggttgcagtgagccgagatcgcgccactgcactccagcctggcaacagagtgagactccgtctcaaacaaacaaacaaaaaaaagagctaatttcccctcaagaaagagaaaccaggtaataatagcagctaatacttattgaatactatttgcccagcaaattcctaagtgtttctgtggtttgtcatatttgaactttataaattctttatgaggcagtttaacgttttacagaaaaaatcagaaaccaaggcttggagaaatgaagtaacttgcaaaaagttgttcagctagtaaatgacagccaggatttaaacccaagcaggctgactccaggcccataagcttatttaagctgcctattcagtcttctcttttactgtctgacttaatctgaattcttctgactttgcgggattttggggttttttattttttttaattatagagacagggtcttactgtgttgcccaggctggtctcaaactcctgctcaagtgatccacctgcctcagcctcccatagtgctgggatcacaggtgtgaaccaccactcctggcctttttaattaatttattttttgagacagggtcttgcactgttgcccaagctgcagtgcagtggcatgatcatagcttcctgcagctttgacctcctgggctcaagtgatcctcctgcctcagcctccaccacccaccacacccagcaatttttttttttttttagagacaagatctctgctaggttgctcaggttggtcttgaactcctgggctcaagcgatcctcccacctcagcctcccaaagcactgagattacaggcgtgagccatcacatccagcaaattcttcagactttaagactctactccatttaccagctgttggaccttaggtaagtcacttaacctctctgtgcctcggttcttcatctgaaaaatgatgtaatgacggtataccccgtacgggttgttacagggactaaatgaagtaatacgtgtaatgcacttggtattactatatagtaagtcctcaaaaaataccatttattattatatatacatattccttttctctgaaacagcaggagcagaaaataaggatctttcttttgctactgaaagctctctttttttgagacggagcctcgctctgttgcccaggctggagtgcagtggtgcgatctcagctcactgcaaactccacctcaccggttcaagcgattctcctgcctcaacctcccgagtagctgggactacaggcacgtgccatcacgcccggctaatttttgtatttttagtagagaggggtttcgccatgttggccaggctggtctcgaactcctgacctcaggtgatctgcccgcctcggtctcccaaaatgctgggattacaggcgtgagccaccgcgcccggtcggaaagctctcagaagtccacaatgtcagaatgctttatgtttccaaggagaaaacagggagccagatgaagtgactttcctaggttcacacgatgagtttgtggcagactacacagccaccataagaattatatcaccaaagctgcccaccttccacattcttgaccaccctctttccaagggtctcgctgacctgtgagttcctggatggtgacacggtccaggatcttgaaactcgtgtccagtttcaggggctggctgcagcgctggcacacgaagctcacctgcatggtgctgttgttggacgtcttagacccttccatccctgaggccgtggaaaagaggcaacattagggagaagcgacgcccttgacctccggcccggggttaccacatgccttggtgacgatggtaaagggagggaagtcccaacctgcgccgttccctctaggaatggtatgatacggggaggacctgcttccgggacagcctgagcaaaggcagtttagagcccagggtcagggaagggactccaataagagccgtgagggttcccagactcccttctaaggtcccacctcagcccccgatgctcttcacctcgggagcccggagcccgtcacccaagtccggtctaccgcggaggcactgtggcctcgggtcggccccggagcgaggcctccagaactaccatcgctctgtcttcagcgacttcccggtagccgccggaaaacttccgccgagaccggacgtgacgctacgacggcagcaggagctcctggtccacaggctcacaggcccggcagcggcccccagaggccgggctgggaaaagcagcgggcttcagcggatgaacaaggttaccacgggaagtgtaggagccaaggccgcagagaatggggaggctccgctattctctaaattcagggggcggcgggcgcggtggctcacgcctgtaatctcagcacttggggaggccgaggagggcggatcacgtgaggtcaggagttcgagaccagcctggccaacacagtgaaaccccgtctctactaaaaatacaaaaactagccgggcgtggtggggcacgcctataatcccagcttaatcccagctactcgggaggctgaggcaggagaatcgcttgaacctgggaggtggaggttgcagtgagccgagatcgggccactgcactccagcctgggcgacagggcaaggctccatctcagaacaacaacagcaacaacaaaaggccgggcatggtggctcacgcttgtaattccagcactttgggaggccgaggcgggcggatcacaaggtcaggagttcgagaccagcctggccaaaatggttaaatcccgtctctactaaaaaatacaattagctgggcatggtggcgtgcgcctgtaatcccagctactcaggaggctggggtaggaaaatcgcttgacccccggaggcggaggttgcagtgagtcgagatcatgccactgcactccagcctgggcgacagaaggaaactccatctcaaaccccccccccccacacacacacacaaaaccaacaaaaaaagaaagtgatattcaaataaaagcttgaagaaggtgaggaaggaattcttacctgcatcttaaggaagagcattctaggccaagggaacagcaagagcacagagggtacctgtttggggattagcagaggctggtgtggctagaagatgggcaacgaaaagagatacagaaaatggggtgagggaggtaagagtgttgagctaccacctaggctcttatagggattgtaaagctctggctttcactttgaatgagatgagatgactgggtcttgagcagagggacttacttcatttttaaaa

SEQ ID NO: 771 - DNA, 6000 bp, Homo sapiens
attcagctccagaatcaaaactcgctgaccccagaccagtccccaggccccaccctgttccctcattggacagaacccccttgcagcccaggagtcagctcagaggtaatcactgcatcatgcttcaaagccgctaagcaagctctgaatggggggcagcaggtttcacttaccttgcctggccgcctgcccggggcagatgggatgcagctgggggagggccccacctcgtcctccgctctctccctggctctctgccttggagatggttgtctccttgcccacctcatttcacccctcctctggttggacattggaattgaagaataggggaagtgattcccccaaagcaggaaaagtgagaactggtgaaggtcacttccctggctggcctccacccctcctctcctgccccctaagctaaattctataaatacatgtcaggagagagtctgagtagtagctggagggcagagttcacttctttgagatggaagttctatctccccaatccacggggtggctgccagtctagctggggtgaaggctggaggagctgggatggatgggagaagcgaccggggaaggcgactgttgagggcctggtgcagaacagtggccacttacggtaccactgcttccttctggaggtccttggacaagtggcttaacgtcttcaagcctcagtctcttcttctgtaggatggtgatcccagtactgtacttccctcatgggattgtagtggagtttaagggggtcaagcagtcccaataagtgtgagttctcattgtctgcgatcccatttctgcttggaagttggctggagctgcaggctggctccccagcaactgctggggacatgaggcacagggagctgtgagttgtgctttgctgaggggctgagatgaggggggtggagtggaatgggaggacagggaggacagtgtgtattaaggacgttgcctttctggaggggcagggtgacggtggggtggtgagctatataggggaggagttgcccctcccatttgattcctaaagatgcagtttgacgtgactgccactcccagctccatgtggaattgcactgatgttctccaccctttctcttcagagtcactataggaccaggaagcttgggggtggggggtagggggaggagtcctctctatgggcactctgttataggagatggttctgagggactctccaggaacactgctggcctcttggtgccctctgtgggatcccacctgctggtcagcccctacgagccctctctccatgccatatcctgcagctgtggctctaagtgctgaggattaggagagagggggctgggaagacagtgtggcttgtcaagcagggagaaacttttggagcccgctcatgtctggggccaggagttgtggacactagagggttatactcaggcaggcagtggctccatgaggcctctgatattgttcctaggaaaaggaagggccagtgcatcctgccctcatgaagaatctctgttgctcgtggtggtgcagatgtaggaagataggtgttggaagccacggccatggcagccgtggtggtggtgactatggtgatcatagtgatggtgataactgtggccgtgtcatggtggtgatagttgtgattctggtagtgacactgatggcagtggcataatgatgatggtcataatggtgctggtgttgttagaagtggtggtgatggtggcagtggtggtgatgatggtgatggtactggtggtggtcataatgatgatggtcatagtggtactagttttggtatagatgcttctggtcatggtgatagtgggagtctcagcaaaggaatatcctgatcatatccaggctatctggtatggtcagtcaagccaagacctcacattataaactaactcttcatggctgggcgcggtggctcacgcctctaatcccagcaatttgggaggctgaggcgggtggatcacctgagatcaggagatcgagaccatcctggccaacatggtgaaatcctgtctctattaaaaatacaaaaattagctgggtgtggtggcacatgcctgtaatcctagttactcgggaggctgaggcaggagaatcacttgaaccaaggagacggaggttgcagtgagccgagatcgtgccactgcactccagcctgataatagagagagattctgactcaaaaaataaataaaataaataaaataaaataactcttcatatcaaataactaacacactagaacatcagcttcataaggagctgcatgaatccccaaggcctgcagaatccccaaggcctagagcagtgtgtggcacacagcagatgctcaataaatacatgttgaatgaatgcaagggaagtgagttcctccttatgatgaacaccacgttacttcatttgatcctcaccccgccctttcaaaattcccatttgatagatgagaaaactgagaccaaaagagatgatgtaaactgcctgaggagtcagcaatggcagagagggagggaggaataatacccaggcctgtcccactcccagtgcaatgctctttcctctacacactttgcagccactctccccgccagcactcagcattacgtagtggtcttgcgcttgggtttaatcatagaaataccgctaataatagtaacaattgctgtttgtaattgtttgagtaaggcttaaatgatcaggaccatggaaattattaataacccaggcccagccatagtgtgggtcgtattaaattgtgttgagatggataacgttagcaataatagtaactgggatcataaattaataacaggagtatttaaattaatgccacactgtcgatacccttagtcataagcagctcaacgctgctgttagtactaatgttgccccttccttcctgccttttatgaattcagctgagaggaaggcaggtctagaaaagcagcgggaggaggagacatcttagaagcagtccctgtctggaaggaatgactcttcagtgatttctgaagaggtgctctttgcctggcctcttatgtccagccatgaaggtggtggctcaccagcattcatgctgaaaaccacaatgatgtctacctgtcctttccaggccagggctgtcccctggactttgtgggttacacaggaaagaaattcacaggacagatatttttttcccccatgaatgaatgaattagcttcagccgatcttggaagtcacctacagactgctagcgtgctctcttcatgagcactgttttttgtttgtttgtttgtttgttttttgagatggagtttttgctctgtggcccaggctggagtgcaatggcgctatttccgctcactgcaacctccgcctcctgggttcaagtgattcttctgtctcagcctcctaagtagctgggactacaggcgtgagccaccacgcgaagctaatttttgtatttttagtagagatgaggtttcactatgttggccaggctggtctcgaactctcgacctcaggtgatccacccgcttcggcctcccaaagtgctgggattacaggcatgtgcctggcccacaagcgctcttgatctcccttttgtttccataactggggagggtagtgagattttttttttttccaggaggaaactgaaatccaaacatggttaagatttgggtgttgggatagactttgcagacacccccatcaactctgtgctccagggtcttgatgtctgggaacgaagaaatggagggaacaggaaaggggtaagcatgggggtgggtggcatgcttttggggttgggaggcatattatttggacttggcaaggtttctagggcaagatgaatttggtcctagcacatggatgggtacacagatatgagtccatttcaccacttttctatttattcccttctacaaaactttcttgaaccctactgtataccaggaattcagagaagaaaccataatccctgcctgcagagctcataagcccatggagacactcacagtctggtgaagtctatattgttgaagatgcatctgtttgtttgttgatgggtgtcagtgtgtgtgtgcactcatgaatgtgtgtgtttgtgtgactgtatacatgtgagggcttatgcagacacgactgtatacatgcatgtgtgaatgtgtacatatgcgcgtttgaatgtccggatcacatatgtgcccgtgtgcatgcctggagaggtgcatgtgtgggacagtcaggtcggcaggagtgcatgagaacggtgtgggcacacgtaagtgcacgatcacacatacaagtgagcttgagagtgtgtattcctgtgcactgtgtgcacacctgtgaccccttcaaacccctcatttgagaatcaaatgatgtcggaatggactccaccttgaatgtcgatggccgaggtaagggcgcctgcgcccctcccctccccctaggcctctgcccagggatctcctgcactgggaaggggaggggtggggatggggtggaggtggggtgatggactgagatgaagggcagggagggcaagcgggcattcttactgatagggggcagttagggagcaaggctccagggagaaggtgaagccagaggcggaggaagatgggtaagagagtgaaccctgtggcgggccgcagccggagaggaacaggaaccgcagtggggacgccctggtccccgggcccacagcatccgggacggacgcgcagtagcgcgggccgggaactgggtaccagggcgggatgggtgagaggctctaagggacaaggcagggagaagcgcagcggggtgcggggaaccgcacgccctccctttgcctctgcttcccaccccgaggcggcagggcgggcgggcgcggttccgggggtgggcgggctgggcggggcggaggcggggccgcagcactggcttcacccagcctctcccgcccgcagccagagcgagccgagccgcggccagctccggcgggcagggggggcgctggagcgcagcgcagcgcagccccatcagtccgcaaagcggaccgagctggaagtcgagcgctgccgcgggaggcgggcgatgggggcaggtgccaccggccgcgccatggacgggccgcgcctgctgctgttgctgcttctgggggtgagtgttagccggagggggcccgctccctttcccgggatcagaactccgagaagagccgggcgccgccaccaaggaaacagaacagagcattggggtcccagatactgagggtgggtggtgggaaaggacctctgatgccgggaccacgaaggagggtctagggttcccggagcgcagaggcgactctccagggtggagatgagggcaagaccggagcacggatgccggtcctcaggtaccgcagggggcggtgggggagctgggaggggtctttcaagagggggcatggggctctccgatgcccaggttcttcggaagaggacactcgaatgccgggatcccgaagggactttcccctcagcatctcggtctctggagagtcgtgggacagaaccaaggcgagagaaggagggggaactggacggggactagagatgagaggggcgagctgggctggggcggggagcccgggacgacgggatggaacaatggaggaggtcggagggactggaggcagaggggacccggcaaggacaatggggaccggccagacaatgggggggaggggcgtcggagggagaggttggggagcgggagagaggttgagaagtgggttagggagggcagaagaggggcgacggcgagggcggcagagagatggaagcagaaggaaaggagacagagcggggcgcggaccctgaagtggtcggggtcccgcctgcccgctgagggacagtgagacgagaagagagagcagaggcttggacatttccagcgcctgtccccgcgctcctgctcgcggcctctcccagtcccggaattggggctgcggatct

SEQ ID NO: 772 - DNA, 6000 bp, Homo sapiens
catggcggcgtgcatctgtagtcccagctactcaggaggctgaggcaggacaattgtttgaacctggaaggtagaggttacagtgagccgagatcgtgccactgcactccagcctatgcaacagagtgagactccgtctcaaaaaaaaagaaaggtgactgaggcagcaagatagatggaggatggggtcaaggggcccgcactggaggctgggaggctgggaagcagtgagaagacctgtagtaactgcagcttcctttctatattagcttgctagggctatcataacaaaaataccacagactagatgcttaaacaaatgagatttttattttctggaggctatgagtttacgatctgggtgttggcaggtttggtttctctggaggcctctgtctttggcttgtaaatggccaccttcttaccatgtcctcacgtggctttttctctgtgcaagtgcatccttggtgcctctttgtgtatccaaatttcctcgtataaggacgccagtatgataggattatggcccaacctaacagcattgttttaacttcatcatcatcttcaaatgcacgatctcccaatacagtcacattctgtggttccaggaattaggcctcaacatatgagtttggaggtgacaggaacacagttcagcccataacattttcttcttttttgagatggagtctcactctgtcacccaggacggagtgcaatggcatggtcttagctcactgcactctctgcctcctgggttcaagcaattctcctgcctcagcctcccaagtagctgggagaacaggcacctgccaccacacccggctaattttttgtatttttagtagagatgggtttcactatgttggccaggctggtcttgaactcctgatccacctgccttggcctcccaaagtggtgggattacaggcatgagccactgtgcccgaagcccgtaacattttctattagtaacaggtatggaatggggtctggacaccactagccgataagattaagtcatttcccattccatcattgggaaatagccaactcctgtaatccatcaaaattatctgtaaaatgggctttgtgacctgttaagaaagactacttttacctctggatcccaagacatagcagagaatctgatacagatcacactggggctcactgcattaatgaaggatgaatgaagcaattcattatctgtagtggtaatgcacactgaactgtggcttgtcctcagactttagaaaaaagagagttgtagagtaagacttgcctggtgtatgacagggccaggcgctctcacctctgtgattcaaaggcatttaatactttctttttgagacagggtgtcactccattgcccaggctggagtgcagtggtgcaaccatgtctcactgcagcctcgacttcctgggctcaagtgatcctcttacctcagcctcgtgagtagctgggactacagggatgtaccaccacatccagctaattttttgtattttttgcagaggcaggattttgctatgttgcccagctggtctcaaactcctgggctcaagcaatccgcctgcctcggcctcccaaagagctgggattacaggtgtgagccaccatggctgggccaagtattttcatttcaagaccaaattgtagttgtgacatatttgtctcccataggtcaggagctcctggagaaccaggttttatacgtctgtctttgtattcccagccagtaacccaggtcctggcaaagagcacatgcaccattatagtttgtggaatgaatgagataattagattaagaacctgtgatgggcaggaactgtaattttgcaatctggttgtgtgtttgcggttcatgatgtgtgcagtcctgtttgtttgtggttcagtttttttttttttagacggagtctcagtctgtcatccaggctggagtacagtggtgcaatctcgacgcactgcaagctccgcctcccgggttcatgccattctcctgcctcagcttctggagtagctggaactacaggcgcccgccaccatgcccggctaattttttgtatttttagtagagacggggtttcaccgtgttagccaggatggtcttgatctcctgacctcatgatctgtctgcctcggcctcccaaagtgctgggattgcaggtgtgagccactgtggccggcctttttttttttggtggtagtaacagtggagagccctcaataaatgcttcattgggaaaactgtaaccaacagctgagaactgcctcatctcactgctaaatctgtaaattgattttcttctttcttgtttcagtggagaagatcctttctcctatcaaaggccagaggtttcaaatatgccctggagcctaacccattactttttttttttttttaagacacagtctcactcactctgttgcccaggctggagtgcagtggcgcgaccttggctcactacagcctaagtctcttgacagtccactgtttaaagcgatgctcctgcctcagcttcccgagtagctgagatcacaggcgccaccaccacgcctggctatcctttgtgtttttagtagagacagggtttccccatgttggccaggctggtctcgaacccatgacctcaaatgacccacctctgcctcccaaagtgctaggattccaggcgtgagtcaccacgccaggacccaacccgttacctttttaagattttaagtcattaactatccccttcttttattttccacctctctactggaatatccccaacattaaacattctctcatttcctacgtttggggtttttttttttttggtcttttctttttttttcctttttgtggagaatggcgtcttgttatgttgcccaggcaggtcttaaactcctggcctcaagctatctccctgcctctgcctccctaaagtagtgggattatggcgtgagccaccatgtctagcctctaatttcctatcttcaaaaaggctccagccccacttggtggctcacgcctgtaatcccagcactttgggaactttgggaggtcgaggcaggtggatcacctgaggtcaggagtttgagatcagcctggccaacatggcgaaactccgtctctactaaaagtacaaaaattagctgggcgtggtggcgggtgcttgtaatcccagctactcaggaggctgcggcaggataaacttgaacccgggaggcagaggttgcagtgagccaagatggtaccactgcactccagcctgagcgatagctcaaaaaaaaaaaaaaaaaaaaaaaaaggcttcatgtcccatacctcctttgagttctcaccctattttgctgctttccttcttaaaaagaggtgtccacgaccgggcgcggtggttcacgcctgtaatcccaacactttgggaggctgaggtgggtggattatttgagctcaggagttcaagaccagcctgggcaacttggcgaaaccccgtctctaccaaaaatacaaaaacttagccgggcgtggtggcatgcgcctgtagtcccagctactggggaggttgaggcgagggggtcgcctgagcccgggaggttgaagctgcagtgagctgagatcgtgccattgcactccagcctgggtgacagggccagacccagtccccccaaaaataaaagtgttgggcttgttatcaatgtgtagtgccttacattgtataaactcatttaatcttcacaatagcatcgtggctgggggccgggggaggactattgtaaaccccattttacagaaaaggaaacaaaggcacagagcggcagagctgggattacgaacccaggcaatctggctttagagaccatacccttaactgtgctaaagcattatcccaacatacgttgatatatttgtgactttatttcttcagcgattatctcccctcgccaatgcacaggtctgcgggagcatggactgtctgaaaggttctgagtttagctttaagcacagtgcctggcacataccatttgttgaataaatggatctacctatctatatatatgtgtgtgtgtgtgtgtgtatgtgtgtgtgtgtgtgtgtgtgtatatatatatatatatatatatatattttttttttttttttttttttttttgagatggagttttgctcttgttgtccagactggagtgcaatggcgcgatctcggctcaccgcgacctccgcctcccgggttcaagcgattctccagcctcagccccctgagtagttgggattacaggcatgcgccaccacgccaacctaattttgtatttttagtggagacggggtttctccatgttggtcaggctgatctcgaactcccgacctcaggtgatccgcccgcttcggcctcccaaagtgctgtgattacaggcgtgagccacctcacctggcctactggatcaatatctttttaaaaaattccacactgggagacatttggtgtaggactgaatccccgtattttagaagccgccttgtctcttcttgcctcgatttcccatcctgttaatcaggagactcagggcgggaggacaaagccaggtgcaagaggcgtgagcacagcgactaggaaaatggagtcggaagccgtaatcttcagtttcctccgctgcatgaggcaccatgtgcaccacgtggactaaaggagacactttctccattttgaagcggtgtccaggcttcaagacctaggctccaatttctcaccgtgaagaagctcgggaaaaccgggcgcttggggaggcgcgcgggcagaggctacccgtccccgcggcctctagacaggggcggagtccctacccggcctccgcgggccccgcccccggacggcggaagccgagctcgccctctccgcccgggcctgggcgtgtcccacgggcgcacggcatgctgggaaggcgtccgcgcggcggccattttgtcttgtcggctcctgtgtgtaggagggatttcggcctgagagcgggccgaggagattggcgacggtgtcgcccgtgttttcgttggcgggtgcctgggctggtgggaacagccgcccgaaggaagcaccatgatttcggccgcgcagttgttggatgagttaatgggccgggaccgaaacctagccccggacgagaagcgcagcaacgtgcggtgggaccacgagagcgtaagtcccgcgggccttggcctgagcccgggctccgtgggggaggggagcgggcgcgggctgtggccctcctggccgcggcgcgatgtggccagggccgcacccggggtcgagcgtctgacccggtgcccatggagccaggagggaggatgctgtccggacccggggatgggggtgatttggttttgttgttctagtatcaagggggtccgggagagcccttggcataattgaaaagcaccttgatgaggcggggaaacgcgggaaagaaggatagcagcgtcttattaaatctagcggctccgaggtttcacctcattatgaaatagggagaagggcacatttttctatagtttgggttgaacgtcgtatttagactaaaatttctgaccaggattcatggtaaaaatcgtggcggtattttatttaagtaattacagcatgacgcttatacggggaaatagaaatgtaaaagaagtcgtttacttgttagggtttaccgtgatgatttacaagtattgttcgttaacagtattctaagaagtcccttatagaggcagctgtcaaggttttttcttccacataaaactcatttgatgctcttagcccggggagtaaaggtaaatattataaccccagtttcactggtgagacttaaaaaggctcacccaaagtcttggcaactgaggaaactaatctttgtagttctgttagctttccacaatcctatgaaactggttctctgcacctactgtagcatttcaagtgttttgatctagttttgaacatgcagtgtaatgtttactttaggtctta

SEQ ID NO: 773 - DNA, 6000 bp, Homo sapiens
taaaagcagagggaattgcttaagaaaaaaaatttgcagtactaaaggacattcatctttaggttgagcaggtcctacaagtgatcaggacagtgaatgaaaaagatccatacctaggcatacccctgtgaaattttagaacacgggggtggtgggggtgggtgtaggtcacagaattatgaatcagaatggcctaagactggtcagtaacaacgggggaagttgaagacattggagaaacatcctcagggtgctgagtgaaaatgtgtctgccggagggggaaaaagacattttcagatatacagggtctcaactgatttatctcccacgggccttttctcaggaaactccaccaaaacatgtccataaaccgagaaagaggaaagaaaaaacaagagatccagtaattctcatctactacagagcagaaaaggaattcatcaggacaataattctatagtgagcttagaaaataagtatcccagattgaagtaaggcagaaggcccatggaagaaaatgaaactgatgatgtgatatattttgagtcatatgtgaaattagtattgagatagtttctatagctgagtttgaagtgtttgagaagaatttgaaaatatagagaaaaaactaggctcacacctgtaatcccagcacttttggaggcaaaggagggcagatcactcgaggtgaggagttcaagaacagcttgcccaacagggtgaaatcctgtctctactaaaaatacaaaaaaattacgcaggcatggtggtgggtgcctgtaatcctagctccttggaaggttgaggcaggagaatcccttgaacctggtgggcagaagttgcggtgagccaaaattgcgccgctgcactccggcctgggcgacagagcaagactctatctcaaaaaaaacaaaacaacaacaacaacaacagaaaacatcagaagtgtctcataatgagcctttgtttggcctgacagtgaatagtacttgcataatataagcaccaagtgtttatttatccaaaaattttgatgtctaggattgataaatagcaaaataagcatagaattttaaaaggtggaggtaaattcgggaagaaatagagaagagttaagataattgctttttagaggtgggaagaagtaggggttaggtactagtctagtgctatttgactttatatacagatttgaaaataataaagtcggcaatggttcagttcagtggtctgtccccatcagttttctttagtggcaataaggaacagtttcctttcaccttccctccttttctccctccctcctttacttctcttttaaccatatatggttgctgtccattatattgactttgaagactgagcagatcaattttatatcctatttggttatgatgcttcatgatttagtaggatcagtttagatgtctacaaactactcagtgataaagtgaatcctttttctttttaaaaagaaaaataactctttttttttggcaagaaaaggttgctaataatcacagataatttatacaattatattttttcccccaggtccgtgtgaaaaaattcatgatgaaaatctacgaaaacagtaagttattttgcttgtcatttccacccccccagttattagttggtttaagtgggacaagggttgaggaataattgcaattaaatgtaaaatgagtgtctgagagaagtccagtcagtggctggggatagtaagaaagttctatagcttcagtaatgatactgatagctaccacatgagtgcaccctgtatgtcagactttttttttctgtagcccatttgctgttttttttaaatgagcctcactgtgtcgctcaggctggagtgcagtggcatgatctcagcttactgcaacctccgcctcccaggttcaagggattctcctgcctcaaactcccgagtagttgggattacaggtgcccaccaccatgcctgactaatattttgtatttttagtagagacagggtttcaccatgttggccaggctggtctcaaactgctgacctcaagtgatccacccacctcggcctcccaaagtgctgggattacaggcgtgagccaccatgcccagccccgattttatccatgagacttgtcctaggtccagggtcatagatccagtacagtggtaaagctagtggttaaacccctgtgtaaagctctatgatgaggggcaatcagaaagtcacttcaaatacacctggtttaccctgcagcctaaatggaatagtcgttgaggctagttaagatagaatatttgagttgtaatggctgaagatttggaaatgagtacttgtttattttcatgttaccaggtatgagaagagctctcgtttcatgaaagttggctatgagagagattttttgcgatacttacagagcttacttgcagaagtagaacgtaggatcagacgaggccatgctcgtttggcattatctcaaaaccagcagtcttctggggtaagtgaagtcaattcagtctttgtaaacggtccttgttttctggagattcagagacctccctaatatttttgaaacttgtcttctgttcattactttgttctttaaaatgatatgaaacttatagggcattcattttttttccagtctttattagcaaacataacactgattttgctaaccataagatttttctttgtttttatttttcttgaggccaagatttttcccttaaatagtagtaactgacaatatgtgattgaccaacagaagttgaagataattgaattactatcctttcaattaagcattttaattattaaatagaaatattatgtatggtatgtgcaagtttgcatgtttatctttgttttcaacttgttggtaatacgttttattgtcttcaataggccgctggcccaacaggcaaaaatgaagaaaaaattcaggttctaacagacaaaattgatgtacttctgcaacaggtgagaattgtgtgcattaatgtcaggaagtaatgtgaaacagacatgtaaccagcaaaaatacaaggatgggccaggcatggtaactcatgtgtataatcccagcactttgggaggccgaggcgggaggattgcttgagccggagaatttgagaccagtctgggcaacaaagtgagacccagtctttacaaaaattagccaggtgcaatggcgtgtacctgtggtcccagctacacacgaggctgagttaggagaattgcttaagcctacaagggcgaggctgtagttagacgtgtctgtgccactgcactccagcttgggcaacagagtgagacctcgtcttgtgtgtgtgtgtgtgtgtacatgtacatatatatgtatctgaaaggacagcaaatatgaaaagacgctcaacactattagtcgttagggaaatacagattaaaactgcaatcaaatacctatttgacacctatgagaatagctaaaattaaactgatcataccagctattggcaaggatgtgagccagctggaactggggtataatattgcacaaccactttggaaaaaatagtctcatttttttctttcatattcctgtagatgatattggagtctgttttgttgtcgttgttactgtttttttgacagtcttgctttgtcacccatgctggagtgcagtggtgcgatctcagctcactgcaacctctgcctcccaggttcaaatgattctcctgcctcagcctcccgagtagctgggattacaggtgtgcgccaccatccccggctgattgttgtatttttaatagagatggggtttcaccgtgctggccaagctggtctcaaattcctgacctcaagtaatccgcccaccttggcttcccaaagtgttgagattacaggtgtaagccactgtgcctggccctggagtctcttaaaaagttaaaaatgtaccatatgccattctactcccaaatatttatccaagagaaatgaaaacatatgtctacacaaagatttacactccagtgttcatgagtgctatattcataatggcacaaaaaaaataaaacccagactggaatcaattaaaatacccatcagcaggtgagtggataattaaatcatgatgtatctatatggtggaatgcctgtcagtaataaaagggaattagctacatgagacaatatgggtggatcttaaaataattaggctgagtgaaagaagccggacaaaaaaggaatatagactctatgactctatataaaattttagaaaatgcatattaacctacagtgacagaaagcagatctgtggttgcctggggattgtgtttaggattcaggctggaggaggtactgaaaagagtaggtggctcacacctgtaatcccagcactttgggaggattgcttgagcccagcagttcaaaaccagcctgggcaacatagtgagacgctgtctttccttttttttaaaaaaaaaaacagagtctcacgtcatcatccaggctggagtgcagtggcacgatcttggctcactgcagcctcctcctcctgggttcaagcaattcttctgcctcagtctccccagtagctgggattacaggtgcccaccaccatgcctggctaattttttttttttatatttttagtagagatggggtttcaccatgttggccaggctggtcttgaattcctgacctcaggtgatctgcccaccttggcctcccaaagtgcttggattacaggcatgagccatcgcgtctggccgaaagtgcatttttcttaacacatcagttatactttattgaagtataaaaaaaatccaggataaattaaacccaaagaggcttttgtaaatgaaaccaaacaaaaaagatggaaaacaaccactaatgaaccatggggaaaaaagacaatagttgggtttgaaagaaatcttaactgtttttttcccctactcttctaagattgaagaattagggtctgaaggaaaagtagaagaagcccaggggatgatgaaattagttgagcaattaaaagaagagagagaactgctaaggtccacaacgtcggtgagtaaaccttatttcacattatctcatctgtctgttaacagttagtaggaactcatttttatttgagaacctttgaaaactgatgttccaaacttagagtcagcacaatttgtagcccacaaggtctgtggcatctactaagctctgcctttgtgcagtatgcaagcaactttatatagtacaagaaacaaatgggtgtggttgtatcccaataaaatgttagcaaaaggcctctctggcttgccaatcactgccttaaaccataaattttcatatgagcctggttttattttcatttttgttgtaataaattactcagtacatacttacatctttgttaaaaattaatacacccttaaatatctaattcttttaattggagaatagaatatacttgtttcagatactattgattgcagaatgtaattggtcattggttcctccatattgaataggatatgttcagattatagtcaatgtgcttagttccttaattagttttgtatatggacattattccttgaacctaagcaaggaatgtattcatactaaaataggtggctttctgaaaggtgatttaaattttgtaaggtaatgtgggtgttgaacattgaacagtgggtctcaacatttcttctggatgattcagtaagttagttgctgttaccttaaacatccctctctaaaagttgaccacttgtagtccaatattactgatttggggaaatggaaaagagcaattcacacacattagaaatcttttctaaatgttgagtactttcctgggatttgtttctcttcctcagatgttcttaaaataactgatttatcattttagacaattgaaagctttgctgcacaagaaaaacaaatggaagtttgtgaagtatgtggagcctttttaatagtaggagatgcccagtcccgggtagatgac

SEQ ID NO: 774 - DNA, 6000 bp, Homo sapiens
aagagaaaaagaaagggctcgtgacagagaaagaagaaagagaagtcgttcacgaagtagacactcaagccgaacatcagacagaagatgcagcaggtctcgggaccacaaaaggtcacgaagtagagaaagaaggcggagcaggtatatataaaacaccctaagactgtccagctcataatgggtgtgcaataacaataataactactagtattattccttggaatggtacttgggaagctcttaagcatctttaagtgataggatgggttgcgagagcggaatcagtgaataaaatagttccatcttcggggcaacttctgtgccatttcccacctgtctaggaaatttcacccaacctttttacaaagttagagtacctgatggtctcttaagtgcttgtctcactgattccgagaaataaaatatgaaatcagccatactgttttaattataattacaaattgaagaagagtcttaaagagcacaacgataaccatcttagcactattggagatgaatttagaaagattttcaataatttttagttcttaagatttctaatgtaaatatgttttagagggtaagttttgcctagtcttgttaattaatagcatctactccaaggcctttacttattgtaatactggctgaagttgccttttggttttaaattattaagaagtagagatcgacgaagaagcagaagccatgatcgatcagaaagaaaacacagatctcgaagtcgggatcgaagaagatcaaaaagccgggatcgaaagtcatataagcacaggagcaaaagtcgggacagagaacaagatagaaaatccaaggagaaaggttagtttatatgagaattcagttcattaagaaacttttcacaccctaatcgccccactcacttttctccagacacaggcaaagatccatttcatacatactccttttcactttgaggaatgccattcagtaggagacaggcattctttccccctctcctacttagatttgtgaaaatgacagtttatctggtgttttcttagatgttaaaaacatctttcagttgataaacctgaaggtttttaatgtagcttcttttaagtgttatattacctttcggggttattaggtgtaggatttattatattaccttggttattggctccttttttttttacacactgcagtgtttcataatacgtcttataaagtgagtgtacattgttgcattaatcttcatttgtagcattcatttaagttagtaattaacatctaagtacctagaagttgaattgcttacatgtgtcttacccacgttttcaatgggatcaacatgctctttcccctttactttttcttttttctttttctttttttttttttttggtgtggcatcccagtagctgatttactgtgctgttggcactattaatggactttttaatttgtgtggcatgttttcacaagaatattctcatctaacttagcctttattggaagataattctgttaaccaccagggtctcctttctgagtttcatgttcttctattttgtattttttatataaaagatataaaatatcttttattttgtattgaatgagctgttgtgctttgcatggttttaggaatgagagaaggggcctatttctgattttctcagctctccttgtttcatttcattctacctgtctccatgtttaatcaccagcataatatatgtgctactattaaggtttattatactagtcttttgtgtgttgtttgtttattatatcctttaatagaactgtcctggttttttgttttcgtttttcctctagactcagctagaactagcagcacaaaccatggacatattttttggtctctgcttttattttcttaaaataagcacacactctttttctgaaatatttaacatctattggcttttactgtaatgtgagaaagtgttgaaaacttttgtcttcctgccagatgtgctagtgtttgccattcaagttgagaacttgcttctgattcaaaaggcagttgctacaaagggttaactgatttaacattagatttaagaatgttttacctaatctttttgcaagactttctgtgtaatgtctttttgggttgagaggtcaactcttaagagccaggtatgactgtcaggtcaaattaataatatttgttttgagaaagtttttagttttacatttcctattgttagctttagttgctctattctgtgttatcatttgtgccacttaaaattgttgggttggttcttagggataaaagctagctagccttcataactacttgaagtcaaagttgagtagtaaatgacactggcctgactaaaaacaggcatatttgtgtaatttctggatagagcaaaaagatgtccagagttgcttacctttaatcctaaaattgtaatgatgatgacatgaaatttagtgaaacttttttttttttccagacagggtctcagtgtcacccaggctgagtgcagtggcacgatcacagctcactgcagcctctacctccccggcccaggtgatcctcccacctcagcctcctgggtggctgggactgtaggtgcatactaccatgcttggctaattttttttttttttttgggggggtagagatggggttttgccatgttgtccagtgtgatctcgatctcctgggttcaagcaatcctcctgcctcagtctcctaaagtgctggggttataggtgtaagccaccatgcctggcccctagtaaaacttttcgttaagcggaataagctgagttacgtttagattagcaacagacagggattttccatgtgagacttggtgcaaagagagaagttactaagaaaactgtatcaggcttgtctcccatgattgggtatgctatgatagagttaaacattggaatctcttttagaagtgatataatttattggcattttgaaaatgctatgtaaaaataaattaattaaaatcagtgtgcagatgagtgaatttaaaaaatgtaaaaaaaaaaatacagaaaagaaactaccatgtagccatctaggcactcttataaatgactgaagatctggactttgggaccaggtgtgagccacagtgggcatttattaatggcaaatgagaaaaagcaagtttattactccaggtgctatgatagaagcagtttatcttactccacaaatgaaaagtggtttctcacacaaagctgtcagcaaccagtgtaaggtgctctctttgtcaagagagtttccttttttcatccatagccctaaaatccaccacaaattgtggatgtccttaggactattaagatctaccatatttacatagggcagaagataagattattggactgactactagtcctctacgggacaacaagacgactcttcctcattgaagctacctgtgcaccggagaagcccataaggcacaaagggaggactttcccacaaggtcagttagagcccactgtcctggcacagttctcacaagtggacagacagacatgaagcaagtcttgcgcttaactacttggacattgctttgtgtattatgcaagtgttacggactaaatatgctcttttacataagatcttcagttctctgagtgggtgcccctcccataccatgttttgtttttcattaccatctctttcctagatatttggtgttacgtcttcataactgtgcagaaactatgtagagggttctgtttctcttaaaatgtctttttgtctaattaactactctgccagaccagctattcttagtaaggggaaaagtaatttttccagaaagtttctagttggctttaacattttctgtagaaattttttgttgggggaatacttggaactgaaaaggctagactatgcttgctctggtgtactacttttacctctagtctgaggtcttacccatccaaagaatagtagaggaaaaagttgtttacctttttcattcttcatttgcagctgagttgaattttaatttctctttttggaaaaacaactctcagatggcatatatattacttttcttagcaaagcacaaaagttcagttgcttagattgggatttaagatccattttctttgattaggcttatccttcttggatattcaaatatatataaaaataatgttttgcattgaaaaatatgtagttgtagtttttaaaacatgcctgttataaacattcaactttttttcaccttttggggtctccatttttacccttctaacttaataattgaacctcatgtgaacatagttttgtatgctgtcttttatacctttcccagtgctttttgatgttttttacccacaatgaaatttacttaaatattatattctgcaatgtgcttaatagcttctcaccaattgagagaatttacccactattttaccttttgcttccttgaattccccttcctgccttctctctcatatattacaaattttatccctttggtaaattcaccaaaccgttgcttgcagtctgtgggaaatgattgtctctcatctctcagttgtttcactttttttcaaaatcatgtctttattgtattttactttaaaatccatggtcaatgtcttcttttatggcagaaaagaggggatctgatgataaaaaaagtagtgtgaagtccggtagtcgagaaaagcagagtgaagacacaaacactgaatcgaaggaaagtgatactaagaatgaggtcaatgggaccagtgaagacattaaatctgaaggtgacactcagtccaattaaaactgatctgataagacctcagatcagacagaggtaagtgtattgtttctcactttgattagggctttttgttactgtttgacagtgcagcgtaagtatgcacagatgaagatggaactaagccgagtaagaagacatacaaaagcctcttctgaaggaaaagacagtgtagtcctgcaaaacattttgaggtacattgttttgtctcagctattttgtagcagactcgtgcccccattagtgtgcctctttggaaattatcgcccacatttgtaatatagtcgccattgaaaagttaattatcctttttttagggattttgatgtcatttcttttttttttttaataaaaaggttgaactgtttttttttttctttttggtattaagtccatcttgtgttggtacattggcagagacatatgctttaaaaacttaaatatttcggaggcacatgttggactactttgttttaattaaactgctagtatttctttgtcaaggatgtttctagttttttgctttattgccttgcattctaatgcagtttgttctgtaactcgagagccagtagcattggattgatggaagtgtagggtttatgaattattgcagctgactaccatacctcacacagcgttggtgttgtgagcggcccatgaaaagccaaattaaaaatcaaggattcagtcaaactaagcaggtactcatgccaggtactcctttctctacccacatccatgtttgaatgctattgcctgtgatctttacgcttaactgttgtgtatcttttttgttctttacaagaagtgcagaggggttttttgtgtattgcgtgaaaacttataaaacaaatgttaacagaatggaattttttttcaactgtatgtagggctgcagtggtggccagaattagatatctttaaagaattttaaatacaataaacacttcatattattcgccttgttacactcaatgcaattctcaagtctataagaggtatgtgcttaatatttcctactgtgtaggagaatttgcagtcagccataggtatgtaggaatagtcactcactggctgatacatttaaagcagcagtgtgaatagcaaggacagacaccttcaatttgtgaaatcaaagaactgatgcactatatagaacgaatttgggtttttaaagaaatattaaaagttaggtact

SEQ ID NO: 775 - DNA, 6000 bp, Homo sapiens
cttggcctcccaaagcgttgggattacaggcatgagccaccgtgcctggctgagggattgtttttaatagtgaaaaacaatgttaaaatgtcagcttccattaatagaggaatggtcacaaaatggagagacaggccaactaaggaatatcatgtaagttaaaaaagtgtgatactactcaggaggctgagtcaggaggatggcttgagtccaagagttccaggctgcagtgtgccactgcactccagcctgggcagcagagtgaggccctgtctctaaaaaataccaaaaaccaaaaaacttaaaaaaaaaaaaaaaaaggtgagatcacgctctaagtgatacatgatagatctaaagatgcactgagtaaaagaaacacattgcagaacaatatgtataatggaatatcatttatggagaaaaaccagggaacagaatatttctcacagatccataaatatgaatgaatgtaaagtattactaaaagatttggaaggtcaaatacaaaaatgtcaacagtgtttgcatctgaagagtggaggaaggggactggaactgaggatgatgcaataacctaatctaaaaggagctttagcttggtctgtaattttaaatttttttccaaatatatccaggtattacctatagaattcaaaattaattaaaacagttgtaaagagagataaaacaagatctatgggctgagtaaaactggtttgtctaagcagccgctgcctctgccatctccccagcttccatagccttctgggggtgcctctttctctccaaccacacacaggaaatcaggctgaaatcccaactgaattatttcttaaacagcattaagaaacaacatgctgttttgcaagcagtagcagagagggcccgttatcccaccagcagctgggcttcaccctgggggtggggatatttgggaactctaagtgggcagaagagacggcagtggggtgtgagtgtgttggaggcggggagctctctcaaatgactatagtcttgagatgtagcagtcccagcagtgccctccagagcctacccccaggaaggggactggcgggtaactcacatgggacaaagcttatttgaaatccctcccactcccttgagctgcattcccctggttactctgcatgctgagaagagctttgagcctcaaacacacctggcccgacaaatagggcctagatgagggaacgacagaggtgcagacaggagaggctgaccaccttgggataacctcaggtgggtcattattaattggttgaaaacatgtcaagtcatagaacatctctagccctggcacacacatgtgcatccccagacccacccccgggccaaagacaggggctttggggaatccacatcttgggagtgctctcacctctatgtgggtggagcactcagggagtttaaacgtcgttcttggagaagtattttcaaacactcctggcctgattgctgcctgtgaggaagcagagcaagcctcttaacaggtgaatcgctgacatgctgcctgccaggtctctgtgtctgggcctgcctttccagcgcactgtccacactgcaaccagagcaggtgagctctccaaagtaacttggaccatgcacttccgcttcacagacctcatgactccctggggcttcgggacaataatttctcagtaggtctgcgagaatgttgcatcctgggcctctgcttggcccaccagcctcaccctgtccaccctctccctgtgttggaactgagtgaagccgacagtgtcattctctgggcccagaatgctcttcctctgtgtctacttggtcagctttgagacattcttcaagacagtctccagaatcaattcctcaagaaagccttcactgacctcccccagttgatccaagtgctgctcttcgctgctccctaaggtccctgcattggttctgggggtgccatttgtttgcctttctgctcccctctgtgagctccttgaggataaggctcatgctttgctcagtggagaatgctcaatgcccagcgcagcacctgacaagggctcagtaaatacttgttgaaggaatcattgaatgacaagggctcagtaaatacttgttgaagaaatcattgaatgaaaggtcaggaacaggtgtccagaggctactgggtaaagagcactggtttggaagtcaggagactgggcatggagattattctgaactgtgtcacactgctgaccttggtcaagtcgtttccttccctgggctccttctttctcagctctacaataaggggcttgcattaaatatctctcccctgttgagccttgacaattcccttaaaagagcgaaaggacactcaagcatactcaaggttgacaagggtgacaggggacaggtgctctcatgcatggctgatgggaggatgaggtaaaatcttcagcaggccatttgactatcaatattaaaaagccctaaaacacgcatacccaaatacgcaggaattttacttcttgcctaaggaaataattgacgatgtggcgagagatttaactccatggatgcttatcctagtactacttataataatgaaaatcagaaacaactctaagtatctaatgagatagaattagttaataaatcatataaaatagttatatgaaatattatacagacataaaaatgaagtaaacctgtatttattgacacagggagatgctcagactaaaattgttaagtaccgaaagtagatggtaaaacaatatttaaagttcttcttatcaatatttaaaaatatatattatgtttacatataggatatcaaattcttaaatgaggtattggtgagtggtgggattatgggcaattattttccttcctattgtttatttatgtgaagacaatgataaaccttgaaagaaaaaagtacccacaatctcacttgatgatgagtaattttgatttatttttatttttgcatactcgtgttctcaaacttttcatcagtgaaaattatattacttaaaggattgaaaaatcatttccaaaagcctctaaaattctagagcttgattcacaaagagccactcgaccaacttcacacacagcaagtcactggcagggcaaaagcttggttccccttctcagcaggggacagaatccctggacacactgggaagatattctgggtgttgctgtcccttgtcccttggccaagaggtggtctgggcatagaagacaagagtgggccgggcgcggtggctcacgcctgtaatcccaacagtgggtggatcaggaggaggtcaggagtttgagaccagcctggccaacatgttgaaaccccatctctactaaaaatacaaaatattagccgggcatggtggcgggcgcctgtaatcccagctacttgggaggctgaggcaggagaattgcttgaacccaggaggcagaggttgcagtgagccgagattgcaccactgtactccagctccgccaacagtgagagaccctgtctcaaaaaaaaaaaaaaaaaaaaagagtgggtggcgggaaggtggctgaaggtaggagggggaacctaaatgggacatgggaggcatggttggcacgagctcagcctgaccagggcccagagaggtagactgattcagtcaaaagtcgtagtacttttcctgctgagattggtggcccttttgctgggctttctcaagcaagaaatatcctcttctgtttcagaattattctgaatcattaacccaagtcctcccaactgcactgatcctgtcccagagaggccctgggctgcatcacctaactgatcactaaccacaaccagttctgctctctcctggttcctgaaatccaggagcagatggtggtggggaggaggagtttggagacagccctctaccagaagccaagaagaaaggggagtgaggagggatagaggaagttatcttggtcctgcgcccacagtccccagggtcctccttcctgtgaagcccaacggtctccagccagatttcctgtccccttagccccaccaagaaccagaggctgcccattgggtggctgttggatgcaggttactgttggagtgggggatggccacctgaggccaattgggtcatctttactccaggtctccctttcatcctcctgtcttccctgggggcactctattccctgcaattccttgggctaccagttcctgacttttgttcctttcaaaggaaccctggataaccagtgtaaccagaatttcagaggggttagttgtgtgtatcccctggggacaagcactggtataggcacacaatggtgagctgagaaatcttgggctggtagtgctaaattcaaaggctggggacaggctggggccagtggctcatgcctgtaatcccagcactttgggaggctgaggcgggtggatcacttgaggtcaggagttcaagaccagcctggccaacatggtgaaaccctgtatctactaaaaatacaaaaattagcttcttgcctaaggaaaaatacaaaaattacttcttgcctaaggaaataattgatgatgtggctagaggctagggcgtggtggcgggcacctgtaatcccagctactcgggaggctgaggcagaagaatcgcttgaaccattgcacatcagcctgggcaacagagcaagataacgtctcaaaaaaaaaaaaaaaaaaggctggggacaatgctggcccctcctttcctgccccttccccccatttcaggggcccctctgtgtgtaccttccaaccccagtgggggaggagaaagagttcagtctccaggatcagaccttcctctacctcaccccacccccagcttagaggacataaaagcgcagattgagctaagaggagctgacaatatcaggtgagctgtggaggtggggtccttggaagctggatgacagcagctggcaaggggataagagagcagtgagcccctccctcaaggaggtctggctttatccatagacagggccctctgaggtggggctgaggtacaaagggggattgagcagcccaggagaagagagatgggggttcccttcttctcttctctcagatgcatggtggacttaggaccttgctgggctgggggtctcactgcagagatgaagctgcttctggccctagcagggctcctggccattctggccacgccccagccctctgaaggtgctgctccaggtaacagttcccaaggtgggagaagatggtgtgttggggtggttgtgttccagagaccccttttctcagagcaggccttcctagctctggggcctgatagggggttggggcccattcctgactttgtgatccctgctctgggcagctgtcctgggggaggtggacacctcgttggtgctgagctccatggaggaggccaagcagctggtggacaaggcctacaaggagcggcgggaaaggtggggcacgaggcactgcccagctctgggcaaggatgtcccaggcctttcagagaagcagcaggcagcagggagcttgaaggtgggagagggggactatggggacccatgtggactccctttctgtctgtctgtccctgtgtttctggatgggagaacagcttaaaagccatccttcccaaagccttgcctctgtctggacacccaggtccatatcctttttataaaaggaagccttcctcccacccgtgggcctgcctgcatggtcctgcatgtctgcccctgggctggggctctgctgggtgggtctgtatcccttctctggccctcactcctcctttctccaagcagcatcaagcagcggcttcgcagcggctcagccagccccatggaactcctatcctacttcaagcagccggtggcagccaccaggacggcggtgagggccgctgactacctgcacgtggctctagacctgctggagaggaagctgcggtccctgtggcgaaggccattcaatgtcactggtactgttgccca

SEQ ID NO: 776 - DNA, 6000 bp, Homo sapiens
ataccaaaaagttaacagaatggcccaaaagaatgcctcatttggttaagaatctcacatatgttgtaaaatatagacaaagtgaagtgtatactcagatatttatttactggaacttcattaataatgagcaaacaataattaagtaagcagcaacataaagctatgcttttaaaagagggctgggaaagagttcttggcaatagcttagggggccacatgatgataatgatcacaatcatggttaactatatgctacagacactgttctaaatgctttatttaaacctattcattcaatcctaacaagaagggtattgacttcattgtccaggaggaaactgagatagcaagaagtaaaaagtaactaatccaagagttgcatagtaatagagctagaatttgaaaaaaagcagtctagctttatagccctggcttttaacactacctgcctagtccttccaggtaatctataaagaacaaagttatcattaaaaaactcaaggacaagagaaaatactcccatgaactactgaaaagattaagtagttcaagaatacaaacaaactcttgagcaattataggtatattagctgtgatataattactcaatagattgcccttgcttaatttaaatatgccttaaactttaagtatcaccttttatctgacacagaaaattatctcctgttcaaatttccttgatgctgcaaatcaaggagcatattttaaaataagctttatataagggcctacataatacctaacttcagttcagcaaactccatccaaagctgctttcccatataaaataaggaatttcttgaggcaatatgctcttagcaatttactattcctcaaaatatttgcaaggctttgtgaaagcagagtaacaatttacaaaaccacgacaaagttatcacttcaatttgtcctgtttattaggattctctaatctagagttcatttccacaccaaaatgggagacacagcaagggcacttgggcaaaaacaggaatgacagtagcacctagaactatcatctccgagaaagactaaagagactaaaaagtttgttaaatcaatggaaccaaaaaaaaagagtacccaacaatgcaaagaattaactcttctacaatggctatttacccagaataaaataactagagaaatggctctatatataatagataattaacataacaaaatattaaaattacaaacagcttggggaggtttttttttttgtaagagcaaataatacagttctctcctactgcttttcttttattttcttctcttttttttttgagatggagtctcgctctgttgtccaggctggagtgcagtggcgcgatctcggctcactgcaacctccgcctcccgggttcaaacgattctcatgcctcagcctcctgagtagctgggattacaggcgtctgccaccacacccagctaatttttttgtattttttgtagacaccgggtttcaccatgttagacaggctagtctcaaactcctgatctcaggtgatcttcccgcctcggcctcccaaagtgctgggattacaggcgtgagccacggcgcctggccagttctctcctactctttagcaacaacattcacagtagacacgtgttaaggctcctccgtcatttccacttgccagaaagataactcaacacatgacagtcatgaagcatgaactcagacaaactattctgaagaatataactgattttctttccttaatctattacacttcaaatctagccaagcacagtttttgttatgctacaatttataagactaaactagctaaagagggaaaaaaagtttgtaaataaggcttatgtgcgtatgtgtgtatttacgtgtgtatgtggatagatccctttaatacctaagagtaattattttcatgtgaacttggaaatattaccaaaccataataagatgcctggatacaaccttgttagaacagaaagaacacttgagaccttacagttcaggttctagcactacctaagccagatgacctcaagcaagccaattactaattactgattgtttctgagccttaattttctcctctgttaaatgggaatctacttatacattcacagagattccttctaattctaaatattggtttcagtgaaataataatgtttcttttttttttgagacggagtctggctctgtctcccaggctggagtgcagtggcgcaatctcggctcactgcaagctccgcctcctgggttcgcgccattctcctgcctcagcctccggagtagctgggattacaggcgcctgccaccacgcccggctaattttttgtatttttagtagagacagggtttcactgtattagccaggattgtctcgatcgcctgacctcgtgatccgcccaactcggcctcccaaagtgctgggattacaagcgtgaaccaccgcgcccggcccaataataaggtttcttatttaatgtaagtaagataggactacttctactctttagttaactatacgtaggcaaaaaacttcagctttttctgcacttggaagttctgaagtgacaatacatgacgaccaaaaaggatcagatttaaactcccgaatgcaaaactatactcattttccaggaacctatttattaaccatggtgactaattcaatggatcacggtatcaaactattctttgctaactttcaaaggtggggcaaagatcatctcagaaaagtatgtgataatattttcagataatgatgcaaagtaacagtattctacactgacatatctccagttctaagagtaaagtgataccatattttcatatttaataatttcatgtttactagctcatttaatctttgtgacagttgtatgaaagaaagtgagcagaatttttatcaacacaatctagaccagctcagaatgttaggtaacctatcagccattacttaacaagtgttggagcccagacttcaatccaggtcttctgatttaaagtttaatagttaccaaaatcctaaaaagtggtgattcaagccaaaagcgagaagttggaaaagtgagaaaaactggataatcagtccttcaattgaacataaagaagataagatcagatttggcagttatataatcaagaagcaaatttaccgaatgttaaactaatgatacatctatcataattccatatctcaaattttgtcaccttgtttcaaagccaagcgtgaacaaattttcaaactcaaaataagaaaaatatgtaaactgacaaactgatttaactagctataggtaaactggtaaaaggcatcatggttctatgtatattttcttctggaatgtgactcatagaaattaaactgtattaatcaattgtaatcaagtaggatatatccctcaaaggaaaaaagtaaccttcagtgccttaagataatgtaggcaaagtagtaaaatataaaatttctactcgagagagtcacttcatacctacacaaatcagtcacatttgtctaggtaccaccatccctcttccacagtaaaaacataagctacaatgcatacaatgatgcctagtaagtaagtttcttcctttcatcatctatgctaagaatacacaactaaaatcagagctaatgacaatacaattactaggtagtagcaactggaatattaaattctatcatgacaacaccagaaacacttgtacaagcttcttcaaatgatcaatgtaatctgtccacaaaaatctctgacaagccccaaagtagaaatgaaagacgttaacattaggataaggagcgatgctgccaaaacacatcaacagtggccagtctacgtgtattattagatttttacatggagttgcaggtaaataaaagatgattgtgtaaaatcttctggaggtcataagtaatctagcagtgtgacacagggccacatatggtttctggaattttagagattaagtcgaccttcacgttttactgcaaatacctccactgtaataagatatagaggtcggggttcaggggtttggaaaggcagacaactctttttcattaaagcagtgaaaaatctgagaagttcctctccaagggctctgcggagcgaaggcccattcccttggctaccctgtaccaccagagctttagatggcacttgcacgcctggatttcgtttaggagcgaatacatctagcatcatgcgccagaggttcgggagagcaaaaaccaaactgacagatcctgagaaatagctcagtcatcagcagggaagaccttctccacttactccaaggtcctggacatcccgggactaagaggttctctaaagaagcctagcaaggcttccaagtacgcggagaggagaacgaacagcccggtgtctgggttcaatgtccgggtgaccaaccatgagaaggtgtcccaaataacctggctaccgccagcgtgagacatccagggtgagacatccagtcagcagcgtcctaaaacactgctggaagtcggaatcacagtgccccagatccgcaatgcctaagtgggagagctccggaagacgccaagctctgaggacagcctcaggcttcggtccccaattccctgagttagtttacctacccgctccgaccccggctgctccggatctcaggatcctggaagctgctccttacggactctcacacccgccgctgggctccagacaaccggaacccgctcacgtcacttccggtccggtccctctgccccctgagacagcctccagaagggatacgttcctccctcctttcggcgagctcggttgatcctcgcgggatttcagttaggctcttagtgcgggccctgtgggtgtggcaagaggaagaatgactgctcgctttgtgattcttgatccggaacttgtcacccaggaaccccggaagaggtagctcacgcgatagaaacgtgttcgctgcccagaagaagggaaggcgcgagtgaggaaaggaggtactgtaggtaggttggttggctccttacagggcgaaggagaccaatatcattattcattttctcgccagtaggaacgtttcttttcacctcgttgcattacccaccttcttcattttctcctttataaactgtcttccgcccaggggccgctgagccctctgttcctgttctgcgaaccgtcctttggaggaaaggaacaggctgctggggaggggaagactcagaatttctagttcccagcaaagcctccaggcaggcagtatcgatgcgctctctccgaaattgataaaatagcgagcaggcctcataccctcagctgggcacttatgaatatccccagcgtttcgagctgtcgagctctgcgtggaaagaattggtttctaagaatatagtcgaaaatttggggccgggcgcggtggctgacgcctgtaatcccagcactttgggaggctgatgtgggcggatcacctgaggtcagaagttcgagaccatcctggccaacatggcgaaaacccatctatactaaaaatacaaaaattagccggcgtggtggcgcgtgcctgtaatcccagctactcgggaggctgaggcaggagaatgacttgaactcgggaggcggaggttgcagtgagccgatatcgctccattgctctccagcctgggcgacagagtgagacttcgtctcagaaaaaaaaaaaaaagaaagaaaaaatttcccccctttttcacacaaagagattaactagagaggtattaatccttactgacataccccaggcaccatactagactctgggaatatgttatacagggaaagtggggcagtggcttaagggtcagagaagatttgggaaaggtttgtttgtttttttcggttgtaaactgcagacccggcgcggtggctcagcctgtaatccaacactttgggaggctgagacaggaggattgcttgagcccaggagtttgagaacagcctgggccacatagggggcca

SEQ ID NO: 777 - DNA, 6000 bp, Homo sapiens
tctataggaattgtcttctttaatgtgcctaacagcacttcaaggtaaatagagctggtcatggacttactgtagtttcgcttaagctttttggctttacaatggttcaaaagcaacacatattcagtagaaactttacccatacaaacattctgtttttcaccttcagtacagtattcaacgaattacatgagatattcaacacttgtaggccttatgttagatgattttgccctattgtacgctaataaattaagtgttctgagcacctttaaggtaggctaggctaaactaccatgtttggtaggttaggtgtattaaatttatttccaacttctatttccttttctaagagacagggtttcactcttttgtccaggctggaatacagtggagtgatcatagctcactgcagcctcgaactcctgagctcaagcaatcctcccacttcaacctccccagtagctgggactacaagcacataccaccacacactgctaatttaaaaaaaaacttttttttttaagacacaggggtttcattatgttgcccaggctggtctcgaactctgggcctcatatgatccctcccacctcagcctcccatgtagctacatttacaggcatgagccactgtgcctggctctcaatttatggtactttcaatttatgatgggtttatcaggatataaccccaccctaagttgagaagcatctatatataattatgatccccatttttcggatgtagaaaaatgaggtacacaagttatagcttgcctaaattcacccagctcataagtggtcgtcttaatccagagcccttgttcttttttctttttgagacagagtcttgttcttgtctcccatgctggagtgcaatggcacaatctcggctcactgcaacctctgcctcctgggttcaagtgattctcctgcctcagcctcccaaatagctgggattacagacacccgccactacaccgagctaattgtttgtatttttagtagagacggggtttcaccaggttggccaggctggtctcaaactcctgatctcaggtgatccagccacctcggcctcccaaagtgctgggattacgggcgtgagccaccatgccctgccgagcccttgttcttttttttggagacggagtctcactctattgccaggctggagtgcagtggtgcaatcttggttcactgcaacctccacctctggggttcaagtgcttctcctgcctcagcctcccaagtaggtgggacttcaggcatgtgctaccacacccggctaatttttgtatttttagtagagatggggtttcaccatgttggccaggctagtctcgagctcctgacctcaggtgatccacccacctcgacctcccaaagtgctgggattgcaggcgtgagccaccatgccctgccgagcccttgttcttaacattactatatcaggcctctcccagcagtctagatgagatgatggtcatttagacaacagtagtgggaatgagaaataaaaaaagtgtctaaggtacacctgtctgatttagtgactgacaggaagtctggtggcaaaagaaagggagaagttaataatgacagctagatttgaacaaatggagaattttggtgaaataccaggtttgaatggaaaagataatgaattagttttgttctgaacaaaagacatctcagagatatctagaaagaagaaaaaaaaggatatatcagcttaaaggacagaaaggtctaggatatatcagtttaaagtcagaaaggtctgggctggaaatatagatttgagagaccttaccatataattgaagttactgaagagatggaagagtatgaggccacttggacaaatatgtagaatgaagaaaggactaaaacataatcctgaggaaatgaacattaggaatcaaaggagactgacatggagtggccaggagtaggagggtcacatagggtaagctgtagtgcacctagtttcagtgctcttccactcaagtgcctaaatacggtgacagggctgcacagacatagtatttatggttctagtgcctttacagcccccaccccctaaaagagacaaagacagagaattcttttttttttcttaagacggcatctcactttgtcacccaggctggagtgcagtggcgccatctcagctcactgcaacctctgcctccgggttcaagcaattctcccgcctcagcctcccacgtacatgggattacaggcacccgccaccacacctggctaatttttgtatttttagtagagacggggtttcaccatgttggccaggctggtctcgaactcctgacctcaagtgatctgcctgcctcagcctcccaaagtgctgggatacaggcatgggccaccatgcctggccaagtttctatttgatgcttacatatcagcaggacttttctttgataatctaacaaccagactccaaactgaacaaatatgcaatgtcagcaattaggattctctgaaataatttctaggctgcaaagtaaccaaatatcccatacactacattccggtactatctggagaaggaactgctctacatagagaagctattatgtgctggataacatactaaatcctttatatccattacctcatttattgttgctatgaacacataaaaaggaagatatattagcctcattttaaagatgagaaatatgaggatcaaacagagaagttgcctttttctttatttttttttaaagagaaggggtctccctctgtcacccaggctagagttcagtggcatgatcatagctcgctacagcctcaaactcctgggcttaagcaattctcctacctcagccttccaagtagatgggactacaggtgcatgccaccacaccctcctgattttttaaaaattttttatttttgtatggacttggtcttgctatgttgcccaggctggtctggaactcctggcctcaaggagttgcttgaggtcgaggcagcagcatctcgagtccagttcaaaaccaatctgggcaacccagtgagacctcatctttacaaaaaatttaaataattagccagatgtggtgccacatgcccatactcccagctactcaggggataaggtaggaggacacctcaggctgggaggtggaaattgcagtgagccatgatcgtgccactgcaccccaggctggacaacaatgcaaaaccctgtctccaaaaaaaaaaaaaaacccaataagatcaaaaacaggacagtgaaagttccaaaagttaccaagtttatttattatgtcccatatctcaatggagtgtctaatcataaaaatgctaaaattaacacatatttttgttctttaggatgttctaatctcatattaatctgatcagattatcatctaactcctctaaaacaacatgtctgtctctttttctgtacacttacgacaagcgtatcaataagcctagtgcctaagactaaggtaaaacaaataaccattctttgtctcataaataattctgggcaatgacagcagaacaaaataagtacatcctataaaatcttcttcttggtgccttctaattcccctgcctcagtaaacccatttcagtagtgctcttgatcccattacctccttctgcaccatgctccacccgttaatctttttttaagagacagggtctcactatgtggccccctatgtggcccaggctgttctcaaactcctgggctcaagcaatcctcctgtctcagcctcccaaagtgttggattacaggctgagccaccgcgccgggtctgcagtttacaaccgaaaaaaacaaacaaacctttcccaaatcttctctgacccttaagccactgccccactttccctgtataacatattcccagagtctagtatggtgcctggggtatgtcagtaaggattaatacctctctagttaatctctttgtgtgaaaaaggggggaaattttttctttcttttttttttttttctgagacgaagtctcactctgtcgcccaggctggagagcaatggagcgatatcggctcactgcaacctccgcctcccgagttcaagtcattctcctgcctcagcctcccgagtagctgggattacaggcacgcgccaccacgccggctaatttttgtatttttagtatagatgggttttcgccatgttggccaggatggtctcgaacttctgacctcaggtgatccgcccacatcagcctcccaaagtgctgggattacaggcgtcagccaccgcgcccggccccaaattttcgactatattcttagaaaccaattctttccacgcagagctcgacagctcgaaacgctggggatattcataagtgcccagctgagggtatgaggcctgctcgctattttatcaatttcggagagagcgcatcgatactgcctgcctggaggctttgctgggaactagaaattctgagtcttcccctccccagcagcctgttcctttcctccaaaggacggttcgcagaacaggaacagagggctcagcggcccctgggcggaagacagtttataaaggagaaaatgaagaaggtgggtaatgcaacgaggtgaaaagaaacgttcctactggcgagaaaatgaataatgatattggtctccttcgccctgtaaggagccaaccaacctacctacagtacctcctttcctcactcgcgccttcccttcttctgggcagcgaacacgtttctatcgcgtgagctacctcttccggggttcctgggtgacaagttccggatcaagaatcacaaagcgagcagtcattcttcctcttgccacacccacagggcccgcactaagagcctaactgaaatcccgcgaggatcaaccgagctcgccgaaaggagggaggaacgtatcccttctggaggctgtctcagggggcagagggaccggaccggaagtgacgtgagcgggttccggttgtctggagcccagcggcgggtgtgagagtccgtaaggagcagcttccaggatcctgagatccggagcagccggggtcggagcgggtaggtaaactaactcagggaattggggaccgaagcctgaggctgtcctcagagcttggcgtcttccggagctctcccacttaggcattgcggatctggggcactgtgattccgacttccagcagtgttttaggacgctgctgactggatgtctcaccctggatgtctcacgctggcggtagccaggttatttgggacaccttctcatggttggtcacccggacattgaacccagacaccgggctgttcgttctcctctccgcgtacttggaagccttgctaggcttctttagagaacctcttagtcccgggatgtccaggaccttggagtaagtggagaaggtcttccctgctgatgactgagctatttctcaggatctgtcagtttggtttttgctctcccgaacctctggcgcatgatgctagatgtattcgctcctaaacgaaatccaggcgtgcaagtgccatctaaagctctggtggtacagggtagccaagggaatgggccttcgctccgcagagcccttggagaggaacttctcagatttttcactgctttaatgaaaaagagttgtctgcctttccaaacccctgaaccccgacctctatatcttattacagtggaggtatttgcagtaaaacgtgaaggtcgacttaatctctaaaattccagaaaccatatgtggccctgtgtcacactgctagattacttatgacctccagaagattttacacaatcatcttttatttacctgcaactccatgtaaaaatctaataatacacgtagactggccactgttgatgtgttttggcagcatcgctccttatcctaatgttaacgtctttcatttctactttggggcttgtcagagatttttgtggacagattacattgatcatttgaagaagcttgtacaagtgtttctggtgt

SEQ ID NO: 778 - DNA, 6000 bp, Homo sapiens
cgtctcaaaaaaaaaaaaaagaagcttggtggctggctgacctgtttcaagacaagcagctttttggaatgtatcttccataggagatgtacggttccccaaaacaaggcagcttacatccatagccaaccctatgagcccaagctgcagcagctcagctcactcctccctctcctcaaagcctccccagtgctttcaaaatcatgacagttaatatgcattgagcacttcctatgtgcaaggcaccactctaagcattttgcatgtgggagctccagacaactcagtgaggtaggtactactctccaaccattttacaaataaggaaaccgaggcacagctggtaaggcagattgcctaaagtcacacagctactgggtgatagagcccgaacagcagttggatctcctgctgagatgagcaggcagggagccccgcacctcccacctcactcatcacctgggggctccatgccgattgccttggccatctccccctgcaggattcacccagcacttctgtcttccagcacttcgccctgtgcctggcaaaagcaggctctcggcagaggtttatggaatggatgaatgaacttgacttgtgtcagagcattgtaatttacaaagcactttctcatccattacctcaagggctattccttgagtcttctttgtcttccactgggctctacccagaagtgtatggtcatgcagccacgtaacactgaatggatgagaaaaagaatgaactgattacagagagaaggagaatccatttcattaccctgcaagcattgtgagggcaaagaccaggtcctactcatcattatatatcaatgcccagcccagtgcctggtgcatggagctcaatatttgtgaaatgtgttgaataaaccagtttcctcctctgctctcctgataggctggagggagagttgaactaactgggttacttctatttctatcacgctttgatgtgcagaatctttttttttttttaatttcaaatctcttatggcaaaaggttctttttctttcttccttttcttttctttctttctttctttttttttttttttttttttttgagacagagctctgtcgccaggttggagtgcaatggcgcgatctcggctcaccacaacctctgactccctggttcaagcgattctcctgcctcagcctctcaagtagctgggattacaagcatgtgccaccacactcagctaatttttgtatttttagtagagacgaggtttcaccatgttggccaggatggtctcgatctcctgacctcgtgatccacccgcctcagcctcccaaagtgctgggattacaggcatgagccaccatgcccggccctttttatttcattttattattattttttttaacagggtctcactctgttgcccagactaaagtgcagtggcacgatcatggctcaccgcagccttgacctccctgactcaagcgatccttccaccttggcctcccaagcagctgggactacaggcacaggccaccactcctggctaacttttttctattttttgcagagatgggggtgctcactttgctgcccaggctggtcttgaatgtccatgctcaagtgatcctctcgcctccgcctgccaaagggaaggaaaaggttctggctccagttttacaggtggcaaaacggaagcccagagaaactgtgtgtcttgtccaaatctcactgagtccccagcacatgctggggagaggtgatggcacggactgaggatacagtggcaaaggcagtgcgcacctatcaattccagggccggcaaaagggccagttctgggttctggcatcccaagctccctgtccctggcggcagtctcttccttccctttcagcacctcattatcctggtatctaggaagagcgcagggccccaggcccacagcgtctgcatcccgagaggtgaaaatctaaatgccactgaggcagctctcgggtgtccccagcaccacacagcccatttggggacaagatgacaaaacttgccatccttcataaggctggccccgggtctccaagcccaaactatctacgtcagtgccaacgtgaccagcagcaaaccaatctttcacctcaatcacttcctctcctcccctctaccccctccccgccagtgatcaagtcctcccccaccccaagagaggcagggggtcacattccagggggtgtgggccatctggcagtagcctgaaccccggaaaactgctttccggaaattctctcctgctagaattttattcccaggtctgaccccagcctggggtgtgaatgcccccttctcggccacctttccagctccggagacagccattcccgcagatccctggcgtgcctattccaaggcctgggccgcgcagcaccaaactgccctcccctaggagaccccagggcgccctctggcggacgcgggccgtaggttggggccatcgttccacctcgagctctccagcccggccgagagcacctggcccaacccacaccggaccaaccaggtttgcagaccccagtgcatgaaagcgttttcataggggaggggaggggggctccacactcgcgtcagggttggcaaagaacctggcagtgggccgaggctgggtagctgccacgaaggggcgtcccctgcagccctgggtctcccctctggaatctgcccgcaggtgactgtcgcacgtctccaacctccggctcccgggtctgaccccagccccgctgcctggctgtggggtagccccacttccctttcggctggcccgggccgcctgacccgcagttgggccctcggggaggcccgggtggcggcgagggggtgtccccgcggggtccgggaaaaggggaaggggaaccgggaggctctccaggtcggcctcctagaactgcccgctctcccgaagcggcgcccccgcctctgccagaaatcagccttcttagaagggaggggggtggggggaaagtgtgaatgagaagttgggggcggagcgcgcggcggggaggggccgctgccaggaacgcgccgccggggctggcgccgcgcccaccggccgcctcggccgcctctcgtcgcgctttgtctccgcgcgcgtccctcccggtccctgcccctgctcgcggcccgccctcggcgcccgcggcccctccctcaccctccgcgctcagcctttctctgctgcgagtagtgactaaacattacaagaaggccggccgcgcagttccaggaatcggggggcggggcgcggcggccgcctatatacccgcgagcgcggcctccgcggcggctccgacttggactccctgctccgctgctgccgcttcggccccgcacgcagccagccgccagccgcccgcccggcccagctcccgccgcggccccttgccgcggtccctctcctggtcccctcccggttggtccgggggtgcgcagggggcagggcgggcgcccaggggaagctcgagggacgcgcgcgcgaaggctcctttgtggacttcacggccgccaacatctgggcgcagcgcgggccaccgctggccgtctcgccgccgcgtcgccttggggacccgagggggctcagccccaaggacggagacttcgattcgggaccaggtaggaaggaggagcgcggcgtggggaggggtctcgctcagtcccgggagcttttcccggtttcccctccccttcccgggtcattcccggcagggaggtgacgaggtaggggcagagcggatggaagccggagatcccaggttcccggaatactccggctggggccttcgggcttctcctgtcccctccctacccccgtgcctcgggtttctccctccgtccacaccgcccggggctactggactgagcggcgcccaggcagtcccgggggcccttctcctgctccccacccggccacactcctggagacctaacttccgcgcgcgagtttcccacgctgcgcccttgcagtgcgcgcctgggaaggggctgcccggggccaccctgccggcaggggcgggagccgtgcgggctccgtgaggcgcctggatcggagcgcgggcccaggagagggcccccggggcagtgggtgccccagtcgctcggcgaaggcaggggagccggggcgggccgggcgcgctggagggttccgggcactcaacgcgctcgcgccttcctctccgcagccccccgggatgcggtagcggccgctgtgcggaggccgcgaagcagctgcagccgccgccgcgcagatccacgctggctccgtgcgccatggtcacccacagcaagtttcccgccgccgggatgagccgccccctggacaccagcctgcgcctcaagaccttcagctccaagagcgagtaccagctggtggtgaacgcagtgcgcaagctgcaggagagcggcttctactggagcgcagtgaccggcggcgaggcgaacctgctgctcagtgccgagcccgccggcacctttctgatccgcgacagctcggaccagcgccacttcttcacgctcagcgtcaagacccagtctgggaccaagaacctgcgcatccagtgtgaggggggcagcttctctctgcagagcgatccccggagcacgcagcccgtgccccgcttcgactgcgtgctcaagctggtgcaccactacatgccgccccctggagccccctccttcccctcgccacctactgaaccctcctccgaggtgcccgagcagccgtctgcccagccactccctgggagtccccccagaagagcctattacatctactccgggggcgagaagatccccctggtgttgagccggcccctctcctccaacgtggccactcttcagcatctctgtcggaagaccgtcaacggccacctggactcctatgagaaagtcacccagctgccggggcccattcgggagttcctggaccagtacgatgccccgctttaaggggtaaagggcgcaaagggcatgggtcgggagaggggacgcaggcccctctcctccgtggcacatggcacaagcacaagaagccaaccaggagagagtcctgtagctctggggggaaagagggcggacaggcccctccctctgccctctccctgcagaatgtggcaggcggacctggaatgtgttggagggaagggggagtaccacctgagtctccagcttctccggaggagccagctgtcctggtgggacgatagcaaccacaagtggattctccttcaattcctcagcttcccctctgcctccaaacaggggacacttcgggaatgctgaactaatgagaactgccagggaatcttcaaactttccaacggaacttgtttgctctttgatttggtttaaacctgagctggttgtggagcctgggaaaggtggaagagagagaggtcctgagggccccagggctgcgggctggcgaaggaaatggtcacaccccccgcccaccccaggcgaggatcctggtgacatgctcctctccctggctccggggagaagggcttggggtgacctgaagggaaccatcctggtaccccacatcctctcctccgggacagtcaccgaaaacacaggttccaaagtctacctggtgcctgagagcccagggcccttcctccgttttaagggggaagcaacatttggaggggatggatgggctggtcagctggtctccttttcctactcatactataccttcctgtacctgggtggatggagcgggaggatggaggagacgggacatctttcacctcaggctcctggtagagaagacaggggattctactctgtgcctcctgactatgtctggctaagagattcgccttaaatgctccctgtcccatggagagggacccagcataggaaagccacatactcagcctggatgggtggagaggctgagggactcactggagggcaccaagccagcccacagccagggaagtggggagggggggcggaaaccc

SEQ ID NO: 779 - DNA, 6000 bp, Homo sapiens
gggagagattaggaaaaggcaaaagtctcctaaatcccttagacgggaaatcaggagggcagagcagaggggccagatctcccctcgacccccccagcagagggaagataagagcaagcaagcctgcgactctctggctctggcttctctcagccggggtccctgcctggaagcagctctggagcgtaccctgtaaaggcccaggtgtctccacccacattttcagaaacgttttcgtcttcattcctttgtcttcagattaacaggcctctaatctccagcgagccatggatggggcttcccagcactcacaccctctatcccatctgtatagctcctgagccctgcatggaaaaccaaaaagtactctagaagaaagcaggttgtggtctctaaaaacaatggaaagaagtcaacatcatccttgacttagagattcattctacgtaccaggttccagtcttaaaaagaaaaaaaaatcaaatatagtctgtttccccaagatcctcactggagatatagtcagaacattttggttaatgcaaaaagagctacctggaagtttagagtgtctgcctttttccgtcttttttttggagacagagtctcactctgtcttccaggctggaatgctgcggcacaatcatagctcaccgcaggctctacctgctgggctcaagcgatcctcccacctcagcctcctgagtagctgggaccacaggcgcgcaccaccatgcccggctaatttttaaaattttttgtagagatggagtctccactatgttgcccaagctggtctcaaactcctgagctcaagcaatcctcccacctcggcctcccaaagtgctgggattactggcacgtgccaccacgcccagcccgtctgccaaattttaaaggaaaagtagaaatcagccaaggtgtggaaggtagttccctccttgtccccagacagggaagcaaatgtgcagaaacccaggactgaggaacgttaccttctggacagcttggagctccatgtagctagagcacgaggcaccagtcgctgaggcagtggcagccgatgaaactgacatggagcagcgtgggacacacactgcaccgaggagtctggattcatccagaaagtgatgggaaaccatgggagagattagaatgccaaagggaaggccaggcacgatggctcatgcccgtaatcccagcactttgggaggccaaggcaggcggatcacctgaggtcaggagttcgagaccagcctggccaacatagcgaaaccctgtctctactaaaaatacaaaaaaattagccaggcatggtggcacatgcctgtaatcccaagtactcgggagactgaggcaagagaatcacttaaacctgggaggcggaggttgcagtgagccgagatggcaccactgcactccagcctgggtgacaggtgggactccgtctcaaaaaaaaaaaaaagaagcttggtggctggctgacctgtttcaagacaagcagctttttggaatgtatcttccataggagatgtacggttccccaaaacaaggcagcttacatccatagccaaccctatgagcccaagctgcagcagctcagctcactcctccctctcctcaaagcctccccagtgctttcaaaatcatgacagttaatatgcattgagcacttcctatgtgcaaggcaccactctaagcattttgcatgtgggagctccagacaactcagtgaggtaggtactactctccaaccattttacaaataaggaaaccgaggcacagctggtaaggcagattgcctaaagtcacacagctactgggtgatagagcccgaacagcagttggatctcctgctgagatgagcaggcagggagccccgcacctcccacctcactcatcacctgggggctccatgccgattgccttggccatctccccctgcaggattcacccagcacttctgtcttccagcacttcgccctgtgcctggcaaaagcaggctctcggcagaggtttatggaatggatgaatgaacttgacttgtgtcagagcattgtaatttacaaagcactttctcatccattacctcaagggctattccttgagtcttctttgtcttccactgggctctacccagaagtgtatggtcatgcagccacgtaacactgaatggatgagaaaaagaatgaactgattacagagagaaggagaatccatttcattaccctgcaagcattgtgagggcaaagaccaggtcctactcatcattatatatcaatgcccagcccagtgcctggtgcatggagctcaatatttgtgaaatgtgttgaataaaccagtttcctcctctgctctcctgataggctggagggagagttgaactaactgggttacttctatttctatcacgctttgatgtgcagaatctttttttttttttaatttcaaatctcttatggcaaaaggttctttttctttcttccttttcttttctttctttctttctttttttttttttttttttttttgagacagagctctgtcgccaggttggagtgcaatggcgcgatctcggctcaccacaacctctgactccctggttcaagcgattctcctgcctcagcctctcaagtagctgggattacaagcatgtgccaccacactcagctaatttttgtatttttagtagagacgaggtttcaccatgttggccaggatggtctcgatctcctgacctcgtgatccacccgcctcagcctcccaaagtgctgggattacaggcatgagccaccatgcccggccctttttatttcattttattattattttttttaacagggtctcactctgttgcccagactaaagtgcagtggcacgatcatggctcaccgcagccttgacctccctgactcaagcgatccttccaccttggcctcccaagcagctgggactacaggcacaggccaccactcctggctaacttttttctattttttgcagagatgggggtgctcactttgctgcccaggctggtcttgaatgtccatgctcaagtgatcctctcgcctccgcctgccaaagggaaggaaaaggttctggctccagttttacaggtggcaaaacggaagcccagagaaactgtgtgtcttgtccaaatctcactgagtccccagcacatgctggggagaggtgatggcacggactgaggatacagtggcaaaggcagtgcgcacctatcaattccagggccggcaaaagggccagttctgggttctggcatcccaagctccctgtccctggcggcagtctcttccttccctttcagcacctcattatcctggtatctaggaagagcgcagggccccaggcccacagcgtctgcatcccgagaggtgaaaatctaaatgccactgaggcagctctcgggtgtccccagcaccacacagcccatttggggacaagatgacaaaacttgccatccttcataaggctggccccgggtctccaagcccaaactatctacgtcagtgccaacgtgaccagcagcaaaccaatctttcacctcaatcacttcctctcctcccctctaccccctccccgccagtgatcaagtcctcccccaccccaagagaggcagggggtcacattccagggggtgtgggccatctggcagtagcctgaaccccggaaaactgctttccggaaattctctcctgctagaattttattcccaggtctgaccccagcctggggtgtgaatgcccccttctcggccacctttccagctccggagacagccattcccgcagatccctggcgtgcctattccaaggcctgggccgcgcagcaccaaactgccctcccctaggagaccccagggcgccctctggcggacgcgggccgtaggttggggccatcgttccacctcgagctctccagcccggccgagagcacctggcccaacccacaccggaccaaccaggtttgcagaccccagtgcatgaaagcgttttcataggggaggggaggggggctccacactcgcgtcagggttggcaaagaacctggcagtgggccgaggctgggtagctgccacgaaggggcgtcccctgcagccctgggtctcccctctggaatctgcccgcaggtgactgtcgcacgtctccaacctccggctcccgggtctgaccccagccccgctgcctggctgtggggtagccccacttccctttcggctggcccgggccgcctgacccgcagttgggccctcggggaggcccgggtggcggcgagggggtgtccccgcggggtccgggaaaaggggaaggggaaccgggaggctctccaggtcggcctcctagaactgcccgctctcccgaagcggcgcccccgcctctgccagaaatcagccttcttagaagggaggggggtggggggaaagtgtgaatgagaagttgggggcggagcgcgcggcggggaggggccgctgccaggaacgcgccgccggggctggcgccgcgcccaccggccgcctcggccgcctctcgtcgcgctttgtctccgcgcgcgtccctcccggtccctgcccctgctcgcggcccgccctcggcgcccgcggcccctccctcaccctccgcgctcagcctttctctgctgcgagtagtgactaaacattacaagaaggccggccgcgcagttccaggaatcggggggcggggcgcggcggccgcctatatacccgcgagcgcggcctccgcggcggctccgacttggactccctgctccgctgctgccgcttcggccccgcacgcagccagccgccagccgcccgcccggcccagctcccgccgcggccccttgccgcggtccctctcctggtcccctcccggttggtccgggggtgcgcagggggcagggcgggcgcccaggggaagctcgagggacgcgcgcgcgaaggctcctttgtggacttcacggccgccaacatctgggcgcagcgcgggccaccgctggccgtctcgccgccgcgtcgccttggggacccgagggggctcagccccaaggacggagacttcgattcgggaccaggtaggaaggaggagcgcggcgtggggaggggtctcgctcagtcccgggagcttttcccggtttcccctccccttcccgggtcattcccggcagggaggtgacgaggtaggggcagagcggatggaagccggagatcccaggttcccggaatactccggctggggccttcgggcttctcctgtcccctccctacccccgtgcctcgggtttctccctccgtccacaccgcccggggctactggactgagcggcgcccaggcagtcccgggggcccttctcctgctccccacccggccacactcctggagacctaacttccgcgcgcgagtttcccacgctgcgcccttgcagtgcgcgcctgggaaggggctgcccggggccaccctgccggcaggggcgggagccgtgcgggctccgtgaggcgcctggatcggagcgcgggcccaggagagggcccccggggcagtgggtgccccagtcgctcggcgaaggcaggggagccggggcgggccgggcgcgctggagggttccgggcactcaacgcgctcgcgccttcctctccgcagccccccgggatgcggtagcggccgctgtgcggaggccgcgaagcagctgcagccgccgccgcgcagatccacgctggctccgtgcgccatggtcacccacagcaagtttcccgccgccgggatgagccgccccctggacaccagcctgcgcctcaagaccttcagctccaagagcgagtaccagctggtggtgaacgcagtgcgcaagctgcaggagagcggcttctactggagcgcagtgaccggcggcgaggcgaacctgctgctcagtgccgagcccgccggcacctttctgatccgcgacagctcggaccagcgccacttcttcacgctcagcgtcaag

SEQ ID NO: 780 - DNA, 6000 bp, Homo sapiens
gggcagagtggagtatctggtgaaatggagaggctggtcgcccaagtaagtcgcggcggagggcgggggcccgggggccgaggcgcggggctcggggccgcggacccgccgagctgctgggggggtggggggagcggacgggaggcggggtggaggtggggtggagggaggagggggtggggaagtcggtggcaggcactggggaagccgagccgccgagcccgagcccggcgccctgtgttgtgctccgctctccgggaaatgccatcactaatttatgcactaaaaggagccggaggagctggagagacgcggggccgagccggggaggccggcggagggagggagggcgcaggcactgactgatgtgcagcagaaaatggctcctttcccctttccctccaccgaacggctccatattgcaaaaccaaaaaaaaaaaattaaaaagcgacgaaaatgcaattgtgtgccttctccctcctagtggtgcagggaggggaagaagaaaggcagaaaatgttgggaactgtcactgcggcgcttttggtggagaattttttttctttaatttgaaatgcgaaggcaccggatggagatagacgcgcaggcacacgcacactcacacacacacacggaggcatatttttgtgttgctgagtatttggggtttgctcgcccgtgacagcgggctcctgggccacgagggggtgtgggggggacgcttggctgttggctatcggattaggggtcaaatggagaacggctgaagccctcgcggggactcggggctggggagaggagggggactgcgactttgcatttcggctgctttgcacgcagggttcctggtgagcaaagtggctttggaacatgtcgcagtaacatgcttaaaattcttgacaactgcaaaataaactgctagtttcattttccttacccctcccctttcttcctgcccttgcgtgtttatttgaggggggggctgtgtatcagggactacgtcaggcctgcggaaatctaccttccacatccacggctaaatgttcataaagacagagtagggccttatgtcactccccacctggaggccgcggcaaaggtggcttttttttttttttttacaccgtgtccccctcccttttcccttgcaagatataacacgtgggaaccggaggagaacatcctggaccccaggctgctgatcgccttccagaacaggtgagcgtcccccacgcagccaccgcctgccacccgtgaccgtatatgggaatggcaaagtgggcgacgcagcaataggaaaggggcgtggagggggctggtgggagccccctccccaaccggcctggatgggcacgctgcggccccagctcctctaaccagcgtccttggcggttgctgcagcttggggtgggggcggggcaaggccagggaaggccaggcttgggttttgggggaagtttgggaagggtgtgtgtgggtggccatgcagctgcccggagaacttggggctgtgcctggttccccaggggcccctcctgttgcaacctgggagccccacccccggagcctaggtgttgctgtcctgcagccactggccgcttggcaccagcacctcgcggtgcagctctgagggagctggcattgtgaaaccgcccggacgtcatggaactgaacttaacctgttggcggctggaggaaagttgacatggccttaaaagctgcacccgcacaccccagggaatttaagcttggtcaggagtagattccatagggtgctgggttgccccccgccccggaccccactgggctgtttggcagggcagggccacccaccctcaaggcaggggggcttggcccaagggcctggggtgggcgctgcttggtggtggaggggtggcttcttctgggggactcatcctcgtgcgcacggttgcttgtcacgctgcagctgctgcagctgggttcgtcgccggtggctgtggttctctgtttcggagagggtagaagggggaagggcgaggaggggaggagcagccggggcccttggagctcggccaccccgctgccttccatctctcctcccccttttattttgcactatttcctgtggcgcgtttggcgctaaaactgtaaactgtagaccctctgagctagccaccggcggggcagggcagttgccctcccgcaatgcagggggggcacgtagctgggatcctgccccattccacctgggagttcaccaccctgtaaccatgtcagcggctgatgccacgttgcataatgggtccctgaagaattaaaacgcaggctgtcgcaatgccacgcaacttcagagtcaggccccggcccccgccctggggcatgtcagaactccccagggttggtccaaggaggcatgggggtggtagctagggtctgtgaggaacccgtttccggcccaggaatgggctgcaactttggcagacactagagaggcatcccactcgtccgtggagggctgggtagtgcctgggaagatccagcccccagctgtggatcacccttaggctggcctgcaggcaggagcctggtggctgtagtgaccggtgcctccgcccatgggctttattcattatttggaaattgaggcagccaggagccagactccgaggaggaggcggtgcttctctaagctgctccggccacgcccacctgctcagctgggaggagcgcagcgttcaccaggtggccacaaacctggccacaccctggccttggtggcccgcccccgcccccagcccctaattggctcatttgccgctgtgtaaacaagggcgcagcccctccccctgtttagtgcctggcctttaagaaagggccctcccttctgccggaggcactcgttatcggaatcttaatgaggtcattagcatcccgcgcttctgacgggagggatgaggtcggcgcacacctcgcttgggctggtttgtcttccctggatccccgtgtccactttgcttcgcacagagccacaggcccaaggccgtgggcaggagggccagaggtgcagccctgagcttctgcctcctgagcacagaggtggggcttgggggggtgctggttcgggtgtgggcatcaaagtgggggagccctttgcccaggacctcttgggcagaggagggttggtgtgagggttaagggcgcagaggcctgacctgccctgaactcttgattcctgtgtccggccagccctacctgatgctctctgaagcgggggggggggcatcacagaagattccggaattagcgggtagggggcgaccctgaggctaacagcactgccctctgttccctcccacccagggaacggcaggagcagctgatgggatatcggaagagagggccgaagcccaaaccgctagtggtgcaggtgaatacacacggccgcccctgggcacccccttgacatggccaccagagctgcctccaggcctggggatggggggggtggtggtggttcctcccagcaccctgaccctgttccctttctactagacctcccacctcctgccccccatgaggcagctgcggacctggtgggggctgggacgctccagaaactcccggcatgcggtggggctgtctcctccctcctctcacccctgcacccgttccctcaggtgcctacctttgcccgtcgttccaatgtcctgaccggcctccaggactcctccactgacaaccgtgccaagctggatttgggcgcgcaggggaagggccaggggcatcagtacgagctcaacagcaagaagcaccaccagtaccagccgcacagcaaggagcgggcgggcaagcccccgccgccgggcaagagcggcaagtactactaccagctcaacagcaagaagcaccacccctaccagcccgaccccaaaatgtacgacctgcagtaccagggcggccacaaggaggcgcccagccccacctgcccggacctgggggccaagagccacccgcccgacaagtgggcgcaaggtgcgggggccaaaggctacctgggggcggtgaagcccctggccggtgcggcgggtgctccaggcaaaggctccgagaagggcccccccaacggaatgatgccggcccccaaagaggctgtgacgggcaacgggattgggggcaagatgaagatagtcaagaacaagaacaagaacggacgcatcgtgatcgtgatgagcaaatacatggagaacggcatgcaggcggtgaagatcaagtccggcgaggtggcagagggggaggctcgctcccccagccacaagaagcgggcagccgacgagcgccaccctcctgccgacaggacttttaaaaaggcggcgggcgcagaggagaagaaggtggaggcgccgcccaagaggagggaggaggaggtgtccggggttagcgatccgcagccccaggatgccggctcccgcaagctgtccccgaccaaggaggcctttggagagcagcccctgcagctcaccaccaagcccgacctgcttgcctgggacccggcccggaacacgcacccgccctcacaccacccgcacccgcacccccatcaccaccaccaccaccaccaccaccaccaccacgccgtcggcctgaatctctcccacgtgcgcaagcgctgcctctccgagacccacggcgagcgcgagccctgcaagaagcggctgactgcgcgcagcatcagcacccccacctgcctggggggcagcccagccgctgagcgcccggccgacctgccaccagccgccgccctcccgcagcccgaggtcatcctgctagactcagacctggatgaacccatagacttgcgctgcgtcaagacgcgcagcgaggccggggagccgcccagctccctccaggtgaagcccgagacaccggcgtcggcggcggtggcggtggcggcggcagcggcacccaccacgacggcggagaagcctccagccgaggcccaggacgaacctgcagagtcgctgagcgagttcaagcccttctttgggaatataattatcaccgacgtcaccgcgaactgcctcaccgttactttcaaggagtacgtgacggtgtagccggagggcgtcggaaggggaagcgccattcccgcgggggggcggggagctgagcacctggggcctcggggcgggctcccctctcgccaacccgccaaccgcgagagacccaggctggcccccagggtgaggacgcccggagcggaggtaaccatgttccccctgcggcggctgtcagacctgggcggaggccccttccacgcggtgccggcggggctcgccctctcctgcccttccccgctggagatggacccccggaacggacagggcagctctgcgcccggcctcagagttctagtattatattttaaccgtgctaacttgtcaagtgctgactctactcccgtttgtacgtggtgttattattgaaatgtattgtttgagctcaaaaggcccgaccaccccccttcgggctgctatatatatatttatttgtaggtatttatatattgaaatataaaaacctagatttatggagtttcctctagatcatgttatattctatatcagacaaactattttcttttgacctttcttcccctccatccagtatttcggttgatttcattttctcccctctcttccccttccacgaactgcaataccagtaaccttggtatatattttttgatactgtacacatggatgtcttgtttctatgtgcaaaaaaaaaaaaaaaaaaaagtttgttaaaaggctacacgagctctctagaaactgctgctactagaaatgtctaaactataagcttccaactattacctgcttgaatgtaaatattaaatggagatgttgaaggtgcattttcgctgtttgagatgagcggacccctctcgccaccaactccgccttcgagccctgtgctgaacctttgcaccagcgaagtgggctggttttgcgggc

SEQ ID NO: 781 - DNA, 6000 bp, Homo sapiens
ggttcaccgcgctcccgcctttggggatcgatcggctggcgggcgacgcgcggccgcggctccggagcctccgcccccctccccctctcgggctacgcaggacgcggcctccaagcagcgtcctcgcggttccgggccgcggccaggccaggctgcaggccagccggggaggcggagacgcgccgggcccttccgatcgggccgcccctcggctccggggttggggagagggaactagagcgagcccagcttctccgccagcggcgctcggcgcccccttttctcgcccccctcccaagccaaatacccccacctcgcgcgcgcgcttaaccctcggcgcgccgcgaggctgggagctgggaggggagtagccgagggggaggggcgcaggggagcgagttggaggggggcagttgcgcttcggctgacgaccacttcggggtccgcctagcgatttttatttcattccctgccttgctgcagcagctcttggttggaaaaaggaagaaagaaatctgccctgcgagtgggccccgctgggtttgggggcgcgacggggacacccgagaggaaaacgcaggggctggcgtgaaggggtgaacctcaggggcacgggagagccgcggggcgaccttgagcaaacgaaacccaaataaaaacacagtgcgccgaggccgttgtgagcgcggcggcggcggcggcgggcggtggaagccgttccaaagatcatatttgaaatatggatcccgggggcgcagatctccaggccggcggggcctcgcgactgagtgggggccgggggccgggtgggcttctccgggcgggcctgaggtggctgccctgacgttgggagggacggacgtcgtagaaaacagcgcgtcccgcttcggcgcctgcgaccccagcgtgccgcaatgcggaggcgcggccctgcgggcggcggtgtggccccgaggggtgcttgggccctgccaaaggaccctggcgtcgcggtgctcggggcccgcgtccccgtccgcgcaccctgtcgggccagtccgcaggaacccccggctgcagtgccgcgcggcccgctagggtgggactcgggggcgtcggaggcttcgccgaccaaatgaaagccgagctttcacgggcggtgggacaaagagcagaaacattgaagtggggacccgggggttgggggggcacccttagaaacaaagccactcctccagaagggtggaggggcggagtgcagggctccctcacagcctccccctgcacgcacaaccccaccagttccgctgcccctaagctgccgctacaagtacgatatgatcaacgccagcgcgaagtttttctaaggacaagggagagaaatgagcgcttgttaaagcccgggtagattctgtagtggttactggtaaatcccctctcggtgatctgcaatccacctccgagggccgggaaaacgataccaacttgagagctttctgagtcgggggagcgacccgggaagccacaggcggcccgctcaaggcagagcccaaatctgggttccgtgggctggcggtggcaatctcctggcccagagcacccgctcagcgagaagattcccttaagaagtcgtttatttccccgggatggtgcgggtcatgcctcttcccagaccgaacacttagtagccaccctccagcccacggctgttaaaaggttcccgacctctccagggtccactccttcagcctggcccccaccaggagcgagcctgtggctgagctagatagcagctctcctctcctggggcccctgagggccctgggggcccaaaccgaggtggcgtctggaaggcttcagtctggcagcagaaccaggggctcgaccagcccctgtctgggagggggcagtatcaaataagcaggccagcggcccttctcggggacctgtgcggagctggttatccgaagtcgggggcaggagccccagcagaaggctctgggaatcccaggtgtagggctagtttctcctgcggctccctgggaggggccaagacagccgggtgggatggtatggggcacccccccgggaggtttcccaggaagggccctctggggcatcaggggagcttccagggcgtccgctgtaccttcccaggattctgtcccacctcctggcgcccattcgctctcccgcggacctgagctcctccccacaccggctggcaggggtggtctagggaccagccaccgaggttaggtaggggcctctctccccatctgcccaccatccacaaagacaaaataaataaccacggaagggaagtcaattgctggtgcttgtgcatttcactttcaaagtcgttggcaaaaaggccaggagcgggggtggccgggggctccttgggcttctgaagtgcttgggcggcccctcaggtagtcttggggagcctcaagacgcttcctgccgccgcacaggcagcaacagaaaagatccgctgcaccgacccccgccccttcctccccagctccgcggctggcccagcccgggtcctgcgcaaactcgtcgtcggggcaccgggtcctgctgtgtggccccgaagtcctgagcgtgggcccctgaggggcctgggcgtagtgagcgaagcggagtccgacgcccctggcagcagggaggctgcagcagccgctcggcctcccccggcagcccagacctggacgccgcggaaacacccattgcaaacagattttccaggggattttcaagagggggagggtagagtgtcgggaagctcagccccttcccggacaaggggactggccgggacaaagttgctgcagacctcccgatggtccgacggcgcagacggcctgtgcggcgtggacggatgactgccacctacagcgcttcccgcgccagcctcgcgacccctctccctccgcggtggagctgccccgcgcgacagttcttcgccctgggcaaaaatgccaggaaaaagccaaacacggcaggagaaaaatattttcctgtacacccacccagcttctggtggcccctgagagccggcccccaccccccgcaactagtcagggaaaccaggcaggcgtcgtcccaccttgcttgcccccccgccgcaccccaacactcagggaatcctaggtttgcgcctcaagctcgttagagatcagtcgcaaacccaacacctctgctgtcaccagaagacaaccgtcacccctacacccctggggaggggccacgtgggtctcggtgggtagcagccgccgggcagcagcagcctccgtggcgcaagagctgcaaggtggtaatgaaatggagtccacgtgtgcgttcaacaccagaccgtcttcgagcttctccgggattcctgggcgaacacgagccccgcgcaggctcctccctcccctgctcgcccgagcccccgtgcggtccccaacagacagccgggtcgcgtgtcagggcggtggtggagacccggatggctctttgcccgcccccatccctcgctccactctcgctctgcttttgctctttttctttctccgtggacgctcagccaagggattgcgcaagcctcctgctcgcggtccttcaagagcccggagccggggcccagacacaccccaggccaggcgcgcccctgcccctgcccctcgggccgcgctgtccgctcccgggtccccccaccccgaccccacggagctcgcgggccctcggcggcgccctcggcaggccgcatagggcgcagcagctccaccagccggacgcaggagccgcgcgccagaacgcgccgtctcgccgccggaggtgccaaacttcacactcgctgctgctcaggccgcgtcagtccggagggccttggcttggtcgcctgtcgggaacaagggtccgcggacacaaggcgaatgcgtggctcctcggccattccgttcatctcccctttgcgctgcccgttcgtcccccgctcagcctcaagctcttcccggccctcccagctccctgtttctaggccactcccgggaccccacgaagtcccctcaggcccccaggcggaccctggcctcccgcgcccgctctctctgcctcctacgcctctcgcctagcttggctctggaggctgctagaaacaggacatctcgccccgtcaataagaggaccaagtgtaaattcggagccattgaggatcggggtgggatcggatttggagccctttctgccgaggttcttgggcgccagggccccgggattggctgctcctcggtccccttcctcgtgcgttcttcaatctctccttggcacccagtcctcggccttctctccgccctgtccctttccctcctcgcgctccaaaatgcccggagcctggaggcgaggcggggcccgcagtggggcgcgagctgcccctgccccattccgccccctgccggcggggcccgcgcgtcccggggcgctggtgacgcaattcggtgcaactgggagcggcggcggatgcttccgtggcccccagcaggggtcccggggccgtgaacactgagaacgtgccgcgagggggaggcccgggcaccgggatgtgggcgaggggtcgccgccgagacccttccgggctgtcaagctctccgcccgcctccgccccggcggacacacctctccttcccggtcccgctccctctctgcagcctccctctcccaggctcgccgatccctccccctgcacctccccggcgccctcccctccgcgtcccccacccgcgccctttcctcctccccccgccgcccaggcccggggcctccggtaggcccggctgcgccaatccgcgccgcggcccgccccctgacgccgagctgggcccggcgaggccccgcccgctgacgtccgggatttgcatgagttcttgtgcagccgcggcccgggctcagttgtctgagcgagcgcgagccgggagccggggcgggcgcgggcagcggcgggccggccgggctgtgcggggcgagcggcggcggcggcgggggcgcttcggccggggcggcagctgggcgccggcgggagctagcagcgtctgcagccgcgccggccgccagcgccccggcgcgctccggctcggccatggagctgccagctgttggcgagcacgtcttcgcggtggagagcatcgagaagaagcggatccgcaaggtagggcggcgcgggggcggcgagcggcggccggagcggcccgcgaggaggcggggagggggtggggaggctgcgggccgggccggggatcccgcggaagctgatggagtgctgtctcttccccccagggcagagtggagtatctggtgaaatggagaggctggtcgcccaagtaagtcgcggcggagggcgggggcccgggggccgaggcgcggggctcggggccgcggacccgccgagctgctgggggggtggggggagcggacgggaggcggggtggaggtggggtggagggaggagggggtggggaagtcggtggcaggcactggggaagccgagccgccgagcccgagcccggcgccctgtgttgtgctccgctctccgggaaatgccatcactaatttatgcactaaaaggagccggaggagctggagagacgcggggccgagccggggaggccggcggagggagggagggcgcaggcactgactgatgtgcagcagaaaatggctcctttcccctttccctccaccgaacggctccatattgcaaaaccaaaaaaaaaaaattaaaaagcgacgaaaatgcaattgtgtgccttctccctcctagtggtgcagggaggggaagaagaaaggcagaaaatgttgggaactgtcactgcggcgcttttggtggagaattttttttctttaatttgaaatgcgaaggcaccggatggagatagacgcgcaggcacacgcacactcacacacacacacggaggcatatttttgtgttgctgagtatttggggtttgctcgcccgtgacagcgggctcctgggccacg

SEQ ID NO: 782 - DNA, 6000 bp, Homo sapiens
attttattttattttattttattttattttattttatttatctttttaagacagagtttcactcttgtcaccctggctggagtgcgatggtgagatcttggctcactacaacctccacctctggggttcatgcgattctcctgtctcagcgtcctgagtagctgggattacaagcacctgccaccaagcccagctaattttcatgtttttttctttttttttctttttttttttttttgagacagagtctagctctctcgcccaggctggagtgcagtggcgcgatcttggctcactgcaagctccgcctcccgggttcacgccattctcctgcctcagcctcccgagtagctgggactataggtgcccgcaaccatgcccggctattttttgtatttttagtagagacggggtttcaccgtgttagccaggatggtctcaatctcctgacctcgtgatccacccacctcagcctcccaaagtgctgggattacaggcgtgagcctccgcacccagctaatttttgtgtttttagtagagatggtttcaccatgttggccaggctggtctcgaacttctgacctcaggtatctgcccaccttggcctcctagagtgctgggattataggtgtgaaccaccgcacctggcctgaattgttcattttaaaaatggtaattttggctggccattgtggctcacacctgtaatcccaggccaaggtgggtggatcacttgaggtcgggagttcaagaccaaccttggcaacatggcaagacccccatctttagaaaaaataaaataaaataattagccaggcatggtggcatgcacctgtaattccagtactttgaaagactgagacaggaggatcgcttgaggccaggtatttgagaccagcctgggcaatatggcaagaccccatctctacaaaaaaaaattttttttaattagctgaatgtggtggcacatgcctgtaatcccaactacttgggaggctgaggcaggaggattacttgagcctaggagtttgaggctgaagtgagctatgatcacactactgcagtccagcctgggcaacagagcaaaaccctgtatttaaaaaaaatttttttgtggccgggcatggtggctcacgcctgtaatcccagcactttgggaggccgaggtgggcggatcatgaggtcaggagatcgagaccatcctggctaacacggcgaaaccccatctctactaaaaatacaaaaaattagccgggcgtggtggcgggcgcctgtagtcccagctactcgggaggctgaggcaggagaatggcgtgaacccgggaggtggggcttgcagtgagctgagatcgcgtcactgcactccagcctgggcgacagagcgagactccgtataaaaaaaaaaaaaaaatttgtaaatggttaattctatgttgtgtgaatttcgcctcaatatttaaaatgaaaaagaaaaaagtcaatagatgtgacttagctgggttatatttgaggtgtctagacatccaagtggagctgtcaggtaggcagttgtaaaacacaacaggagtgaccagttttaccagctcttatggaaatagctgcttcctgccattccccacccagcccactgcacgcactgttgcggcccagaggtgggcgtgaggtctctgctgccactcatcctcatccacagccagccacgctgcagagccacccagccagagacacctactctggtctccagctaggatgttgaggacctgtttcgaatgtcttggaagaagtcctggaatcctcccagcccccaggtacaagagtgaagacgcatacgctccctgtttatacaccctgaccctttatttacatccacccatggcaggggagtcaggtagaggcccccttcctcgatcaacctaaactcctgatcttggggttttcttgtgagggtctgatttttattcttctagggcctcacgcctccatcttcttctggtgccaacatcatgatttcaaggcaaagcttttccccaactccctaccttctatggatgaataaagtgcccagaggaggccagacatggtggctcatgcctgtaatcccagcactttgggagtccaaggtgggcagatcacttgggatcaggagtttgagaccagcctggccaccatggtgaaaccccgtctctactaaaaatacaaaaattagctgggcatggtggcacatagctgtaatcccagctacacgggaggctgaggcaggagagtcgcttgaacctgggaggtggaggctgcagtgagctgaggtcaagccactgcactccagcctgggtgacagagtgagacttgtctcaaaaaaaaaaaaaaagtgcccagaggagctcttcagctggcccaagtctggcacatgtccgtttcttcactgatcactgccacggggcacagagcccctgggtggtgctgtcctggtgcctgctggcccctgtcccccaggtcccccttctgagtttttccagggataccctaacctaacctggccagattactagaggtgctgctttattggctctggatatgtgtatgcagctgcaattctgtgtgatatagatgacctgccagtggggccctcctgaagatgccatagtgattaagatacgttttgttttgttttgtttgagacagggtctccttctgttgcccaggctggagtgcagtggtgcaaccacggctcactgcagcgtctacctcctgggctgaagcgatcctcccacctcagcctccggagtagctgggaccacaggcatgttgcaccatacccggcttttttttaaaattattttttgtagagacagggtcttcctgtgttgcccaggctggtctcgaactcttggcctcaagcaatcctccctcctcagcctctcaatgcactggggttacaggcatgagccactgcacctagcctaagatatggtttttgacctcagaaaacacagggtccttcagggttgtggcttccttgactgtttctttttattttattttattttaggttccgggatacatgtgcagaatgtgcaggtttgttacataagtagacatgtgccatggtggtttgctacacctgtcaacccatcacctaggttttaagccccacgtgcattagctatttgtcctgatgctctccctccactccccctaccataggccccagtgtgtgttgttcccctccctgtgtccatgtgttctcattgttcagctcccacttatgagtgagaacatgcagtgtttgggtttctgttcccatgttagtttgctgagaatgatggcttccagcttcatccatgtctctgcaaaggcccttcattcctttctatggctgcaccttgactatttctatggctatttctgttcttagggaggctcctcccatctccagtgcattcttctgcccccctcttttactgggaatggcggcatttctttgcgttttctgtaactagaattctctgtgtggctggcacagtgtgatgagctggcaagcttccccactgtgggggagggcttatcatgaggtctgctggaggaaactaagagagctgagccttaggggcttaaatgaactgcctgaggggaagctgacacccagtggggctgtaaccctggttggagagttcatgtctgcacctggcctcggcctgcgttctcacttgctctgcccaactggctgtgccttcagccggctcatcaccaggagatttgggttggagctactgctcagccaccatgagctacatgaccttgaaggccgatctttgattgtccgcaggataatcctgaaggttctcaggccatggacctgtgaatttcccttctttcagtgtctgcatcattgggaaccaagcccctaaccaatgtttattcattcgctcaaccaatatttgtggaatatcacagccctaggggtggggacacagcagggaacaagaaagacaagaattattgtcctcagtaggttactgtggagtggggaggctggcaggaagccacgtaactagaatacacgttaggtcaaggcagtattcccacagagaagatggaacagggaaggggagtgaaggccaggatgggaggtctacggacttaagtaggatgatctgggaagtagcatttgagtagagtctggaaggagggatgggaaagagtgttccaggcagtgggaacagcaggtgcaaaggccctggggcagaagtgtgcctggactgtcaagactgttgggctgtgtgtctggagcaggtaaaagagagataaggtcagcaaggacctgataagcagagcctcatggtcacgctgaggactccaggacctgtacaccgaagggaatgacaggagctgactcatgccctagcaggacttctctgtctgctgtgttgagcgctggtgatgggggcgtgggaagaagttaggagccattacagaggtcccggtgggccatgatcaggacaccacaatgcaggtggtgagaatggatcggattctagacatatctcaaggtggaggaccaagactttcatctaaatctaaacaatagttatgaaatgttaacttgagatggatctattggaattattcagatacttccaataatggatcatgagaaccaagaaaggccctagaatttatcctgatcttcgtaggattttcccaagggtagaaatgatgatgaactgggtgaccgttcacaaaggagagaggattcccagcccccaagcctgaagccttcccctcaatcaccctcaatcaccatcttctgtgggtcgaccagatgcacggactgttctcagccatccctgtggttcttacggcaatgtctagctgtgggactgcactggtgcttcgatggctcatagaagccccatataaggcactgctcctgtgggatgtgcctgtcaaacctgcttgtccactgccgttcagttcagccagagattgggccacattcagtcctcgcttccctgggagggggaaggtaagtgcgcgcagtccatccggcgaagagcaggtcagcctacggagggctcagcctacggaggggctcagccgacacaggtctgatggggcccgagagtggtcccaggggagtgggaggggccggcatcttcctcatcaggagtggaggagctgccttgtatgtggactagagaacagaaaacggcttgtctgtgttgctgggtcaatcactggaacattctctgaatgctgagttctgccttaaaacagcatgggtcatgctagatgaaagggatctctgttttatactctcatctcttcgctattgccgtgggatgaaagacagcagaaggaaggtgtctaagttcagaacaaagtgagcaagaccagctggctgctgttggtagcagaggcacagccagcctgtcatggcactggggggccgaggtgagctgtgccccctcctcctgggcttgtgaccctctgccccccatggggtatgtacatgtgtgtgtgtgcgtgtgcgtgtgtgtatgtgtacatgccttcttccctacttcactggcaagggaagagactgacacttgggttaggagaaggatgttgacctgggaggggtcaaataaggagaacccacatcttagatgctcaggattttatgatcttaggctcttctagaattgctgtacagttagattcagagtttggaattagagatctctgggccctcccctcccctcccgtcccctcccctcccgtcccctcccctcctctcccctcccctcctctcccctctcctcccctcccctcttctctcctttttcagaagtctccctctgtcgcccaggctagagttgcagtggcacaatctcggctcactgcaatttctgcctcctgggttcaggtgattctcctgcctcagtctcccaagtagctgggactataggtgcacgccaccacacctggttaatttttttatttttagtagagacaggg

SEQ ID NO: 783 - DNA, 6000 bp, Homo sapiens
agagtctagctctctcgcccaggctggagtgcagtggcgcgatcttggctcactgcaagctccgcctcccgggttcacgccattctcctgcctcagcctcccgagtagctgggactataggtgcccgcaaccatgcccggctattttttgtatttttagtagagacggggtttcaccgtgttagccaggatggtctcaatctcctgacctcgtgatccacccacctcagcctcccaaagtgctgggattacaggcgtgagcctccgcacccagctaatttttgtgtttttagtagagatggtttcaccatgttggccaggctggtctcgaacttctgacctcaggtatctgcccaccttggcctcctagagtgctgggattataggtgtgaaccaccgcacctggcctgaattgttcattttaaaaatggtaattttggctggccattgtggctcacacctgtaatcccaggccaaggtgggtggatcacttgaggtcgggagttcaagaccaaccttggcaacatggcaagacccccatctttagaaaaaataaaataaaataattagccaggcatggtggcatgcacctgtaattccagtactttgaaagactgagacaggaggatcgcttgaggccaggtatttgagaccagcctgggcaatatggcaagaccccatctctacaaaaaaaaattttttttaattagctgaatgtggtggcacatgcctgtaatcccaactacttgggaggctgaggcaggaggattacttgagcctaggagtttgaggctgaagtgagctatgatcacactactgcagtccagcctgggcaacagagcaaaaccctgtatttaaaaaaaatttttttgtggccgggcatggtggctcacgcctgtaatcccagcactttgggaggccgaggtgggcggatcatgaggtcaggagatcgagaccatcctggctaacacggcgaaaccccatctctactaaaaatacaaaaaattagccgggcgtggtggcgggcgcctgtagtcccagctactcgggaggctgaggcaggagaatggcgtgaacccgggaggtggggcttgcagtgagctgagatcgcgtcactgcactccagcctgggcgacagagcgagactccgtataaaaaaaaaaaaaaaatttgtaaatggttaattctatgttgtgtgaatttcgcctcaatatttaaaatgaaaaagaaaaaagtcaatagatgtgacttagctgggttatatttgaggtgtctagacatccaagtggagctgtcaggtaggcagttgtaaaacacaacaggagtgaccagttttaccagctcttatggaaatagctgcttcctgccattccccacccagcccactgcacgcactgttgcggcccagaggtgggcgtgaggtctctgctgccactcatcctcatccacagccagccacgctgcagagccacccagccagagacacctactctggtctccagctaggatgttgaggacctgtttcgaatgtcttggaagaagtcctggaatcctcccagcccccaggtacaagagtgaagacgcatacgctccctgtttatacaccctgaccctttatttacatccacccatggcaggggagtcaggtagaggcccccttcctcgatcaacctaaactcctgatcttggggttttcttgtgagggtctgatttttattcttctagggcctcacgcctccatcttcttctggtgccaacatcatgatttcaaggcaaagcttttccccaactccctaccttctatggatgaataaagtgcccagaggaggccagacatggtggctcatgcctgtaatcccagcactttgggagtccaaggtgggcagatcacttgggatcaggagtttgagaccagcctggccaccatggtgaaaccccgtctctactaaaaatacaaaaattagctgggcatggtggcacatagctgtaatcccagctacacgggaggctgaggcaggagagtcgcttgaacctgggaggtggaggctgcagtgagctgaggtcaagccactgcactccagcctgggtgacagagtgagacttgtctcaaaaaaaaaaaaaaagtgcccagaggagctcttcagctggcccaagtctggcacatgtccgtttcttcactgatcactgccacggggcacagagcccctgggtggtgctgtcctggtgcctgctggcccctgtcccccaggtcccccttctgagtttttccagggataccctaacctaacctggccagattactagaggtgctgctttattggctctggatatgtgtatgcagctgcaattctgtgtgatatagatgacctgccagtggggccctcctgaagatgccatagtgattaagatacgttttgttttgttttgtttgagacagggtctccttctgttgcccaggctggagtgcagtggtgcaaccacggctcactgcagcgtctacctcctgggctgaagcgatcctcccacctcagcctccggagtagctgggaccacaggcatgttgcaccatacccggcttttttttaaaattattttttgtagagacagggtcttcctgtgttgcccaggctggtctcgaactcttggcctcaagcaatcctccctcctcagcctctcaatgcactggggttacaggcatgagccactgcacctagcctaagatatggtttttgacctcagaaaacacagggtccttcagggttgtggcttccttgactgtttctttttattttattttattttaggttccgggatacatgtgcagaatgtgcaggtttgttacataagtagacatgtgccatggtggtttgctacacctgtcaacccatcacctaggttttaagccccacgtgcattagctatttgtcctgatgctctccctccactccccctaccataggccccagtgtgtgttgttcccctccctgtgtccatgtgttctcattgttcagctcccacttatgagtgagaacatgcagtgtttgggtttctgttcccatgttagtttgctgagaatgatggcttccagcttcatccatgtctctgcaaaggcccttcattcctttctatggctgcaccttgactatttctatggctatttctgttcttagggaggctcctcccatctccagtgcattcttctgcccccctcttttactgggaatggcggcatttctttgcgttttctgtaactagaattctctgtgtggctggcacagtgtgatgagctggcaagcttccccactgtgggggagggcttatcatgaggtctgctggaggaaactaagagagctgagccttaggggcttaaatgaactgcctgaggggaagctgacacccagtggggctgtaaccctggttggagagttcatgtctgcacctggcctcggcctgcgttctcacttgctctgcccaactggctgtgccttcagccggctcatcaccaggagatttgggttggagctactgctcagccaccatgagctacatgaccttgaaggccgatctttgattgtccgcaggataatcctgaaggttctcaggccatggacctgtgaatttcccttctttcagtgtctgcatcattgggaaccaagcccctaaccaatgtttattcattcgctcaaccaatatttgtggaatatcacagccctaggggtggggacacagcagggaacaagaaagacaagaattattgtcctcagtaggttactgtggagtggggaggctggcaggaagccacgtaactagaatacacgttaggtcaaggcagtattcccacagagaagatggaacagggaaggggagtgaaggccaggatgggaggtctacggacttaagtaggatgatctgggaagtagcatttgagtagagtctggaaggagggatgggaaagagtgttccaggcagtgggaacagcaggtgcaaaggccctggggcagaagtgtgcctggactgtcaagactgttgggctgtgtgtctggagcaggtaaaagagagataaggtcagcaaggacctgataagcagagcctcatggtcacgctgaggactccaggacctgtacaccgaagggaatgacaggagctgactcatgccctagcaggacttctctgtctgctgtgttgagcgctggtgatgggggcgtgggaagaagttaggagccattacagaggtcccggtgggccatgatcaggacaccacaatgcaggtggtgagaatggatcggattctagacatatctcaaggtggaggaccaagactttcatctaaatctaaacaatagttatgaaatgttaacttgagatggatctattggaattattcagatacttccaataatggatcatgagaaccaagaaaggccctagaatttatcctgatcttcgtaggattttcccaagggtagaaatgatgatgaactgggtgaccgttcacaaaggagagaggattcccagcccccaagcctgaagccttcccctcaatcaccctcaatcaccatcttctgtgggtcgaccagatgcacggactgttctcagccatccctgtggttcttacggcaatgtctagctgtgggactgcactggtgcttcgatggctcatagaagccccatataaggcactgctcctgtgggatgtgcctgtcaaacctgcttgtccactgccgttcagttcagccagagattgggccacattcagtcctcgcttccctgggagggggaaggtaagtgcgcgcagtccatccggcgaagagcaggtcagcctacggagggctcagcctacggaggggctcagccgacacaggtctgatggggcccgagagtggtcccaggggagtgggaggggccggcatcttcctcatcaggagtggaggagctgccttgtatgtggactagagaacagaaaacggcttgtctgtgttgctgggtcaatcactggaacattctctgaatgctgagttctgccttaaaacagcatgggtcatgctagatgaaagggatctctgttttatactctcatctcttcgctattgccgtgggatgaaagacagcagaaggaaggtgtctaagttcagaacaaagtgagcaagaccagctggctgctgttggtagcagaggcacagccagcctgtcatggcactggggggccgaggtgagctgtgccccctcctcctgggcttgtgaccctctgccccccatggggtatgtacatgtgtgtgtgtgcgtgtgcgtgtgtgtatgtgtacatgccttcttccctacttcactggcaagggaagagactgacacttgggttaggagaaggatgttgacctgggaggggtcaaataaggagaacccacatcttagatgctcaggattttatgatcttaggctcttctagaattgctgtacagttagattcagagtttggaattagagatctctgggccctcccctcccctcccgtcccctcccctcccgtcccctcccctcctctcccctcccctcctctcccctctcctcccctcccctcttctctcctttttcagaagtctccctctgtcgcccaggctagagttgcagtggcacaatctcggctcactgcaatttctgcctcctgggttcaggtgattctcctgcctcagtctcccaagtagctgggactataggtgcacgccaccacacctggttaatttttttatttttagtagagacagggttttgtcacgttggctaggctggtctcaaactcctgacttcaggtaatccgcccatcttggtctcccaaagtgctgggattacgggcgtgagccacggctcctggcgccttcccattcaccttccccttcccctccccttcctccctccctccctccctccctccctccctcccttccttccttccttccttccttccttccttccttccttctctctctccttcccttccttcctctctctt

SEQ ID NO: 784 - DNA, 6000 bp, Homo sapiens
cagctcagatgttgctggcaaaagtttttttttattatttttattttttatgtactgctccttgaggagctgggctaactcataggcagtgcatccagattcggcatttttttttttttagatggagtctcgcactgtcaccctggctggagtgcaatggcacaatctcggctcactgcaacctctgcctcccaggttcaagtgattctcctgcctcagcttcccaagtagctgggattacaggcacacaccaccacacctgcctaattttttgtattttagtacagatggggtttcactatgttggccagactggtctcgaactcctgaccttatgatctgcccacctcggcctcccaaagtgctgggattacaggcgtgaaccatcgcgcccagccaaaaaatattttttaattgttaaaaataataatggaatgccaaatgtagtagaacagtttcacaatgacaagaactattagttcctaaaaaatccccaagattcagataagagattacaaaaaccttgataaattagtgacattatgtaaaatcaacagtgctgggtttggtggctcagacctgtaatcattgcacttagggaggcagaggcgggaggagtgcttgagcccaggagtttgagagcctggccaacatagcaagaccccattctccacaaaacggaaaatacaataaaataaaatcagcgttttgttttattttattaatttatttgagatggagtctcggtctgtctccctggctggagtgcagtggcgtaatctcagctcactgcagcctctgcctcccgggtttaagcgattctcctgcctcagcctcccaagtagttgggattacaggcatgtaccaccacacccagctaatatttgtatttttagtagagacagggttttgccatgttggccagactggtctggaactcctgacctcaggcgacctgcccgtctctgcctcccaaagtgctgggattacaggcgtgagccacgtcgcctggacttcctttattttagatagcacagggtcatggaagataaagtgatgccttccttcccctaccccctaccccgatttctactgcttgcattatttcttagggtaaagaatcttcttatttggctggaagactctattcccaccgtagtttagtcctggatgtgtgattaaagaaatccagtggttgccctgcgctgagaaggacagccgggcctgggttctctcctggctcagtacagccccctccccactcctgctgaggactcccagggaagctggaggcagctctggggcgttttctctgacttccctagacttctcttcagctgcccaaacagtagagggatgctgaagccctctcttcccgcagtctgtccctaagggttgcgctggcacctgtgcccccagtgccccttggcagcactcctttggtttcagggcttgtctgccatttttcttttttctttctttcttttttttttttaagacagggtctcagtctgtcatccaggctggagtgcagtgatgcaatctcatttcactgcaacctctgcctcccgggctcaagtgatccttccacctcagcctcccaagtagcttggggaccacaggctcacgctaccatgcccggctaatttttgtattttttgtagagacagggtttcgccatgtcacccaggctggtcttgaactcctgggctcaagcgatctgcctgcctcagcctcccaaagttctgggattgcaggtgtgagccaccatgcccggcctgctatttttcagtttgtggcagaaaagttgttttcctttcctcattttgtggttgctgctttattcacttatttatttttttaactttttaaaacgcaacatttggttcatttcaccaggagctggggagggaggtacaggaggctgccctgatcctttgttgggtttgatctggagactttgacgtgacagagcgactgcgcccactggttgtcctctaagaaggcgtgaggggaagcccagacgcctctgcaggagccagagacattcctagggggtcacagggtcagctgaggtgaacagggattctggaatgaggaagccaaggggatggaagggaggaggctggcagggaaacgcccagagcacgtgctcctgcccgacacctccaggcagagaacaggagctggcaagagaggaaccccgcttgtggtggggacgctgaacaggcagggcctggctgggatgggggcccagcctaggctgaaaacgaagagaaaggaaagtgggtgccggtgtcccacgcactgtggacccccagccctggccctggggtggcaggggcagaaccgggcactgcagggacctcctcagcccaccctcctcctgcttcctggcagggatgagagagggaagcaggaggcagggtgggattgccagctgctctcggatcgttttttttttttttttttttttttttttttttttttttttaaaaacgggatcgtgctatgttgctaggctagtcttgaactcctgggctcaagcgatcctcctgcctctgccttccaaattacaggcatgagccactgcaccaagcctggatctttttttttttttttaaacaactttgttgaaatataactcacggccaaacacagtggctcacacctataatcctagcactttcggaggctgaggggggaggatcacttgagcctaggagtttgagaccagcccaggcaacatagtgagacccccttctttacaaaaaacaacaacaacaaaaaaaatgagcctggcatgggggcacatatctgtattcccagatactccggaggctaaggtagaggatcacttaagcccagaagacggatgttgccgtgagctgagattgcaccattgcactccagcctgagcaacagagcaagaccttgtctcaaaaaaaaaaaaaaaaaaaaaggaagagctataacccatacggcacacaattcacccgtttaagatgcttctagtgtattcacagatgtgtgcaatcgccgccacagttaactttaggacattccatcatctgtaaaggaaacatcccctacctttagctaccatcctgacatcctgatagacagggggcctgaagacccctcggtgatgcagggcagggctggagtgggggccctgggctgactttattgctcgctattgctgccttgaaattctgaatacgtttttaaaacaaacgcaccatcctttcattttgccctgagctccacagacgatatagctggtcctgaagtggggcagaggatcattctgacttggagtcagactctagcgacgcaggcttctactgggtggaggcccaggagctcaggagccttctgtgggagtgtgcccattggcagcgcatccctggagatggacggacaatttccacatcgcctttgcccctgtgcacgctccctctggctgccgtcataaattaccacaaactgggtggcttaaaacaacagaaatgtatttgctcatggttctggaggccagaagtccacactccaggggtgagcagggccgcacccccatgaaggctccagggagggtctgcttcatgccttctcttgagtttctagtgttgccaccgacccttggcgtgtcactccagtctcggcctctgccaacatggggtgatcatggggtgtctaggcctagggcccttctcctcctcttcttcttcttctttcttttttttttaagacagggtcttgctctgtcgtccaggctggagtggagtggcactacctcagctctgcaacctacacctcccaggctcaagcgatcctcccacctcagcctcctaagtagctgcgactacaggtgtgcaccacaacacctggctaattaaaaaaaaaatttttttaggccaggtgcagtggttcatgcctgtaatcccagcactttgggaggccgaggcaggcggatcacttgaggtcaggagatcgagaccagcctggccaacatggtgaaaccttgtctctactaaaaataaagaattagctgggcatggtggcatgcacctgtgatcccagatactcagaaggctgaggcaggagaattgcttgaacccgggagacaaaggttgcagtgagccaagattgtgccattgcactgcagcctgggagacgagcaagactctgtctcaaaaaaaaaaaatttttttttagcagattttagcagagacaaggtctcactgtgttgcccaggctggtctcaaactcctgagctcaagcaatctgcccgccttggcctttcaaagtgtgggattacaggcatgagccaccacacccagcccttctcctcttgttataagggcacccatccctggactagggcccaccctaatgacctcaacttgattacgttggcagagacttattcccaaatgaggtcctacttacaggtactgggggtcaagacttcagcattcttttgcggggggccacaatcagtgacaccctgactcgcaagcctcaatcacctgttccagtgagaaacaggactgagatcagaaggaatgaggcagagctgccctcgattggttctcctctcctcctcacctgcccaccccggcctctgcgcccgtcactgtcctctccagctgttcttccttccgggcaaggagactcagcagaagggtatgagtggcctggccctgtggggagccgcagacaggcctgtgggtgctttggataactactgcgcctgtcaactctccttggtagtctagggttcaaagcccaggtccattctagaagtctgcttccaagtgctaaggaagcttcaatagttactgggaaaaccacaggggtcaaaggtccgtcgagttatttcccggatccgagtctgacgtcttttccccgccgcttgcggtggttgtgaccgaaccttgagttttggaacaggtcacatggctttgaaatcacggtcaattcacctggtgctgctttgacttcaggctcttccttctgcccagctccgtcccacccagcagcccgcagagaaaggaggcagctggcaccacactgggctttggagacactgcggggactgtggaccccaccctgctgcacggagctcctgcaaaagcaaacctgagaaccttggtgagtacttccggagacccggctcctgggacggcttctggcgctgctcctgcacacacgactctccaacgatcattttccatgttttatttttatcttttaatttttgagatggagtctcactctgtcacccaggctggagtgcaatgatgcaatctcagcttactgcaacctctgcctcccaggttcaagtgattgtcctgcctcagcttctcaagtagctgggactacaggcacccgtcaccatgactggctaatttttgtattttcaatagagacgggtttccaccatgttggtcaggctagtctcaaactcctgacctcaggtgatctgcccgccttggcctcccaaagtgctgggattacaggcatgagccactggccccggcccattttccatttttcagatgacaggtgttgatttgctctgattttcaagtatttttagcatacagatccctgcaagaggcatctgtctccagtggtccagcctctccttccaaatgaaaagaatcaagtcacaggaattcatgggtctgtaaggaatcgctcccatctgtgcccaggagattaacaaaggcggtggctgcagctctgtgagcagtggagaaaaattaggcacaacctgatatcctcccacaggagcgtaagtccactgtggttattcatatcattgaatccagtgcacagtttaaaggaccatgcatgtatcaagctgcatgtatcagtatgagaaacctcagaagccgtacagccttgcacagaacgatagtttctgtgaagttccagctaacactgaaggcactgttgatgtaaagctgctgtctgcacgaagtatcatgc

SEQ ID NO: 785 - DNA, 6000 bp, Homo sapiens
ccgactttgacggtttggcaggcacttctaggaacctcaggctcctggtaaccccaggtgccccgcttacttgccgatttgccctactcccccttccctccaggctgcagttcctgtcccagccccagcactctgagggtgaggaaccccctcactgtattggggttggataggataaggagcccctgggccttgactctgaagggtcggtccttagttacccagtgccaaaaggagacccctgagcggtagggtggggagaatctgcttggagagacacaagcaaagggcaagggagtgtctcctggagtccgcctttaaccttgcggctttgctggaggggccagaacggcccagcctcagctcttaggaggcgacagagcggccccggccagagggtacagggccttggcagggccgcggagccttctgtgcactgctcaccattttccttcagggagtaattctaggcttccctggaggagctgttgaaagatttaggtattgaaaggagcaggagcaggactcacacgacccaaaacagtggagaatagaccattttccctgtgttccagcacggtgtgtgtttatgttctttagagttctagtacgcggattcgtattctttttttatctttttctcaggataacgttaaaatgagttagcactgagtgcatttcagctaccgaggagggtcattaagtctgaacagtggggtctcacggggaaggtcagagtgggtaaccctcgtgccaaaatcgggagtcacgctgtttattcaaccaaaagaccaagtctgcttgaggtccaggagcttttaaggagaccagcaggttaaagctgggggcctgctggggagtctgggcaaggctgtgggggcatgggagtcatgcctcggcccaccggcccatctgtgcacctgcacacctgcccacatgcccacccgcccacatgctcagctgcccacatgctcacccgcccacatgctcacccgcccacatgctcacctgcccacatgctcacctgcccacctgctcacctgctcacctacccacctgcccacctattacctccctacctgctcacttgctcacctgcccatctgcccacaggtctcatggagacatccaagctgaccgagtgcctggctggggccatcggcagcctgcaggaggagctgaaccaggaaaaggggcagaaggaggtgctgctgcggcggtgccagcagctgcaggagcacctgggcctggccgagacccgtgccgagggcctgcaccagctggaggctgaccacagccgcatgaagcgtgaggttagcgcacacttccatgaggtgctgaggctgaaggacgagatgctcagcctctcgctgcactatagcaatgcgctgcaggagaaggagctggccgcctcacgctgccgcagcctgcaggaggaggtagggggacaccctgcaccccggcgcgaccctgctgtcgtctgcccccaggcctttgtactagctggtccatctccctggaactcctttcccctcttccttgtctaacacttccctgccccgagagccttggctgagacccctctgggaagctgatccttcccctccccaggaggccacccaggcccctctgtgtagcctgcatggcgacgaggtgtgccttgtccagtagctgcccgtggcctggctggcttgtctgtgaactgcccatcctgctgacgcctgggcaggtctggacacactctgggctgcatatttgtagggccgcctacgtcccactgcccagctgcggcagtgacatgggatagtcggcctctgtcatcctcctttgtccttctcagctggtcctggactcaggcgggatagttggtctctgtcgtcctcctttgtccttctcagctggtcctggactcaggcgggatagttggtctctgtcgtcctcctttgtccttctcagctggtcctggactcaggcgggatagttggtctctgtcgtcctcctttgtccttctcagctggtcctggactcaggcgggatagttggtctctgtcgtcctcctttgtccttctcagctggtcctggactcaggcggggagggcaggagggttctcaagtgaggcctctgaaactcagtgtgtttcactcacttttctttggggaggatgatctgactgattggtaaggcttctcaaaatactgaggatgtgcactccttgtcattttggcatttgctttttacctttattattattactattatttttaattttttagaggcactatctcgctctgtcaccaaggctggagtgcagtggtacaatcctagctcactacagccttaaactcctgagctcaagtgatccccagcctcccgagtagctgggactacagattgtaccaccatacccagctaattaaaaaaaaattttttttgaaatggggggttctcattatgttgcccaggctggtctcggactcttgggctcaagcgatcctcccacctcggcctccaaagtgctgggattacaggtgtgagcccctgcgctggccagcgctttgcctttaatcatgacatttgttgtttgtttttaattttttacttcttatttagaaataattccaaatatatatttttaaatcacacaaataaaaatagtacaaataatacccacctacccttgctttatcatttgtacttttactctctcgtggccctttatgtctacttcctgaaaatcagcacctgcccctatatagccacagtgcagttctcaacttcagtctttttggtatggacgccctgtttttatccaatccgcctgtgttctggttttctcatctgtcccagtgactccttcacagcctttcccccagcccagggtcgggccctgtgttctgctgttcctctctttagccaccttcatttgggaacagcccacagcctttctttgtctattatgaggtggccctctttaaagcccccaccccttccctttgatgatagacgacctctcatttggggtttgtcttgtgtttcccacatgtatacagaaattatgttctttggccgggaccctgcacagggggtgctggcctgactcagggcatctcctcgagggctctcgaggtcctgtcgcccctcacaggggacgtcacaccgtccaccatttgtcaaggtgcaggccaattgctctactgcagaatggctctttcttttcttccctgcaactgataaatatctcgggtgtggggcgctgagaccagcaagcaccctgctcctggtggacatttcccaggatgtagctgtggtgactctggcgggagctggcccctaccctgggagctgtgaatgacgaccgtgccagtgctccaccttgctgctgcccacggcctctgccttcccttctcccttggctgactttggaccaggccagcccactttgctgctgcccacggcctctgccttcccttctcccgtggctgactctgttcttggcgcagttcatgggttcctactctgcaggggtctgacctctcactgtccttaatgattttggtctcaaatggacccagatgtgaccaatggaacccttcaaccagctccgtgtcctaaaacgggtcccttgtttttggagaaccaactgcttttctggcctcacaagatattccagggtcatcttgtacccggcctaccccaaatccaggctcagcccattctctgagggccccacttcctttttttatttttattttttggtttgtttttttgagacagagtctcactcgcttcccaagctggagtgcagtggcgccatctcagcccactgcaatctccatctcccgggttcaagcaattctcctgcctcagcctcccgagcagctgggattataggcgcgcaccaccacacctggctaatttttcgtatttttagtagagacggggttttgccatgttggccaggctggtctcaaactcctgacctcaggtgatccgcccacctcggtctcccaaagtgctgggattacaggcatgagccaccacgcccggcctcctgcctccttttagagaacaagatgtgggcgtaggtgtgtccatcactactagggtgtctttgcttctcagccctttcaggggacagagctaggaaacacacacacatgtatggacatatacatacacatatgcacacacatacttgtctgtgtacacacacatactcatatgcatggaagtatacatatagttcacgtgcatacttcagaaatcatgggttctcacccatacctctaattccaacccatgccctgcggctttttcttgccttctcctgttccgtacgtgtgtgctccttccccagggggaacgctgctcccagcgtcaccagcaccttcagacccgtgctcagtcctgcagcacatctcaaatcgtttcagaatcactctgcccataccactgccattaacagccccgctaagacgggtgccggacttgtttgtaattcacctccccccgccagccaatcttgctcaaggctgagggtttgtaatcaaacactgtgtttgtgagtcactgtatcttcgttctctctgtccttgtctgtctgtctctctcttcgttgtggttatggcgtctgttggaaatagaattcggttcatttgttctggttcactttcagtctcatgttttccggttcccttccagctctgacttgattttactttttgaatctgtggacggtgacatgcccagcccagctggaccattgcaggagctgggaacttgcgaattgacaatgtgctaaccgggtgtcgggaggggagagtccaggtggaaaggtccttcttggccacagcccaggggtgagcaccggcacccaccccgacgtgcagacttcccgggcttgcctcacggggaaagtcctgcctccccagggctgccacacccaggacgggaagagggcgggcccgtggctcgagctccaagtttctcttgggctgctgtccagaggaaggaggccagcaggacctggtgggatagtccctggaaggccagggccctgcacacagactgcaagtcaacacaggagctttgctgtctgaacagccccggtcccgcgttcccaggcacgtctacccctccgacctgactttcctctctcttacttcttactgatttccatgactccaaattccctttcttgatgtatttagcagaacatggacaagcagggaagccagggagcatgctggccatcactgccggctgctcagctgtagagatccaggagttggttatcaaggcctcttggtctattcctgggaccctaaccctggatggagttcaaccgcggtgcctcatctataagacagagctgaaaggcctctgtcctcccagccccagttgaatatttgggactattcattaggtgaaccctttcgtgggtttttcagtctcgaggcaggaagccccctgagtgctaaaagcatcattaggaggaagggtgagaaatgcccccagctcctgatcaggggagaagctgtttccatcgcccttcctgtcgcctccccaccgcacagctgtatctactgaagcaggagctgcagcgagccaacatggtttcctcctgtgagctggaattgcaagagcagtccctgaggacagccagcgaccaggagtccggggatgaggagctgaaccgcctgaaggaggagaatgagaaactgcgctcgctgactttcagcctggtaggttccggtccccgcagcagagagcggcctcctgccttgggggcttggccctcaggctgtggggtttctgacaggtggtttagttaaggtgaggctaagaacaagagatgaaatttagtgactcatctcacccactttctctttacctccttccttcctgctgttccccagaccccaaaattggcagaattaaaagctgctggaacagaattaaaagctggaactgggcacagtggctcattcctgtaatcc

SEQ ID NO: 786 - DNA, 6000 bp, Homo sapiens
agaaatgaaagcacatattcatgaaaaggcttaatgcaacatttataatggtttataatattcgtaaatgtttatggcagtattattcataatggacaaaaaagaaaccaaatatttgccaactggaatggttacaaacaaaatgtatacccacacaatcgaatcttttatttatgtatttatttatttattttgacagagtctcgctctgtcgccccggctggagtgcagtggcgagatctccactcactgcaagttccgcctcccgggttcacgccattctcctgcctcaccctcccgagtagctgggactacacgcacctgcaaccacgcctggctaattttttgtatttttagtagagacggggtttcaccgtgttagccaggacaatctcgatctcctgacttcgtgatccgcccgcctcggcctcccaaagtgctgggattacaggcgtgagccaccgcgcccggcccaacagtttttttttaaaagcacttgggttattggaaagttgggcaacatgatcacctgcacaggggctctgagtctttaacagtgaagcatttcacacctgattaggaaacgctgtgctgatgacatggcactgacagtgtgactcagttacagaaactctcaaatatccctccaacattcagaaattttcaaaagacaccaagctcggtattttgcatagttctgtccccaaaaatgccctcctgtgttcatgtctgtgtctgaacaaagcagctgtgcgtgtgtgtgtgcgtgtggtctccacttctcttgatcagcctgggttgcctggcagtatgggccaaacagacagggccctgtctgcatggagctcaagagtgattaaaagaggctgggtggccggacatggtggctcacacctgtaatcctagcactttgggaggctgaggcaggaggatcgcttgagctcaggggttcaagaccagcctgagcaacatagtgagaccctgtctgtacaaaaaataaaaaattagctggacatggtgttgcacacctgtagtcccagctactcgggaggctgaggtggaaggactgcttgagcccaggagatagaggcagcagtaagctgagattgtaccactgcactccagcctgggcaaaagagcaagaccctgtcttgaagaaaaaaaaaaaaaaaaaaaaaagattgggcaccccggtggttcatgcctgtaatcccagcgctttgggaggctgaggtgggtggatcacctgaggtcaggaattcgagaccagcttggccaacatggtgaaaccctgtcgctactaaaaatacaaaaattagctgggcatgttggctcacacttgtaatcctaactactcgggaggctgaggcaggagaatcgcttgaacctgaaaggtggaggttgcagtgagccgagattgtgccattgtactcaagcctgggcgacactgagactacgtctcaaaaaaataatcaatcaataaataaaagaggcgtccacgttaacgagtccacagtcctaacaagtgctgcaggctggacgcggggcagcgtcccacccagtgtctggtgcagggcatttaggggcttggcctccaggagaggcgagcccggggctgggtgcgagcactgctgctgggccaggccactcacgttatgcggccgttcctgatacttcaacacggcccttgtgggcgaatgtgtggaatctcggaacaagcggagtggggaacagggctctgcggtgaagcccaggctgaggcagcccctcatctgctcacggtgccaggagctccctgcctcctggtcctgaggagccgcgggattcctcagggacactagggcctctgcagcggcgcctgcgccaggcagccacgcgcgctgcgcacgaattctgtctcagcctggagaaaaacacctccgctgcgccctcgcccagcaccagctttccgcggggcgtgcaaggggctcctcctagccccacagccctgtctttccacgggggacaccaaggccctggaacggcccgcgcgccagcgctctcgcccgtgtttaacgagaacttaatccccgtgcccgttacctccccgaagtcccgggactaggtgactaggccccgaagcaagagtcgcagtcggaccgactgggccggggagggcagcgcactgcacctgcgcgggcttccacagcccacgcggccgccgcaggcctcgagtgggcgcgggttgggcagcggcgagaggcgggaccggacctcgcctcccgggtgcgggcgccctgggctcgcgtagggaagtgccctggcttacagaggtgaccactgacggggcttggggtggaaggtgacgacgccagaacccacgcggaacgcgcccacgaggcccagccgcaagatggcgacggcgtgcccccggccacccgcgcgccgcgcatgcgccctggccttccccgcccgagtgagcggaagtctcgtgaccccggaagtgacaggcagggcgggcggggcggccgacgacgttcgtcatttagtgcgggagggatcctgaaccgcgcggccgaaccctccggtgagtggccgtggcggggcggaggcggcggggcggaggcggcgggtcggggcggggaccggcggcgccggcgggggcggggggcgctgaggtgggggcttccgcctttgttcgcgccccgccctgagcccgcggcagggtctcggcgggcgggggcgcggtgacagcgggccagggcggtgcgggctagggcggggccggggcgggaccgggcggcggcggccccggccccacgtgcgggtcccgggccggaggggcggcggggaccaggggagtgccggcccctcccgagcggtccggagcttctttcatggccgccgaggcgcgtggggcccgggccagacctgagggcccctccttggggacgcggggggcgccgggccggcagccgcggtccatcgcgttcgggggcgacgcggggattggggcgcggcctcccccagcgcccgggccacgcccggcacggattgcgggccctgcggaagtgcgggccgcgccctaggatcccggcgcctacggctatcctcgcgcggcgcggaggccccagcccctggaggaagcagggcggcctggaccccggcctgggtgtcccgggtgtgctgctccctgacccacctcccacgctgccgggaaggatctgagcctgacagatcccctgccgggtcagtgctgccccgggcactccgggcccaccatctacaagagggcccgagagtactgagtggctgtggtagctcccaagttgtaggtcacagaccctcacaattgtggagaaaccgcagatacttaggatccccgtgtccaggtggccccgtgcggtattctagctgcccctaacatccgagctccaggggcatcctgtttgaaagatgacgctgagccgaccacacacgtttacatgtgactaccacggccagaggagcaaccctactgagggataccgagccccgttaccccgtagggcgagggcctgggcagctcaagagcggcaagaccctaagagagggtttagtgtgggccccgccggttgattctggggcctgctagccccgccccacacatacagggggctgctgcctcctccatcgtggagggggaggtgtgtcctctctccccatgatcggctgcagttcccattttgtcttagatgttatacctggggtgggggcacctcacactgccccagaggatgcccctgagcaggaatcgcgggggtggagaggagcgaaggtggcccccttggagcccttttggagctccggctgcagcccacactcctgctcagaagtgcgcctccgttggggatccaggtccaaggcctgtcaccgtcccgcccacaggtgtcccgacccaggctaagcttgagcatggctgagcaggagcccacagccgagcagctggcccagattgcagcggagaacgaggaggatgagcactcggtcaactacaagcccccggcccagaagagcatccaggagatccaggagctggacaaggacgacgagagcctgcgaaagtacaaggaggccctgctgggccgcgtggccgtttccgcaggtgagtctgggctgcgggagccgggtggccgcccgttcactccagctgtcttgccgctccccagcccctacttccactggtgggggtggggccctcacctgctgtcactccccagaccccaacgtccccaacgtcgtggtgactggcctgaccctggtgtgcagctcggccccgggccccctggagctggacctgacgggtgagtgccctgcggccgcgggggtccgggcggcccctggtggggatctcgggaagtgcagccagggggccgcgcagggctggggcttcgcgcagggctgctgggcagtcattgagggggaggtccccccaacaggcgacctggagagcttcaagaagcagtcgtttgtgctgaaggagggtgtggagtaccggataaaaatctctttccgggtaagctacaggctgctgtggccagggaatggaggcggggctggggctggggtccggaccgaccttccctgatcctcgcttcgggtcctgcaggttaaccgagagatagtgtccggcatgaagtacatccagcatacgtacaggaaaggcgtcaagagtgagtggggccccgggcagggcagagggggccgcttgggtgcgtgctgccaggcggggaagcggggccgctgaccgccctcttccttgtgccgcagttgacaagactgactacatggtaggcagctatgggccccgggccgaggagtacgagttcctgacccccgtggaggaggcacccaagggtatgctggcccggggcagctacagcatcaagtcccgcttcacagacgacgacaagaccgaccacctgtcctgggagtggaatctcaccatcaagaaggactggaaggactgagcccagccagaggcgggcagggcagactgacggacggacgacggacaggcggatgtgtcccccccagcccctcccctccccataccaaagtgctgacaggccctccgtgcccctcccaccctggtccgcctccctggcctggctcaaccgagtgcctccgacccccctcctcagccctcccccacccacaggcccagcctcctcggtctcctgtctcgttgctgcttctgcctgtgctgtgggggagagaggccgcagccaggcctctgctgccctttctgtgccccccaggttctatctccccgtcacacccgaggcctggcttcaggagggagcggagcagccattctccaggccccgtggttgcccctggacgtgtgcgtctgctgctccggggtggagctggggtgtgggatgcacggcctcgtgggggccgggccgtcctccagccccgctgctccctggccagcccccttgtcgctgtcggtcccgtctaaccatgatgccttaacatgtggagtgtaccgtggggcctcactagcctctaactccctgtgtctgcatgagcatgtggcctccccgtcccttccccggtggcgaacccagtgacccagggacacgtggggtgtgctgctgctgctccccagcccaccagtgcctggccagcctgcccccttccctggacagggctgtggagatggctccggcggcttggggaaagccaaattgccaaaactcaagtcacctcagtaccatccaggaggctgggtattgtcctgcctctgccttttctgtctcagcgggcagtgcccagagcccacgcccccccaagagccctcgatggacagcctcacccaccccacctgggcccagccaggagccccgcctggccatcagtatttattgcctccgtccgtgccgtccctgggccactggcctggcgcctgttcccccaggctctcagtgccaccacccccggcaggccttccctgacccagccaggaacaaacaa

SEQ ID NO: 787 - DNA, 6000 bp, Homo sapiens
aggggtgccaggacaggtggatgttcctacacacagaaaagatgttcactccatacgaaaagttaacccaaatacggactgtatatctaaatgtcagcaaacataaaatatagcagaagatcacagaaaaaatatgagagagaatctttacaatatccggttgggctaagagtttgtttttgagacagggtctctgtcacccaggctggagtgcagtggtacaatcatagctgactgcagcctcgacatcacgggctcaagtgatccgcctacctcagctcaggagttcttaggatagcaaaggcatgcaccatgtggaaaaaactactgcactagaataaaaggttttgcccttaagaagacatcattaagaaaatgaaagacaaaccacataaaatgtctgcaaatcacctatctttttcttttggagacagagttttgctcttgttgcccaggctggagtgcaatggggcaatctcagctcactgcagcctctgctttctgggatcaagcgattgtgttgcttcagcctcccgaatagctgggactacaggcgtgcaccaccacacccggctaatttttgtatttttggtagagacagtttttttgctatgctggccaggctggtctcaaactcttggcctcaggtgatccgcctgcctcggcctcccaaagtgctgggattacaggcgtgagccactgcacccagcctcatatatctgataaaggactgtatacaggatatgtaagtactcatagcttaatcagacagcccaattaaaaatgagcaaaagatttaaataggtttctgcccaggaagactcattggggaagtgcaggtgcgactcacagtgtgacacgacactgcttcacacttgtacagctgggatgaagcacagcaggtattgctgagcctgtggccacctggagcagcccagcgttgctagggggtgcaaagtggcacacctacattggaaaacatttggggacttccactcaggaatctacccaagagaaatgaaagcacatattcatgaaaaggcttaatgcaacatttataatggtttataatattcgtaaatgtttatggcagtattattcataatggacaaaaaagaaaccaaatatttgccaactggaatggttacaaacaaaatgtatacccacacaatcgaatcttttatttatgtatttatttatttattttgacagagtctcgctctgtcgccccggctggagtgcagtggcgagatctccactcactgcaagttccgcctcccgggttcacgccattctcctgcctcaccctcccgagtagctgggactacacgcacctgcaaccacgcctggctaattttttgtatttttagtagagacggggtttcaccgtgttagccaggacaatctcgatctcctgacttcgtgatccgcccgcctcggcctcccaaagtgctgggattacaggcgtgagccaccgcgcccggcccaacagtttttttttaaaagcacttgggttattggaaagttgggcaacatgatcacctgcacaggggctctgagtctttaacagtgaagcatttcacacctgattaggaaacgctgtgctgatgacatggcactgacagtgtgactcagttacagaaactctcaaatatccctccaacattcagaaattttcaaaagacaccaagctcggtattttgcatagttctgtccccaaaaatgccctcctgtgttcatgtctgtgtctgaacaaagcagctgtgcgtgtgtgtgtgcgtgtggtctccacttctcttgatcagcctgggttgcctggcagtatgggccaaacagacagggccctgtctgcatggagctcaagagtgattaaaagaggctgggtggccggacatggtggctcacacctgtaatcctagcactttgggaggctgaggcaggaggatcgcttgagctcaggggttcaagaccagcctgagcaacatagtgagaccctgtctgtacaaaaaataaaaaattagctggacatggtgttgcacacctgtagtcccagctactcgggaggctgaggtggaaggactgcttgagcccaggagatagaggcagcagtaagctgagattgtaccactgcactccagcctgggcaaaagagcaagaccctgtcttgaagaaaaaaaaaaaaaaaaaaaaaagattgggcaccccggtggttcatgcctgtaatcccagcgctttgggaggctgaggtgggtggatcacctgaggtcaggaattcgagaccagcttggccaacatggtgaaaccctgtcgctactaaaaatacaaaaattagctgggcatgttggctcacacttgtaatcctaactactcgggaggctgaggcaggagaatcgcttgaacctgaaaggtggaggttgcagtgagccgagattgtgccattgtactcaagcctgggcgacactgagactacgtctcaaaaaaataatcaatcaataaataaaagaggcgtccacgttaacgagtccacagtcctaacaagtgctgcaggctggacgcggggcagcgtcccacccagtgtctggtgcagggcatttaggggcttggcctccaggagaggcgagcccggggctgggtgcgagcactgctgctgggccaggccactcacgttatgcggccgttcctgatacttcaacacggcccttgtgggcgaatgtgtggaatctcggaacaagcggagtggggaacagggctctgcggtgaagcccaggctgaggcagcccctcatctgctcacggtgccaggagctccctgcctcctggtcctgaggagccgcgggattcctcagggacactagggcctctgcagcggcgcctgcgccaggcagccacgcgcgctgcgcacgaattctgtctcagcctggagaaaaacacctccgctgcgccctcgcccagcaccagctttccgcggggcgtgcaaggggctcctcctagccccacagccctgtctttccacgggggacaccaaggccctggaacggcccgcgcgccagcgctctcgcccgtgtttaacgagaacttaatccccgtgcccgttacctccccgaagtcccgggactaggtgactaggccccgaagcaagagtcgcagtcggaccgactgggccggggagggcagcgcactgcacctgcgcgggcttccacagcccacgcggccgccgcaggcctcgagtgggcgcgggttgggcagcggcgagaggcgggaccggacctcgcctcccgggtgcgggcgccctgggctcgcgtagggaagtgccctggcttacagaggtgaccactgacggggcttggggtggaaggtgacgacgccagaacccacgcggaacgcgcccacgaggcccagccgcaagatggcgacggcgtgcccccggccacccgcgcgccgcgcatgcgccctggccttccccgcccgagtgagcggaagtctcgtgaccccggaagtgacaggcagggcgggcggggcggccgacgacgttcgtcatttagtgcgggagggatcctgaaccgcgcggccgaaccctccggtgagtggccgtggcggggcggaggcggcggggcggaggcggcgggtcggggcggggaccggcggcgccggcgggggcggggggcgctgaggtgggggcttccgcctttgttcgcgccccgccctgagcccgcggcagggtctcggcgggcgggggcgcggtgacagcgggccagggcggtgcgggctagggcggggccggggcgggaccgggcggcggcggccccggccccacgtgcgggtcccgggccggaggggcggcggggaccaggggagtgccggcccctcccgagcggtccggagcttctttcatggccgccgaggcgcgtggggcccgggccagacctgagggcccctccttggggacgcggggggcgccgggccggcagccgcggtccatcgcgttcgggggcgacgcggggattggggcgcggcctcccccagcgcccgggccacgcccggcacggattgcgggccctgcggaagtgcgggccgcgccctaggatcccggcgcctacggctatcctcgcgcggcgcggaggccccagcccctggaggaagcagggcggcctggaccccggcctgggtgtcccgggtgtgctgctccctgacccacctcccacgctgccgggaaggatctgagcctgacagatcccctgccgggtcagtgctgccccgggcactccgggcccaccatctacaagagggcccgagagtactgagtggctgtggtagctcccaagttgtaggtcacagaccctcacaattgtggagaaaccgcagatacttaggatccccgtgtccaggtggccccgtgcggtattctagctgcccctaacatccgagctccaggggcatcctgtttgaaagatgacgctgagccgaccacacacgtttacatgtgactaccacggccagaggagcaaccctactgagggataccgagccccgttaccccgtagggcgagggcctgggcagctcaagagcggcaagaccctaagagagggtttagtgtgggccccgccggttgattctggggcctgctagccccgccccacacatacagggggctgctgcctcctccatcgtggagggggaggtgtgtcctctctccccatgatcggctgcagttcccattttgtcttagatgttatacctggggtgggggcacctcacactgccccagaggatgcccctgagcaggaatcgcgggggtggagaggagcgaaggtggcccccttggagcccttttggagctccggctgcagcccacactcctgctcagaagtgcgcctccgttggggatccaggtccaaggcctgtcaccgtcccgcccacaggtgtcccgacccaggctaagcttgagcatggctgagcaggagcccacagccgagcagctggcccagattgcagcggagaacgaggaggatgagcactcggtcaactacaagcccccggcccagaagagcatccaggagatccaggagctggacaaggacgacgagagcctgcgaaagtacaaggaggccctgctgggccgcgtggccgtttccgcaggtgagtctgggctgcgggagccgggtggccgcccgttcactccagctgtcttgccgctccccagcccctacttccactggtgggggtggggccctcacctgctgtcactccccagaccccaacgtccccaacgtcgtggtgactggcctgaccctggtgtgcagctcggccccgggccccctggagctggacctgacgggtgagtgccctgcggccgcgggggtccgggcggcccctggtggggatctcgggaagtgcagccagggggccgcgcagggctggggcttcgcgcagggctgctgggcagtcattgagggggaggtccccccaacaggcgacctggagagcttcaagaagcagtcgtttgtgctgaaggagggtgtggagtaccggataaaaatctctttccgggtaagctacaggctgctgtggccagggaatggaggcggggctggggctggggtccggaccgaccttccctgatcctcgcttcgggtcctgcaggttaaccgagagatagtgtccggcatgaagtacatccagcatacgtacaggaaaggcgtcaagagtgagtggggccccgggcagggcagagggggccgcttgggtgcgtgctgccaggcggggaagcggggccgctgaccgccctcttccttgtgccgcagttgacaagactgactacatggtaggcagctatgggccccgggccgaggagtacgagttcctgacccccgtggaggaggcacccaagggtatgctggcccggggcagctacagcatcaagtcccgcttcacagacgacgacaagaccgaccacctgtcctgggagtggaatctcaccatcaagaaggactggaaggactg

SEQ ID NO: 788 - DNA, 6000 bp, Homo sapiens
ctgaggcaggaaaattgcttcaacctgggaggtggaggttgtggtgagccaagatcgcaccactgcactccagcctcgggaacagagcaggactccatctcaacaaataaaaataaacaaggtttttaaataacaaaattattttaaaagttcatccttttagtaatgcaagaaagccagttaatgtgatgccatcattttaggacgtagcattggcaaagacatatatgtctgtctgtctttttttgtcctttttttttttttttttttttttttgagagacagggtctctctgctgcccaggctagagcgcaatggtgccatctcaactcactgcagcatctgcctcccaggtccaagcaataattctgccttagcctcccgagtacctgggattacaggcacctaccaccaggcccggctaattttgtatttttagtagagatggggtttttaccatgttggccaggctggtcttgaactcctgacctcaggtgatccatctgcctcagcctcccaaagtgctgggattacaggcgtgagccaccgcacttggcctttttttggttttttttttttggagacagagttttgctcttgtcacctaggttggagtgcaatggcgctatcacggctcactgcaacttctgcctcccggtttcaagcaattctcctgcctcagcctcctaagtagctaggattacacgcatgtgccaccatgcctggctagttttatattttttagtggagaccacgtttcaccatgttggccaggttggtcttgaactcctgacctcaggtgatccacccacctcggcctcccaaagtgctgggattacaggcatgagccaccatgcccagcaacaggatctccttttgtcaccaaggctggagtgcagtggcatgatcacagctcactgcagccttgacctcccaggctcaggtgatcctcccacctcagcctccagagtagctgggactacaggtgtgcgccaccatgcccagctaatttttgtaataaacccttcgatttacatgaacaaaaattttttttttgagatggaattttgctcttgttgcccaggctggagtgcaatggcacgatcttggctcactgcaaacctctgcctcacgggttcacaccattctcccacctcagcctcacgagtagctgggactacaggcatgtgccaccacgcccggctaatttttgtatttttagtagagacggggttccaccacattgggcaggctggtctcaaactcctgacctcaggtgttgcgcctgccttggcctcccaaagtgctgggattacaggcgtgagccactgcacccggcctatggtgaataaattttcaacaaaggtggtgagacattgcattgggggaaacgatagtttctcaacaaggggtgccaggacaggtggatgttcctacacacagaaaagatgttcactccatacgaaaagttaacccaaatacggactgtatatctaaatgtcagcaaacataaaatatagcagaagatcacagaaaaaatatgagagagaatctttacaatatccggttgggctaagagtttgtttttgagacagggtctctgtcacccaggctggagtgcagtggtacaatcatagctgactgcagcctcgacatcacgggctcaagtgatccgcctacctcagctcaggagttcttaggatagcaaaggcatgcaccatgtggaaaaaactactgcactagaataaaaggttttgcccttaagaagacatcattaagaaaatgaaagacaaaccacataaaatgtctgcaaatcacctatctttttcttttggagacagagttttgctcttgttgcccaggctggagtgcaatggggcaatctcagctcactgcagcctctgctttctgggatcaagcgattgtgttgcttcagcctcccgaatagctgggactacaggcgtgcaccaccacacccggctaatttttgtatttttggtagagacagtttttttgctatgctggccaggctggtctcaaactcttggcctcaggtgatccgcctgcctcggcctcccaaagtgctgggattacaggcgtgagccactgcacccagcctcatatatctgataaaggactgtatacaggatatgtaagtactcatagcttaatcagacagcccaattaaaaatgagcaaaagatttaaataggtttctgcccaggaagactcattggggaagtgcaggtgcgactcacagtgtgacacgacactgcttcacacttgtacagctgggatgaagcacagcaggtattgctgagcctgtggccacctggagcagcccagcgttgctagggggtgcaaagtggcacacctacattggaaaacatttggggacttccactcaggaatctacccaagagaaatgaaagcacatattcatgaaaaggcttaatgcaacatttataatggtttataatattcgtaaatgtttatggcagtattattcataatggacaaaaaagaaaccaaatatttgccaactggaatggttacaaacaaaatgtatacccacacaatcgaatcttttatttatgtatttatttatttattttgacagagtctcgctctgtcgccccggctggagtgcagtggcgagatctccactcactgcaagttccgcctcccgggttcacgccattctcctgcctcaccctcccgagtagctgggactacacgcacctgcaaccacgcctggctaattttttgtatttttagtagagacggggtttcaccgtgttagccaggacaatctcgatctcctgacttcgtgatccgcccgcctcggcctcccaaagtgctgggattacaggcgtgagccaccgcgcccggcccaacagtttttttttaaaagcacttgggttattggaaagttgggcaacatgatcacctgcacaggggctctgagtctttaacagtgaagcatttcacacctgattaggaaacgctgtgctgatgacatggcactgacagtgtgactcagttacagaaactctcaaatatccctccaacattcagaaattttcaaaagacaccaagctcggtattttgcatagttctgtccccaaaaatgccctcctgtgttcatgtctgtgtctgaacaaagcagctgtgcgtgtgtgtgtgcgtgtggtctccacttctcttgatcagcctgggttgcctggcagtatgggccaaacagacagggccctgtctgcatggagctcaagagtgattaaaagaggctgggtggccggacatggtggctcacacctgtaatcctagcactttgggaggctgaggcaggaggatcgcttgagctcaggggttcaagaccagcctgagcaacatagtgagaccctgtctgtacaaaaaataaaaaattagctggacatggtgttgcacacctgtagtcccagctactcgggaggctgaggtggaaggactgcttgagcccaggagatagaggcagcagtaagctgagattgtaccactgcactccagcctgggcaaaagagcaagaccctgtcttgaagaaaaaaaaaaaaaaaaaaaaaagattgggcaccccggtggttcatgcctgtaatcccagcgctttgggaggctgaggtgggtggatcacctgaggtcaggaattcgagaccagcttggccaacatggtgaaaccctgtcgctactaaaaatacaaaaattagctgggcatgttggctcacacttgtaatcctaactactcgggaggctgaggcaggagaatcgcttgaacctgaaaggtggaggttgcagtgagccgagattgtgccattgtactcaagcctgggcgacactgagactacgtctcaaaaaaataatcaatcaataaataaaagaggcgtccacgttaacgagtccacagtcctaacaagtgctgcaggctggacgcggggcagcgtcccacccagtgtctggtgcagggcatttaggggcttggcctccaggagaggcgagcccggggctgggtgcgagcactgctgctgggccaggccactcacgttatgcggccgttcctgatacttcaacacggcccttgtgggcgaatgtgtggaatctcggaacaagcggagtggggaacagggctctgcggtgaagcccaggctgaggcagcccctcatctgctcacggtgccaggagctccctgcctcctggtcctgaggagccgcgggattcctcagggacactagggcctctgcagcggcgcctgcgccaggcagccacgcgcgctgcgcacgaattctgtctcagcctggagaaaaacacctccgctgcgccctcgcccagcaccagctttccgcggggcgtgcaaggggctcctcctagccccacagccctgtctttccacgggggacaccaaggccctggaacggcccgcgcgccagcgctctcgcccgtgtttaacgagaacttaatccccgtgcccgttacctccccgaagtcccgggactaggtgactaggccccgaagcaagagtcgcagtcggaccgactgggccggggagggcagcgcactgcacctgcgcgggcttccacagcccacgcggccgccgcaggcctcgagtgggcgcgggttgggcagcggcgagaggcgggaccggacctcgcctcccgggtgcgggcgccctgggctcgcgtagggaagtgccctggcttacagaggtgaccactgacggggcttggggtggaaggtgacgacgccagaacccacgcggaacgcgcccacgaggcccagccgcaagatggcgacggcgtgcccccggccacccgcgcgccgcgcatgcgccctggccttccccgcccgagtgagcggaagtctcgtgaccccggaagtgacaggcagggcgggcggggcggccgacgacgttcgtcatttagtgcgggagggatcctgaaccgcgcggccgaaccctccggtgagtggccgtggcggggcggaggcggcggggcggaggcggcgggtcggggcggggaccggcggcgccggcgggggcggggggcgctgaggtgggggcttccgcctttgttcgcgccccgccctgagcccgcggcagggtctcggcgggcgggggcgcggtgacagcgggccagggcggtgcgggctagggcggggccggggcgggaccgggcggcggcggccccggccccacgtgcgggtcccgggccggaggggcggcggggaccaggggagtgccggcccctcccgagcggtccggagcttctttcatggccgccgaggcgcgtggggcccgggccagacctgagggcccctccttggggacgcggggggcgccgggccggcagccgcggtccatcgcgttcgggggcgacgcggggattggggcgcggcctcccccagcgcccgggccacgcccggcacggattgcgggccctgcggaagtgcgggccgcgccctaggatcccggcgcctacggctatcctcgcgcggcgcggaggccccagcccctggaggaagcagggcggcctggaccccggcctgggtgtcccgggtgtgctgctccctgacccacctcccacgctgccgggaaggatctgagcctgacagatcccctgccgggtcagtgctgccccgggcactccgggcccaccatctacaagagggcccgagagtactgagtggctgtggtagctcccaagttgtaggtcacagaccctcacaattgtggagaaaccgcagatacttaggatccccgtgtccaggtggccccgtgcggtattctagctgcccctaacatccgagctccaggggcatcctgtttgaaagatgacgctgagccgaccacacacgtttacatgtgactaccacggccagaggagcaaccctactgagggataccgagccccgttaccccgtagggcgagggcctgggcagctcaagagcggcaagaccctaagagagggtttagtg

SEQ ID NO: 789 - DNA, 6000 bp, Homo sapiens
gtttagtctatatatttacagagagttgtcaactttgtaaattttttttaataattatttttttcttttttagagacagggtcttgctatgtcacccaggctggaatgcagtggcttggtcctagctcactgcagccatgaacttgtgggctgaagcaatcctcctgcctcagcctcccaagtagctgggactatagacacataccaccacgcctggttaattttaaacacggggatttcgccatgctgcccaggctggtctgcaactcctgagctcaagcgatcctcctgccttggcttcccaaagagctagggttacaggcatgagccactgcacttggccaacttcgtaattttttaattgccaattaagaacattaaaaaatgtaccatctactattactcttgcttcttaaagtatgtttaattttttaaaaagtaacagaatttcatactgaagggcagccttagatctggttactttatgaaaacttaactatatatctttattgttctcattttgctgcaagtcatgaaaatcccaccaaggactgccactggttcctggacccagtgtttgggaatccctagtcagttcggtgttactgaacattttcaaggccttcttaaaattttttttttattttttgagacagggtctggctccattgcccaggctggagtacagtgacatgatctcagctcactacaacctctgccttccaggctcaagtaattctcccacctcagcctgctcggtagctgggactacaggtgccaccatgcctggttaatttttgtattcttttgtagagataggatttcaccatgttgcccaggctggtctccaactcttgagctcaagtaatctgcctgccttggcctcccaaagtgctggtattacaggtgtgagccaccacacccacccttcaagaccctcttcattcaacctgctaaaatcatttcacatctttacctaaggactgtaatcagactgatgatattgcaaattctataactccctcatttacatggaatcatttaaatctgtgctaatgtaaataatccaattgttaaatacttgtcactgtattaggactagatagtgttaacatagtcatagttatgaatgggggagttctgtagttagattgtctctgttccaatcagggtctgagcaaatattaacaacatttctctctgcacttcagtttccccatctgtggcatagttttaaagagattatgtataaagtgtatggagtagtacctagcacatggtgagcactcagtatgtttgttatattattattatatttatacatggtatcagtattttgcacttgcatgtaggattttaacatactttatattttaagggtgatctcaaatatccacaatactttggaagagattagtcacaattagacgatagaattttaaggttggaagggaactttattttatttttatttatttatttttttgacacagagtctcgatctgtcacccaggctggagtgtagtggcgccatctcggctcactgcaacctccgcctcccgggttcaagcaattctcctgcctcagcctccagagtagctgggattacaggtgcctgccaccatgcccagctaatggaagggaatttttaatataatatgattccaccctattaaaggtgaggacctctttattaaaaaaagttggcctggcgcggtggctcacgcctgtagtcccagcactttgggaggccgaagagggtggatcacgaggtcaggagttcgagaccagcctggccaacatggtgaaaccccatctctactaaaaatataaaaataggccagggcagtggctcacgcctgtaatcccaacatttccggaggccaaggtgggcggatcacctgaggtcgggagttcaagaccatcctgaccaacatggagaaaccccatctcgactaaaaatacaaaattagctgggcatggtggagcatgcctgtaatcccagctattcgggaggcaggagaatcacttgaatccagaaggtggaggttgcggtgagccgcgatcgcgacattgcacaccagcctgagcaacaagagtgaaactccatctcaaaacaaaataaaacaaacaaaacaccaaaaattagctgggcgtggtggcgtgtgcctgtaatcccagctactccggaggctgaggcgggagaatcgcttgaacccgggaggcagaggttgcagtgagccgagatcgtgccactgcactccagactggtagacaagagtgaaactccgcctcggagaaaaaaaaaaaagttaatttagagtccatctatcttatggcagaagataactagatttagagtccatctatcttatggcagaagataactagtgatgtgtcacaataatcagaagagccttgtaggtaagtaagctatatatggaccccacctatatttctagtagatatttctagaaatatatggaccccacatatatttctagtagttctgccaggttggttatcacttccacttatatttatcagtgtcactcatgtattgtcttaactacttgtattttttcgtatgtgtctaaatggaaagcaacataatgttcacggttctctgagaaacaacaaaattcctaatacctaaaaatggtaataataataaaaaaaagacaagcagggtttaggaaatttattttagggcaactgcctgatttattttaagccctatgcttaaaaataagtctaattcacatgacttaaaatgctggagccaagaaaagtcgctgcaaaggcatttaatgaaatacctggtttgtctagttgtctttgttatgatttttgtataaaccaagaacgtcctatcttgatatatatagtggattttatatctaaatatttcttgtatttaataaattgaaaatagaaatagacattttttcaaacagtgtaagattttcctaacctctgactcacatcgtaaggctggtggactgttcagatgctgtacgatgctttttactccgatgctttttggttcatctgtagcattttccatcatggggtaaaagatccacattttctatttctagtgatccttaatttggcttctgagcaaaaataaagtttgatgaggaataaattaaggtagatttcctgctgaaaccagtgaagaacataactttatcagcgggggtgagtgacaagtctttcacctttcctcacaccacagtcaacgaagtaacggaactaggagaaatgcccattattctcatgtcctacattagttctgataaaaatcacaattaagtttcactgaatgttttgacattgaaacggcagcattacacgtccaggagagaactacagtaggggtgttatgagaactaacacgaacgacttaaaaatattgatttttttctacgagattattttcctttaaaaaaattaaattgagcttgacttctattgactgtatcttccggagtcagtattttatggctcccctgacacacacgcctggcgtgggagggctgagcgctgcagcgcttcggaactttcccagtgaatcgtaaatgggttcaacgccggggctcgcggagggctgtccatggagtaccactgaaaaccaaacgccactggtgctcaatgctggtacctgccgacgaaaaggcttcttgcctaaaaaagaacctattgccccaccctaacagcaacaaggagaacaagcactctctcctcgtcagaagtctctggactggctgcaacccagaggaaacagagctggggcatctgccgggacagcgatcagaagcagccagagctccgcctccgtccggacctccaaggccgctccagagccctgcatggctcctcagagccggccaaggcgagaaccttgccggcagctgcttacccgcactcggctcctcccagcggtccgccttctccaccgcctgcccgcaaggccccgcccacctcaccgccccgccccaccccaccctgcggaggcgacagagtgcgcgcgcgcgcgcggggtcccggctggttccccttccgagcgtccgcgccccgcatgcgcagtctgccccggcggtctccgtttgtttgaacaggaaggcggacatattagtccctctcagcccccctcgccccaccccccaggcattcgccgccgcgactcgccctttccccggctgggaccgcagcccctcccagaagctcccccatcagcagccgccgggacccaactatcgtcttcctcttcgcccgctctccagcctttcctctgctaagtctccatcgggcatcgacctcgccctgccccaccggacaccgtagcagcagccccagcagcgacgggacaaaatgggagagtgaggctgtcctgcgtggaccagctcgtggccgagactgatcggtgcgtcgggccgggccgagtagagccggggacgcggggctagaccgtctacagcgcctctgagcggagcgggcccggcccgtggcccgagcggcggccgcagctggcacagctcctcacccgccctttgctttcgcctttcctcttctccctcccttgttgcccggagggagtctccaccctgcttctctttctctacccgctcctgcccatctcgggacggggacccctccatggcgacggcggccggggcccgctagactgaagcacctcgccggagcgacgaggctggtggcgacggcgctgtcggctgtcgtgaggggctgccgggtgggatgcgactttgggcgtccgagcggctgtgggtcgctgttgcccccggcccggggtctggagagcggaggtcccctcagtgaggggaagacgggggaaccgggcgcacctggtgaccctgaggttccggctcctccgccccgcggctgcgaacccaccgcggaggaagttggttgaaattgctttccgctgctggtgctggtaagagggcattgtcacagcagcagcaacatgtcgactggggacagttttgagactcgatttgaaaaaatggacaacctgctgcgggatcccaaatcggaagtgaattcggattgtttgctggtgagtagcgctgttctcttttgcttgtctggggttttgcatgtctttccttcctcttgcattagtctggttcgctgcaaaagtctcaggtgtgcataatcgtcttggaaaatgctagatttctgtttcctgaagaatcttggagtaccattaacatctcatggtgtggtcctatttgccatttgactggctctgtactaactactctgaacttttaattctgactcagttcatgagtacccgaaagatacttacaaactgctattgcaggcatcctataaaaagttatcacgtcagagttactgcaatgtatacagtttgttgaatggcgatcgtagtaattaatgttaatctttctgatccgtttgacagttaaattggaaagactactttgcattttttttcctttttgcgatttagctcctaggggtttagtttttagccttgaaaatgataacggagaattgctattgaggaagtgatttttgagccaaaatttcataggtgatttgagtttgaaggaactttttgctaaactattgtaaaaaaccaagataattggtcataggtaattacagtgttaacttattttattgtattattggttacaaaagtacgtaccatacagttattgtaactgtctttttggtggtgtggcacttaacattgtcacttgtaaaacattctaaagagggttttatgacatgaaaaaccacaatcccattttaaaaatagttaagtggttgataatacagttatctgtaaataattggaattcttaggtttgatacatttcctctgtaaatgtatcaaagttgttcagagtttctgaacaactaagggttatataatatttcttggtccaaacaaaaccacataatctctaaaataaggtttcagggagcatgtatatg

SEQ ID NO: 790 - DNA, 6000 bp, Homo sapiens
tgggcagagagcttggagggatcagcttgtttcttattctacgtgccatcaaagcttgggggctgctggaatgggccagtctggggtctctgttctcaaggtctgtaggattctttggttgtcttccatgtgatctgttcatgtggttacttagcttgggtttcctcacaccatggtgatctcagtttagtctgacttcccagagcataaaactgttagctgccaggcaccctcagagcttaggcctcctgctggcacagtgctacttttgctgcattgtactggttaaagcaggtcacaagaccccagcccggattcagtgtgggagggaatgccacaagggtgtgaatattggagacatagttcattgggggcaatctttggaggctagctaacacatcaatgtttattagagaaattcacgaacatgataccaagcctatttcctaccaaatgaccaaaagcaaaggaatgctcagcttaattgtcttttactatacagaagtctacacccaaatctttctgatgtttccatgatctctcccaaatatgcctcattcaaattctttcagcactgcagtctcttcattaggttctagcatgactctcatctacactaaatgtttccagatgcctgaattccaaaattcagaaaaattaagatataactagtttagtctatatatttacagagagttgtcaactttgtaaattttttttaataattatttttttcttttttagagacagggtcttgctatgtcacccaggctggaatgcagtggcttggtcctagctcactgcagccatgaacttgtgggctgaagcaatcctcctgcctcagcctcccaagtagctgggactatagacacataccaccacgcctggttaattttaaacacggggatttcgccatgctgcccaggctggtctgcaactcctgagctcaagcgatcctcctgccttggcttcccaaagagctagggttacaggcatgagccactgcacttggccaacttcgtaattttttaattgccaattaagaacattaaaaaatgtaccatctactattactcttgcttcttaaagtatgtttaattttttaaaaagtaacagaatttcatactgaagggcagccttagatctggttactttatgaaaacttaactatatatctttattgttctcattttgctgcaagtcatgaaaatcccaccaaggactgccactggttcctggacccagtgtttgggaatccctagtcagttcggtgttactgaacattttcaaggccttcttaaaattttttttttattttttgagacagggtctggctccattgcccaggctggagtacagtgacatgatctcagctcactacaacctctgccttccaggctcaagtaattctcccacctcagcctgctcggtagctgggactacaggtgccaccatgcctggttaatttttgtattcttttgtagagataggatttcaccatgttgcccaggctggtctccaactcttgagctcaagtaatctgcctgccttggcctcccaaagtgctggtattacaggtgtgagccaccacacccacccttcaagaccctcttcattcaacctgctaaaatcatttcacatctttacctaaggactgtaatcagactgatgatattgcaaattctataactccctcatttacatggaatcatttaaatctgtgctaatgtaaataatccaattgttaaatacttgtcactgtattaggactagatagtgttaacatagtcatagttatgaatgggggagttctgtagttagattgtctctgttccaatcagggtctgagcaaatattaacaacatttctctctgcacttcagtttccccatctgtggcatagttttaaagagattatgtataaagtgtatggagtagtacctagcacatggtgagcactcagtatgtttgttatattattattatatttatacatggtatcagtattttgcacttgcatgtaggattttaacatactttatattttaagggtgatctcaaatatccacaatactttggaagagattagtcacaattagacgatagaattttaaggttggaagggaactttattttatttttatttatttatttttttgacacagagtctcgatctgtcacccaggctggagtgtagtggcgccatctcggctcactgcaacctccgcctcccgggttcaagcaattctcctgcctcagcctccagagtagctgggattacaggtgcctgccaccatgcccagctaatggaagggaatttttaatataatatgattccaccctattaaaggtgaggacctctttattaaaaaaagttggcctggcgcggtggctcacgcctgtagtcccagcactttgggaggccgaagagggtggatcacgaggtcaggagttcgagaccagcctggccaacatggtgaaaccccatctctactaaaaatataaaaataggccagggcagtggctcacgcctgtaatcccaacatttccggaggccaaggtgggcggatcacctgaggtcgggagttcaagaccatcctgaccaacatggagaaaccccatctcgactaaaaatacaaaattagctgggcatggtggagcatgcctgtaatcccagctattcgggaggcaggagaatcacttgaatccagaaggtggaggttgcggtgagccgcgatcgcgacattgcacaccagcctgagcaacaagagtgaaactccatctcaaaacaaaataaaacaaacaaaacaccaaaaattagctgggcgtggtggcgtgtgcctgtaatcccagctactccggaggctgaggcgggagaatcgcttgaacccgggaggcagaggttgcagtgagccgagatcgtgccactgcactccagactggtagacaagagtgaaactccgcctcggagaaaaaaaaaaaagttaatttagagtccatctatcttatggcagaagataactagatttagagtccatctatcttatggcagaagataactagtgatgtgtcacaataatcagaagagccttgtaggtaagtaagctatatatggaccccacctatatttctagtagatatttctagaaatatatggaccccacatatatttctagtagttctgccaggttggttatcacttccacttatatttatcagtgtcactcatgtattgtcttaactacttgtattttttcgtatgtgtctaaatggaaagcaacataatgttcacggttctctgagaaacaacaaaattcctaatacctaaaaatggtaataataataaaaaaaagacaagcagggtttaggaaatttattttagggcaactgcctgatttattttaagccctatgcttaaaaataagtctaattcacatgacttaaaatgctggagccaagaaaagtcgctgcaaaggcatttaatgaaatacctggtttgtctagttgtctttgttatgatttttgtataaaccaagaacgtcctatcttgatatatatagtggattttatatctaaatatttcttgtatttaataaattgaaaatagaaatagacattttttcaaacagtgtaagattttcctaacctctgactcacatcgtaaggctggtggactgttcagatgctgtacgatgctttttactccgatgctttttggttcatctgtagcattttccatcatggggtaaaagatccacattttctatttctagtgatccttaatttggcttctgagcaaaaataaagtttgatgaggaataaattaaggtagatttcctgctgaaaccagtgaagaacataactttatcagcgggggtgagtgacaagtctttcacctttcctcacaccacagtcaacgaagtaacggaactaggagaaatgcccattattctcatgtcctacattagttctgataaaaatcacaattaagtttcactgaatgttttgacattgaaacggcagcattacacgtccaggagagaactacagtaggggtgttatgagaactaacacgaacgacttaaaaatattgatttttttctacgagattattttcctttaaaaaaattaaattgagcttgacttctattgactgtatcttccggagtcagtattttatggctcccctgacacacacgcctggcgtgggagggctgagcgctgcagcgcttcggaactttcccagtgaatcgtaaatgggttcaacgccggggctcgcggagggctgtccatggagtaccactgaaaaccaaacgccactggtgctcaatgctggtacctgccgacgaaaaggcttcttgcctaaaaaagaacctattgccccaccctaacagcaacaaggagaacaagcactctctcctcgtcagaagtctctggactggctgcaacccagaggaaacagagctggggcatctgccgggacagcgatcagaagcagccagagctccgcctccgtccggacctccaaggccgctccagagccctgcatggctcctcagagccggccaaggcgagaaccttgccggcagctgcttacccgcactcggctcctcccagcggtccgccttctccaccgcctgcccgcaaggccccgcccacctcaccgccccgccccaccccaccctgcggaggcgacagagtgcgcgcgcgcgcgcggggtcccggctggttccccttccgagcgtccgcgccccgcatgcgcagtctgccccggcggtctccgtttgtttgaacaggaaggcggacatattagtccctctcagcccccctcgccccaccccccaggcattcgccgccgcgactcgccctttccccggctgggaccgcagcccctcccagaagctcccccatcagcagccgccgggacccaactatcgtcttcctcttcgcccgctctccagcctttcctctgctaagtctccatcgggcatcgacctcgccctgccccaccggacaccgtagcagcagccccagcagcgacgggacaaaatgggagagtgaggctgtcctgcgtggaccagctcgtggccgagactgatcggtgcgtcgggccgggccgagtagagccggggacgcggggctagaccgtctacagcgcctctgagcggagcgggcccggcccgtggcccgagcggcggccgcagctggcacagctcctcacccgccctttgctttcgcctttcctcttctccctcccttgttgcccggagggagtctccaccctgcttctctttctctacccgctcctgcccatctcgggacggggacccctccatggcgacggcggccggggcccgctagactgaagcacctcgccggagcgacgaggctggtggcgacggcgctgtcggctgtcgtgaggggctgccgggtgggatgcgactttgggcgtccgagcggctgtgggtcgctgttgcccccggcccggggtctggagagcggaggtcccctcagtgaggggaagacgggggaaccgggcgcacctggtgaccctgaggttccggctcctccgccccgcggctgcgaacccaccgcggaggaagttggttgaaattgctttccgctgctggtgctggtaagagggcattgtcacagcagcagcaacatgtcgactggggacagttttgagactcgatttgaaaaaatggacaacctgctgcgggatcccaaatcggaagtgaattcggattgtttgctggtgagtagcgctgttctcttttgcttgtctggggttttgcatgtctttccttcctcttgcattagtctggttcgctgcaaaagtctcaggtgtgcataatcgtcttggaaaatgctagatttctgtttcctgaagaatcttggagtaccattaacatctcatggtgtggtcctatttgccatttgactggctctgtactaactactctgaacttttaattctgactcagttcatgagtacccg

SEQ ID NO: 791 - DNA, 6000 bp, Homo sapiens
caatgactcccttgctacattcaaaggcatttcacatcttttggtctttgacatccttcatccttttggtctttgacactttacttttgtgatagtcctcctgattctctgcttctcttaacttttctcattttactccctatttgtatttgtctttaaatttctgttgtaactctttgcttttctgtatacttccttatgatctactttagtggtatcatctatgaccgctatgctgcaaactctcatatatttatctctagcctgtatgttaatcctctaacctccaatttccctggtgttaaacaattcttaaatttttatatcaggcagagtcacaaaaggaaaaagcacattcaaaatgggtaatcgaggataatttggtaaggagggtattaacaaacgtgtagatagagtttaggaaaatcaaaaaagcaatggtgggccgggcatagtggctcacgcctgtaatcccagcattttgggaagccacggcgggctgatcatttgaggtcaggagttggagaccagcctggccaacatggtaaaaccccgtctctactaaaaatacaaaaattagcccggtgtggtggcagtcgcctgtaatcccagctagtcaagaggctgaggcaggagaactgcttgatcccaggaggcagaggttgcagtaggccaagatcgcaccactgcactccagcctgggtgacagaaggagagaggtctgtccccacccacccaaaaaaaagcaatggtgttgctaaagagaaaataaagacaatgacagcaaggattgagcagtgagtagaaaagtttaactgtaaagtaggggactagattcatcacacaactatgctctgggtgggaagggtggttctttttaaaccaaaggatccttattggtattaggagagtgaagtttctggatgttgcccattagctggtggtatctgggcttaccagttaggctagtgctaggtggctggagatagttcatgctataagcctgggaagtccatttaggaattatggcttccaggtacctctgtttcctatgggtgcctgccttgggattacagtggcaagtgtttctgctctttatgtgaactatccaattcagtactgtcttgtctagtcaggtctaggtagcatcaacaggctgtcatgcccagtgtctggttccagcccatgctgaggtctgaagggagtaggttgatgggtggcaggtagctgaaagaacacttgggaggccataggccggtgaaagatggttttactcagcagctctcttacactgtgtgtctttgtctcggctgcctgctccggctctgccactcccacgcctgcagctgcattccctggtctgcaaggccagctctcccttacagggtcagcagcttaattctctctgggcatgagtcgagccatgccgtgctgtatgtacagtgtcagcagggcagttataccttttacaaacaatagtgcctccaaaccaggcgatgagccttcccatgttatagctacatagctgtgattatataacaagtggagttatgtgtctgtgctccaaactcaatgagtcacacaggatgtttaccttggcctattcttgaccaaatcacatccattttccttacactaggtgactgacccggagtttctctgttggtatcctggtgctgccaacacccaggagtgatttctacttctatgtctaaagagacaatagaagacagtgtttgcaggaactcaaagaggataatggtatgacaagagctgtggcctttggtggagacacagacaacctgtggcaacacagcaggaagggagctaagggaattactaactggatctcattttcttctaccctccaatctcttcaagaagctcgaacagaggatcctattgatgcagtccatgtaggcaggttcctagggctgagagcagagggaagaaaggtagagagtagatctggagggacacatagtgtctctatcagagctaacttttacaatgcctcttttcatcttgcttctcaagaatctataatctatcttgctttcataagccctgttcctcccttcatatctactatagctgctgtagtggagaccacttctacttgcttcttaggcaaaactggaaggacagttgagaataataataatccatctgttctggataaattgtgctccctcaccccacccaaattcataggttgaagccccaacccccaatatgacgctaagtggagataggacctttaaggaggtaattaaagttaagtgacgtcatcagagtggatccttaatctaataggactggtgtccttgtaaggaagagaaacagactagtactgtatgtgcatgtgtgtgtgtgtgcacagagaaaaggccatgtgaagacacagtgagaaggccgccatttaaaagtgaagaagagaggccttaggagaaaccaataccagcagcacttggatcctggactccaagtctccagaactgtgagaaatacatttcttctgtttaagtcactcagtctttggtattgttatagccaaagactgagttgttatagcaaccctagctgactagctgaatagacaccactgtttataaacatttttatcaagtatcttatgatttggttctttataaacatcatccaatataaccttttaccatcacaatcctagaaggcaggtgttattaatccaaggctcacagacaaggaagctgaggttctgagaggttagtagtttgtgcatggccataaaatttaagtagcaaggccggtcatggtggctcatgcctgtaatccaagcactttgggaggtcgaggcgggcgggtcaccttaggtcaggagtttgagaccagcctggctaacatggtgaaaccccgtctctactaaaaatacaaaaaagtagccaggcgtgctggtgtgtgcctgtattctcagctacccagggcgggctgagacaggagaatcgcttgaacccaggaggcggaggttgtggtgggctgagattgtgccactgcactccagcctgaacgacagagtgagactccgtctcaaaaaaaaaaaaagcaaatatttattatggggacttctgtctattaaaaccattacaatgtgctgataccacatgaaaaaggaatgtaattactgtgcctctggtgtggctgggttcagttaagaattaattattttaatatgtttctgcaacacctttagctttctcttttcacatgtcctgggcttcaactatcacccaatctgatgactctcaaatctgtaacgtcgtcctagtcctttttctttagttccaggctcatccctctcacgatctactatatctctcacttggatgtcctacaggcattttaactcatttttaaaaagctacacgattgaaatgttttgagttattttaaattcctctgtcatctcactaaattggaccaataattgtttctcaaacatgttctttcctcttcatttccactgcagatgctttcctaatttagttcctggatcaccacagtatcctcctaaatggatctcactgccttccatcctccttgatgctacctgagggcttttctgaagacactttttctttttccttttttttttttttttgagacagggtctggctctgttgcccaggctggagtgcagtggcgcaatcatggctccctgcagccttgacctccccagctcaaggaatcctcccacctcggcctcccgagtagctgggaccacatgtgcgcgccatgacgcccggctacttttttgtatttttggtagagacgggagtttcaccacacttgtaattgcaaaattgccctgaaatgatttttccattctcttcccgacaaaatccaaattccttagctagtcattatctgaccttggccttccctccaatttcatctccccagctaaatccaaagacagataatttgccacctagcctaatatttaaaagagtacactggcgttagcctgccttgacttgaaatcacagaacctacttcacagggattaaatgaactagtacacatataaagaacttatgtcttgcctggtacatcatgtggtaaatattagctattcttcttatccaccctctcaactcatgcatttgcacctggtggtccccttgcctggaatattacctctcaccatccatctaacccctgcttctctttaaagattcaatccaggagtcagattcctagcaagtttaccctgccccacccttccatctcgttagtctccaccgcttcctattcaaattattgtttgcgtcggtcactagaccgtgaacttcctaaaggagggatagtgtcttcatctttttggtcaaaacctaaagacaggtgcacgatactttctgaatgactgcacagaaagcgccccatatgtaattaagtctgttaataaatattcctaaacgttattttgtcttgtatgtagacctgccccgaatacagtacaggagcatcttcaaagtacttccagtgggtgccctggacagcagctaagaaccccggggtaaaacgagtttcctctctactgttacaaatcagaaacctcctccgtaaaagcctcagatctgggaaacgcggatgcatatgccaacttttgagtctcagtctgcgcctgcgcacgtgacctctacacgtctcctctgcgcctgcgccgctcaagttagcgcgaggctactcagtcgagggtgggactacgcttcgcgttttgggattgggcgctgaaggccaaaccggacgacgcggaaatgacgtcacgccgggggccctgccgcgcggtggctgctgggtgccgcacgccttcccatcctcctcctctcccctcccccatccctccccgccccctcggccgctccgctccctggcgtgactcggcactgagagtcccgggagaagactcggcggtcgccacctcttctgtccaggcctcggccttcctgagcatctctccttcctctcccagatcgtcttctccttcagtttcaaagccagtggcgtcgcggccaccctgccgggctctctgtgaggatggtgggggtgaagcccgtcgggagcgacccggatttccagccagagctgagcggcgcgggctccagactcgccgtggtcaagttcaccatgagagggtgaggccaggctcgagctctgtgggtccccgtctgtccttccttgctttcctttcactctttgttggccctggtttcctagccgtctgctgccccggagtgtccggcagtcgccgcagccccaggagctgccggaattaggcctcgtttctcgggtgtgaacccccatttatgcacaggggttcctagacgggctcgggggcctggctggccggcttctccagctcaggagatttctcacctgctccttttcaattctttgacaaactggttttgggggtggcccgcccctattccttccagcctgtgggagtctccgcagccacccttgcctgagcctgaccccttctttctgcagagccagctgtcatttgcatctccagagctccaaaagcttaatttaccgaacactttgtttctcttcaccacctacatctctctaaagcctttgaagattcagatggggcgatctaactaatatgcgtagctctgagtcctgaatttctgctaatgcatttcgaactaagttaacgttgggttagggtgctttttaaattatttgaacttttttcttcctcgttcggccactaacttgtagcttaggctcccctatgtatgcgattgcaactggtcacacacgacagtacatatataatatatttcaggtggacagttggccggatgtcttagtttgacccggctctgttttttcacttaagaggacagggatcttgaaaaatgttaactgtctttggtaaatatcaacaaaattataggtcgtagaaaaggtggaccttttatagtggatgtgtagtaaagttcc

SEQ ID NO: 792 - DNA, 6000 bp, Homo sapiens
cagcaaccatgtccctgggcatttatcccccaaaaaatgaaaatttaaatccatacgcacacacacacacaaaactgtacaagaatgttcacagcagctttatctgtaacagccaaaaattaaaaacagcccagatatgcaggtgaatggttaaacttggatacatacgtaccatggaatactactcaacaattaagaagtacaaactattgataaatgcaacaatttggatgaacctcaagaactgtctcattcaacaatgttgatgaatctcaagaactgtctcattcaacaatttggatgaatctcaatttcaaaagattacatgctataggattccatttatatagcactctggtaatgacaaaattatagagatagaaactgattaaactgattaagggatggtgagggtaagggaggtggatgaaactagaaagaggtaacatgaagaaaatctttgtagtgatagaatagttccatatcttcttcctctttttttttttttttttttgagacagggtcttactctgtcccaggctagagtgcagtggcataatcacagctcactgcagcttcaaccttcccaggcttaggtgatcctcccacctcagccccccaagtagctgggactacaggcatgcacaaccacaccagactaattttcgtattttttgccagagacggggttttgacatgttgctggtctcaaactcctgggctcaagcaatctgcctacctcagcctcccaaagtgctgggactacgggcatggtcaaccacatcagcctagctctgtatcttgattgcagaggtagttgcaggaatccacacaggtgataaaatggcacagaactatacacaggcattgtacaaaatcaatttattggttttgatactgtactacagtggtataaattgtaactattgagggaagttccttgggtgaagctgcataaaatgtaaccactggaggaaaccagacctctctttactatttgtgcaacttcctatgaacctataattatatcaaaataaagttaaaacaaaataaatgggaagagttatttatataggaggaaaaaacatactactacaaaaccatagagttaaaacagtatagtgttagagcaagaacagacaaaccaaaggaaaggactcaatattcagagtatatatgagcacttaatacacagtgtgacaccatatctatgggaaaagggaagaaagatgccaggaaaactggcacagtacatggaaaataaactggatcacaaacttgtgacacataaaaagttaaactctgcatgtattaaagaccaataagtttaaaagaaaactatgaattagcagtacataacatagcagagtaactttgtggcacagcactggggaaagatttcttaaacaaaacctccaaaatacaaccatatagccaaaagattttttaatttgattatatcaaaatataagatttctgttcaatgaagaacatcatgagaaagattacagacaaatgacagattaggaacagatacacttgtaatacttaaatgattagtatctatggaatacaagaaatgtccgcaaatcaacaagaaagaactgaaaccccaaaataaaaatgggtgaagggatgaacaggcaatttcacaaacaaaaaattaaaaaagataaaacacacatgaagaaatactcagattcggcagggcacgctggctcatgcctgtaatcccagcactttgggaggctgaggcaggcagatcacaaggtcaagagatcgagaccatcctggccaacatagtgaaactccgtctcttctaaaaatacaaaaattagctgggcgtagtggcgcgtgcctgtagttgcagctactcaggaggctaaggcaggagaatcgcttgaacctgggagacagagatggcagtgagccaagatcgcactactgcactccaccctggcaagagtgagactccatctcagaaaaaaaaagaaatgctcagattcattagtagtgaatgaatctgaataaataatgaaatgtaatttaaaatgagatttaattttgtatctattagtctggaaaaattggagcactgaataaaaccaagcatttgtggggaaacaaagataaaggaaccctcacgagcttcctgcaggtgtatagactattgctgcttgttctaaacatcatctggtggtgcttcaataaaatatatgaaaaccaaatgatccagaatcacatatggatctataactcactgaaagtatcacagaggtctaaaatgtatgcttatcatagtattatctgtagaggtaggaaaatgaaaataacatgggtatctacaaataggagagcagacagataaactgtagtagatgtacattctgaaatattgtgcagcacttggaagcaaagaacagcaatgcaatagatcttcaaaacataatagtgagacaaaaaaactgcacgatatcatctctataaattaaaaatgtgggcacccagaacaatatacatttaataacacatacaaacagaagaatacacatcatacagaatggttgcatatgggttgatgagcaagagaaaacagcgggaattagaaacaaaaaacaatgaatgagactggatgtggtggctcacacctgtaatcccagcactttgggaggccaaggctggtggatcacctgaggtcaggagttcgagaccagcctgaccaacatggtgaaaccccatgtgtactaaaaatacaaaaattagccaggcatggtggcacagtctgtaatcccaagctagtcaggaggctgaggcaggagaatcgcttgagcccgggatggggaggttgcagtgagctgagatcacgccactgcactccagcctgggcaataagagcgaaactccatctaaaaaaaaaaaagaagaacgaaaaatgcaggcaggggagatgccttgaacagcccattgaattgagtaagattaactccatcctctgcacctgaggtccaaaatgaactttaaggactcatacatctaataaacatcacaccactaaagctaaatgtcatcctacccctctcacgaagaaaacacaaaacaagctcactactttgaagattttcgatgctaagtgtgttacatggagaaaccacccaacttcctttaacttcaaaacggaacatatatcaaagataaaaggaaactgtaagatacaagggtcactacccctaaaatttaagttaaattcttacagggatattcaaaccaagccaagcccagtccctttgattcacccagtcaccgagatcttttaaaatttagttacaggtggcaataagaaaaaataaagggcatactctcatttttctcttaaagtatttctctgaaacactcttaaaataaggattggcagtaaaataaatgaattttctaccataatccctaattgacattaataataaagcattaattatatttatagtggttcgttttcccaatttataataactaatatgtattgttctggatggaactagacagttttttattctttgtaataatgagggcatttcaacacattatgttcacttttaagctgaccttcatacagccacgagtttgtttataaagcaagaagcagagtcaaactaaaatttttgttttacaaaatgtcaaaaactcagttaatttctttcatacaacaggcaattcctgcaaccttgcccataaaatcctaagacataaacacctgaaagagtcagtttgcctttttttgtctcatggcaaatattacagtgagaggaagctatagctgccactgaccgaaccctaaattcagcagcatcaacaatatcaatgcagcctgtcatgcgacggtaggttccctagtttcagactatctaacccagcaaattctgcctcaaaaagtgacatactaagtgggtaaaaaacataaaacagcaatttttgaatcaaagttagggtagtgctgacttcaaacatagcttcagaacgctgggacccatcactaagtgaatgggagtgactggcatccgctcagacaagtactagggcaaagggataagaactggcagatggcatctcaaaaatgaaattctaacagtggtgtcagtaccttgggcatgggcaaaaatagtaccaacaggaaaggaaagactatatgaaccccaaaagcaagcacatcgcccaaaattgctgtcaataaccaccaacgatcatcaccaatcacctgatcccgtttagattgcacctgggaaccaggcagtcccacctcaagaccaaagcaactgtcacaagtagcaaatatcactcaccaggcaagggagccacaaagacccccggctggcccccacgctcttggtaacggcgcctacttttgggcccgacctgcaggcttgcagccgcagcgatctgacagctagcaccgcccccggctagagcgggtttgtgacctttgacccctgacccctgacctccacggtgcaggaacatcccgccctgtggtttcccatggagaagcttgaaagcccccttacctgtcacagcttcatctcatgccgcgatgtagcctatcagaccgccggtgggcgccccagccaaggaggacaaggatagggcggaactacggaggatgcggggtgcgtagatcctgctgggataatccgtggggcggcaagcgctatacagccgccgtctccccagtgatactgcaaggtgccggtgccgccgccgccgccactgcagtaaatcagctgacaccagccccaactgccgtgactttcgctgcaactgtcgcaaaaatgagggggcgggaaagactcaccatttccctacttgcaaggcctaagccggcgccgagagagccagccgcgttacgatggagaccgaaagtggagaaaaggccagctgtgggcaaggagtgcacggccgccatcttggttgtgggaagtctcgtctaggctgtcctctctccagttgggaggaccaagatggagcgaaggatgaagtagcaagtgcacgtctttcttgggagcaggatgttgcgcaagtttacacttctgaccccatcacactgcttcccactgagatgcaagaggtagggaattccctaaacactggaaagtatgttggatgctggaaagctaaaaagaatgacaaatgtcccccaagatagataagctatagtatagtgcaggatgagaaatgccaaataaggagcaaggaagaaaagagatgaattatttctaggttggggtaaggaaggataatcacattaggtcatatggaagtctagaaaaattggtcagatttggaataataattgggaaaggaaaacaactttgtcaccagcattgaaatgtaaaacatgaatatatgcaataaatagaaagttaaatttggaagaaatacaagggacgtgaagtaggtgaagtgggaaaatgtggtatcagggcttagctgtttctgctccgtgagcggctcctttaacaggcagtctatgccctggagctctcttgtgggttgatagagacttcatcacattcggcctagaccaggtaataaaaaagtaacatggaaaaatagaataatgtagataacaagaggcttttagtggccatataagctttttggtctttattccaaagacaatgaaaagtaattgaagacttttgactaataaatagtgtagcacttttcctaaccacatggtattcaggtttttaaaattgctttacaacaaattatcacagtcttagtgtcttagtggcttaaagcaacacatatgtattgcctcacattccatgggcaaggaggtcaggaacaggttagctgagtcctgtgctcatgctctcacaaggctacaagtggatgtcagccaaactgcaattctcatctggaggctcaactagggaagaatctgattccaaactcctgtcagctcattcagttccttgtggctgtctgactaggggccctggc

SEQ ID NO: 793 - DNA, 6000 bp, Homo sapiens
tagtctctagcattattagagttaactctttggaactgagaaactacacaaaacttacaatctgtgttttcatttaatcactagctataaaagagctctttttgcttgtggtattgtagatattgtctagctaggaaagacaaacaaggaaggaaatgataaaattcttttttttttttttttttttttttctgagacaggctcatgctgttgttcaggctggagtgcagcggcgtgatcttgactcactacaaccactggctcctgggttcaagcgacaatcctacctcagcttctcaagtacttgggattataggtgcatgtcaccacacctggctaatttttgcatttttagtaggaatggggtttcaccatattggtcaggctggtctcaaactcctgacctcaagtgatccacccacctcggcctccaaaaatgctgggattacagagatgagccactatgtccagctgataaaactcttaacagaagcttcactttattcaaagccctctctcaggcatgcccttgagcaaacacacacgtaacacatacacacgctcatcattcagtccattcttaagtagcagatatctgaatatctgagtacatctgagggccagatactgaagaaatccaataaaagtcaaatgtatgttagtggtttctgtacaataaggaagtggcttttcacacaatgttaaaaacaatatttcccatcaaaattcagaacattagtattacaaggtcagtaggaggatcagccccatggcaactggtggaaagcaccaggtacatcactcctcacagtagtgggtctgcctgtctccctgcctccctgccagactgagtaacttgaccacaagaaccaagtctctgcattttctgtatgtgtagctcagcatagtgcctaaaaccactggatggtgaataagtgatgtttttcaccttgatgaattagaattagaagtaaaagaatgtactatttcatgaagatggaagtaaagttaaggtagctattgccactgtcttccttacctcagattatcatggagcaaatgctaggcatctgacaatttcatccataaatatttcagcctgcacatctggaagatgaggaatcctctaaagacataaccgaaatatcattattacattctaatatgttaacaaggcttctttaatatcattaaatatccactcggttaaaatttcccatttttctcctaatttattttatagcttacttgaatcaatatcaaaataagacacatgcattgcatgggttgataagtctgatgtctctcttttattaaaaatcagtaaaaatcagtttaatctttgtttctttttttccaactttttatacggaaaaaaaaaaaactgagggaaaagttgcaaaagtacaatgacagctcctgattgtcaattgttaaaaatggtgtcatggtgcaggctgggttctctgggaagctgatgctgagatggagtgaggagtccaaaaggtttatttctctcacatctgtgagaggaaaagggaggaagcaggattgggccgaggaagggaaaaagcagatctgacaaagtctctactaacccaagaggaagctctagtacaaagattgcctgttaaaggagtcccccatgggagcagaaattcctatgccttgataccaccccctagaacaggggcctccccaagaagaatgtgccctggactttcctcaccctgctcagtcattcatcagaggctgcctcaagattagtgtgatctcagctggaaagcccaggtgaccctgaagaagctaacagcaagagtgtgagcaaaccactctccttgcagctaggaagtggttctttcttgaaggggaatctgggtggtgcttcatgtgtctcccatagtccactatttacacaaaaatgagttcccttctctacacaggtttggggagcaactcctccaggtttctggtcaccctctcttccttatgggaaacctagaagagggaggttagtagacgatctacagccctgttgctgcagttggtgaccagggctaccactaggacttatcagctcctccttcattatctattctaattttcccttgctagtcttgctggtttggtgaggggggctgtgaaaccctcatttgtgaggaggcttaacaccctaaaccttatcaccttcactccttcctaaaaggcctgagtatggagtaactagagatgtttctagaaaaagacattttgttacttggaaagaaatggtttgaatcatggaagtcatgagacaggaaaaaaagagaagtatcaacacttgacttttatgtcatgtgagaaagtgcaaaaggaatctcttaattgcacaaaacagttttaattacacaaaaatcatgcaaaaaacccttattaagcctctttgccatttggtattaaaataaagccatcgaccatgataggacttttctgggagagggtccaggaaggaaaggggagtattagctgagtactaggcaccatggggaataccaaactacgactgaaaacctcgatgagaaaaaaataacagcatgcatgaagtgatccgaaaataacagtagcaataaagtcactgttaggccactgggctatctccctcttttgaaatttgtaaaatggaagaacaagcctccttgccttttgcagagctaacctggagcttaagaagtccagaaggtactggtgtgctgtagggtaatttgctactaaattctcaaacccccaaccttgcgatctgcctgcctcggcctcctaaagtgctgggattacaggcgtgagccactgtgcccagcctgctactaaattttaaggacagagtagtacttaagttttaaaaatgccactaaagctgggtgtggtggctcacgcctgtaatcccaacactttgggaggccgagacaggccaatcttgaggccaggagttcgggaccagtctggccaatagagtgaaaccccatctctactaaaaataaaaaaaattagccaggtgtgatggtgtgcacctgcaatcccagctactcgggaggccgaggaaggaggattgcgtgaacccaggaggtggatgttgcagtgagctgagatggtgccattgtactccagcctgggtgacagggcaagactccatctcaaaaaatatatatatatatgcctctaaaatggtgaaattcccgattttatcctgtgggtctcatttatgattcttttgcagtgataaccatacatttttggttacaacaacaatgacgacatctcacttgtctccttgcttccctgtatttcccacctgatttacatggcacattgctgccaaattaatatttgtggctggcccatcttaagtgaccccgataagtcacactcttgtataatcctttctccttgagtacagataaaacccgtgacttactttaaccaataatatatggcaaaggtgatggctgtcactccctaatttaggttatcatctacatccatttccatatctatgtccatgtccatatccatggctgtatctatatctgtgtgactcctttcttgtgctcagtagagagattctccttgctagctttgaaggagtatgctgccatgttgcgagagagcctttagtaaggcccatgtggtaaggaactgtgggtggctgctaggacctgatggccacttccagttcagagccagtaagaagccagggcccctagtcagacagccacaaggaactgaatgagctgacaggagtttggaatcagattcttccctagttgagcctccagatgagaattgcagtttggctgacatccacttgtagccttgtgagagcatgagcacaggactcagctaacctgttcctgacctccttgcccatggaatgtgaggcaatacatatgtgttgctttaagccactaagacactaagactgtgataatttgttgtaaagcaattttaaaaacctgaataccatgtggttaggaaaagtgctacactatttattagtcaaaagtcttcaattacttttcattgtctttggaataaagaccaaaaagcttatatggccactaaaagcctcttgttatctacattattctatttttccatgttacttttttattacctggtctaggccgaatgtgatgaagtctctatcaacccacaagagagctccagggcatagactgcctgttaaaggagccgctcacggagcagaaacagctaagccctgataccacattttcccacttcacctacttcacgtcccttgtatttcttccaaatttaactttctatttattgcatatattcatgttttacatttcaatgctggtgacaaagttgttttcctttcccaattattattccaaatctgaccaatttttctagacttccatatgacctaatgtgattatccttccttaccccaacctagaaataattcatctcttttcttccttgctccttatttggcatttctcatcctgcactatactatagcttatctatcttgggggacatttgtcattctttttagctttccagcatccaacatactttccagtgtttagggaattccctacctcttgcatctcagtgggaagcagtgtgatggggtcagaagtgtaaacttgcgcaacatcctgctcccaagaaagacgtgcacttgctacttcatccttcgctccatcttggtcctcccaactggagagaggacagcctagacgagacttcccacaaccaagatggcggccgtgcactccttgcccacagctggccttttctccactttcggtctccatcgtaacgcggctggctctctcggcgccggcttaggccttgcaagtagggaaatggtgagtctttcccgccccctcatttttgcgacagttgcagcgaaagtcacggcagttggggctggtgtcagctgatttactgcagtggcggcggcggcggcaccggcaccttgcagtatcactggggagacggcggctgtatagcgcttgccgccccacggattatcccagcaggatctacgcaccccgcatcctccgtagttccgccctatccttgtcctccttggctggggcgcccaccggcggtctgataggctacatcgcggcatgagatgaagctgtgacaggtaagggggctttcaagcttctccatgggaaaccacagggcgggatgttcctgcaccgtggaggtcaggggtcaggggtcaaaggtcacaaacccgctctagccgggggcggtgctagctgtcagatcgctgcggctgcaagcctgcaggtcgggcccaaaagtaggcgccgttaccaagagcgtgggggccagccgggggtctttgtggctcccttgcctggtgagtgatatttgctacttgtgacagttgctttggtcttgaggtgggactgcctggttcccaggtgcaatctaaacgggatcaggtgattggtgatgatcgttggtggttattgacagcaattttgggcgatgtgcttgcttttggggttcatatagtctttcctttcctgttggtactatttttgcccatgcccaaggtactgacaccactgttagaatttcatttttgagatgccatctgccagttcttatccctttgccctagtacttgtctgagcggatgccagtcactcccattcacttagtgatgggtcccagcgttctgaagctatgtttgaagtcagcactaccctaactttgattcaaaaattgctgttttatgttttttacccacttagtatgtcactttttgaggcagaatttgctgggttagatagtctgaaactagggaacctaccgtcgcatgacaggctgcattgatattgttgatgctgctgaatttagggttcggtcagtggcagctatagcttcctctcactgtaatatttgccatgagacaaaaaaaggcaaactgactctttcaggtgtttatgtcttaggattttatgg

SEQ ID NO: 794 - DNA, 6000 bp, Homo sapiens
tgtttttactctgagatggaaaaacaataggagagttggcatttttttttaatggggtctatctatgttgctcaggctggttttgaagtcctaggcataagtaatcctcccaccctggcctcccaaagtgctgggattacaggtgtgaggctaccacgcctggccacaataggagagttttgagcagaggaggaataagacctgatgtgatgttttaaaagaataattcttactgctatattggtaacagactggggtgggagcaaagcaaaacagggagaagttaagtggctactggaataatctagttgagagacaacgtggcttggcccagcgtgccagcagtggacattggattctacatatatatagtgaaggtacagcaggaaggatgggctgacaaaaacgatttgtgtgtaaaagtggagtcaggaatgaattcgaagtttttggactgaacaaccagagggtgcagaaactgaaagaaagaggtttataagggaagacgtgttaaattttggacatgttatatttaagacgtgtcttagtcattcaagagaagatggcaaacaagtgtttacatacgtgaatctaggagttcaaagcagagaaatgggctggaaatagaaattaggagtaatcaacccaaataaatgtaaagtcatgggactgaaggataagaccaagagggcgagaaggaaaccttttttagtttatttgttttagagacaaggtcttctctgtcgaccatgctggaggttgacaatacctaaatcaataaaattctgtcttgtccatattaattattcataaatgaatgattactgaatgaatttcaataataattgttgaggctcactgcagcctcgaactcctgggctcaagcaatcccacctcagcctgcagagtagctgggactacaggcctgtgccactatgcctggctaattttttgtttttttgtagaaacagggtctcagtatgtttcccaggctgggaggaaaccttctgttagagccttttacacgttctcattcctataataaactgcatgaaagcaggatttctgcagctaaaagtgcaccttctactcagcaggtatgcaatgactgtttttccatggtccaggttccacagccccatttctaagctccctacttaacagaattttaggcagcatttagaacctcctggaaggtctgccatccttagggctcagatgttccatgccaccaaagaatttacatagcttgggcaagaccctcagagtctgtgtctatctacactaacagcaaagggtgtccaggtcagtcttgaatggaatcagggccgggtctgactatagcacattcccaaatgtacatggttgtggggaactaagctatcaacaaggatttactctgagtcatcagcaatgaaaacatttacaattatttctaatctcttgtagacagtttgaacgggctcttttcttgtggtttacttatttgtattattaaattttcacccagtttgaggaaagatgtaaagtgtcagaaaaaaaagtgaagagaagaaaaagaaacagaatgggcaacatttcgagattctagggctgcagatccagtgactgaagaaagcacttcacagcctcgtgggacttgtcacccacacggactagacactcacactataattcctgtctttggcaccagagaaaaaatacctttaggaccttctagtatcacagatcttctcccaacagcatgaaatcactttacaataacttttttgtcttaaatagagtaagcatccccagctgaccttgcttcactgtccagcccccaagctcccagtgctgttttttgaaaaaaagtccgtttaattcttctgatctccatagggatgagcttaacgttcccaaattctccaacccttctcaccccagccaacctcctcaaaactaatctttaccatcttgaaagacaggtgaaactcatctgcctctcatcagacttcccaccccaaattctcagattccacaactgcatgccctttgtgcttgccacctcttgttaggcaactgtccccttctctctgtgtgactccacagaaaagtggcctcaaatatttcctttagttcccccaaacaaagctaagaccattttgtagcctttaacaaaaactgactgaaggcaggcgaggaaaacacaacacccaacatcaagtatccgctgcttttggattccagcagccacgcttcttccctggcagggccttgctgactttcttctctctccttcatggccatgtaggagtcctccatacctggctttcttcaggaagcccagaaccttccctaaccagagtactcgttagcaccgtaatactctggagatctgcccccaaagacaattttttacattatggtaagtccagaaattcaaaattttatgtacctagcataacaatattttgtatttgttttttttgcatatccaaaagcccaacgtgtttttcctagaacagaaaaaaattatgccacttctctgctaggccttgctagttattccctcctcacatcattactcctttgcacaagcaataatcccaagtcactattatcctttgcctcaatcccaaactctgaaacaagagttgtcaggagggtttaagaaaataatgtggccaggcagggtagctcatgcctgtaatcccagtactttggaagactgaggcggctggatcaccttaggtcaagaccagcctggctaacacagcaaaaccccgtctttactaaaaatacaaaaaaattagcgggctgtagtggcgcacgcctgtaatcccagctactcaggaggctgaggcaggagaattgcttgaacctgggaggcggaggttgtagtgagccacgatcacaccactgcactccagcctgggcgaaagagcaagactccatctcggaaaaaaaaaagataatgcaaaaataagaagaataaagaagaatgaagcagcagcagcagcatgtaaacatttagtatattttgtggtacataccatgtcctcaataaaagataaaaatccattatcattcatacccaacacagcatttaatatgttattgtaaaggtccccaaataatagtccattcctggataaacccttatgattaggaattgaatatttgttagttttttatcttctaaaatttctagcaaataataagcacttaataaataccattttgaatgaatgactttcctctcatcaagtatttactaacctctatacataacagaatattaagagacagtttttgttcttaaggcatttataaagatgtgtacaaataattatactgtaagacaaatctttgtcatttgagaagttcaaaaaactgctaaggggttcaaaggcaggccaaagttacaacaatggtataaagtaatggttctaagtggggtctgggaacccctagtgcagttcctgagaccctttcgcggggtccacaaggtcataaagatttttcataacaatattaagactttatttagctttttcattcattctttcaggagtggacactgcagtttccagcgttctgtgacctgtaatagtgcgacagactgaatgcagaagcacataaacgaatccagctctgtgattaagccaagacattaaagagatcttcaaaatgaaaaccaatgccacttctctaatagacttttttgttttggaaaatttgtttttccacgaaagtattatttctgttaccatataatgggttattctttttaaataaattaatattttttaaatgtcttagctttaatttcaaaggtggtaaatatcagtatgtattacatgtatgtattatctctaacccacataagagctctctggggtcctcaataattcttaagagggtaaaggagtctcgagaccaaaacttcaggaaccctaatacagccattccaaacctaacaaggaaaatagttttacttcgagtttcatgttcatggtgaagtcaagaagagaacgtggtaacctggtttgatggagggagatgatgagttcggcgtcagtctttcccaataccttgcaaaatgttcatgaattcctgcaccccaccctctgcattcatcacctcgcctgcgcttcttcccagccttccttaggtctcccagagcagtgtccacatccctttcttttgcattttaagtcctctggatgactgccccatcctaggggtcccctgacagctttccttctctcactatcctccggggtcaacctcgacttctccctttcaccaggggcgggggtgggaacagggagcgaggcagccgctgggccacttttgcctccaccctccagagccctgggccccgctctcaaaccccaggcgttccggggagctgctgagttccgctccgcctcaatgaccgaagtcctccccacctccgctcactcacgccggcggcccccgccgcgctcagccccaccgacagcgcccccacctccccaccgcagcccaccccgctcgacccgcgcgcccggcctgccgcggccctgagctcacctgaggcggaggcgcccgcgactccccgccagctccgccagtctcctccagccccggccctcgggcgcctgatccaggagctcgctgagcctccgcagcagcggctcccgcaggcggttgagggtcgcgccggccggaggggcgagcagcggccccgtgggggcggccgagggcggcagggcctgtagcgggtcccccaacagcgacatggccctcgccggcgaccccggactgccggggctcccgcccgccccgtcacgggcctcggccccggggcaccttccgctcgcctccgagccgcggaggcaggggcggaagaacaaatctggcagcgcggcacggccctcagaggaggaagctccgctccccgccccaattagacaggtttgccgaggggagcctggcctgctggccgcgccagccgcgcaaaggggcggggcacccggggggcggggcacggagcctcgaggggcgggaccttgggcctcgaggggcggggcggggctgcctactgcgtgcgtgcggctgcgcgcctccctcgccctcccccgcggtcccgggctggccgtggcgcgcgcttcaaacccagccctcccgagcaggaaaggacgggtgggtgcagctggaggaggaagcggtggaggaattacgccccggcagctcctctacggcggggaagcctgcggcgtctgggcttcctgagaccgtgggaggaggcctgcgtactcacgccagagagcggggcaagcggttctcagtcgccggctcccgcccgcagtccccggcgagcgctctcccctgactcagggactttcatgtgcccggcgacacaccagcatcctgcagtgggcaacctcagcggacgcttcctcgttttagggttagatgtgtatggcattgctagagggaagtagtgctggagatccggatacttgagttggaattggccaaaatctttgcctagacttttaaacaattactactttgcaaactgagctgtggcatatttagggctaatcagatcttggaaatgattgtttttagcaggaatcatctggtttacaccgcgtcagactgccgcccgcaatctccgtcatcaaagcaggcaaccctgtagaggatgcctttccctggaatgatccggaatggacgacacctgagctctctctgccaatcttagcaacatccaaggccattatccctttgaaaactatggcttcgtttgggacaaaaaggaagtaacttacgaaatgtgaccagtcaggtagttccctacacgaggcttcctggcccaatttctgttgccattagcttttcatcacccaaggccgcaggattttctgaccagtaatttggatacctatattcttatacatgttggcgaggtaggtgcgccatacagtctccaccacattctagcacaagcagtcattaaacttc

SEQ ID NO: 795 - DNA, 6000 bp, Homo sapiens
tttagctttaggggttttgacatatccacataccacctgttctcttgggtatttaatatacttccttaaacaaaatcaaattttaacaagtaaatttgatatagtcctaatcaatactattagttgaaatggcaattttgattggcagctatttttcttttctgtattaatgtataactattaagataaaaatgttcatccatgttatgacttaaaagcatcttgtataacaccagtggggcatagatggctctgtggtaggtatgtatctacagaataaaatctcagcttttggcatgacataatctggtcttcactgccttttacatcgtggtctctgtccctttcccatcagtatccccagctctcctggagcaactgcagttctccaaccttgctgtgatgttttctggctctgtgcttttatagtatggtattcttttttttttttttttttttttggagacggagtctcgctttctcacccaggctggagtgcagtggcacgacctcggctcactgcaacctccacctcccgggttcaagcaattcttactcagcctcccgagtagctgggattacagctgcctgccaccatgcccggctaatttttgtatttttagtagagacagggtttcaccatgttggtcaggctggtcttgaactcctgacctcgtgatccacccgccttggcctcccaaagtgctgagattacaggtgtgagccactgcggccagcctacagtatggtattctttctaccctgtttcccaagccatctcctctcatctttccacatggactgaagggctctcccctggatttgtatacttcttgctatcaacagagcacttactcctcctgttccttgtcttaagcagacatcgggtttggtcaacattgtattctgcaaactctaagggaaaactggtgaagaccgaactgtggtgtgggaatcccgcctagctcatctgcctgggttgtctttatctttgtctcatgactaggctactttacaactctgagatcgcagtgaacttacagaaaactgatagtgatgcaagtgaatcttgtttataattaaataaattgtcaggtggaggttcaattgcattccctcctccactgtggaagaagctagttttgcatctaggaagcaacttcatttcagtgggctgacatatttatctggtctttgggttctcctctgaagtaattgtaacacctttctgattcccttgttagttaatgagttaaaatctctgatatgtgttcattgcatatttgttgcatcatgatttaaactttcttgtagaaactattcttaagaccggacgcggtggctcatgcctgtaatcccagcactttgggagggccgacatgggtgaatcacctgaggtcaggagttcaagagcagcctgggcaacatggtgaaacccgtctctactaaaaatacaaaatattagctgggcgtggtggtgtgcacctgtaatcccagctactcaggaggctgagacaggagaatcacttgaacctgggaggtggaggttgccgtgagccgagatcgtgccattgcactccagcctgggcaacaagagcataactccgtctcaaaataaataaattaatcaaataaaaactattctttaacagtatgtatttgatacagagcctggtgccccaagaatatgtgttcatgacggaatgaatgattgagtgaatgaatcaatttagacaagtaggtgtagactttccatggtcaggatcaaatatttaggtctggatgattcatcatgaaggaagagtgtggaatactagcatgatgcctagctactattacaaagttgaaatcgaaatgagaaaatttccctaatcctttggaagatggtggcaagaatgggctgcaggggatgtgctgagcctgtgtctgtgggtcacctgagtggctcctacagaggctgagtcagagaggtcacaaagtgggctgagcatggaataagggatggcagacaatgaatgccttttttttttttttagacagagtcttgccctgttgcccacactggactgcagtggcacaatctcagctcactgcaacctccgccccctgggttcaagtgattctcctgcctcagcctcccaagtagctgggaatacaggcgcgtgccaccacgcctggctaattttttttggtgtatctttagtagagatggggtttcaccatgttggccaggctggtcttgaactcctgacctcgtgatctgcccgcctcagcctcccaaagtgttgggattacaggtgtgagccaccacgctcggccatgaatgccatttaagccacataactcctgcttcctttccctccattgtatacagatccaaggaccagcaggttttctcctgcactgagtcttttaaaccctgtccaactgtgaaataatatatcattctggcgttttttttttttttagttggagtaccatctatagttaaactgtataaaggaaaaaaatcctatgagtcagtttccagacctatgagtgctttgaagattacatcaatggagttccatatattgaaaccacaagcttcctgccaattgtctggatttacaaagatctatttcactttgaactaatgaggaagaactcccaaggctattatctatagacatgcatgaacttttaagggacatttaaaagccagatctttacccccaatttttctcctatctttatataaacataacggttaatatagaaaagaaagctgaattactatttacattgttcccaaaattgatgtagcagttttaagagtactaatatacaatgcacatacttctccctgacgctatataacactattaggtactattattttccactttttacaggtgtggaaactgaagctcagagaggttaagtagatcacctaagttccaccactagactagtaagtggcagcaacatcaagtttccaattcaggactaactttaaaggtcacattctactataccattatgcccataagagaaccacaggagtgaaattatgtcatagaaatattaacatttgattgaggagagaaaaagaccagtcaaaaaaggtaatgtcagtttgggtagaggatggagggtggcgggtagtgactggatagggtataaaattgctaggtggaaaaaaaggttgggagtagggtaaaacgagggaggcagtcacttgggaagccagggtgggggcgtacaactcgaggtcaaaacagtgcccagctgagctatattggctaagagtaaataacactggcacccatttaactcgtatgcacacgagaggttgcataagcaacgctttgtacatggcagacttttctaagaagtctaaatttagaagacctctgttgaatttaaattaaaaggcaggattccagtaaagactagaagattttatttccataattggcacatgcaggtaacagatcctcagaaaatatttgtacagtaattgaggacaaaacaggaaggcacctgaagcggttgggaaaggcttgccaagtcaaactgagtatgaaacggcacttgtatgtgtaagggtaatagcatttactgagtcatctacgatgtgccagttaccgagttaagtgcttcacatacatcaactcctttaattctggcaacaactctatataaactgtattgtcagtcctgtgttaatagatgaggcagagaaattaagaaacttattcaagctcctaacacttgaatcgagcagatctttcatgctcttagccatctcactgcagtctgaattcttaacttatgctagagtgaagtttaatgactgcttgtgctagaatgtggtggagactgtatggcgcacctacctcgccaacatgtataagaatataggtatccaaattactggtcagaaaatcctgcggccttgggtgatgaaaagctaatggcaacagaaattgggccaggaagcctcgtgtagggaactacctgactggtcacatttcgtaagttacttcctttttgtcccaaacgaagccatagttttcaaagggataatggccttggatgttgctaagattggcagagagagctcaggtgtcgtccattccggatcattccagggaaaggcatcctctacagggttgcctgctttgatgacggagattgcgggcggcagtctgacgcggtgtaaaccagatgattcctgctaaaaacaatcatttccaagatctgattagccctaaatatgccacagctcagtttgcaaagtagtaattgtttaaaagtctaggcaaagattttggccaattccaactcaagtatccggatctccagcactacttccctctagcaatgccatacacatctaaccctaaaacgaggaagcgtccgctgaggttgcccactgcaggatgctggtgtgtcgccgggcacatgaaagtccctgagtcaggggagagcgctcgccggggactgcgggcgggagccggcgactgagaaccgcttgccccgctctctggcgtgagtacgcaggcctcctcccacggtctcaggaagcccagacgccgcaggcttccccgccgtagaggagctgccggggcgtaattcctccaccgcttcctcctccagctgcacccacccgtcctttcctgctcgggagggctgggtttgaagcgcgcgccacggccagcccgggaccgcgggggagggcgagggaggcgcgcagccgcacgcacgcagtaggcagccccgccccgcccctcgaggcccaaggtcccgcccctcgaggctccgtgccccgccccccgggtgccccgcccctttgcgcggctggcgcggccagcaggccaggctcccctcggcaaacctgtctaattggggcggggagcggagcttcctcctctgagggccgtgccgcgctgccagatttgttcttccgcccctgcctccgcggctcggaggcgagcggaaggtgccccggggccgaggcccgtgacggggcgggcgggagccccggcagtccggggtcgccggcgagggccatgtcgctgttgggggacccgctacaggccctgccgccctcggccgcccccacggggccgctgctcgcccctccggccggcgcgaccctcaaccgcctgcgggagccgctgctgcggaggctcagcgagctcctggatcaggcgcccgagggccggggctggaggagactggcggagctggcggggagtcgcgggcgcctccgcctcaggtgagctcagggccgcggcaggccgggcgcgcgggtcgagcggggtgggctgcggtggggaggtgggggcgctgtcggtggggctgagcgcggcgggggccgccggcgtgagtgagcggaggtggggaggacttcggtcattgaggcggagcggaactcagcagctccccggaacgcctggggtttgagagcggggcccagggctctggagggtggaggcaaaagtggcccagcggctgcctcgctccctgttcccacccccgcccctggtgaaagggagaagtcgaggttgaccccggaggatagtgagagaaggaaagctgtcaggggacccctaggatggggcagtcatccagaggacttaaaatgcaaaagaaagggatgtggacactgctctgggagacctaaggaaggctgggaagaagcgcaggcgaggtgatgaatgcagagggtggggtgcaggaattcatgaacattttgcaaggtattgggaaagactgacgccgaactcatcatctccctccatcaaaccaggttaccacgttctcttcttgacttcaccatgaacatgaaactcgaagtaaaactattttccttgttaggtttggaatggctgtattagggttcctgaagttttggtctcgagactcctttaccctcttaagaattattgaggaccccagagagctcttatgtgggttagagataatacatacatgtaatacatactgata

SEQ ID NO: 796 - DNA, 6000 bp, Homo sapiens
ctgtaacaatattcatcctgttcatttcctgcctcctcccgacaccacttagtattaggtatcccagtaccaagcccctatctgccaggagtgtatgatggctctccagtccccatttccccattatttggatactaaatcctctgagcaatgtctttattttttttttgagacagaatttctctcttgttgctcaggctggaggagtgcaatggcgcaatcgcggctcactgagtcctccgcctcctgagtggctgaaattacaggcacccgccaccacgcccggctaattttttgtattttcagtggaggcggggtttcgccatgttggccaggctggtctccaactcctggcctgaggtgatccgcccgccttggcctcccaaaatgctgggattacaggcgtaagccactgcgcccaacctgagcaatgtttttggtacaaatttttttccccttgaaaaaggtgttttagttataaataccttcaaagagtaaacaaaattgctagagaataaaaaaggcagagttgcggtgattgtgtaatgttaaataataggaaccatgggtggattcaatgcggtattgtaatttcttagagaaggagcaatggcgatagaatttatgattagaagaaacattctgggttaggtgtggtggctcacgcctgtaatcccagccctttgggaggccgaggcaggtggatcacttcaggtcagaagtttgagaccagccggggcaatatggtgaaaccccatctttacaaaaaaatttaaaaagtagctgggcgtggtggtatgcgccagtagtcccagctactcaggaggctgaggcaggagaatcgcttgaaccccggaggcagaggttgcattgagctgagatggcaccattgcactccagcctgggcaacaagagtgaaactccatctcaaaaaataaataaataaataaataaacaaacatgccggccgtggtggctctcgtttgtaatcccagcactttgggaggccgaggcatatggatcacctgaagtcaggagtttgagaccagcctggccaacatggcaaaaccctgtctctactaaaaatacaaaaattagccggacgtggtggtgtgtgcctgtaatcccagctacttgggcggttgaggcaggagaatcgcttgaacctgggaggtggaggttgcattgagccgagatggcgccactgcactccagcctgggtgacagagggaaactccgtctaaaaaaaaaaagaaaaaataaaaataaaataaataaataaatataaaggggtttgtaggaaatcaactaaggaatataaagaggtatacaaattccatgttttagtactgaaatttaacatgtgccttgttttttaaattttattaaaggatgcctaaattaaaggactattctttcaatttctagaacaaatagtttgtgtcggggctactgaaggcacaacacagatcagtgtagttgaaatttatctcaatataattacctctttggttcttccctttctttcagagactgatccttcaacaaatgcacattttcactgactccaaaaaatttcattcaaactttggtctgtattgcctgacttcttagactaggttagttcctcttgttttatgtctatttctgtggcaccttgtattttccccttctgtacttctgctgcattttttgaatgttattctttctaacctgtaaactctatgaaggcagggacagtgtgtgatttattcaactgctataacacggtgactggtacataataaatgtttgtaattatctgttaaattaattgacttgaaaatgttatcactcttgggagaacttgcaatctccctaatttttcatatgttgctgttgattgaatttaaataaaatacatattattaatagattcatgaggctaaggggtgaaactttaaatgaaaatacagaaaatcatcaggaatgtaaaaaatcattgagaaatatttatttttatctccacagcttcttcattcttgttcaatgaaactgtgataacctaagcggtaagttccagttggtctctctctccaacccccttcactcttcatctgcaagtttagtcactttattgaggttaaaacaggtcatagatagtatgtggtttaaaactgtttaaaagtttcacatgtgaaaatccggatttagggcctggcgcggtggctcacgactgtaatctcggcactttgggaggctgaggcgggcagatcgcttgagacctgccggggcagcatgaagggacttcccacccccactaaaacaatacaaaaaatgagccgggcttggtggcaagccctgtagtcccagctactcggaggatgaggtgggaaaatcacctgggcccgagaggcggaggttgcagtgagcccagatcgcgctaccgcactccagcctggacgacagacccactctgtggccaaaaaaaaaaaaaaaaaaaagaaaaaaagaaaaaagaaagaaaaaaagaaaagaaaaatcccgaattacaaagcaattgggggaatggtaattcaattaaaaaggtgtacaacattcttttaaatagtaaactgcccaatgattacaacattgattcaactgacgaaaaatacaacttttcagaccacgactaaacattgtggcagtagaaactattttttttttccctgaatgatgaaagaaaaaaaccagagaagacgttaagacagaacacgtggaaaaagcccatctcatactccattctaatgtttcttctacttaccagtgctttctgtgtcattaaactacttcagacttcaagagcaatgggaaacaatgaaacctcagtcctttgctattttccttttcaggtacaggagagggagaggacagacttagggttgtgccttcgaacaagcacattcaacgacagcctcagttagaattcccagacgctgcctgtcttcctgggtcttgaaaaagtggggaaaaagtgaggttggcccactcagactgccagtgatgctgtggtgtgacgggtgtgtatctctatctcatacaatgggcgcaggtgaggaccaggacctgcgaccttcgtacgtttacagtccctgaaagccctcacctttaattagtagggaaaataaaagtcatctggcaagctggagtgcgggtaaaatacaagttaatgaacatgagcattcgtgttcattaagaactctggcacagagttcaacggcagagggcacaatactcactggccacggccagctgctggcggccaggagaagcagaaccaaaggaccgctgggacttgtagtccaccatgtttccctcgggattgccgatccccttacgagaaccacaactcccaaggtttaccgcgcgcgtcggtcttcactgccctctccgaggccggctcaggaacctcccgggaaactgccccccaccccgccctcgtacgcacgcgtcacgtttgtttaccctgaagctccgcctccggccatcccctggctctccccactcctccctggaatgccgtcatgccggcgatgaatatttatgaggcacacgcggccctcccgccctgccagcctcccgccttcccgctcccggcgcatgattaatattcaatgagcccagatccgcggctggttcgccgggttgaggcgggggtagcgggcggggccggcgctggggagcccgcgacccgggcggggagggcgtgtgtcgggggggcggtggcggcgaggcgggcgcgcgggatggaacactgagacaccgacggaatgctccgaatcgccacataatcccctggaacggccgcgcacaacgccattggcttctcccttctccgcgcgccgccgccgtctcccacctccgcctcatcgcctccctctccgcccgctgcctccggagctgggggggaaacgcgaagccccactgcaatggagcccgccgccgcggccacggtacagcgactccccgagctcggcagggaggaccgagcttcggctccggcggccgccgctgcggcagcagcagcagcagcggcggccgcggcggctctggcggcggcggccgggggcggccggagtccggagcccgcgctgaccccggcggccccgagcggcgggaacggcagcggcagcggggcgcgggaagaggccccaggcgaggcgccgccggggccgctgccgggcagagcggggggtgccgggcgcaggaggcggcgcggggcgccccagcccattgccggcggggctgcccccgtacccggggccggcggcggcgccaactccctcctgctgaggagagggcggctgaagaggaatctgtccgcggccgccgcggccgcctcctcgtcgtcgtcgtcctcggccgctgctgcctcgcactcccccggcgctgccggcctccccgcctcctgctcggcctcggcgtcgctgtgcacccggagcctggacaggaagacgctgcttctgaagcaccggcagacgctgcagctgcagccgtcggaccgggactgggtgaggcaccagctccagcgcggctgcgtgcacgtcttcgaccgccacatggcctcgacctacctgcgcccggtgctctgcacactggacaccacggccggcgaggtggccgcccgcctgctgcagctgggccacaaaggcggcggcgtggtgaaggtgctgggccaggggcccggagccgccgccgcccgggagcccgctgaaccgccccccgaggccggcccccggctggcgcccccggagccgcgggactcggaggtaccgcccgcgaggagcgcgccgggtgccttcggggggcctccgcgcgcgccccccgccgacctacccctgcccgtcggcggcccgggcgggtggtcgcgccgcgccagcccagcgccctcggactccagccccggcgagccgttcgttgggggccctgtctcttcgccccgcgccccacggcctgtggtctccgacaccgagagcttcagtctgagtcccagcgccgagagcgtgtctgaccggttggacccctacagcagcggcggcggctcctcgtcgtcgtcggaagagctcgaggccgacgcagcctcggccccgacgggggtcccgggccagccccgccgtcccggccaccccgcgcagcccctcccgcttccccagacggcttcctcgcctcagccgcagcagaaagccccgagggccattgacagcccgggcggggccgtccgcgaggggtcgtgcgaggagaaggcagcggcagccgtggccccgggaggcctccagtctacccccgggaggagcggggtgaccgcggagaaggcgcctccgccgcccccgccgcccaccctgtacgtgcagctccacggagagaccacccggcgcttggaggcggaggagaagccattgcagatccaaaatgactacctcttccaactgggatttggggagctgtggagggtgcaggaggaaggcatggactcggagattggctgcctcatccgcttctatgcaggtaaggaagtcacctgccttgacgggtggttgcaaaagctgccgaggaccgaggagtgattcaaattgcttgtcagtttgcccaacccaagagtaagtgcgggtcctgatgagtctttgtcttaaactttacagctttttcatacagtctgtgtagtactagattgagcaatctttaaatctgcacgttttatcaatcttgagggctcagaggttggaaagcaatgtgaaagaggtggctgaatcaccaggaagtacaggaagcagatccctctgaaagcggcaagagcacctttaaccataaaggtgcttcctcaggggcatgttgggtttcaggcagtttgggatttcaggtaaactgtcacgtgagcataagacggacagaagaaatgacaataaaaatgctctatcacacttttgcctgcatttgactgtccagttgagcgttctagctgtatgtgccaccgggagctcc

SEQ ID NO: 797 - DNA, 6000 bp, Homo sapiens
gtttctccatctgaaaagaggattgccactgactcctccttaacactgtttttgaaagggcgaatgaaataatttatgtaaaaacccttcaagatgtttgaagataataaaaaccaatgtattgtagatgttatcacgccatagtagtgaagggtggcatgtactttacaacaaaaacaaacaaatataaaatataaatataaaaatgtaaaatactaaaaaaaaaatttaaagcctctgtactgaaaattaaagggactgttcaagcacacactggtgtcacacgttcgaaccgcgttactcaatactgctgtaattatagtaataagaacctgcttgtcaatattatagcttaatgctgaaccacctctcccctcttggtttgcatgtaggaaaccacattaaggtttgatcattcccagaagagaaaataaataaaatatgacagggataaaaagattgttcccgcgaaatcccaaggagtcacacacaaaaataccttgtccgagattcactaggtacagtgaatgtgcactttattctgtcaacaccctttgtcattactaaaattcgaacagaaattgctagactactcagatctaagtgctgggagaaaagagtcaaaaaatataaaaagatatagtttaatgctgccctacatcaatgacaaaggctccccagagagtctaaaacaaaagctcattcatgtttaggagtccataacttatgtcgagcaaccttaagttcttgaattttttaacctataattactctctttcaggcaaaatttaagatgtccgattttaaaaggatattaaatacttaagtaacttcagataaagctaattaaattttcccatatcttaagtcagctaagagaatggtggcctggtagatgctataacaattttcaaaccaagttttcattaacaactctgtaattagatagtacctttatccagggccttctcgctcattaaagactttcattttactttacccagataaatatttaaatattcaaagcaaccacaaatggctttcaaagcctctaaaaaacaaccctagtcaggttataaatactaaaattgaacagaaaggtgatcttcaagagagcagaccctcaagacagtagataagctcaatttaaatgcagaaaaatattcaaaagaatttgaaagcaacttcctagctatccttaaccccaactatacgtaaacaaaacaacatgcagcaataaatttaaaaataagttatgtataaaattaccaatggggtacagaattttcaaaaaccctgtaaaagatgtcatctaaaacaaacattaattatcctcttcctacagaaaaaaactactaccaaaatgtaactctgtcctgttgaggtgtcctatattctgttggaacacagagatcatttctaggaatcacttccagcctggtgcaaaccttcactatatgtggagtcctgacaacgtttccataaatgagactacgcttttgttcatcaataactgaacttctttgcaaaaattcaagtggattcaccatacactaaattttgttctactgcaaatgaataacagcagagatgtctggtatattaacttaggcttaaaataagctcaactttgctttaaagccaaaataagcaattagacaacttcgcaacaatcaggcatttttcttctaggacacctgtacactggcttcatgttcaagaatagggtggatactttgtgtggcacccccacacatctgagtatatgtaagcacatactcagaggcatacatgcatttatgctgtacatatagaaacaaggcagtaagtgcagaatgaggtaacaattactgcttttcataaagaacaaaacaaaaagattaaaagatcatgccaaacattttaagatttaaccaggaaagacttttttaatattgagatgaggttttgagaaaaaagaaagtgcttattacccattagaatattttagacactcttgaagagaatcaaagggaaacacagattcaaactttgttaactgtgacacccaaaacctttccgtggacacttatcacaatggatatatccaatcataagcaaactctttccatataaaatttgttcaaactctaatacatcccttgtttttatatacagttccttccatgtagttaaagggcacctatttttaatgcttttgtaaaataacaatattttacaaattacatgaattaaaggagaaaagaatacagttgttgatcttacataaaaaatcatctatttcctggaccataaactttaaaagccatgtcatcgagttgacaaattgtcttcagatactgcaaatgctactgtattacgatttggttttctttacaagtaaaagattcatcagaaatccacttaaatttcagaaaaacttccaagaaatttaaagggcatctctctcaccaggaatcctgtcagtcttgcatatttcaatgtgggagtaaagatgtaaagatttcttcatgcaaactaattaaattgccactgggacacacaagctggaccaaaagacattaaattgtaaagaatggctacaaattaatggagttacaagtatgattattttccaccatcacctacaacctaaaaacgtaaagttagcgaagagttaacactcttgatttaattttgctatgagaactttattttaaataaaattccttatcactgagaacataattattcaaaccagaggaggaaagggatgtaaaactacttagaaaactcaagtacaatatccagcatctatagctcctgaatttagtactagccaaatcttcagccaaaagagaaacattacatgggtcacccctagtcaagaatttgctaatgtactgaaacaagacgggggaagatttcaggacacatctgaagaaatagcaaccacttaaatccttcttgtgaaccttcctgcaaggcgtattgcggtggtcagttctgaccataaaggctggaagaaaatgagagaaacaggcaaaatctttttttttatgcaagacaaacttgcagacgaaacagaaatcgagcaaaaaaagcgctggggaaaagtatcagttaaaaaggcacccttttgtcagatttctaatgagggctccgtgggtaatttatgagtgtggcagagctgaataaacaaaggcaccagttgacaagtcaggagctcccggtggcacatacagctagaacgctcaactggacagtcaaatgcaggcaaaagtgtgatagagcatttttattgtcatttcttctgtccgtcttatgctcacgtgacagtttacctgaaatcccaaactgcctgaaacccaacatgcccctgaggaagcacctttatggttaaaggtgctcttgccgctttcagagggatctgcttcctgtacttcctggtgattcagccacctctttcacattgctttccaacctctgagccctcaagattgataaaacgtgcagatttaaagattgctcaatctagtactacacagactgtatgaaaaagctgtaaagtttaagacaaagactcatcaggacccgcacttactcttgggttgggcaaactgacaagcaatttgaatcactcctcggtcctcggcagcttttgcaaccacccgtcaaggcaggtgacttccttacctgcatagaagcggatgaggcagccaatctccgagtccatgccttcctcctgcaccctccacagctccccaaatcccagttggaagaggtagtcattttggatctgcaatggcttctcctccgcctccaagcgccgggtggtctctccgtggagctgcacgtacagggtgggcggcgggggcggcggaggcgccttctccgcggtcaccccgctcctcccgggggtagactggaggcctcccggggccacggctgccgctgccttctcctcgcacgacccctcgcggacggccccgcccgggctgtcaatggccctcggggctttctgctgcggctgaggcgaggaagccgtctggggaagcgggaggggctgcgcggggtggccgggacggcggggctggcccgggacccccgtcggggccgaggctgcgtcggcctcgagctcttccgacgacgacgaggagccgccgccgctgctgtaggggtccaaccggtcagacacgctctcggcgctgggactcagactgaagctctcggtgtcggagaccacaggccgtggggcgcggggcgaagagacagggcccccaacgaacggctcgccggggctggagtccgagggcgctgggctggcgcggcgcgaccacccgcccgggccgccgacgggcaggggtaggtcggcggggggcgcgcgcggaggccccccgaaggcacccggcgcgctcctcgcgggcggtacctccgagtcccgcggctccgggggcgccagccgggggccggcctcggggggcggttcagcgggctcccgggcggcggcggctccgggcccctggcccagcaccttcaccacgccgccgcctttgtggcccagctgcagcaggcgggcggccacctcgccggccgtggtgtccagtgtgcagagcaccgggcgcaggtaggtcgaggccatgtggcggtcgaagacgtgcacgcagccgcgctggagctggtgcctcacccagtcccggtccgacggctgcagctgcagcgtctgccggtgcttcagaagcagcgtcttcctgtccaggctccgggtgcacagcgacgccgaggccgagcaggaggcggggaggccggcagcgccgggggagtgcgaggcagcagcggccgaggacgacgacgacgaggaggcggccgcggcggccgcggacagattcctcttcagccgccctctcctcagcaggagggagttggcgccgccgccggccccgggtacgggggcagccccgccggcaatgggctggggcgccccgcgccgcctcctgcgcccggcaccccccgctctgcccggcagcggccccggcggcgcctcgcctggggcctcttcccgcgccccgctgccgctgccgttcccgccgctcggggccgccggggtcagcgcgggctccggactccggccgcccccggccgccgccgccagagccgccgcggccgccgctgctgctgctgctgccgcagcggcggccgccggagccgaagctcggtcctccctgccgagctcggggagtcgctgtaccgtggccgcggcggcgggctccattgcagtggggcttcgcgtttcccccccagctccggaggcagcgggcggagagggaggcgatgaggcggaggtgggagacggcggcggcgcgcggagaagggagaagccaatggcgttgtgcgcggccgttccaggggattatgtggcgattcggagcattccgtcggtgtctcagtgttccatcccgcgcgcccgcctcgccgccaccgcccccccgacacacgccctccccgcccgggtcgcgggctccccagcgccggccccgcccgctacccccgcctcaacccggcgaaccagccgcggatctgggctcattgaatattaatcatgcgccgggagcgggaaggcgggaggctggcagggcgggagggccgcgtgtgcctcataaatattcatcgccggcatgacggcattccagggaggagtggggagagccaggggatggccggaggcggagcttcagggtaaacaaacgtgacgcgtgcgtacgagggcggggtggggggcagtttcccgggaggttcctgagccggcctcggagagggcagtgaagaccgacgcgcgcggtaaaccttgggagttgtggttctcgtaaggggatcggcaatcccgagggaaacatggtggactacaagtcccagcggtcctttggttctgcttctcctggccgccagcagctggccgtggccagtgagtattgtgccctctgccgttgaactctgtgccagagttcttaatgaacacgaatg

SEQ ID NO: 798 - DNA, 6000 bp, Homo sapiens
tactgtgtttcatatggcaatcttatttcaggacttctttgctctcaaatattgaggaccttaagcaacatttatttatgtcaattatatatatcgatatttgctgaattataaatttaactaagaaatataggctgggtgcagtggcttacgcctgtaatcccaacagtttgggaggccaaggcgggcggatcacctgaggtcaggagttcgagaccagcctggccaacatagtgaaaccctgtctctactaaaaatacaaaaatcagccaaatgtggttctcggcacctgtaatcccagctacctgggaggctgaggcaggagaattgcaacccaggaggtggaggttgcagtgagccgagatcacgccactgcactccagcctagatgacagagctagactccgtctcaaaaaaagaaaagaaatattttagggtaggcacgatgactcatgcctttagttctaacactttgggaggccaagacaggcagattgcttgagcccaggagttcaggaccagcctgggcaaaatggcaaaacttcgtctctacaaaaaaaaaaaaaaaaattagctgggtttggtggtgcgtgcctgtagtcccagctactcaggaggctgaggtgggaggatcatctgagcccaggaggttgaggctgcagtgacccatgatcccaccactgcattccagccttgtcgatagagaccctttctcaaaaaaaaaaaaaaaaaaaaaaaaagaaagaaatattttaatgtatattaattcatttagacagtaataaagcatattaacataaatgatgtttttagtaactttttaaatgaaaaaacagtttttcaaaacaaaaatagtaagaaaagtgtcattgttttcttttcattttctttcttttctttctttctttcttttttttttttttttttttttttttacggagttttgctcctgtcacccaggctggaatgcaatggcacgatctcggctcactgtgacctccgcctcccaggttcaagcgattctcctgcctcagcctcctgagtagctgggactacaggtgcacaccaccacgcccagctaatttttgtatttttagtagagacagggtttcaccatgttggccaggctggtctcgaactcctgacttcaggtgatccaccggcctcagcctcccgaagtgctgggattacaggcgtgagtcaccacacccggccagagtgtcgttgtcttctattttggtgaatcttttaatatctggctggattctcatatctctttctgtattccatcaggtatgctattacaaaagcaggtactgtctggaagtctccactgaaatatgagagtgacagttaggtgtgcggaagaaagtggcacaaagcaagtaacatcttagtattgttataaaaatagtttgaacagccaggtgcggtggctcacgcctgtaatcccagcactttgagaggctgaggcgggcggatcacgaggccaggagatcgagaccatcctggccaacatggtgaaaccccgtctctaataaaaatacaaaaaattagccaggcatggtggcgggtgcctgtagtcccaactacttgggaggctgaggcaggagaacagcgtgaacccaggaggcggagcttgcagtgagccgagatcgcaccactgcactccagcctgggcgacagagcaagactccatctcaaaaaaaaaaaaaaaaaagtttgaccatgtggatcttctgaaagggtctcgggtacctcctctggggtcccccaagcatgcttttagaatcactggactaggaataagaggctctgtaattctagcttgtgttttgcagtgattataaataatcagaatagtggataggcttttttttttttttgaggcagagtctcgctctatcgcccaggctggagtgcagaggcgtgatctcggttcaccacaacctctgtctcccgggttcaagcaattcttgtgcctcagcctccagcatagctgggactacaggtgcccaccaacatggctggctaattttttttgtatttttagtagagacaaagtttcatcatgttggccaggctggtcttgaactcctgacctcaggtgatctgcccacctcggcctcccaaagtgctgggattacaggtatgagccactgcacctggctgaggataagcattctttaagaaggcctaacggccctaatataaaacagtttaaaaacgattatccagatttaggaataattcttccctaagtgattttttttaaatttaaaatacaattaagtctattatactcagccatccaagtaaacaggtattatttaaaaatcaaggtaacactcaacctgtcaaataggtacatggtcagctttccatttagaatcaacttttatttaactatttagaatacagcttaacatatactgattgggttgaattgtgtttatttttagagtgtgtgtgtctcttctaggcagagtgcatactgtctaggattagacgtgggcggtttttaaaggagttagcataacgcagtcactaatatgattcttatcttacttagagatggtgtagaggtcgttgataggccaaatgtaagagtgcacagagaagtaaaaaattaaagatagcttctttaattgcttaagttgcttgggcaactgtgaaaatgaaagggctattaacaaaaatagaggaaaaagaagtgccagtttggaataaagatggtaagttcagtttggggctggaaatgtggggtagctcaggagaggagccagcatgtgataggactgagataattgctcacataggagtcaaaacatttccaaggaaaacagtgtagagagagcatgaaactgctaaaaaacctatctatgaagattacttcaatttgggttggggaagaaaagatgaagaaaaggaaggtaatacatgagaagagggcttaagagagctaagaagaagggtgtgtggtcagcagcatcaatcaagtactgtattgagatcgacgaatgataattggttcttttttgagatagagtgtcactctgtcgcccaggctacattccaggagtgcaatctcagctcactgcaacctccacctcccaggttcaagtgattcttgtgcctcagcctcctgagtagctgggattacaggggtgcaccaccaggcccggctaattttttgtgtttttggtagagatggggtttcaccatgttggccaggctggtcccaaacttctggcctcaagtgatccactcatctcggcttctcaaagtgctaggattacaggcctgagccaccaggcccagctgataattggttcttaaatttggaactgcgaagtcctggttaccttagagagagtattgttttgataagtttttattatttcagttttgggtttgagaaacatgaaacaggagtttttgacttgtctgaaacagcaccgactccagaagggctaacgccagctctgcctggtccctttcctccttcactggggccatttacactgtgttaattaagctaattgagatactgctagaaagctttctccagcagaattcacttcctgaaatattcaaccttattttagagggaaaagtttgtttttagatagaatgtttacattttaggtaaaacactggccttagagtcagcagatgtgcattccagtgctgctgctccttaacctctctggggcccccatttcctctttagttgaatttgggagttgggctagattatctcttaggctatgctaaaattatgatgttaatgacatttgtctcttttttcccttttgttttgctttattgtaataggttcaccaagttgaagagtcttaacctttccaataatcatttaggggacttcccactggcagtctgcagtattccaaccctggcagagctgaacgtgtcctgcaatgccctgcgatcagtcccggcagccgttggagtgatgcacaagtgtgtacttcaaaccccactggcgggtatatccagaagccccagggaagctgcattgggggtgtggcacatgagattagttaacttgttatgttgctcatgtaagtcttggccccaaatcaagagatcagggactatgtagtccgtatggagttcatatgttggatttgtactccttacagtcttgtaaaaaaattaaatattcttgtttagaactgaagatccctacagatgagtatgtctaaacatggaatgtgggttatgttctcatttttctgagttatattgaattttaagacttagaaattaattttaagaaataacaaggaaagcccaaaggatatctgaatcaattcatatcacagttagctcacattgctcccatttaagcctattcaaattgggaaaactagtcatgattttcattttcaataaaagattaagatgcttatctctgattatttctctttggtccattattgcctcaggccctgcccttaggcattttgcgaagaataatacattttctggtaatacggtctacacttatggaacttgtatgttgataataaagatgtaaaatttatatgttctctttgtaattcttatgttttctctaatagcttacagacatttttgttggatggaaactttctccaatcccttcctgctgagttggagaacatgaagcagcttagttatctgggtctttctttcaatgaatttactgacattcccgaagtattggagaaattgactgctgtggataaactttgtatgtctggaaactgtgtggagacccttaggctacaggctttaagaaaaatgcctcacattaaacatgtggatctaaggtaaccatttttgagaaatagatctcatttgagtggctggcttatattgcaggggtggggagtaggttattaaccaaggcaaacaagctgggtaattgaatgtgggcccgtttttctatttctgcctagagggaagaattatgattaatagtagggtttgctattactggaaactctcactgatgtatgtcttgaaggtctttgttttgcagattggaacccagttgagtgagagagctgttttttgttgttgttgttggtttttgttttttttgttgttcttgttttttttttttttgagtcaaagtctcgctctgtcgcccaggctggagtgcggtggcctgatctcggcttactgcaagctccgcctgccaggttcatgccattctcctgtctcagcctccctagtagctgggactacaggcacccaccaccatgcctggctaatttttttgtatttttagtagagacgaagtttcactgtgttagtagccaggatggtctcgatctcctgacctcgtgatccacccgcctcggcctcccaaagtgctgggattacaggcatgagccaccatgcccgtcctgttttttgttgttgtttttaaagagatggggccttgctctcttgcccggcctggagtgtaatgatgtgctcagagctcactgcagcctcaaactcctgggctcaggtgatcttcctgcctcagcctcccaagtactcaggcatgttcagtttcatcagtgtaaaggagcatcaccttttgctcccctttcttctcctttcatatggttcagcctaggaaacctatacattccagtcccataaagaattgcttggcttcacctttcctcagaataaaggaatcagacctgtccctcctagggaagtattagcaatttgcagatataaaattcttaatttggaggtaaaagtggttataatttatctgatttttgagaatttcttggaatgtgacaagataaggaactctaaacactttgttaacttgctttctaaattgttaacattatttgcctcttgagttccttgtatttagaaaaccctcatattccagaatttgagccctattttattcatccaccagtggtagaacttcattagagccaaggacaatggcttgcactgacctcaggtagtaag

SEQ ID NO: 799 - DNA, 6000 bp, Homo sapiens
ggagttttaccagtgtgtacaaggagtgaattcatgactcacagtgttctgaggctgctctggacatgcaatcttgcatgcttttgtcatgacaggtcttaagaagtttatcagctttctcaaatagctgaatgacagaacactggatttttgttcagatagcctatcaacttggcatctgtgttgcggttgtcacttggtaacaagataagtacttcgacagaggtgttacactccctaacaaagctgacttcatgtgcagactttctcacactcatagctggcccagggccacttcttaaaataggtgaggtttgttttctttgccctgtctctcgggaccttgcctcccggtggcctaagcctatgcttattcaaagccttctcattctcctatcctcgtcacacaccccgaaactccttcctggaccacccctttctctgtaaaacccgcttcacaggaatttagatacatgtaatatttctcccaaagccgttaacaaacaaagtgttgttgctaatttattctctgataaagagatttcaaaaagtgtatattggagaatgttttagccaagatgtcccaaattcacaccatggaggtgactgccttcacctccatttggttcggctcacagcaacaactacttaaatttctggaataaatcatgctatctaactactaaggctaattaatactaatgatctttgctataaattaacatagtttcaatatgtctaactggaagtcattaaaaataaggttattatatagaattttatattaaaataggactttcttttgacctacattcatatcatgtttgagataatttcagtggtgatattactgctgatacagaaatgatgcattttcctaatttgtacattccccatatatccacaaatcatgtaaaataggtaattatggaagtatcactgtttgctcttcaaagtgaagaggatagaaatgcattacaatgtgccaaacatgagtaagtcattcagcaaacactaagtgaacacctaatatgagccaaatgcctgtcctagccactggggaaaaccattatagtcttggagttcatggttgttaccatccagcagggaagataggcactgaagagtaaactacacaggttatgcaatcacagttggttagatgtttcaaagaaaaagcacagtgtatgcaagtctcagattagatattagaactttattacttataaagttattgtcttcttttggaaattatttctcctttatatatgattcattgtagtgatagtcaggagagaaaaaacacctcaatacagaaactttggtaaattatttctgattttaaaagtaatgcatgcctattatggaaaatgtgggacttttttaaggtacaaagaaagacaatggtaaatctataaagttaccacttagacataaatcctgtttatgttttgaagaaatattatgttaagtaatatttcttctgcatgtattgtatttatataattaatatcatactgtccatataattttatttcctttcatttcccccttatgattatcttgtatacattttcctagaaaataagacactttctgtttcattaatctcatattccgtaggagtgacctgctctgcaattgttgcctgtattatttcaggttatttgagaaagcttaatctgatgtattttctattggtaaggaacactctttagtgactgtgctttttttctagttgacctactggctgggtgactgctatagtctcctaatacatttctcaccctttagattctttctcttctgaattttcagatttttcttcataaaacaccactttttacaagtcacttcccttctccagagtttacagtagactgcctttagcttagatcccaactcagcctgagatcaaaggctcctctataagatctgttccttttctcctttcctcctctataagatctgttccttttctcctttcctcctctataacaccaactcggatccagacagacctcaggaagctattcgatgatctttgcttcccacttctataatattagtgccttcctctctctattgtctatttttcatttatctcagctctttgctcaagaccctaacacacattatcaatcgtttcccttctttctatgatacttactattagcaccactcaatttgggtttaagttacatattatcttttacaagtctctctagttgtttgaggtgtgaaagtctagtcttcttatactagagctcataaattgctctaatctaggcagaaaggcagctcccaaaccggacactaagagtcaccctattatatatcagctaatattatgcggcactcactaccaacgagaatctgctaaggacttggcaggcatcatctcgttgattattcacagcagcctgtattatttagaatgcttttggctgcaaatgacagagaacccatagcgtcgaatgctgcttaaacaatacagacttgtttattataatatctcagcaacagcaagaacaaaaactagaggtaggtggtttctagcactggccaatgtcagagctcttgtttgggatcgctgcaaatttctcagtcttcctatatggttgaaatatgactgtgactgtggcatcttctggcatcacatcctcgcacaaccatgctcaaagttgggtaggaagggatggtatagatatggaggttctttcttcatgctttcttctgttaaggaaagaaaaccttttgccaaacattccccagtggatttctcccaaaacgctttgtccagaattgggtttatatgtccacccatttccaacccacccccaccctgcccaacacacacacaccccctacaagactggcagctaggctttcctttcctgagatcaagggctctctgaataatacccgaagaaaattaggaagaagggtagcagaaaggcattgattggggtaggcaatcaacagtaccagctgtatagaattattagaaaattagaagttagagtagttgagaaatacgtgcaagattatacaactagtaaatggcaaaaagaagattctgagtctgagacttttctgagtctctcagtattcatatccttgttcaccacagtatagggcctctctagagagttttagcatgttactccacccattaaaaatatttggtaagaatttgcttgatgctcaccactgttcttgctgctcaagggaaaccaagtatatatttgtggatagatcctaactcagatgatactgtcagaatatataagattcctataccacatcctgaactctgaaagttgcagttctacgtagaagttcactgagggttgtaagagtcagaatggactccatggaagttatggggtgtgaatcaaacctcacaggtgagtcagtggggagaaagaagcatgacattcctcttgagaataactggaatgaaaataatacggtgagaaagagtagcacctgaaaagtgagtgaaggaaagggtggtggaagttctaggtacattgatatctgtcccaacttgttgagctgtcaatgtgtggttaaaaaacagttaaacaggccaggcccggtggctcacacctgtaatcccagcactttgggaggccgaggtgggcggattgcctgaggtcaggagtttgagaccagcctggccaacatggtgaaaccccgtctctactaaaaataccaaaaattagccagtcgtagtggtgggcacctgtaatcccagctattcaggaggctgaggcaggaggatcacttgaacccaagaggcgggagttgcagtgagcagagatcacgccattgcaccccagcctgggcaacaagagtgaaactcgatctcaaaaaaacaaaaacaaaaacaaaaaacagttaaacagatggttggtcacatagacattaccagaggggtcttcttggacagaggctgaaaagaaagaagggacttagctcaccaccagactcctcagcactcacgggagaagagcactaaggacaaaggggcacttaacacgtgtaaaagggcaatggctcctaataaaggataagatctgttttctttttattttattttttgtttttgagatggagtctcactctgtcacccaggctggagtgcagtggcacagtctcagctcaatgcaacctccacctcccaggttcaagtgattcttctgcctcagcctctcaagtagctggaactggagatgtgtgccaccacgtgcagctaatttttgtatttttagtagtgacagggtttcaccatgctggccaggctggtctcaaactcctgacctcaagtgatcctcccgcctcggcctcccaaagtgctgggattacatgcatgagccaccacacccggccataagatctattttataatcaagagaagatgaaaaattcttcttgtgtcaggatattagggtagaatccgagttatttcgaaaattacagcttgagacaatgtaagacagattaaaatagagaatttctaagacagaaaatggattttttcttccctcccatgccctaagcatcgcttgggtctccctaggctcaaaagagagagtaaatctcattatatttatatattggaagaagcccacaggccatggttgtccaaagctagaagaagtattgtagaatttgatactatccttgagcacaagtatagtgggggaaatcttgaaactggggctgacagattttagctaactttcacaggcatgtgtagatattgacaaattcttaagtttcagagtgacctcatcctcccccaaaatttcttaaaccatgcctttacaaacaagtatttctattctaatgatgtcttcctgagtaaaatgttgaatcactcaaaggacacagatcaaaagacagagggagaaaaaaaaatgccatgtgggaggggcaaagctgtataaaaccagtcattaccatgtctgaactgtaacaactctcagaggagcattgcccgtcagacagcaactcagagaataaccagagaacaaccaggtatttcaatgatttccatgccatgtctatgggaaatagggtttcatgttttctcttccctcatgctggtattaatagattgaaaatttggatgtggggtgtttgtagagggcgagtaaaatttaagtggtgttttcttgtttagttgttgaattgaaaatattttatttcaagatttgaattaaatttataaggtttaattttgaatctcagaagccaacaaatacctttgtagcattaaccaaaacaaaatgtacattcagattgtgatgccaattttattgaacagattagattatatatgttctctactagctactgttttgacactaaatttgatggaaacaactagatacattaaaatattttcatttaagcaattgaatgtaatctctacattgtatataaataataggaaaagaagacttcatttgcaccttaaatgaaaaagcaggaactgcaaaaattaagtagcaatttgggctgggtcaatctagtacaacaatatgtttattgagtttagttcaataatgggtcaatttagtgaaagagaataatcagccaaagtagttgcagggttgactgaagtatggttcagtaaataacttaatatcccataaaaagatacttattcattatgaaagccatcaactaggagaaattgcttttaattctgttgggggagatgtagcagtatttgatgagatattcccttgaaactgttgttttctcttagttctcattaatttttgtggtcaatttcaaaatatttccactgtctaattgtaaacaaaatttgttttaaatgctacagcaaactccaatctaacatccagggccaacagggtgagagacaatggccgtgtgcctggtgactcctcccaaattcttccttccctgtgccaagtttcagtggtgcatttgtcaacttgtgttgcaggaaccaacaca

SEQ ID NO: 800 - DNA, 6000 bp, Homo sapiens
ctggccctgcattgtcaaggccaagcctcagctgaggttttgcccacatgtaggtatgcctgaggtttggtttggctgtcgcatttgaattggggctgtaactgacgctgtttccagcagtcagggtaacggattactgtgtttcgagaatctcactctatcgcccaggatggagtgcagtgttgtgatcttggctcactatagcctctgcctccggattcaagtgctcaagcaattcttgtgcttcagcctcccgagtagctggaattacaggcgcctatcaccaggtctgtgtaatttttgtatatttaggtgagatggggtttcaccatgttggccaggctggtctcaagctcgaccgtaagagatcagcccgcctcagcctcccaaagtgctggggttacaggtgtgagccaccataccgggtcctattcttttttagtagtgcaaacgttaagatggtatgtggaagctgaatttttttttttttttgagacagtctttgctctgtcacccaggctggagtgcagtggctcaatcttggctcactgcaagctccgcctcccgggttcacgccattctcctgcctcagcctcccgagtagccgggactacaggcgcccgccaccatgcccggctaattttttgtatttattagtagagacagggtttcaccgtgttagccaggatagtctcgatctcctgacctcgtgatccacccgcctcggcctcccaaagtgctgggaattataggcgtgagccactgtgctgacctaatttttactttttttgtagtaatggggtctcactatgttgctcaggctggtctccttcccgggctcaagcgatccttctgcctcagcctcccaaagtgctgggatttcaggtgtgagcgccaatagcttagaaaactatttgtttttctaaatagtgcctaagatgtgaggaggcctaatcttgtcagtgctgataaggttaacatgatcattttccgccttttactctgtcctcaggaaggcaggtggggactgtgaagtagggctgtggggttctcggcaaaggcgggggcagctctggccctgcattgtcaaggccaagcctcagctgaggttttgcccacatgtaggtatgcctgaggtttggtttggctgtcgcatttgaattggggctgtaactgacgctgtttccagcagtcagggtaacggattactgtgtttcgagaatctcactctatcgcccaggatggagtgcagtgttgtgatcttggctcactatagcctctgcctccggattcaagtgctcaagcaattcttgtgcttcagcctcccgagtagctggaattacaggcgcctatcaccaggtctgtgtaatttttgtatatttaggtgagatggggtttcaccatgttggccaggctggtctcaagctcgaccgtaagagatcagcccgcctcagcctcccaaagtgctggggttacaggtgtgagccaccataccgggtcctattcttttttagtagtgcaaacgttaagatggtatgtggaagctgaatttttttttttttttgagacagtctttgctctgtcacccaggctggagtgcagtggctcaatcttggctcactgcaagctccgcctcccgggttcacgccattctcctgcctcagcctcccgagtagccgggactacaggcacccgccaccatgcccggctaattttttgtatttattagtagagacagggtttcaccgtgttagccaggatggtcttgatgtcctgacttcgtgatctgcccaccgtggcctcccaaaatgctggaattacaggcgttagccaccatgccctgccacttttttttctttgagatggagtctccctccgtcacccaggctgtagtatagtggcatgatctcggctcgctgcaacctccacctcctgggttcaagcaattctcctgcgctagcctcccgagtagctgggattacaggcatgtgccaccaggcctggctaacttttgtatttttagtagagacagggtttcaccatgttgagcaggctggtcttgaactcctacttcaagtgacctgcccgccttggctgcccaagctgttgggattacgggcgtgagccaccacacctggccaacccattgtacgttgaaaatgtaaataaaaaatataaaggccggcttgtggctcacgtctgtaatcgcagcactttgagaggccgaggccggcggatcacagatattgagaccatcctggccaacatggtgaaaccctgcgtctactaaaaatacaaaaatcagctgggagtggtggcgtgcacctgtagtcccagctactcgggaggctgaggcaggagaatcgcttgaacccaggaggcagagattgcagtgagcccagatctcaccactgcgttccagcctggacgatagaaggagactgtctcaaaaaaaaaaaaaaaaaaaaaaaaaggctgggcaaggtggctcatgcctgtaattcctgcactttgggaggccgaggcgggcggatcaggaggtcaggagatcgagaccatcctggctaacacggtgaaaccctgtctctactaataaatacaaaaaattagctgggcgtggtgacgggcgcctgtagtcccagctattcgggaggctgaggcaggagaatggcgtgaacctgggaggtggagcttgcagtgagccgagattgtgccagtgtactccagcctgggtgacagagcgagactccgtctcaaaataataataaaaaatgaatttaggccgggcgcaatggctcacgcctgtaatctcagcactttggaaagctgaggtgccggatcacctgagcttaggagttcgagaccagcctgggcaacatggtgaaaccccgtctctactaaaaatacaaaaattagccgggcgtggtgatgggcacctgtaatcccagctacttgggaggctgaggcacgagaatcgtttgaacccgggaggtggaggttgcagtgagctggataccgccgctgcactcctgcctgggtgacagagtgagaccctgtctcaaaaaataaaattaaaaaaaaaacaaacctgatacctcccagtgttgtcagttggcacatactatgtctcaataaaatgcttgctgttaccctctattttgagacgaagagggaccctgtgtatgacaaccccagattgacctcatttgcattttaagtatttagaatgtgggtaacagttttcagtggaggaaactgccacatagggactaaagcagtcccagggtccactccaggagctgccaggcgcgctcggccacaggtgagccatccattcgcccaaccggtgctccaggaaggcaggaagcgggatgcagggcttcagcctcacttctcgcagcttcagcacctgggtcagaggagaggcgggcggggcgatgaagggaccggaagtcggccttttttccgtccgcttgaccagcgtcgactgcagccaatgaaatcagggatggcgagtgttcagccagtggtgaggctgcatccgggtgtgggtgccgaaaaggcagctgggggcgggacgtcgaggtgcggcacgagcggcgggcgcaccggccaataggcggcggggttcgtttcccgggggtgggcactggcgggtgcggtgacgtcggcgcaggcgcgtcgcggcggcaggggcgcggggcttctggaggcggcggcggtggccagcgcggcggcgccggccgtattctccgggctgcggagggtaaagagcgggctcgggccgaggctggagggctgggtggggccagagcggcgcttcgggggcccgcggaggacgagggagggagagaatctgaggagctggtaggtttggggacccatctgggtgaccgggccggggaaagggctcggccgggcgtgcgaggggcgtagcggccccagggatgctggagcggagccttagggatgggcaaggccttgggggcggggggaggttctgcaaagggagccactggggtctgcctaggggcttgtgcggagattgcgggcgagaaggggcagaggacggtggaggagactcagatggggccctttttggcggcccgttttggggggtaggggagacggcggttgggggactttgatacatggagcgtggaggaagaggttaatcttgcgaggacagtggaggtcagcgggggagggaggcaaagtgggctttcaggagcgtggaaggcgtcgtccggttcttggaaaattcagaattggagggagtcagagatggttgggggtgggcgggggtgttccatcgatgagggtcttaagagacctgccgagggcaaggaccaggaggggttaaggtagtaacttgggaattttgatcggaatggcagcactttgggaggcctgggacgatcgcttgagccttggagttccaggctgcagtgagccatgattgcaccactgcactccagccagggcgacagagcgagactccttctcaaaaaacaacaacaccaacaacaaaagaagtagacttgagaacttcgttaagacattggccagggagtaaggtagccctgggatttgaggttgaggagaacgtgcaggaatggtgggggattttggctgagcaggttgagagaagtctaggagtgagaggcaaaaaaagacgcaggcagcgtcggggaaatcagaattatgtgtctggagagagttttgcggggtgaaggtggcccagtggggctgttaccaaacttttgagtggttatggggctctaagaggtgacatgacaggacccagcccagtaaacacagcacctctttttgtcgagtttggagcttcagagtggagaggtgggaggcttgtgtttgctggacaggtctgtccattaatctaggagaaaagggtggtgtctcagttcctcacttctgtctttccctgtcttctccagggttgccattaggggactcctgaggtcctatctccaggctgcggtgactgcactttccctggagtggaagctgctggaaggcggaccggccgccatgtccacgttcaggcaggaggacgtggaggaccattatgagatgggggaggagctgggcaggtgagctgtctgcccgcacggctgggctccagggataggagagaggcgctgtggggttttctgaacagcagctctcctttcctgttctttatcctgtatgctgagaaggaatgagtcagtatcatgcggtgggggaacgaatttgggccgtggagtcagacagccccggctgtgaattcctgcttgggaatcctctgtgtgtttcctgtggggagaaaagtaattgagccgttacagcagccaagaccgtgcctggcatggggcaccagagcaacagatgccagctgcttttgttattaaaagatgtgtcttctgcctgggcaacatagcaagactccatccctacaaaaaataaaaatgaaaaaaaattaaccaggtgtggtagctcatgcctgtagtcccagctactagggaagctgagacgggaggatggcttgagcccaggagttggaggaggctgcagtgagctatgatcgtgccactgcactgtagcctgggcaacagagtgaaaccccatttatttaaaaaaaaaaaaatctccctgtgttaatcctcttttgtgggaggcactttagtttttttgcccagctcttggatgtttaaagtggggggagggaggggcgtgtctcccagctgggcccaaacctcggtcaattgtttaacatgcttgtgggaaaaagcagaggtttcctcttccagggaggcagctgatttcctgcctgtctgggccttggagggtccccctggggccccaccccctccagactagccaggcaccactaggccctgcctccttttgtagagcctccagccttatttggtgagtttgctactggccagcctccctggagcctccccatgatgtcaccagaagggaatgtaaata

SEQ ID NO: 801 - DNA, 6000 bp, Homo sapiens
aggtggtgactctgttctgcatttttcacggtgtcttcgcaggggagcggggctgcccagtactgggctccctggagcctagaaggggacccgggccctagttaggtgcagcctggggctgcctcagtgttaggtggaacgttctggaatggtgggaatgccctacccctgtgtcattcagagaagcagctgccagctgcgcgggtctgctgagcatttgaagtaggatcagtgcggcaaggaattacgagatgtcactttgaacgcatttggatggccctgtggagcgaggggctctggattgaacttcgcaggtttcagcaactttccgaattgctgacgagctcacaagttctatctgccatcaggattttctgtggtcaccccagtcctgactagtttattagaaacccattttttttttttttttttttgagatggagtctcaccgtttgctaggctggagtggaatggcaccatctctgctcactgcaacctccacctcccgggttcaagcaattctgcctcgggctcctgggtagctgggattacatgcgtgtgctaccacgcccagccaatttttatatttttagtagagatgaggtttcaccatgttggcctggatgatcttgatcactcgaccttgtgatccacccgccttggcctcccaaagcgttgggattgtaccactgtgcccggccttgtaaacacttttttagaggcagagtcttgctgtctcccagatgagtatagtggtgcagtcagctcactgcatcctccacctcctggactctcctgcctcagcctgccaggtagctgggactccaggcatgtgccaccatgcccagctaatttttatttattttgagacagaattttgcttggcctggttggtctcgaactcctgacctcaagtgatctgcccgcctcggcctcccaaagtgctgggaattataggcgtgagccactgtgctgacctaatttttactttttttgtagtaatggggtctcactatgttgctcaggctggtctccttcccgggctcaagcgatccttctgcctcagcctcccaaagtgctgggatttcaggtgtgagcgccaatagcttagaaaactatttgtttttctaaatagtgcctaagatgtgaggaggcctaatcttgtcagtgctgataaggttaacatgatcattttccgccttttactctgtcctcaggaaggcaggtggggactgtgaagtagggctgtggggttctcggcaaaggcgggggcagctctggccctgcattgtcaaggccaagcctcagctgaggttttgcccacatgtaggtatgcctgaggtttggtttggctgtcgcatttgaattggggctgtaactgacgctgtttccagcagtcagggtaacggattactgtgtttcgagaatctcactctatcgcccaggatggagtgcagtgttgtgatcttggctcactatagcctctgcctccggattcaagtgctcaagcaattcttgtgcttcagcctcccgagtagctggaattacaggcgcctatcaccaggtctgtgtaatttttgtatatttaggtgagatggggtttcaccatgttggccaggctggtctcaagctcgaccgtaagagatcagcccgcctcagcctcccaaagtgctggggttacaggtgtgagccaccataccgggtcctattcttttttagtagtgcaaacgttaagatggtatgtggaagctgaatttttttttttttttgagacagtctttgctctgtcacccaggctggagtgcagtggctcaatcttggctcactgcaagctccgcctcccgggttcacgccattctcctgcctcagcctcccgagtagccgggactacaggcgcccgccaccatgcccggctaattttttgtatttattagtagagacagggtttcaccgtgttagccaggatagtctcgatctcctgacctcgtgatccacccgcctcggcctcccaaagtgctgggaattataggcgtgagccactgtgctgacctaatttttactttttttgtagtaatggggtctcactatgttgctcaggctggtctccttcccgggctcaagcgatccttctgcctcagcctcccaaagtgctgggatttcaggtgtgagcgccaatagcttagaaaactatttgtttttctaaatagtgcctaagatgtgaggaggcctaatcttgtcagtgctgataaggttaacatgatcattttccgccttttactctgtcctcaggaaggcaggtggggactgtgaagtagggctgtggggttctcggcaaaggcgggggcagctctggccctgcattgtcaaggccaagcctcagctgaggttttgcccacatgtaggtatgcctgaggtttggtttggctgtcgcatttgaattggggctgtaactgacgctgtttccagcagtcagggtaacggattactgtgtttcgagaatctcactctatcgcccaggatggagtgcagtgttgtgatcttggctcactatagcctctgcctccggattcaagtgctcaagcaattcttgtgcttcagcctcccgagtagctggaattacaggcgcctatcaccaggtctgtgtaatttttgtatatttaggtgagatggggtttcaccatgttggccaggctggtctcaagctcgaccgtaagagatcagcccgcctcagcctcccaaagtgctggggttacaggtgtgagccaccataccgggtcctattcttttttagtagtgcaaacgttaagatggtatgtggaagctgaatttttttttttttttgagacagtctttgctctgtcacccaggctggagtgcagtggctcaatcttggctcactgcaagctccgcctcccgggttcacgccattctcctgcctcagcctcccgagtagccgggactacaggcacccgccaccatgcccggctaattttttgtatttattagtagagacagggtttcaccgtgttagccaggatggtcttgatgtcctgacttcgtgatctgcccaccgtggcctcccaaaatgctggaattacaggcgttagccaccatgccctgccacttttttttctttgagatggagtctccctccgtcacccaggctgtagtatagtggcatgatctcggctcgctgcaacctccacctcctgggttcaagcaattctcctgcgctagcctcccgagtagctgggattacaggcatgtgccaccaggcctggctaacttttgtatttttagtagagacagggtttcaccatgttgagcaggctggtcttgaactcctacttcaagtgacctgcccgccttggctgcccaagctgttgggattacgggcgtgagccaccacacctggccaacccattgtacgttgaaaatgtaaataaaaaatataaaggccggcttgtggctcacgtctgtaatcgcagcactttgagaggccgaggccggcggatcacagatattgagaccatcctggccaacatggtgaaaccctgcgtctactaaaaatacaaaaatcagctgggagtggtggcgtgcacctgtagtcccagctactcgggaggctgaggcaggagaatcgcttgaacccaggaggcagagattgcagtgagcccagatctcaccactgcgttccagcctggacgatagaaggagactgtctcaaaaaaaaaaaaaaaaaaaaaaaaaggctgggcaaggtggctcatgcctgtaattcctgcactttgggaggccgaggcgggcggatcaggaggtcaggagatcgagaccatcctggctaacacggtgaaaccctgtctctactaataaatacaaaaaattagctgggcgtggtgacgggcgcctgtagtcccagctattcgggaggctgaggcaggagaatggcgtgaacctgggaggtggagcttgcagtgagccgagattgtgccagtgtactccagcctgggtgacagagcgagactccgtctcaaaataataataaaaaatgaatttaggccgggcgcaatggctcacgcctgtaatctcagcactttggaaagctgaggtgccggatcacctgagcttaggagttcgagaccagcctgggcaacatggtgaaaccccgtctctactaaaaatacaaaaattagccgggcgtggtgatgggcacctgtaatcccagctacttgggaggctgaggcacgagaatcgtttgaacccgggaggtggaggttgcagtgagctggataccgccgctgcactcctgcctgggtgacagagtgagaccctgtctcaaaaaataaaattaaaaaaaaaacaaacctgatacctcccagtgttgtcagttggcacatactatgtctcaataaaatgcttgctgttaccctctattttgagacgaagagggaccctgtgtatgacaaccccagattgacctcatttgcattttaagtatttagaatgtgggtaacagttttcagtggaggaaactgccacatagggactaaagcagtcccagggtccactccaggagctgccaggcgcgctcggccacaggtgagccatccattcgcccaaccggtgctccaggaaggcaggaagcgggatgcagggcttcagcctcacttctcgcagcttcagcacctgggtcagaggagaggcgggcggggcgatgaagggaccggaagtcggccttttttccgtccgcttgaccagcgtcgactgcagccaatgaaatcagggatggcgagtgttcagccagtggtgaggctgcatccgggtgtgggtgccgaaaaggcagctgggggcgggacgtcgaggtgcggcacgagcggcgggcgcaccggccaataggcggcggggttcgtttcccgggggtgggcactggcgggtgcggtgacgtcggcgcaggcgcgtcgcggcggcaggggcgcggggcttctggaggcggcggcggtggccagcgcggcggcgccggccgtattctccgggctgcggagggtaaagagcgggctcgggccgaggctggagggctgggtggggccagagcggcgcttcgggggcccgcggaggacgagggagggagagaatctgaggagctggtaggtttggggacccatctgggtgaccgggccggggaaagggctcggccgggcgtgcgaggggcgtagcggccccagggatgctggagcggagccttagggatgggcaaggccttgggggcggggggaggttctgcaaagggagccactggggtctgcctaggggcttgtgcggagattgcgggcgagaaggggcagaggacggtggaggagactcagatggggccctttttggcggcccgttttggggggtaggggagacggcggttgggggactttgatacatggagcgtggaggaagaggttaatcttgcgaggacagtggaggtcagcgggggagggaggcaaagtgggctttcaggagcgtggaaggcgtcgtccggttcttggaaaattcagaattggagggagtcagagatggttgggggtgggcgggggtgttccatcgatgagggtcttaagagacctgccgagggcaaggaccaggaggggttaaggtagtaacttgggaattttgatcggaatggcagcactttgggaggcctgggacgatcgcttgagccttggagttccaggctgcagtgagccatgattgcaccactgcactccagccagggcgacagagcgagactccttctcaaaaaacaacaacaccaacaacaaaagaagtagacttgagaacttcgttaagacattggccagggagtaaggtagccctgggatttgaggttgaggagaacgtgcaggaatggtgggggattttggctgagcaggttgagagaagtctaggagtgagaggcaaaaaaagacgcaggcagcgtcggggaaatcagaattatgtgtctggagagagttt

SEQ ID NO: 802 - DNA, 6000 bp, Homo sapiens
agtgcaatggtacgatctccgcttactgcagcctccacctcctgggttcaagcgaatctcccacctcagcctcacaaatagctgagattacggccacacaccaccatgcctgctaatttctgtatttttagtagagatggggtttcaccatgctggccaggctggtctcgaactcccagactcaagtgatccacccacctcagcctcccaaagtgctaggattacaggtgtgagccaccatgccgggccccagctaatttttttttttttttgagacagagtctcgccctgttgcccaggctggagtgcagtggcgcaatctctgcttactgcaccctctgcctcccgggttccagcgattctcctgccccagcctcccgagtaactgggattacaggcgcgcgcctccacgcctggctaatttttacatttttagtagagaccgggtttcaccatgttggtcaggctggtctcgaacttctgacctcacgatctgcccaccttggactcccaaagtgctggtattacaggcatgagccaccgtgcccagcctggccccagctaattttttaaattttttgtacagacagggtcttgccatgttacccaatcttgaactcctgggctcaagcagtcctcccaccttggcctcccaaagtactgggattacaagcatgagccaccttgcctagcttaatggcatttacatttgtagtgaaatacacataacaggctgggcgcagtggctcatacctgtaatcccagcactttgggaggccgaggtaggcggatcacctgaggtcaggagttagagaccagcctggacatggcgaaaccccgtctctactaaaatacaaaaattagccaggcgtggtggtgggcacctgtaatcccagctactcgggaggctgaggcaggagaatcatttgaacccaggaggtggaagttgcagtgagcagagattgcaccactgcactccagccttggcgacagagcaagactctgtctcaaaaaaaagaaaaaaaaaagaaaagaaaagaaaaaaaagaaaaagaaaaaaagaaatatacataatataaaattggtcattttaacaatttttaactatgttggccaaagtagcccacgcgttgggattggagacccggtcttgcccaccgtgatcgccccagtacagtgcctggcatatagtaggtgctccaggaacaattgatcaggatgactttgtctttgctgggtaagaggccacattctaaaggtcagtttttggccaggcacagtgactcacacctgtcatcccagcactttgggaggccgaggcgagtgaatcccttgagctcaggagttcaagaccagcctgggcaacacggcaaaaatcctgtctctacaaaatctacagaaattaggcaggtctggtggcacatgcctatagtcccagctgcttgggaggctgaggtgggaggatcacttgagcctgggagtttgaggttgcggtgagctgtgattgtgacactgcactccagcctgggtgagtgagacccatctcagaaaaaaaaaaaaaaatacataaaacagggctgggcgtggtggctcatgcctgtaatcctagcactttgggaggctgaggtggtggatagcctaagcttaggagtttgagaccagcctgggcaacatggcgaaaccccaccccctctactagaatacaaaaaattagcgggcgtggtggtgggcacctgtagtcccagctactcaggaggctgaggcaggagaatggcgggaacctgggaggtggagcttgcagtgagccgagatgaggccactgcactccagcctgggcaacagagcaagactctgtctcaaaaaaaaaaaaaaaaaaaaggctaggccaggcacagtggctcacacctgtaatcccagcacgttgggaggccgagacaggtggatcacctgaggtcaggaatttgagaccagcagagccaacatagtgaaaccccgtttgcactaaaaatacaaaaaattagtcaggtgtggtggtgcacacctgtaatccccgctactcgggaggctgaggctggagaatcgcttgaacctgggaggcagaggttgcagtgagcggagattgcgccgttgcactccagcctgggcgacaagagggaaactccatctcaaaaaaataaataaataaaataaaaaataggctgggcgcggtggctcatgcctgtaatcccagcactttgggaggccgaagcgggcggatcacgaggtcaggagatcgagaccatcctggctaacatggtgaaaccctgtctctattaaaaatacaaaaaattagctgggcatggtggcaggtgcctgtagtcccagctactcgggaggctgaggcaggagaatggcactaacccgggaggtggagcttgcagtgagccgagattgcgccactgcactccagcgtgggcgacagagcgagactccttctcaaaaaataaataaataaataaataaataaataaataaataaaaaataaagagcagtttttagaataaaatctagagccaacttgaggcgacagtatagactcttttgtagattgctcacagcaggtgcccttaagaccctgggtctgtgatgtgttttgtgctgtgggacacatggctccaaagaagtccctgaaaatcagatcatgaaaaggtcatcaggttggggaagtaattgatcagttctctcagtttaagaaggtggggaagaggaggagcttgcattctgggatagcctgggatagctgtgtccctactcagagagaggctgggggcttgggggtggacaggccagacggtgaccatctgaacctactcctcactggggttttcctccctccctttcctgtccactgctgctgggagggatttgctgtcctggcatctggcccagctgacggggccaagtgtatgagtggcagcctgcacgtcagcccttgggtgtgcagtttcagattccagagaatgagctggcttggagccctgctgagtcaatgcccttctccttgccagtgctctgagccaacctgccccgagttcttcctggcaggctggttttctgtgccagcctccccttcctgacagggtataggggaatgggtagggaagaggcagaggagatcggtgcaagtttgaatgaacacttagccctgtggaatgaatgtggtccagccctttagcctcactcagtacttcctttgtcccaactctatccctaccccaggctcagaatgttggggtatctccacctgcctgagaacttcaaacatacaggggctgggcttagagggcagcagcaccttcgttcagtgcatgagtgaatgaatgaatgagggagagaaagaggaaggtcttccatgtctgaaacttttttttttttttttgacacacagtctcactctgtcacccaggctggagtgctgtggtgcaatctcagctcactgcaacctccgtctcctgagttcaagcgattctcctgacacagtctcccgagtagctgtaagcacgtgccaccacacccggctaattttttatttttagtagagacgaggtttcaccatgttggccaggctgatctcgaacccctgacctcaggtgatccgcccccccccccctcccaccacccggcctcccaaagtgctgggattacaggcgtgagccaccgcgcctggccacagacttttattttatttcttttttagagacaggatctcactctgttgcccaggctggagtgcagtggcaccattgtggctcactgcagcctctacctcctgggctcaagtgagcctcccacctcaggctcccaagtagctgcgaccacagtcatgggcgaccgccctggttcctcccttccttgtgtctcctctttctgttctctaagttcctgctttattataggcaaagctcaggacattaaagaccctggcggtagagggtaggctatgggggtgaggccctgatccaagtcctgccgctaaggcactcataatttcgggctcaggggagaaatggaagtcaaagaatctcataaacacagctgcgatgacgaaccctttcacgggaaggaacatgcgagcccagaaaagtctctcctggtcttgggatggaggtcacacgaagcctccgcaaggcaaggacttttggtgagttccgggctccgctgaactcagctctttttcttttccttcctttctttccttcttcctttctttccctccttccttccttcctctttctctctttcctttctctctctcttttctctctctctctccttcttccctccctccctacctctctctcttttctttttccgtccttccttccttctttccttctttctctctcttttctttcttttcttttcttttctcttctttcattttgagacgtactctggctctgtcgcccaggctggagcgcaatggcgccatctcggcgcactgcaacctccacctcccgggttcaagcgattctactgcctcagcctcccgagtagctgggactacaggcgcgcactaccaagcccggctaatttttttttgtatttttagtagagactgggtttcacgatgttggccgggctggtctggaagtcttgacctcaagcgtgcgccctctccgccactgggtaaggcgggggcggaatagggggcttgcaatttcacactagaggcgggcaccgtgggggaaagaagagtcacgtctcccacggttcgtagaggaaggcctgcctgagcctggagcgggggcgggagagccacagtttggcatccccagggcatcccccagcccgcagactaccaggcctccagaggacaggaccccacccccggccacaggccctgcccccagcactccccgcaccccgcctccaagactcctccgcccactccgcacccaacttataaaaaccgtcctcgggcgcggcggggagaagccgagctgagcggatcctcacacgactgtgatccgattctttccagcggcttctgcaaccaagcgggtcttacccccggtcctccgcgtctccagtcctcgcacctggaaccccaacgtccccgagagtccccgaatccccgctcccaggctacctaagaggatgagcggtgctccgacggccggggcagccctgatgctctgcgccgccaccgccgtgctactgagcgctcagggcggacccgtgcagtccaagtcgccgcgctttgcgtcctgggacgagatgaatgtcctggcgcacggactcctgcagctcggccaggggctgcgcgaacacgcggagcgcacccgcagtcagctgagcgcgctggagcggcgcctgagcgcgtgcgggtccgcctgtcagggaaccgaggggtccaccgacctcccgttagcccctgagagccgggtggaccctgaggtccttcacagcctgcaggtacgtgtccccagggctggttctccgcgcccctagtggctctcctggcttggaagggtatggacaggagtggggcgtgggggcggggtgcgcaactgtggctccctgggcttccctgcgtcaagggatgggctccccccttaggaagccgaggagggaggttcgctcaaggccaggaattcaagaccacctaaagcaaaatagcgagacccccgtctcttctacacacacacacacacacacacaaaataaataaaataaaataaaataaatataaaattaaaaaacgaccgggcgcagtggctcacggagcctccacctgctgtcgagactagcctggccaacatggagaaacctcgtctctactaaaaatacaaaaaattagcctggcatggtgtgcatgcctgtaatcccagctacttgggaggctgaggcaggagaatctcttgaacccgggaggcagaggttgcagtgagccgagatcgcagcactgcactccagcctgggcaacagagtgagactcctcaaaaaaataatagcga

SEQ ID NO: 803 - DNA, 6000 bp, Homo sapiens
acgcctgtaatcccagcgctttgggaggctgaggtgggcggatcacgaggtcaggaggtcgagaccatcctggctaacacggtgaaaccccatctctactaaaaatacaaaaaattagccgggcgtggtggcgggcacctgtggtcccagttactcgggaggctgatgtaggagaatggcgtgaacctgggaggcagagcttgcagtgagccgagatcgcaccactgcactccagcctgggcgacagagactccatctcaaaaaaaaaaaaaagaatattgtaacactgtaactgtggtgtgtaaattattcttttttttttttttttcctgagacagagtctcgctctgtcacccaggctggagtgcagtggcgcgatctcggctcactgcaagttccacctcctgggttcacgccattctcctgcctcagcctcccaagtagctgggactacaggcacctgccaccatgcccggctaatgttttgtatttttagtacagacagggtttcaccgtgttagccaggatggtctcgatctcctgaccttgtgatctgcccgccttggcctcccaaagtgctgggattacaggcttgagccaccgcgcctggccgtaaattattcttaagtagaaagaataaatgatgaacaaatccaaaataataactacaacaacttttcaaaacacagacagtacaagcaatatataaatagaaacaaagaaaagttaagaagcgggtatgatgttaaggcatagagttttcattagatttctttttgtttgtttctttgtttatacaacagcattaagttgtcatcagcttaaaattatgggttataagatagtatttgcaaacctcatggcaacctcaagtcaaaaaatgtacaacagatacacaaaaaataaaaagtaagaagttaaatcataccacaagagaaagtcaccttcactaaaaagaagacaggatggaaggaaagaagggagagaagatgaaaaaacaaccagaaaacaaataacaaaatggcaggagtaagttctcacttactaataataacactgaatgtaaatgaattaaactatccaatcaaaaatcatagaatggctaaatggattaaaaaaacaagacctaatgatctgttgcccacaagaaacacacttcacctataaagaaacccatagactggaaataaaggaatggaaaaacatattccatgccagtggaaaccaataaagagcaggagtagcaatacttagacaaaatatatttcgagacaaaaactgtaagaaaagtcaaagaaggtcactatgcaattataaagaggtcaattcagcaagacgatgtaacaattgtgaacatatatgcacccaacattggagcactcagatatagaaaacatatattattaggtaaaaagagagagggccgggcatggtggcttatgcctgtaatcccagcactttgcgaggccaaggcaggtggatcacctgaggccaggagttcaagaccagcctggccaacatggcaaaaccccgtctctactaaaaatacaaaaaattagccaggtgtggtggtgggcacctgtaatcctagctacttgggagactgaggcaggagaattgcttgaaccttggaggtggaggctgcagtaagccaagattgcaccactacactccagcctaggcaacaagagtgaaactctgtctcaaaaaaaaaaaaaaaaagagagagagagagatagacaccaatacactaatagctggagattttaacaccccatattcagaactggacagatcttccagacagtaaatcaacaaagattatttcaatatatactgaaaaattggacaaaagaaagattaaatgggatttaatctacactatagatcaaatggacctaatagatatttacagcacattttatccaacagctacagaatacacatacttttcctgagcacaggaatcattctcaaggatagaccatatgttaggtcaaaaaacatgtcttaaaacgctccgaaaaattgaaataatataaattgtgtcacagaataagtggaataaactagaaaccaatgacaagaggaattctggaaaccatacaaacatatggaaattaaacaatacgctcctgaatgacgagtgggtcaatgaagaaattaagaagaaaattgaaaagtttcttcaaacaaatgataatgaaaatgcaacataccaaaacctatggaatacagcaaaagcagtactaagagggaagtttatagatataagcacctacatcaaaaaagaagaagaccttcaggctgggtgcagtggctcccatctgtaatcccagcactttaggaggccaaagggagtggatcacctgaggttaggagttcgagaccagcctggccaacatggtgaaaccctgtatctactaaaaatacaaaaaatgacatggtggtcggtgcctgtaatcccagctacttgggaggctgaggcaggagaactgcttgaacccagaaggcagaggtggcagtgagctgagattgcgccattgcactccagcctaggctgcaagagtgaagtgaaactcatctcaaaaaaaaaaaaagaagaagaagaaaaccttcaaataaacaacctaagaatgcatcttaaagaattagaaaagcaagagcaaaccaaacccaaaatcagtagaagaaaagaaataataaaaatcagtagaaataaatgaatttgaaatgaagaaacaatagaaaagaacaatgaaacaaaaagttggttttttgaaaagacaaacaaaattgacaaaccttgaggtagactaagaaaaaaccaggcccaaataaatacaattagaggtgaaaaaggagacattacagttgatactgcagaaattcaaaggatcattaatgcaactaagaacaactatatgccaataaactggaaaacctagaagaaactgataaattcctaggcagatagaacatagcaacattgaaccatgaagaaataaaaaacctgaacagaccaataacaaataatgagatcaaagccataataaaaagtctcctagcaaagaaaaccccagaacccagtggctccactgctgaattctaccaacatttaaaaaagaactaataccaatcttactcaaactattccaaaaaacagaggagaaggcaatacttccaaatttattttacaaagccaatattactttgacaccaaaaccagacaaagacatgtcagaaaaagaaaactataggccagtgtcactgatgaatattgatgcaaaaatcctcaactcaatactagcaaactgaatttaacaatacaccaaaaagatcattcatcatgaccaagtgggctttatccctgggatgcaaggatggttcaatatatgcaaatcaatcaatgtgatgtatcatttcaacagaataaagggcaaacaccatataatcatttcaatgtgcactgaaaaagcttttgataatatttaacatcccttcatgataaaaaccctaaaaaaaagtgggtaaagaaggagcataccttaacataataaaagctatatatggcagacccacagctagcatgataatgaatggggaaaaactgaaagcccttcctgtaagatctggaacacaataagaatgcccacttttaccactgttgttcaacacagtacttgaagtcccagctagagcaataagacaaaaaaaaaaaaaagaaaaaaaaagaaataaagggcatccatattgggaaggaagaagtcaaattatccttgtttgcatataatatgatcttatatctggaaatacctaaagactccaccaaaaaagtattagaactgagaaataaattcagtaaagttgcagtatacaatatcaacacacaaaaatcaataacatttttatatgccaacagtgaacaatctgaagctacttgagaggctgaggtgggaggattgcttgagcttaggaggtagaggttgcagtgagccatgatggccccactgcactccagcctaggtaacagagcaagaccccatctcaaacaaccaaaaatgtgtagaaggatggttaccagaggctgcgaaaagtagtagcgaggagtagttatgggggaagtggggatggttaataggtataaaaaatagttacaaagaatgaataagacctagtatttgctagcacaacagagtgactatagtaaaaaataatttaattgtacattgaaaaatcttgaaaaatttcattgaaaaagagcataattggagccaggcgcagttgctcacgcctctaatcccagaactttgggaggccaaggtaggcggatcacgaggtcacgagtttgagaccagcctggccaacatggtgaaacccagcctctactgaaaaatacaaaaattagccgggtggtggcgcgtgcctgtaatcctagctactcgggaggctgaggcaggagaattgcttgaacccacccaggaggcgaaggttgcagtgagcctcgcaccattgcactctagcctgggcgacagagcaagactccctctcgaggaaaaaaaaaaaaaaagatataattagtttgtcagtccgtgtccaggaggaagaagcaggaggtcctattgagtacgggcaggaaattccgcttaagtgcaaatataacccgggaggattcagatcaaagagcagggaggaagccccccctgccaagggctgtgtcaggaacttgctcatccggctccactcagctgtgcaagatcgcttcttctgtcaatcagccctcagggggcgggacctgacgccctatccaatcaggggcgtggggcgggttcgtgggaactgtcaatcaggcactgcccagagaagtgtgtgtggttgaaaaagcccgcggcgtctgctccacccacctgcgctcggctctgggttctgtagctgagagacgacctggaagttctgaggcagcctttgtctggctggaacacgcattggcagcgggagctgtcggtaggacctgggacaccgcggaagtcgggaaatggtgcgtgtgctgggccggcgtcccgaggcgggggaggggttaggtggaaccggccgtaatcggctgtggctggacccgggcctccccaagggcgacttcgggatctacggacccgggtccccctggcgtaggtcggccctcggccgcagggtggggctgggcatgcagccgggaccccgggcgtcctgtcccgttcctgcgcggcgactgcggccccggcgccctctctgggcagctccgagcccgcagccccgggtctccccagattgtgcggctgtaaccaacacaggttcgcggcccgactcactgcaccgagacgccgagggctgcagcagaaacggtttaacaggaggagaggggaggacaccccagatccgcctccctgagggatttggggtctggacgggggcggctgggtgtagcgtccttggttggtggggaagtgaggggtgaatcctgggacaggaggtgaagaaaccgcattctgctgagagggctccctcgtggggtcttcaacctggttggcgccagcctttctgctgggattcaggatctgagaactccggcgactcttgagcagcactcggagatcttatccccaggcacaatggggaagccggcggtcagcgtctgctgtgacctgactctcagggaggcggccccttgaggcagcggggctgagggcacctgtttaatatctaactgcaatctcgcctccagcctggctcgcagttcctgtgaacccggtgaggaggctgcacggtgacgacgagtcaccaggtggaatccagactcgtgtgtggggtttgtgtgtgggaggagctgtggtttccgtggtcctcagtcctttcttcctttccaagggcgaccgtttcccctctgagtcttccaaagacgtgggcagcagggtctcaaatccaccactgtgttctctcatcctgactcttcctagggctggcagc

SEQ ID NO: 804 - DNA, 6000 bp, Homo sapiens
ctcatcgacgcccaggacgcaaggctccttgcggcacaccgcgggcacaggcgaactcaggcgacagcggcctgtattgtctctctccagctcgctgagatccatgccgcctcagccgccaccaccagctgcaagaactaatactgcaggagcgggtctcggcgcgcgttttccgcgggcctcgaagcggcgcctgcttccggccaatccgcgggcagaacacgcccctggcgctcccgccgccgtggacgcttacgcagccgacgccgacgtcgctgccgtgcgccctcctgggaattgtagtcccgaagggctatggccgaacactcagcttggggaattcggtggacggggtcactttgcaagctctgcttcacggtctctggggccccgcctgcgtggcccggtgggaagagggggaaataagagggaaactgagacgtagcttcgaagacccagcctaacggggaactagagagtcaaatatcaccccactcccaggacacgggtcaccgcatcactgggtccccaactgccacttggattcaggccctgtacttgcggtccctgcttctgtacacattctaagtcccctggaccaggtagccccgcttccactaaacccaggcttttggatttggagtccccaaactccctctcttggttgctcccttcggcccacctccactccgtgcaagatctgtgcttcctaacctctgtctcattcaggccaagccttccccacccccgttggagatcacagacctcggtggactcctgctcagggtctctgctccctatagaagctcattcctcccaacttagaatgaatgtccccacccccacccctcgacccactttttttttttcttttttttttttttgagacagagtctcgctcttgtcgcccaggctggagtgcaatggcgccatctccgctcactgcaagctccgcgtcccgggttcacgccattctcctgcctcagtctcccgaatagctgggactacaggcgcccgccaccacacccggctaattttttgtactttttagtagagatggggtttcaccgtgttagccaggttggtctcgatttcctgaccttgtgatccgcccgcctcggcctcccaaagtgttgggattgcaggcgtgagccaccgcacccggccttcttttttttttagacagggtctctctctgttgtccaggctggagtgcagtggcgcgatcttggctcactgcaacctccacctcctgggctgacgcgatcctcccacctcagtctcccaagcagctggactacaggtgcacaccacaccaccatgcccgactatttttggtattttttgtagagacggggtctcattatgttgcccaggctggcttcaaactcctgggctcaagcgatccggtcgcctcagcctcccaaagtgttgggattacaagcctgagccagccacagtgcctggcatccaccacttctattccctgggctcactggggctcatgtcctctgcctgtgggttcccgccccttaccaggctcatgccccttcctcagggtcctagttcattgtctctttatctccttttactcctcttcgcctccccctccactttttttttttttttttttttttttttttttttgagacaggatgttactctgttgcccaggctggatagcagtgtagcgatctcggcttattgtaacctttgcctcccaggctcaagcgatccttcctccccatcgtaccgagtagctgggaccacaggcatgtgccgccacgctcatctaacttaaatgtttttgtttgtttgtttgtttggttggttttttttgagacagagtctcgctctgtcgcccaggctggagtgcagtggcgcgatctcggctcactgcaggctccgcctcccgggttcatgccattctcctgcctcagcctcccgagtagctgggactacaggcgcccgccaccgcgcccagctaattttttatatttttagtagagacggggtttcaccgttttagccaggatggtctcgatctcctgaccttgtgatccgcctgccttggcctcccaaagtgctgggattgcgggcgtgagccaccgcgcccggcctaattttaaaaatttttatggagaggtgatctcaacgatattgcccagactaatcttgaactccaggactcaagagatccgcctgcctcggcctcccaaaatgctggaattacaggcgtgagccccggcgcccggcgccccctccacttttctccttttctccctagatatcagcggggctcacggctcctgactcagcttccccctaaccaaatcagcctcaagtcactcaagacttggagccccagttctcccttcctcaaactcgcttcatacccgccccgcaccgcacatcctccctccgcgcccaccctgggccccgcaacttgccccggccctgctctctcacccgggctcagagcctccagtcgcagtcgaagggcttgcaggatggacaatcccgttgccggcagggccgtaactggatcagcttctccgggtccatgaaaaccgggcccggcgctgtgcccactacctcgcggctgcgctcctgcttgcccaggtcgcagagacaccgccactttccccacgggccaaggattgagtcctcgacttctagagaaggagggcagaggtgaagacctacgtggagggggcctactcccaatcccctcccccagagagggagaaagataaagatactaacgaataagagaagcacatattcgctagactctgcttctatgccagacaccctgccacagattatctcatttaagctttttttttttttttttttttttttttgagacagggtctcgctctgtcgcccaggctggagtgcagtggcgcagtcacagctcactgcagcctcaacctcctgggctcaagcaatcctcctacctcggcctaccaagtagctgggactacaggcacatgccactgtgcctggctaattttttgtattttttgcagagacggtgtttcaccatgttgcccaggctggtctggaactcctgggctcaagtgatactcccatctcagcctcccaaagtgctgggattacaggtgtgagccagccaccatgcctggcctcatttaatatttccacgagtctcaggtggggaaaccaagacccagagacagcaagccaaccttccaagctcatatacggggtaagtgggccagaggaactacaacctgacacttccaggctgtgccagcctgcccagttgtgagtgtcctacaacatccttggtgcccgccatttgaagctgacttctgtcttcaggggtgtgaccatggccctacctagaaggcacaatgccacctgacagcagggttgtcaagtgataaatggcataattgacataatgaaggtaagtaaatctcccggtgctgtgctagcatatacaaaccaatttattatgatcagtttgtttatttatttaatttatttattttgagacaagatcttgctctgttacccaggttggaatgcaagggcataatcatggctcactgcagcttcaaactccttggcacaaatggtcctcctgtatcagcctcttgagtagctgggactacaggcgcatgccaccatggcaggctaatttattttttatttttatttatttatttatttttgtagagtagggggtctctccatgttgcccaggctggtcttgaattcctgggctcaagcagtcctcccgcctcggcctcccaaagtgctgggccatcaagtcaggctaattttaaaatattttttgtagagatggagtcttgctgtgtgggccaggctggtctggtctccgagaccaagggatcctcccacctcagcctcccaaagtgctaggattataggcgtgagctaccgcgccggccactgtgatcactttaaagggctctttactgaatctgcccctttcccctatgagacagatcttatcccaactccgatcttatcccaactcaccgctcaccaaggtctgacacctcctaccctcccacacccatgtctctgccacacctcaccgacctctttccatttctccttcaggacttttcaccttggcatttgctattccctcttccttggacattctttccccaaatctttccatatgggactttcgcttgtcgttctcgctgcactggtcacgggtcttctgcaatcggaccctctctgatttcccaagcttgcccgcccccttctttctctgtctctgcccttcctggcacctatccccgagtgacagcttcagtgtcctgcccacaccctctcttcccctgggagctgctttaaagcagtatctatttcaatatatccaagagtaaaccgagccttagagaaaagtaaccagcccaaggggacgcctccagtgcggagctgggtggagatttgcagcccgccgaggaaggtccctttgcagccagcaggagaagtagggcaacggggagcctttgggcatcgtcatccccgccgcctgaggttaccctttagatgctgcagcctcagctgctcccagctgtcaccttcgccctgctgccctaagtactgatagtcctggtagaccagggcaggggtcgccagctgcaggagtagcagaggcgccagcagcagcgcccccggggtccgcgccatgctggactccaacggcccccaacgcgctcccaggcggagtcgtgcgcggagtctgcggcgggcgcattacccacgcgggcaggtgcagtggtcccggccgaaggcaacgcgtctccccccgccgcccgcaggcgcatggacccggccgcacgctcccccgcacctgcgggcgcagtggacccgaccgctccgctcgtccgctccctcccccgcgccgtgcacgtcttggttcgggccgggcataaaaggcttcgcggcccagggctcacttggcgctgagaacgcgggtccacgcgtgtgatcgtccgtgcgtctagcctttgcccacgcaggtatgaacacccggagtgcacctggcgggaggacccccttcaggctgctttggcccgatcctgactttagtgctggccgcctttgctttccatccgctatagtggcctcctttgtccttgcgggggaaaccgaggccacagccttgcagcgcaggcctgatcgcccgacttcccgccccctgctcgtgcgggcctcactgtctccttctgggctgggggcttgcgacaccgccctccggccgactcgctcgtggggtgctggtggcagtggctgggtcactcgtgctctggtcaggagagcgggtctccggcagcctccgggcctcgtagaccgggtacccgggagggtgagggttagtgctgtcgcctccgccgtgctgactcagtcatagggcccagcacgcagcgcgaccttgggttgggaggacaaagtgtcttcccgggcgcactgaccgggcgggggtctcagctttcagtcatggcctccggtaacgcgcgcatcggaaagccagcccctgacttcaaggccacagcggtggttgatggcgccttcaaagaggtgaagctgtcggactacaaaggtgagcgccgcccggagggggcccaggtagaagcggggccgtgcatgagagaagctgggccctaactcctctgtgtccctcctccccagggaagtacgtggtcctctttttctaccctctggacttcacttttgtgtgccccaccgagatcatcgcgttcagcaaccgtgcagaggacttccgcaagctgggctgtgaagtgctgggcgtctcggtggactctcagttcacccacctggcttggtatgagcaggggccaaagagggaggttgcagctaagctcacaccctcaggtcctagcagtgtggcttcgtggccattgctcaacctctggaacctgcgtttccccatcgtgaaaataatggaaacattgccgccca

SEQ ID NO: 805 - DNA, 6000 bp, Homo sapiens
cccccatccccgagtgtggttccagatagtggaagtcttatctcctgtctccagccagacctgatcggtttctgtccctggagctggggggggagcggggagaggggcggttagaggggcagtgttggggaagtgggacagacagacaggcaaacaagacccctttccaaagcctctgcgtcagagtgtccagcccgcgatgtccctgggcagggcaccccagtgtccaccgaacctcgagctgcctgctccctcccgcagtggtggcgctccgaagaggcgcaggacatgggcccgggtcctcctgaccccacggagccgcccctccacgtgaagtctgaggaccagcccggggaggaagaggacgatgagaggggcgcggacgccacctgggacctggatctcctcctcaccaacttctcgggcccggagcccggtggcgcgccccagacctgcgctctggcgcccagcgaggcctccggggcgcaatatccgccgccgcccgagactctgggcgcatatgctggcggcccggggctggtggctgggcttttgggttcggaggatcactcgggttgggtgcgccctgccctgcgagcccgggctcccgacgccttcgtgggcccagccctggctccagccccggcccccgagcccaaggcgctggcgctgcaaccggtgtacccggggcccggcgccggctcctcgggtggctacttcccgcggaccgggctttcagtgcctgcggcgtcgggcgccccctacgggctactgtccgggtaccccgcgatgtacccggcgcctcagtaccaagggcacttccagctcttccgcgggctccagggacccgcgcccggtcccgccacgtccccctccttcctgagttgtttgggacccgggacggtgggcactggactcggggggactgcagaggatccaggtgtgatagccgagaccgcgccatccaagcgaggccgacgttcgtgggcgcgcaagaggcaggcagcgcacacgtgcgcgcacccgggttgcggcaagagctacaccaagagctcccacctgaaggcgcatctgcgcacgcacacaggtgagggggcggggccccggacatgagaaagggcgcggcgcccgctgtagttacaggggaagaagggttgcagagggcgggacttggacttggctggcctctgagagtgagtgcctccttaaattttgtgccctaggggcctcactttgttcatcctagtcccagcccaggctgagtaaaggggtgtggccagatgcaggggacccggggacatgactgggcagacagtggcgcttatggcttccttgtcccctaggggagaagccatacgcctgcacgtgggaaggctgcggctggagattcgcgcgctcggacgagctgacccgccactaccggaaacacacggggcagcgccccttccgctgccagctctgcccacgtgctttttcgcgctctgaccacctggccttgcacatgaagcgccacctttgagccctgccctggcacttggactctcctagtgactggggatgggacaagaagcctgtttggtggtctcttcacacggacgcgcgtgacacaatgctgggtggttttcccacgaatggaccctctcctggactcgcgttcccaaagatccacccaaatatcaaacacggacccatagacagccctgggggagcctcttacggaaaatccgacaagccttcagccacagggagccacacagagatgtccaaactgtcgtgcaaacccagtgagacagaccgccaaataaacggactcagtggacactcagaccagctcccagatggccctggacagcaggagagggtgtgggatgaggcttcccagagaccctgggtctagaaagcggctcctgaaggtcccttattgtggctgatattaactgtcaatggttatgggtcctataaaaatgcccctcccagataaagcttcagcgttggcctgaatttttgggttttggaggctggaagatggcaggaggctgtaaacctagaggtcatattagagggccttacacaccctcatctcctaaactacagtgacacccctcaactccaacaagcccccttgggcactggaggccttgctgtcctctcttttcccacccagttcaggctacactgtccttgtcttctgccttgaaccctgcggacattgacagcaaacatctccctggatttaagagttcacagcctatgactgcccagggggttcatcttgcccactgtccagatagagccaatttatcgagacagagggattgcaatagagagagtttaatccacatacatccagctaaatgggagatgggagttttattacttgaatcagcctccctgaaaattcagaggctagggttattcaagaacagtttggtgggcaggagggctagggaatgggtgccttgctgcaatcctggagctgtggaaaacagttgctgagtcagcttctgggtggggaccatagagtcgctagtctgggtggagtcatccagttgtcagatatgcaaaaagcctaaaaagacatctaaaaaggccagcgttaggttttgcaatagtcatgttatttgcagaaataactggggaagttgcaaaccttgtgacctccagaataatggctggccatctttgtttttgtttttgagatggagtcttgctcttgcccaggctggagtgcagttgttccatcttggctcactgcaacctctgcctcctgggttcaagtgattctcctgtgtcagcctaccaggtagctaggattacaggcacatgccaccatgccgggctaatttttgtatttttagaagagatggggtttcgaaatgctggccaggctggtttcgaaatcctgacctcaggtaatctgccagcctcggcctctcaaagtgctgggattacaggcgtgaggcaccgcacccggccggaaaaatggctggtcataatttaactactacacctacagtttagcagaattcaggctcctctcatcctcctaacctagtgccctttcattatttctacaaaggcagtttagtttggggaagggctattatcatttaagctataaactaaattcctcccaaaattagcttggggccaggcatggtggctccctctttaatcccagcaatttggcaggctgaggcgggcagatcacttgagcccaggagttcgacaccagcctgagccccaaggtgaaaccccatctctaccaaaaatggtgaaacccagtctctaccaaaaatacaaaaattagctgggcatgtggcgcatgcctgtaatcccagctactcaggaagctgaggcaggaggattgcttgaacctaggaggcggatgttgcagtgagctgagatcacaccactggactccagcctgggcgacagagtgagacaacgtgtcaaaaaaaaaaaaaaagttagcttgaccccactccaggaatgaccaagcaagggcagtttggagattaaaggcaagatggagttggttaggtcagagctctttcactgacataattttctgtcataatttttgcaaaggcagtttcaagccagtactcagattcccatagccctttgccctgccatgatcctttgaggctgaggtgggagaatcacttgaaccccggagttccagagcagcctgggcaacatagtgagaccctcatctctgcaatgaacaattatctgggtgtggtggcacaggcctgtagtaccagctacctgggaagatctcttgagcccagtaggttgaggctgcagtgaactgtgatggagtcactgcattctagcctgggtgagaaaccattatcctgtctcaaaacgacaaaaaacaaacatacagtcacctctttgctagctcaggggatcctggagaaaacgtgcagaatgaaaaaggagagtctgggtggcgtggattacatgcctgtaatcccagcactttgggaggcaagacaggtggatcccttgagctcaggagttcagcctgagccacatggtgaaaccgtgtttcaaaaaaaaaactacaaaaattagctgggcatagtggcatgtgcccgtgatcccagctactcgggaggctgaggtgagaggatcacttgagctggggaggcagaggttgcagtgagccaagattgcgccactgcactccggcctgggcaacagagcgagatattgtccgggaaaaaaaaaaaaaaaaaaggaaggaaaaaaaaaaagaaagaaaaaggggaagatacactggaacacaaatgcttcttaaggggcgcagtggctcacttctgcaatcttggcactttcgggggccgaggctggtggatcacgaggtcaggagttcgagaccagcctagtcaacatggaaaaaccccgtctctactaaaactacaaaaattagccgggcgtggtgtcgggcgcctgtaatcccagctactcgggaggctgaggcaggataatcgctttaatcaggaaggcggaggttgcagtgaaccgagatcgtgccattgcactccagcctgggcgacaagagtgaaactccgtctcaaaaaaaaaaaaaaaaaaaaaaaaaaaaaaagaggaagaacaaaggtcccaagagttggacccaggttgtagggctggaataaaaaataaaatacaaacttgtgcctgatccagaaacccgggcgggagttgggtcagacagaagagcgtgggctgggattagctaccacgaaaaggaacggtggccaggctccaggagacgctggagcgccgggcccgtcgtgggcgtggtctgggcagactcagcgttgccttttgcctctccaaaacgcagcatcgcgtctcgggggaggagtctgtaccctcgtgatgtccccgccccggttcccaggcaagtttagggaagtgaaaggcgccaggtgccagtcctggcctctgatgtaacccagcgccccgcagtcccgacacagattcctggatctcagccccatagcagctatgatcccgctgctgctggcagcgctgctgtgcgtccccgccggggccctgacctgctacggggactccgggcagcctgtagactggtgagtgcgcagcggggggcctaccatcgccccggggtccggctgcggtcactcaaccgggatggctacctcctcggggaaccctggggtgccttctcttccctctctcctatttctgtgcattctccgacctccaggttcgtggtctacaagctgccagctcttagagggtccggggaggcggcgcagagagggctgcagtacaagtatctggacgagagctccggaggctggcgggacggcagggcactcatcaacagcccggagggggccgtgggccgaagcctgcagccgctgtaccggagcaacaccagccaggtgaagggggccccgggccaactaggggcgaaactctagggctgccctgcctgggaggaatttcacgttgcctccgtttatccgcccgcagctcgccttcctgctctacaatgaccaaccgcctcaacccagcaaggctcaggactcttccatgcgtgggcacacgaagggtgaggcctggattgggggctggggagagactcgggtcccatttttccaaggtaacccctgacgtgcatggggtggtcggggagatctgcactgtcagaccctgggcatctattccccccaacttttttttttctttgtttttgagacggtgggagttcgctctgtcacccaagctggagtgcagtggcacaatcttggctcactgcaatctctgcctctggggttgaagcaattctcctgtctcagcctcccaagtagctggtattaaaggcgcaccatcacaccaggctaattttcatatttttagtacagacgaggtttcaccatgttggccaggctggtctcgaactcctggtttctacctcaagtgatctacccgccttggcctcccaaagtg

SEQ ID NO: 806 - DNA, 6000 bp, Homo sapiens
tgtccaggccgccatcagacgcctccagccgccggagcagcagttccgccacctgaccatccgccatgactccttccagtgtgctcagcgtgtccgggcccgggtgggcggggggagctgagccaccggaaccggaaccggagtgtgtaccgccatcttgaatgtgtctaactgtagaacagggctcaatgtgtcgtcatcttgagtgtggcgacggagccgcaaaaggtgcatgggactcagttcccacctccaccctggctccatcaatggcgtctggttgaccagaggggtaaaattgattatctcaaggtcagaagcaccgccctgttttgagttttatctagcctcacttcgagcgggctgtgtgaccttggacttccccgtctctgggttacagaaccctctgcccttctggtattctctcttgccctaggagaggcggtgggtggtgggctccagagatggtcattttggcgatgtcagctacttttaaaatttcaaaggaaggctgggtaggtaccgtccctttttatagagggaaaaggaattcacctagtaagtcaaggtggcacctaacctgtgtggactacctcgtatgtggtagtacttagcccagaactgagtacttcacgtgtagtatttcatttatccccaaaactttatgatgtagatactgatataaccgcattacacatgtgagaaaactgaggctcagagggtggtatgacttgcccaaggttctacagagagttggtggaaatgaagtcataaattataaaccttccagatcctcccacccctgtgcgctgagagtaacgtcagtgcaaatactgcatggcctagattagcactgtcctatagaaacacagtgcaaaacatctttcttttttgagacagggtcttgctctgtcacccatgctggagtgcagtggtgcaattatggcttactgcagccttgacttcccaggctctaaggatcctccaaccttaggctcctgagtagctggaactgcaggtgcgcgccaccacacccagctttttttttttttttaagtatgggttttggccatgttgcccaggctggtctcaaactcctaggctcaggttatcctcctgcatcggtctcccaaaatgctggcattagaggcatgacccacctcgcccagccagccagaccctgactcttacaaaaaaaaagatgactaataaaatattttgcactcggccgggcacagtggctcacctctgtaatcccagcactttgggaggccgaggcgggtggatcacctgaggtcgggagtttgagaccagcctgaccaacatggagaaaccccgtctctactaaaaatacaaaattagcagggcgtggtggcgcatgcctgtaatctcagctacttgggaggctgaggcaggagagtcgcttgaacctgggaggcagaggttgtggtgagccgagatcgtgtcattgcactccagcctgggtgacaaggcgaaactccgtctcaaaaaaaaaaaaattgcactttttttcatactaaatcttcaaaatctgatgcgtattttacacttacaacacatctcagttcggaccaaccacatttcaaatggtcagtaatcacatgtgggcagtggtgacttacgtcagcacaggtagattagaatcctagatctgctggccaggctcagtaatcccagcactttgggaggctgaggcgggtgaatcacctgaggtcaggagttcaagaccagcttggccaagatggcgaaaccccatctcctctaaaaacacaaaaattagctgggtgcagtgggggtgcctgtaatcccagctacacgggaagctgaggcaggagaatcacttgagcctggtaggtggagcttgcagtgagcagagatcgcaccactgcactccagcctcggtgacagagcaaggctctgtctcaaaaaaaaaaaaaaaaaaaaaaaagaatcctagatctgttatttatgtcattcaaccagaaggtgtagtctttctgtgcctcagtttcttgctcacatggaggtgattggagcccaggttactgtgagaattaaatgcccacacatattcacactgcttactaaattgagtgtggcccatgttcgaacactcttataagcagaacacatttattccttttacatcacaattattatttgagtctgtaaaatgggattactcatatccccaaatcctgaccctatatgaggttctgtattaaggatacatttctcaaagtcccttctctcctcccattttatgttgattatttatttatttatttagggagtgggtctcactctattgcccaggctggagtgcagtggcatgatcttggctgactgcagcctccacctcctgggctcaagcaatcctctcacctcagcctcccgagtagttgggactacaggtgtgtaccagcaggccaggctaatttgtgttatgtatattatatattatatgctatatataatatacatactattcatatatttatgcattatatgtcatatataatatattacatatgtgtacatatatatattttgtaagaatgaggttccaccatgttgcccaggctggttttgaactgccgggctcaaacaatctgcctgcctcaggttcccaaggtgctaggattataagtgtgaactaccatgtccggcttatttttatttatttttgagacagggtcttgctctgtaacccaggctagagtgtgcagtggcaacaacacagctcacggcagcgtcaacctcctggtctcaagtgatcctcctgcctcagccttctgagtagctgggaacacaggcaggcgccaccacgcctggcaattaaaaaaaatgtttttgtaaaaatggcctcctgctatgttgcccaggctggtcttgaactcctggccttaagcattcctcccatcttggcctgccaaagtgttgggattacaggcgtgagccactgtgccccgtgtgtttttagttaatttccacaagagtccttccttcctctcttctatcatgcagcaagtactttttaagcctgttctgtgccaggtgctgcaggtgacactggaggatgcgaagtgaacaaaacaggcagtgtctaacctcaagtaggaagcgccaagcccacaggtgcctgacacaggaacaggaggaagggtcagcaagaggcctgggatggtccccgggatcctcatgggggggaccagactaggcaatactgaatactacctagaggaagtggtagaaccccaacttcccagttcattctcccccgtctttttttcgagatggagtcttgctctgtcacctgggctggtgggctggagtggagtggcgtgatcttggctcactgcaatctctggctcccaggttcaagcgattctcccacctcagcctcccgagtactgggattagaggcacccgccaccacgcctggctaatttttatttatttatttatttttatttttagtggagatgggttttcaccttgttggccaggctggtctcgaactgacctaaaatgatctgcccgcctcggcctccccaagtgctgggtttacaggcgtgagccactgcgcccggccaccatttcttttttttttttttaaccagagacccttgccaagtcattccccccactccactttattttccttttcattttttccttcctctcttttctgagtcacaaccattagccaggaagcaccccctccccaccctctttcctggatccccctcattccctccttccatagtccactcccgcgctcccaggtccagggcttatttgcccagagtttggaaaacccccagctctccttcctcctttctacagcgtgggggcagggtactggtgccagtcacgtgcctctggcttctgaagaagactctagactggggtcggggggtgggtcctgcccatctccctagcatcttatcgtccctaccatctgtgtcttttttccctccccaaacggaaccccctgccctctcgcctgcctatagccgtttaattgcaaaagccaggccgtttgtgggagaccacagacagcgacccccttcatttaccggttgagaggagggtaaaggggcggctgcaatctgggtaataaccctatccccactccagaagtcacagtcacatcgttaagccttcctcccctcttgtcccaggacagctttaaaaacgttaaaagcatttctgctgggtagcatctggccagggtcgccccctctgtctgctcaggaacgtctgtcacttcagagagcttaagtgacttgccccggtcacacagcagcagtccgataggctgccagggctctaggggcagaaggaggagagggctggcattcttcccaccggcccgcgtgactgtagcaccggggtgcagcgaagccccaagggccccaatccgtgagctctctcccatcccaggcaggggtgggggagcagcagtggggtgctggttctcaaatgcaagataagagctggctaagaaagccttgcccagcccctccacctagagggaatgggagggagagaagctgagggcagggtcccggtcccgcgtggagacagctgcgctcccgcggtttctttaaacgcccagatgggcaacgacgcgcgcggacgagggcggggttgggttcaggtctggtcacatgacctggcctgaggtgctcgcggcccccaccccaccagtgggcgtcccccccacgcgtggtcgaccatcattggtcggtggtgaggccaatagaaatcggccatctgggaacccagcgttccgaggcgcagcctaacatagtgaaccgacgaaggtccaatggaaaaagacggccatgggcatagaccaatgacaaagtggcaggggcgggcccaagggctgggtcaggttggtttgagaggcgggtgggtataaaagtgcaaggcgggcggcggcgtccgtccgtactgcagagccgctgccggagggtcgttttaaagggcccgcgcgttgccgccccctcggcccgccatgctgctatccgtgccgctgctgctcggcctcctcggcctggccgtcgccgagcctgccgtctacttcaaggagcagtttctggacggaggtaacgcctggtcccgcctcgaggccgccccgacgacgcggccggcccccgatcctggatctgcgttgtcgcccgtaattaccgtttagaggtccaacacggtggcctcccgggactagagccgcgggcgatttctcttctgcgtccctggggagcgcggagggcgtagcggcctcccgcggcgggagttagggttagcccgaggatctctgaaggcacccgacgtgtcaaactagaggttggaatggggagtgtcggggatctcctttcctgtccccagcagcttgtggctctcggcagatgtttggtgtggggggggattagcacagccgctctgacctacccctctaatcccccacttagacgggtggacttcccgctggatcgaatccaaacacaagtcagattttggcaaattcgttctcagttccggcaagttctacggtgacgaggagaaagataaaggtaagagcctaggagtgggtgctcagatccgggaggacttcctggcagaagtccttgtctgtacacacacagccgggacagtccccttggaggaggacaggtggaggaagtgggggagtcttctctattctctaagtcgagggtcctcgcgagtcaaggcccaacggtgacctcactaccgtcccgtctcaggtttgcagacaagccaggatgcacgcttttatgctctgtcggccagtttcgagcctttcagcaacaaaggccagacgctggtggtgcagttcacggtgaaacatgagcagaacatcgactgtgggggcggctatgtgaagctgtttcctaatagtttggaccagacagacatgcacggagactcagaatacaacatcatgtt

SEQ ID NO: 807 - DNA, 6000 bp, Homo sapiens
gatcctccaaccttaggctcctgagtagctggaactgcaggtgcgcgccaccacacccagctttttttttttttttaagtatgggttttggccatgttgcccaggctggtctcaaactcctaggctcaggttatcctcctgcatcggtctcccaaaatgctggcattagaggcatgacccacctcgcccagccagccagaccctgactcttacaaaaaaaaagatgactaataaaatattttgcactcggccgggcacagtggctcacctctgtaatcccagcactttgggaggccgaggcgggtggatcacctgaggtcgggagtttgagaccagcctgaccaacatggagaaaccccgtctctactaaaaatacaaaattagcagggcgtggtggcgcatgcctgtaatctcagctacttgggaggctgaggcaggagagtcgcttgaacctgggaggcagaggttgtggtgagccgagatcgtgtcattgcactccagcctgggtgacaaggcgaaactccgtctcaaaaaaaaaaaaattgcactttttttcatactaaatcttcaaaatctgatgcgtattttacacttacaacacatctcagttcggaccaaccacatttcaaatggtcagtaatcacatgtgggcagtggtgacttacgtcagcacaggtagattagaatcctagatctgctggccaggctcagtaatcccagcactttgggaggctgaggcgggtgaatcacctgaggtcaggagttcaagaccagcttggccaagatggcgaaaccccatctcctctaaaaacacaaaaattagctgggtgcagtgggggtgcctgtaatcccagctacacgggaagctgaggcaggagaatcacttgagcctggtaggtggagcttgcagtgagcagagatcgcaccactgcactccagcctcggtgacagagcaaggctctgtctcaaaaaaaaaaaaaaaaaaaaaaaagaatcctagatctgttatttatgtcattcaaccagaaggtgtagtctttctgtgcctcagtttcttgctcacatggaggtgattggagcccaggttactgtgagaattaaatgcccacacatattcacactgcttactaaattgagtgtggcccatgttcgaacactcttataagcagaacacatttattccttttacatcacaattattatttgagtctgtaaaatgggattactcatatccccaaatcctgaccctatatgaggttctgtattaaggatacatttctcaaagtcccttctctcctcccattttatgttgattatttatttatttatttagggagtgggtctcactctattgcccaggctggagtgcagtggcatgatcttggctgactgcagcctccacctcctgggctcaagcaatcctctcacctcagcctcccgagtagttgggactacaggtgtgtaccagcaggccaggctaatttgtgttatgtatattatatattatatgctatatataatatacatactattcatatatttatgcattatatgtcatatataatatattacatatgtgtacatatatatattttgtaagaatgaggttccaccatgttgcccaggctggttttgaactgccgggctcaaacaatctgcctgcctcaggttcccaaggtgctaggattataagtgtgaactaccatgtccggcttatttttatttatttttgagacagggtcttgctctgtaacccaggctagagtgtgcagtggcaacaacacagctcacggcagcgtcaacctcctggtctcaagtgatcctcctgcctcagccttctgagtagctgggaacacaggcaggcgccaccacgcctggcaattaaaaaaaatgtttttgtaaaaatggcctcctgctatgttgcccaggctggtcttgaactcctggccttaagcattcctcccatcttggcctgccaaagtgttgggattacaggcgtgagccactgtgccccgtgtgtttttagttaatttccacaagagtccttccttcctctcttctatcatgcagcaagtactttttaagcctgttctgtgccaggtgctgcaggtgacactggaggatgcgaagtgaacaaaacaggcagtgtctaacctcaagtaggaagcgccaagcccacaggtgcctgacacaggaacaggaggaagggtcagcaagaggcctgggatggtccccgggatcctcatgggggggaccagactaggcaatactgaatactacctagaggaagtggtagaaccccaacttcccagttcattctcccccgtctttttttcgagatggagtcttgctctgtcacctgggctggtgggctggagtggagtggcgtgatcttggctcactgcaatctctggctcccaggttcaagcgattctcccacctcagcctcccgagtactgggattagaggcacccgccaccacgcctggctaatttttatttatttatttatttttatttttagtggagatgggttttcaccttgttggccaggctggtctcgaactgacctaaaatgatctgcccgcctcggcctccccaagtgctgggtttacaggcgtgagccactgcgcccggccaccatttcttttttttttttttaaccagagacccttgccaagtcattccccccactccactttattttccttttcattttttccttcctctcttttctgagtcacaaccattagccaggaagcaccccctccccaccctctttcctggatccccctcattccctccttccatagtccactcccgcgctcccaggtccagggcttatttgcccagagtttggaaaacccccagctctccttcctcctttctacagcgtgggggcagggtactggtgccagtcacgtgcctctggcttctgaagaagactctagactggggtcggggggtgggtcctgcccatctccctagcatcttatcgtccctaccatctgtgtcttttttccctccccaaacggaaccccctgccctctcgcctgcctatagccgtttaattgcaaaagccaggccgtttgtgggagaccacagacagcgacccccttcatttaccggttgagaggagggtaaaggggcggctgcaatctgggtaataaccctatccccactccagaagtcacagtcacatcgttaagccttcctcccctcttgtcccaggacagctttaaaaacgttaaaagcatttctgctgggtagcatctggccagggtcgccccctctgtctgctcaggaacgtctgtcacttcagagagcttaagtgacttgccccggtcacacagcagcagtccgataggctgccagggctctaggggcagaaggaggagagggctggcattcttcccaccggcccgcgtgactgtagcaccggggtgcagcgaagccccaagggccccaatccgtgagctctctcccatcccaggcaggggtgggggagcagcagtggggtgctggttctcaaatgcaagataagagctggctaagaaagccttgcccagcccctccacctagagggaatgggagggagagaagctgagggcagggtcccggtcccgcgtggagacagctgcgctcccgcggtttctttaaacgcccagatgggcaacgacgcgcgcggacgagggcggggttgggttcaggtctggtcacatgacctggcctgaggtgctcgcggcccccaccccaccagtgggcgtcccccccacgcgtggtcgaccatcattggtcggtggtgaggccaatagaaatcggccatctgggaacccagcgttccgaggcgcagcctaacatagtgaaccgacgaaggtccaatggaaaaagacggccatgggcatagaccaatgacaaagtggcaggggcgggcccaagggctgggtcaggttggtttgagaggcgggtgggtataaaagtgcaaggcgggcggcggcgtccgtccgtactgcagagccgctgccggagggtcgttttaaagggcccgcgcgttgccgccccctcggcccgccatgctgctatccgtgccgctgctgctcggcctcctcggcctggccgtcgccgagcctgccgtctacttcaaggagcagtttctggacggaggtaacgcctggtcccgcctcgaggccgccccgacgacgcggccggcccccgatcctggatctgcgttgtcgcccgtaattaccgtttagaggtccaacacggtggcctcccgggactagagccgcgggcgatttctcttctgcgtccctggggagcgcggagggcgtagcggcctcccgcggcgggagttagggttagcccgaggatctctgaaggcacccgacgtgtcaaactagaggttggaatggggagtgtcggggatctcctttcctgtccccagcagcttgtggctctcggcagatgtttggtgtggggggggattagcacagccgctctgacctacccctctaatcccccacttagacgggtggacttcccgctggatcgaatccaaacacaagtcagattttggcaaattcgttctcagttccggcaagttctacggtgacgaggagaaagataaaggtaagagcctaggagtgggtgctcagatccgggaggacttcctggcagaagtccttgtctgtacacacacagccgggacagtccccttggaggaggacaggtggaggaagtgggggagtcttctctattctctaagtcgagggtcctcgcgagtcaaggcccaacggtgacctcactaccgtcccgtctcaggtttgcagacaagccaggatgcacgcttttatgctctgtcggccagtttcgagcctttcagcaacaaaggccagacgctggtggtgcagttcacggtgaaacatgagcagaacatcgactgtgggggcggctatgtgaagctgtttcctaatagtttggaccagacagacatgcacggagactcagaatacaacatcatgtttggtgagggcctgcttcctggtgctgatctctgtcccattagttagagggagacccagaccccattgactttcttaataatgattttttttggaaggggagctaaaagaataagtcccagcaacaatttattgcattatgatcgcagatctaggctgttaatttaatttgcgtgtttgtatatagttatttcccaatcttactaatgaggattttgagttctagagcactgattttttttttttctcctttaaacttaaggctccacccacagcccattcaggacagaatcagggtctgagtttctcttctcagccttgacagacccgagttgaagaaccaggtcttccttttataaagaggggtgagagcctcgagatgatgggtagtctctgactcttaactggatctgcttcacacctaggtcccgacatctgtggccctggcaccaagaaggttcatgtcatcttcaactacaagggcaagaacgtgctgatcaacaaggacatccgttgcaaggtgtgcctgggggtggtggcaaatggctgtcatggggagattcagaggtcagcctcattggggggtggcccccgctcaccttcttccttcttcaggatgatgagtttacacacctgtacacactgattgtgcggccagacaacacctatgaggtgaagattgacaacagccaggtggagtccggctccttggaagacgattgggacttcctgccacccaagaagataaaggatcctgatgcttcaaaaccggaagactgggatgagcgggccaagatcgatgatcccacagactccaagcctgaggttggtgtttgggcaggggctctgctctccacattggagggtgtggaagacatctgggccaactctgatctcttcatctaccccccaggactgggacaagcccgagcatatccctgaccctgatgctaagaagcccgaggactgggatgaagaga

SEQ ID NO: 808 - DNA, 6000 bp, Homo sapiens
ttctgtattaaggatacatttctcaaagtcccttctctcctcccattttatgttgattatttatttatttatttagggagtgggtctcactctattgcccaggctggagtgcagtggcatgatcttggctgactgcagcctccacctcctgggctcaagcaatcctctcacctcagcctcccgagtagttgggactacaggtgtgtaccagcaggccaggctaatttgtgttatgtatattatatattatatgctatatataatatacatactattcatatatttatgcattatatgtcatatataatatattacatatgtgtacatatatatattttgtaagaatgaggttccaccatgttgcccaggctggttttgaactgccgggctcaaacaatctgcctgcctcaggttcccaaggtgctaggattataagtgtgaactaccatgtccggcttatttttatttatttttgagacagggtcttgctctgtaacccaggctagagtgtgcagtggcaacaacacagctcacggcagcgtcaacctcctggtctcaagtgatcctcctgcctcagccttctgagtagctgggaacacaggcaggcgccaccacgcctggcaattaaaaaaaatgtttttgtaaaaatggcctcctgctatgttgcccaggctggtcttgaactcctggccttaagcattcctcccatcttggcctgccaaagtgttgggattacaggcgtgagccactgtgccccgtgtgtttttagttaatttccacaagagtccttccttcctctcttctatcatgcagcaagtactttttaagcctgttctgtgccaggtgctgcaggtgacactggaggatgcgaagtgaacaaaacaggcagtgtctaacctcaagtaggaagcgccaagcccacaggtgcctgacacaggaacaggaggaagggtcagcaagaggcctgggatggtccccgggatcctcatgggggggaccagactaggcaatactgaatactacctagaggaagtggtagaaccccaacttcccagttcattctcccccgtctttttttcgagatggagtcttgctctgtcacctgggctggtgggctggagtggagtggcgtgatcttggctcactgcaatctctggctcccaggttcaagcgattctcccacctcagcctcccgagtactgggattagaggcacccgccaccacgcctggctaatttttatttatttatttatttttatttttagtggagatgggttttcaccttgttggccaggctggtctcgaactgacctaaaatgatctgcccgcctcggcctccccaagtgctgggtttacaggcgtgagccactgcgcccggccaccatttcttttttttttttttaaccagagacccttgccaagtcattccccccactccactttattttccttttcattttttccttcctctcttttctgagtcacaaccattagccaggaagcaccccctccccaccctctttcctggatccccctcattccctccttccatagtccactcccgcgctcccaggtccagggcttatttgcccagagtttggaaaacccccagctctccttcctcctttctacagcgtgggggcagggtactggtgccagtcacgtgcctctggcttctgaagaagactctagactggggtcggggggtgggtcctgcccatctccctagcatcttatcgtccctaccatctgtgtcttttttccctccccaaacggaaccccctgccctctcgcctgcctatagccgtttaattgcaaaagccaggccgtttgtgggagaccacagacagcgacccccttcatttaccggttgagaggagggtaaaggggcggctgcaatctgggtaataaccctatccccactccagaagtcacagtcacatcgttaagccttcctcccctcttgtcccaggacagctttaaaaacgttaaaagcatttctgctgggtagcatctggccagggtcgccccctctgtctgctcaggaacgtctgtcacttcagagagcttaagtgacttgccccggtcacacagcagcagtccgataggctgccagggctctaggggcagaaggaggagagggctggcattcttcccaccggcccgcgtgactgtagcaccggggtgcagcgaagccccaagggccccaatccgtgagctctctcccatcccaggcaggggtgggggagcagcagtggggtgctggttctcaaatgcaagataagagctggctaagaaagccttgcccagcccctccacctagagggaatgggagggagagaagctgagggcagggtcccggtcccgcgtggagacagctgcgctcccgcggtttctttaaacgcccagatgggcaacgacgcgcgcggacgagggcggggttgggttcaggtctggtcacatgacctggcctgaggtgctcgcggcccccaccccaccagtgggcgtcccccccacgcgtggtcgaccatcattggtcggtggtgaggccaatagaaatcggccatctgggaacccagcgttccgaggcgcagcctaacatagtgaaccgacgaaggtccaatggaaaaagacggccatgggcatagaccaatgacaaagtggcaggggcgggcccaagggctgggtcaggttggtttgagaggcgggtgggtataaaagtgcaaggcgggcggcggcgtccgtccgtactgcagagccgctgccggagggtcgttttaaagggcccgcgcgttgccgccccctcggcccgccatgctgctatccgtgccgctgctgctcggcctcctcggcctggccgtcgccgagcctgccgtctacttcaaggagcagtttctggacggaggtaacgcctggtcccgcctcgaggccgccccgacgacgcggccggcccccgatcctggatctgcgttgtcgcccgtaattaccgtttagaggtccaacacggtggcctcccgggactagagccgcgggcgatttctcttctgcgtccctggggagcgcggagggcgtagcggcctcccgcggcgggagttagggttagcccgaggatctctgaaggcacccgacgtgtcaaactagaggttggaatggggagtgtcggggatctcctttcctgtccccagcagcttgtggctctcggcagatgtttggtgtggggggggattagcacagccgctctgacctacccctctaatcccccacttagacgggtggacttcccgctggatcgaatccaaacacaagtcagattttggcaaattcgttctcagttccggcaagttctacggtgacgaggagaaagataaaggtaagagcctaggagtgggtgctcagatccgggaggacttcctggcagaagtccttgtctgtacacacacagccgggacagtccccttggaggaggacaggtggaggaagtgggggagtcttctctattctctaagtcgagggtcctcgcgagtcaaggcccaacggtgacctcactaccgtcccgtctcaggtttgcagacaagccaggatgcacgcttttatgctctgtcggccagtttcgagcctttcagcaacaaaggccagacgctggtggtgcagttcacggtgaaacatgagcagaacatcgactgtgggggcggctatgtgaagctgtttcctaatagtttggaccagacagacatgcacggagactcagaatacaacatcatgtttggtgagggcctgcttcctggtgctgatctctgtcccattagttagagggagacccagaccccattgactttcttaataatgattttttttggaaggggagctaaaagaataagtcccagcaacaatttattgcattatgatcgcagatctaggctgttaatttaatttgcgtgtttgtatatagttatttcccaatcttactaatgaggattttgagttctagagcactgattttttttttttctcctttaaacttaaggctccacccacagcccattcaggacagaatcagggtctgagtttctcttctcagccttgacagacccgagttgaagaaccaggtcttccttttataaagaggggtgagagcctcgagatgatgggtagtctctgactcttaactggatctgcttcacacctaggtcccgacatctgtggccctggcaccaagaaggttcatgtcatcttcaactacaagggcaagaacgtgctgatcaacaaggacatccgttgcaaggtgtgcctgggggtggtggcaaatggctgtcatggggagattcagaggtcagcctcattggggggtggcccccgctcaccttcttccttcttcaggatgatgagtttacacacctgtacacactgattgtgcggccagacaacacctatgaggtgaagattgacaacagccaggtggagtccggctccttggaagacgattgggacttcctgccacccaagaagataaaggatcctgatgcttcaaaaccggaagactgggatgagcgggccaagatcgatgatcccacagactccaagcctgaggttggtgtttgggcaggggctctgctctccacattggagggtgtggaagacatctgggccaactctgatctcttcatctaccccccaggactgggacaagcccgagcatatccctgaccctgatgctaagaagcccgaggactgggatgaagagatggacggagagtgggaacccccagtgattcagaaccctgagtacaaggtgagtttggggctctgagcagggctggggctcacagtggggagtgcaccaaccttactcacccttcggtttccttctcccttctgcagggtgagtggaagccccggcagatcgacaacccagattacaagggcacttggatccacccagaaattgacaaccccgagtattctcccgatcccagtatctatgcctatgataactttggcgtgctgggcctggacctctggcaggtgagacttggaggaaaaaggaggatccctggggtacctcaagtgcataagatcacccaagaggaaagggacagggtaggcaccccaggtgagtctgactcaaaaatggtacttcttgtaaacagtacttcctggtctgtccctgtgaagtcctcacagcaacccctttaaggttatacttgctgtgcaccaagtacttccccaagtacttttatgcaaatcaacttctttacccccaaagacctagaaggtggtcaggtaacccagttagttagctggggctgggcacagtggctcacccttacaatcacggtactttgggaggctgagacagaggattgcttgaggccaggagttacacaactcaacctagcttggcaacacagcgaggagaccctatctctacaaaaaaaatttttttttttgagacagagtttcactcttgttgctgaggctggagtgcaatggcacgatctcagctcactgcgccctccgtctcctggtttcaagcgattctcctgcctcagcctccggagtagctgggattacaggcatgtgctactatggatgccaggctaatttttttttttttttttttttttgagaccgtgccttgctctgtcgcccaggctggagtgcagtggtgtgatctctgctcactgcaagctccgcacgaccccccaggttcactccattcttctgcctcagggtcccgagtaactgggactacaggcaccccccaccatgcctggctaatttttttgtatttttttttttagtacagacatggtttcaccgtgttagccaggatggtctccatctcctgacctcatgaaccacccaccttggcctcccaaagtgctgggattacaggcgtgagccacctcacccagcctttttgtagagacagggcttcatgttgcccaggttggtctcgaactcctggcctcaggtcatctgcccgcctcggcctccca

SEQ ID NO: 809 - DNA, 6000 bp, Homo sapiens
tggatcttaggggaaggaattggaatgggagtgtctgcaatggtttgctgaaagacatctaacacttggctctctaaaaaccaaaacaaaatgaaacaggagacaacaaaccaacatccctgcaatactgttcttgaaaacatcatgctgaatgaaagaagccagacacaaaaatcacatagtgtatgattctatttctgtgaaatatccagaacagggaaacctgcagagacagaaactcggctagtggttgcctaaggctgggatgtatggagagattgggagtgatagctaaagggtactgggattcttttggggggtgataaaaatgttctaaaatgagccaggtgtggtggcccgcgcctgtaatctcacactttgggaggccgagtggggaggatcccttgaggccagaagttcgagaccagcctgggcaacacagcaagactttgtctctacaaaaaatcttgaggaaaaaagtagcaaggcatgtacgtgcacacctgtagtcccagctgcccaggaggctgaggtggaaggatcgaataagcccaggagttttaagctgcagtgagctgtgatcgctccactgcactccagcctgggtgacagatcttatctccgaaaaaagaaaaaacaaaatgttccaaaatgaactgacgcaatggttgcatcactgtgaatatattgaaacccactggattgcacacttcaggtgggtgaattgtataatacgtaaattatatctcatttaagctgttgctatcgaaccgagtttgttcttcctctgtgcagcaagccaatcaatgtaatgacagattttgcagaagaggaagagttcgttcatgaggcaattaagcgacgaggtggtaaaacaggtctcaaattctcctccccaaaaatagggtttgagggtgcttatgggatagaaaacggggtgatctaaagtacggagaaaggtgactggcaggtagggaaggtgaggtaatcagaatttctgagcaagcatggttgagctacatggctttagataggacatttgtgcaaaaaatagcatttagcatgatctgaaggtggagtttacggccctctgatatcagctacccacataggtgcagttgaagggtcagtgatctccactggcttaaactaaacaagagctgcctcctacctagttcctgaaaaacaactttaagcacccattactatagtgtcccacagacaaaaatgttatctgtaaggaagccagtgggagtttagttatgcattatttggctacgtgacttgctagtggcgcttttaagatcaactataagtaagcaattaaaagtaagtaagcaattaaacgcaaggcagattaagtctggagggcttaatcaggttcgcctttggtttcactattaacataagaaataaaatgaaacaaaatggctgaaaaataataagaggaggaggaagagaggaatcatcatgatgcatcagttaaggcaactgggctggaacattttaggggttgtttgtttgtttttatatttaagacagagtcttgctctgtcacccaggctggagtgcagaggcacaatcttagctcgctgcagcctcaaactcctaggctcaagccagcctcctacctcagcctcctgagtagctaggactataggtatatgccatcatttttattattattattattttagtgacagggtctcactatgccccggctggtctcaaactcctcacctcaagcgatcctcctgccttggcctcccaaagcgctgggactacagacgtgacccaccacacctcaccccttatagggttgaatgccaactgtgccaattgctgaccttgggcagtcatttcacctctatgagcctcagtttctccatctgcaaaatgggagcaaaaatactgatctgtctagactcttgaagactcgatgagataataactaagtgaagtcggtgttatctacacagtggaaggtgagatgaataaactaggcataatgatgatggtaataaccagatgggctggctatgggatgggggttgggagaggttgtggctgggctggcacagacatctgactcatttagactctctgcctaggccacctttgccagagggagtcccctcagccttgcgatcactcatcccattggcgttggctccatttccacaccacagctgtgtgccaagggtgtgtcatgaggtttcttgagtgacagaaaactcaccgacaataaagggccaggtgattgtgccacccgattcatagaccaggcttctcaggagaaaccccgggagattccacactgtcagccccttctccaagatcagtacgtgggcctgactcctcctcggtgcccagctcagtattggcaactaggagagtagtgagattgaacttggccttgaggaacagctgcctctagagttggtaagtgatttggtggatattagcctctctctctctctctctctctctctctcacacacacacacacacacacacacacacacacacgcacatacacacatacgctccctctcccttcatgaattaatgctctggccagttttggcagaatggaagaaatttccatccatcccctctttcttttcatctgttcatttttttcttatttgtttactcagcaaattctctccaacaccacctctgtgctccctgccacactgttggccatgatggagacagagataatgaagtcaggctttcagtcctgaaaactgagctgccagttcagccatgagagtaagaatcaaaaacactgctgtaattcaagtaggagcaagcagagctgtgagagtccagagaaggaagaggaaagttccaggaggtcaagagggatcctaaaacctacctgggtcaccattgctgttaagcacctagagctctccccaggtcctttgcggatgggaaaatcgagtctcagagaggagagtgagatgccgaaggtcacacagctgggaagggactgaggcaggattcggttctggctccagggctatgctccttccacttcctccctcacaatctttggctcctctttcgtcacagcacttgctgtgtgtgtgtgtgagtgtgtgtgtgtgagagagagagagagagagagagatttaatattcatttctgtcacagactagagctacagaaggacagaaagtcagggagcatgtctgtcttacttaatggattctaagtgcataacacataatagatacccagaaaatatttgctgggtaggtgggtgggtgggtggatggattgatggatggatggatggatgggtgggtgggtagatggataagtaaataggtggatggatagatggaagatagagatgatggatgaaggaatggatagaaggagggctagatggagggatagttggaagatagaatagatggagggatggaagacagagagagataatggatgaatggatggatggatggatgaatgaatgagtggttggatgaataagtggatggatagatagatggatgggtagataaatgggttgatggaagaatgaatgggtatatgggatgactgattaatagatgggtagacagacggatgaatagatgtgtgagtgggtggatggatggatggatgagtggatagataggtaagtggaaagataaattggtggatgggttgatgaataaaaggatggatgttaaattggattgatggatgactagatagatgtgcgggtggaaggatgggtggatgggatgactgattaatagataagtagatggacagatgaatagatggaagggtgagtgggtgaatggatggatagatgatgaattaatggatagatggtagatggatagatgaatgaattgatgggtgactggatagatagatggataaaaacatagatgaatggatggttgatgggggaaggcatagcagatattatgccaccaaaattgtcagagaaggatctagatagaaaaaaaaaaagcattcccggtggggtgcagtggctcacatctataatcccagcactttgggaggctgaggtgggcagatcatgaggtcaggagatcaagaccatcctggctaacacagtgaaatcccgtctctactaaaaatacaataaaattagccaggcatggtggcgcatacctgtagtcccagctactcgggaggctgaggcaggatcatcacttgaacccaggaggcagaggttgcagtgagccgagatcatgccactgcaccccagacagcctgggtgacagagtgagattctgtctcaaaaaaaaaaaaaaaaaaagcaaaaagcattccctactgaggagaaagtgtaggaaaaggcaaagagatggggaaatgccaagagtatgacaaaagtctgtctgtgcagccagagaagagaacaggactcagagatgagaatggagaatgtggacagacattcagactcaaggaagagcaagggaggtggattgaccccttcgtattggagacccagtgagataatatcaaagttgcattccccacttcgatgacattctccttttaaacactcctccaaggcatctctttgagatggcttccccagcccgtcatctcctaggtagaagaggcaaacacatgggtcacttgccctgctcctcattccagggctttcaggggaagttcagtccaccagaagctggtgaatgacccacgggagacacaggaagtttttgggggcggagtgggggacattgtggggtaggctcagcagttctgaagaagacatccagaaatggaagacatcgtgaaattgtcattctaggggtgatatattactacttcatggattatcatctattgcccagatctgtccacagaccaaatccccaccacttgagtgctatttggtctcaaaaatccagatacataagccagtttgtcccctgagcccctcggcctccctttagagaactttaacctatcttctcttgactccaaggatcagacaagggtgctgagagccgggactcacaaccaaaggagaaatgagcaatccgcggtctttggaagaggtaggctgggtgcaggttgaggggagggtgatcatctggggagaaggaaggtgaggattttaatgttttggaaagagtggagggactgaaaaaatcatgatctgaactcagagctaggaggtactttgtagtcaatcaaacagcaaaaaaagactcagagatggaaccgaagttgggttgggtggtgggggcagtcaaacacagctacctctgtctccaaagatcaagttcttctcaacacattaaaggttctgagaagtcctgcaataaacaatttcatgttgattttttaaaagatgaagttcttaccactggggtgctcagtacgctgcttctgttctggaaagaactgttgacccccaatattcttcttcctcagacgggatctcagtattagcttcagaaactctgagacctctgcaagtgaggaggtaatagaggaatgctcagaacactcttggggaggatgaggagacctgcaaatccacaaaatacgacaactggaagggatcttcaaaatcacacacacactcattgtctatatttggaaactgaggctcagatgggagcagtgacttcccccaagttcataccaagctagaaaagagctggaccccaggttgggttgctgtatttgggaactaaaaataaaggacacccaattcaatttgaatttcacatcaacaacaaataattatgtagtataagtatatcccatgcaatatttgggatatacttatactaaaaaggtatttggtttttatttgaaatttaagtgtacctgagcatcttctattatacctggcaaccctaagcccaagcctctcttgttttgtttgttcatttttgagacagggtctcacttattgcccaggctggagtgcagtgacaagatcatagttcactgcagcctcaacttcccagg

SEQ ID NO: 810 - DNA, 6000 bp, Homo sapiens
gccgagattgagccattgcactccagcctgggcaacaagagcaaaactccatctcaaaaaaaaaaattaggtggttgtggtggtgcacacatgtggtcccagctactctggaggctgagatgggaggctcacttgagcccaggaggtcaaggctgcagtgagccatgattgcaccactgcactccagcctaggcaacagagtgagaccccatctcaaaaaacaaaagggaaaaaaaaaaagaaaacagaagtgatacagagaaggctttctggaggagggggagtaggagctggggctttgatgggtgagtgggagttcaccagagctaggccaaggaaacaaccctgagcaggaggcagaaaagtctggcatgaaccaggcatgatggctcatgcctgtaatcccagcactttgggaggccaaagcaggcggatcacttgaggtcaggagtttgagaccagcctggccaacatggtgaaaccccaactctactaaaaatacaaaaattagccagatgtggtggcacatgcctgtagtcccagttacttagggggccgaggcacgagaatcatttcaacctgggaggtgaaggttgcagtgagccaagatcatgccactgcactccagcctgggtgacagagcgagactctattgaaaaaaaaaaaattagccagccatggtgacgtgcacctgttgtcccagctactcaggaggctgagttgtgaggatcacttcagcccaggaggttgaggctatgattgagccagtgcactacagtctgggcaacagagcaagaccctgtctcaaaaacaaaaacaaccaggcatgatgggtggccacatggaaggatgtgggctttagcagtttttgtcagtcccacagctccacttctgggctggggacattgaggccagcagccctgacctacgcttatcacccacagataccactgcatccccacccagcgcatccccgagctccagcagccccgcctccccagctgctgctggccacacccgccccagctccctgcacggcctggctgccaagcttgggccaccccgccccaagactggccgccgcaagtccaccagcagcatcccgccctccccgctggcctgcccgcccatctccgcgcccccaccccgctcgccctcgcccctgcccgggcacccgcccgcacctgcccgatccccgcggctgcgccggggccagtcagctgacaagctgggcacaggggagcggctggatggggaggcggggcggcgcactcgtgggccagaggccgagctcgtggtcatgcggcggctgcacctgtccgagcgccgagactccttcaagaagcaggaggccgtgcaggaggttagcttcgatgagccgcaggaggaggccactgggctgcccacctcagtgccacagatcgccgtggagggcgaggaagccgtgccagtagctctcgggcccaccggaagagactgatcccctgccaggtctctccctggcatcaaagttacgcgttttcttgtgcaatgttttttccgtaaagtcatgcctggatggggactgagccaccagcctgacacccagaaggcgagaagccatctcggtccttgctggaaggtggagacatcgcttgtgttctggtgtcaatcggggctggatggggcaagaatgggggacaagggtggctttgtaaatagcagcaaatccctgcaactaatttattactttttttttctttttttttttttttttttgagacagagtctcactctgttgcccgggctggagtgcagcggcgtgatctcagctcactgcaacctccgcctcccaagttcaagcgattgtcctgcctcagcttcccaagtggctgggattacaggcgcccaccactatgcccagctaattttttgtatttttagtacagacggggtttcaccatgttggtcaggctggtctcgaactcctgacctcatgatttgcctgcctttgcctcccaaagtgctgggattacaggcgtgagccactgggcccagcctaatttattactttttataagcgatagccgtactgagccgccccctgaaggcggctgccaggtcttgccccaggcacctgggactctgtttgcaggccctgccctctgggctgagaaggatgcactttggacaagtcatctgtgtttgtgttttccagtttttctgtactttttaagtgttttgtgttacctggtctcattcccctccccacacctacccatttgaggggatggagttgaagtcacctggtcacctgtaccggcccagttcggctacaacctggagtgtccgtaaacaattcctctcacccacaaaacaatgtaatcccagcgatggactggattctgaaggccacttcccaccatcatagctgccatgcccaggcagtgcctgctctatatatagagtctgcctccaatcctgctggcttcagcctggagaagggatatgggagctggagctttgatggatgaataggtgttcaccggatctgggcagaggggtcatccgctccccaggtgggcactgataaaggaaggtacaggcctcacctggaactgccaaggcagcctccagaaatgctcggctgtctcggggcacgctccagtatgccagtcctgcgggattacgtccagctacttccagaaacactcagtgtcccctcccctcaggctctgccttggcctggccttgtccagtctaccctggacaagatgccgtgtgtttgaggcccagcagagtaagcccttggccgtgatgtgtctgaaacacctgttaggggttccctccatatgtcagagcctctctgggatgaagttcaagccagaaaacccagtcgaggctcaagtttgaatttcagcttcactgtgtggctctgggaaaatggctttcccactctgtgcctcagtttccttgtgtttacaagactaatcccattgactgtttattaagcacctactgtgtgccaagcgcttttacgtggcttctccctcagccagccttgagaaggctggaggtggtgtcatcacctccattttacagacaaagcagctgagaccccagcgaggggcggagacctgtcccacgatcacccagcaggagtcgtggcagaacggagcatcagccagaccctgttgtgggcgttgtcatcaagggagcttgaatggagggtctggtgtcagatacagccgactccagccccagctcatcccccatgatgctgtgtgacccactgggcactctggtgagggagctttccagacatcaacagcccactctgcttccctttctgagtcccctgtccagcactgcctagtgttggagggtagaccaaggctgtgcatgattcaccccctccttccatcctggagctggcagtgaataaaagcccgtatttacaaagatgagctccaacgtctggatttgtgaggggctgagaaaggaggaagggaagagtggggaggggagcggagtgaaatagacccatggctcaaagtcattgcaagtgggttttgaggactgcatagcagttcgctgttgagattcttcctgatgccatcgctggtaccagcctcctgctaccctctccctgcgagtactccatcatagccctgcctttaaaagcttcctccagacatctgggccctgagctatgttttttatttttatgtttttgagacaaggtctcgctctgtaacccaggttggagtacagtggcgcaatcacggcacattgcagcctcgacctcctgggcgccctgggctatgttaataaaataaataagcggcggggcgcggtggctcacgcctgtaatcccagcactttggaaggccaaggcgggcggatctcctgaggtcgggagttccaaaccaccctgaccaacatggagaaaccccgtctctactaaaaatacaaaattagccgggcgtggtggcgcatgcctgtaatcccagctgctcgggaggctgaggcaggagaatcgcttgaactcgggaggtggaggttgcggcgagccgagatagcgccattgcactccagcctgggcaacaagagcgaaactccgtctcaaaaaataataacaaaataagcaatcgtcgcgtcctttctatcctggtcttagcttgcgctctgccataaaactccctctagccgaacccggcccagccctagagcaatccgttacttccggggcgctcagccggcatgcaaacactcttggctacagccccatctccgagtgcgttcggctatttccggaaaccgtcggcatctaggctcaagtccgctaaattctagtgcccgtaggggtcgagatcgttggctgtttccggacgctctgggttgccatggaaactccttcaaccctggctttctccgacttctgctttttgcggcaggccctttccccactctactgccccctgtttgctgagcttgagaacgcctcatttgtcccctggaaccatctatgcttcagtaattcccataagctggcggtcgcctctgggtctaaactcccaaggcctccattgggcactgagcacattcggttatttccagaaacgctccgcggtcttggggatcagcctcagttgtgccagtgcggccgtagagagtgttcggccatttccgaaagcgctcgggcgtctctaagcccagccgagcccagtctcggatccctcgccgacccgattgcactcggctacctctggaaacgctcggctgtctcgggggcaccctctagtccaccagtcccgcgggattacgttcggctacttccggaaacactcgggtgcccccttacctcaggctccgcctcggcctcggttcatccgcccggctcgaatgcgctcgggcatttccgccgggggcgggccaggccgctcggaaccgtggcggcggcggaggcggggatcccgcggctgcggcgacggtggccgcggtggagccacggggcgggcttggcttggtgtgacggcggctgcggcggcggtggcggccgcgaccaggtgagtcctgactggccctcgtggcgggggcggctgggagtgtgcttaaatgcggggcgcccgggggcagtgccgggccccggtggaagccagaacgcaagcgccaggctgcgtcgggccccgcgggaactgggggggccgcaggcaagggggggcctcgggctcggctccgcagcggtgcagcctccttgggacggtcggggcagaatggggagagactccccgcgtccaagataccggactggagccgaggccccaaatgaagggaggccctgcctggaatggggcttcgaatagtaccgaggggcgcccaggcattgtgcggggcagaatggggtgcgggagggccgggggtcgaacccacttccggtcccctagccgggtggccgggtccacgcagacccaagtgcgcgtctgtgtgagcgctcaggccctgccttcacccgcggagcccccagccctgcctgccccgcccctcccgcctcccggattcggggagcgctgctcccggggcgcgcacaccggggcgtgggggcgggctggcaggcagatccaggcggttttctgggcatcccctctcggggcctcagtttccccacctgtagaatgagggtaacagaggcctaggaatgggtaaattgggcacccgagaatgtggcgcccctccgccctgctcggacacctcttggggttccccgtgactgaaggatgctcagagcctccacctgacactcgggcctcttggtggatagcacctatccttatagccaccctgaatccttgacaagcaacttaacccactgccaaggctttgcatgtgccgttccgtctgcctgtcgcgccttcctatccgctgtgatgatccattctctagaacagcacgtccatcccccgaccctagccctgtccatcacagggcgtctgaacccgcagggctaggctgggaatgtgt

SEQ ID NO: 811 - DNA, 6000 bp, Homo sapiens
aagcgattctcctgcttgagcctcccaagtagctgggattacaggtgtgcaccaccatacccgactaacttttgtatttttagtagagacagggttttgccatgttggccaggttggtctccaactcctgagctcaggtgatccatccgctttgtcctcaaagggctgagattacaggcatgagccaccgctcacagccattaaattggacagactttaaatgggtgagttgtgtggtatggtattggaacctcaataaatatattaaagacacaagatgaaaaggaaagggctgcctgctaggctcaggagggagtggggacaggagaactgggtgtgggagatagtggaggaggtggggtgaagtcacttcagaagcggcatggattaaaaggggcctgagccagccgggcgcagtggctcatgcctgtaatcccagcactttgggaggttgaggtaggtggatcatgaggtcaggagatcgagaccatccttgcagtgagctgagatcgcgccactgcactccagcctgagtgacagaacaagactctgtctcaaaaaaaaaaaaaaaaaaaaagagaacaaaaagcagcctgagccagcccatcatgtcctgggacgctggcagtgagtgaatggctgacccaggcagacagaagggagtgggtgccaggcttggggccaccaggccttggacaggagcacagaaggtaggtctggtgggaaggccactgtggaccatggctcaggagaggcaggagaggaggacagagggagaggaggcagggcctgtgtgtttgctctttttctgcagagcaggcttcttctcagaggtcctcctggcacatcctggcttaagtgggcccaggttatcccaggcctcaccaacaactagaaatcctggcatgatgtgttgtatctcttcagctcagctgtgagcgcttggggacagggcccggaaccatgtgctcactcaacaatgaaagcagggccataaacaaagagcacaccagcataggggtatcctcctcactcctccaccgggaaaggctggggtgggtgtgtatgtgctgtaacaaaagtccacaccattaggagacacaaccccaggcagtggtatttagggcactgtctggcacagggggggccactgctctgtggtgaactgggagaggaccagggtatttatacaaaaatgagatgctggaagcagggagctcagggagcctccaggcctgaggtccttctgtggcctggtctggctgcaggtcacacaggtgcatatttggaaacagaccttgtgctgcacacctgaaggggtggggtagcccaggttacaccggagaagaatgagactcggccaggcgtggtggctcatgcctgtaataccagcactttgggcggctgaggcagggggaccacctgaggtcaggagttcgagaccagcctggcctacatggtgaaaccctgtcactactaaaaatacaaaaaaaaaaaaaaaaataggccgggcccagtggctcacacctgtaatcccaccactttgggagaccaaggcgggcagatcatctgaggtcaggagtttgagaccagcctgaccaacatggagaaaccccatctctactaaaaatacaaaaaattagctgtgcatggtggcacatgcctgtaatcctagctattcgggaggctgagacaggagaatcgcttaaacctgggaggcagaggttgcggtgagccaagattgcaccattgcactctagcctgggcaataaaagtgaaaactccatctcaaaaaaaaaaaaaaaaaaaaaaaaaaaaatcgcagggcatggtggcgcccacctgtaatcccagatactagggaggccgagggaggagaatcgcttgaacctgggaggcacaggttgcagtgagccgagatcacgccactgcactccagcctgggtgacagagcaagacctggtctaaaaaaaaaaaacacacacacaaaaaacaacaaccaaaaaacaaacaacgccaggcgtggtgggtcgtgcctgcaatattagcactttgggaggccgaggtgggtggataacctgaggtcaggagttcgagaccagtctgaccaatatggtgaaaccccatctctactaaaaatacaaaaattagccggatgtggtggcatccaactgtactcccagctactcgggaggctgagacaggagaattgcttgaacccaggaggtggaggttgcagtgagccaagatcgggccactgcactctagcctgggtgacagaatgagactctgtctcaaaaaataaaaaagaaagaaagaaaagaaaaaagaaaaatgaggaaatagaatgcattatattcctccaatgtgttctgggacagcactcatgggccagatctagcctgaagcctcttttttttttttttaatttttggtagaggtgggggtctcactatgttgcccaggctggtcacaaactcctgggctcaagccatcctcccgcttcagcctcccaaagtgtggggattacaggcatgagccacctggctcacaggcaatctgtttttgtagagcccccaggctaagaacactttccatttgtaaatggttgtctcagtaactgaaactttctggccagccaaacccaaaatacttgtcatctgtcccttttatagaaaaagtctgccaatctcagttctgggatacaagaaaaacaagaggaggttggccgcggtggctcatgcctgtaattccagcactttgggaggctgaggctggaggatcacttgagcccaggagtttgagaccagcctggtcaacatagctgcaccctgtctctacaaaaagtagaaataaaaaataaaaaaaccaagaaggggctggggaggacttttcacctcacactgatttttctactgtctgaattattacgtttttaattaccatgctcatttttgtgtgtgtgttaaaattgaggaataatgtgcataacatgtaatttaaatgtaaagtttgatttgttaagagacatgcattctgccgagcacggtagctcatgccgatagtcccatcactttgggaagccgaggtgggtggatcacttgagcccaggacttcgagaccagcctgggcaagatggcgagatcccatctctatagaaaatacagaaagctgggcgcatgcttgtaatcccagcttctcaggaggctggggtgggaggatggcttgagcccaggaggcggaggttgccaagaaatcactccagcccaggcaacagaaccataccgtcttaaaaaaaaaaaaagaaatgtatgtattcactcttagattacgtttaaaagtttctatttgtctgttaacctggggactgagtatgggcgccttttaagttctctttttcaattttctgtgctgagcccgataacaaaatttaacgtgttacttaaacatttgaaaactttacgccgggcatggtggctcacgcctgtaatcccagcactttgggaggccgaggtgggcggatcatccgaggttgggagttcgagaccaccctgaccaacatggagaaaccccgtctctactaaaaacacaaagttagccaggcgttgtggcacatgcctgtaatcccagctactcaggaggctgaggcaagagaatcgcttgaacccaggaggcggaggttgcggtgagccgagatggcgccattgcactccagcctgggcaacaagagcaaaactccgtctcaaaaaaaaaaaattgaaaatttaaagaatatggattcctgtgacaccatgcaggcgggggctgccagcagggaaccactgcatagaacatcttgtaaattccctccaggttccgggttgcggcctcagctttgccttggggagccgcggccttctttgggcctcagtttccccatcttagaaatccaagggtggctgagggccagagcacaggctatgactcagtttaacccactgtaaaacgtaaataactagagggaccgatttcctgggctgttacgagaaggaagaggagctgggaaagacctcaacaaactgcagcacttagcgttattacagaagctatgatggatccccgggctccgcctccggtcacaccgccgggaaaactgaggcccgcctgtgtccccggaaccccgcccccgagccccgagtgcccagactctgagaccccggcgcagagtgatactgacccgacagtcctcgacgcggcaagttccgtttgtagtcgatgggcccatagccccccggcggaggcatgtcctgcttcacctttgacgccgccatactcgcagtatcccacacttccggtcccgggcggaagtgacttactgccaccgccatgatgagtgtggcggaagcacttgagatggtccgcggcacggctaggaagtcccggacagtagtgtaactatccgaccgcgcgggaaagctctggcggcggaccctgggtaggaatgcgctgccgggctgcagctgaggggtctttactcctcttttgcccagacagggcgtgactcgccttggttcttgcattataggccctcgcgttcaccttgcctctggggtgttgcgcaggccagtcagaaactccgagctctcaaaggagccaggtgccccagttaaggccccttttcccgttttcgccccgtctagggactctacgcgaagcccagggctccacgtagtcacgggctgggtacatgatgttggggggcagctgctgctcgaagtcggactcaccccaatccctggaacggattctgctccctggtggtgatgggtatcccttgctagtggcctctcatcggaaactgaccattcaggatgattatgagtcacaaagcagggaggctagggtggccccggggcggggtcccggacccccaccctaaggcggagtgacgcccgcagtcacttcacaaggcaaaaattgttacggggcaataaaaggcacaacagcggccaatgtctggcagtgggcacatgggggtgcgggggtgtaggtgccaagcgccatggcttagacccgagattggagtccggccgccccccgacagcagccgcctcctgccccccgtgcgccctaggcgccaccatgtcgggagacaaacttctgagcgaactcggttataagctgggccgcacaattggagagggcagctactccaaggtgaaggtggccacatccaagaagtacaagggtaccgtggccatcaaggtggtggaccggcggcgagcgcccccggacttcgtcaacaagttcctgccgcgagagctgtccatcctgcggggcgtgcgacacccgcacatcgtgcacgtcttcgagttcatcgaggtgtgcaacgggaaactgtacatcgtgatggaagcggccgccaccgacctgctgcaagccgtgcagcgcaacgggcgcatccccggagttcaggcgcgcgacctctttgcgcagatcgccggcgccgtgcgctacctgcacgatcatcacctggtgcaccgcgacctcaagtgcgaaaacgtgctgctgagcccggacgagcgccgcgtcaagctcaccgacttcggcttcggccgccaggcccatggctacccagacctgagcaccacctactgcggctcagccgcctacgcgtcacccgaggtgctcctgggcatcccctacgaccccaagaagtacgatgtgtggagcatgggcgtcgtgctctacgtcatggtcaccgggtgcatgcccttcgacgactcggacatcgccggcctgccccggcgccagaaacgcggcgtgctctatcccgaaggcctcgagctgtccgagcgctgcaaggccctgatcgccgagctgctgcagttcagcccgtccgccaggccctccgcgggccaggtagcgcgcaactgctggctgcgcgccggggactccggctagaagccgggtggttccagccattcctgcagccaagggcactgggccagggcggcgcac

SEQ ID NO: 812 - DNA, 6000 bp, Homo sapiens
ggtctgtggccacatggcaggcagagaccctgaccccatctgctcccacagattcgtcggtggacagatggcatgcactatgccctgggccccggagatgtggcaggagctatccagacagaaacatatagcaccttgagaggagggcatggggtgacattttaggcaaggcttgaagaggggaaaagtgccaggagtgtgcaaaggcttggagataggagccagcatggcaggtcaagaacaaaaagggcaatgtggtgggactgggtgggaagacggggcaagggcgtgggttttagctaagtgcagtgggagtctagggaaggtcctgggcccagtactcaagctacgcccactctgaagccatgcccactaccccaaggatggggttttgcccattttccaagtggggagtctgaggcatggccccagtcaggagcagcacccttcgaataaaccagaggggctaggggctaggttttattttatttatttattttttcttttgaggcagagtcttgctctgctgcccaggctggagtgcattggtgggatcttggctcactgcatcctccattttccgggttcaagtgattctcctgactcaggctccccagtagctaggactacaggtgcaagccacccatgcccgactaaattttgtatttttagtagagatggggttttaccatgttagccaggctggtctcaaacgcctgacctcaagtgatccgcctcccaaagtgctgggattacaggtgtgagccaccatgcccggccccaggagctgggttttctacctccactctgatgtggtccagccaagactggaggctaggcactgcccctcttttagcctcggtttcctcatctgcaaaactgaaggggacagggccatgtatctatttggagggatgaagatagagctggcactgcatcaccagggcaccagaaagccattgagactgagtgagcaggggctgggcatggggagacccaccagaggagcagctatgtagggctcatatgcaggtaggcacgattaggatttcctaatatacctaatacatttccccatataccccaaatgggaaccactcccaggctctgtggggtcctctctcaatttcctccttaccttgccatctcctttccctctctccctccttattccaggcaaataagcttactggccttactcaaacacgccagctcccctcttcctggggaacaacctggactgtttctcttaccttcagagtcccttgactttttttttttttttttttttctgagacagggtctcactctgtggtccaggctggagtgcagtggcacgatcatagctcactgcagccttgaactcccaggcccaagcgattctcccacctcaccctcccaagtaactgagacacaccaccatgcctggctaatttttaaattttttgtacagatggccgtctcgctgtgttgcccagattggtctttaactcctgggctcaagcgatccgcccacctcagcttcccaaagttctggaattataggcgtgagctgccacgccctgcccagagtccctccttgaacacctcccaactctacctggcatttagcacaacttacaattattttatttccatgtcattcttttattttacttgacttttcaattgtctcgttttcggcagggatgggcccaagtctcttcgccatgagctctggggcctggcagacagtaggtgctcaagaaatgcatgactacatgaaggaacagaggaaggaacgagctagtgagtccagctgaatctcgcccagccccgccctgactcccccaccccctcttcccgagaggaaagggacccacagcagggagggcttcccccacccccgcaacgtcactgttgctagatctgggttcaaattacagctgtgagccgggtgaagtggctcatgcctgtaactccagcactttggggaggtcgaggcaggtggatcgcctgaggtcaggagttcgagaccagcctggccaacatggtgaaaccctgtctccactaaaaatacaaaaaattagccaggcgtggttgcctgcgcctgtagtctcagctactcaggaggcagaggcatgagaattgcttgaacccgggtagagactgcagtgagccaagatcgtgccactccagcctgggcaacaaagagagaccttgtcctaaaaaaaaaaaaaaaaaaaaaaaaaaaaaatcacagctgtgtcttttttgtttgttttttgagacggagtttcgctcttgttgcccacggtggactgcagtgacacgatctcggctcactgcaacctccccctcccgggttcaagcgattcttccgcctcagcctccgagtagctgagattacaggcgcccgcccccgtgcccagctaaattttttttgtatttttagtagagacggggtttcactatattggccaggctggtctcgaactcctgacctcaggtgatccacccgccttggcctcccgaagtgctgggattacaggcgtgagcaccgcgcccggggtttttctttttctttcttttttcttttccttttttttttttttttttttttttaagaggcagggtccagggcgcgttggctcacgcctgtaatcccaacactttgagaggccgaggcgggtggatcacgaagtcaggagttcaagaccagcctggccaagatggtgaaaccccgtctctactaaaaatacaaaaattagccgggtggggggacacgcgcctgtagtcccagctacttgggaggctaaggcgggagaatcgcttgaacccgggaggcggaggttgcagtgagccgagatcgtgccactgcactccagcttgggcgacagagcgagactctgtctcaaaaaacaaacaaacaaacaaacaaacaaacaagagatgaggtctcggctgtgatgcccaggctgttttcgaactcctgacctcaagatatctgcccgcttcggactcgcagtgttggggttacaggcgtgagccaccgcgcctggcccttggctctgccttttggcaagtgacatccatgtgggcctcagtttccttatctataaactcctactttacgtggagacaggccaccctcgccccacccctggctgttccattcttaaaagatgtggacggcgaggcgctggggtccacttgcttcccagcccatcatcacagcgacatcacgacccggggacaacaaagctcctttgagtttgcccatactggggagctcaaaaggtccaggctcgaatcctcccgactcccttttgagtcttggagcaataacctcaacatgcgtgactctaaaatagggtacccgcgcctgccttccccggatggagcgatcgcttctccactagtccgcaaatgggggccaccgttagagccaggtgcgaggaacagcgagtttattgcaggttccaaccgggaacctggcacccacggctggttgggaagggacgccctccgcgcagaggctgagagttccgcgcaggcgcaatgcttccgtcccctctggtctcgccctctcggggcctggtcgcagggaatcgcggatgcgcatgcgcctccagctcccgggatcgcggggaacgtggattccgaacaagggcaactgcggactcccccgtgggaagaaagggagggaagcggaagggaaaaagcgcatgtgcagcagcacgcggcagcttcgcatattccctcgaagcgcgcctcttgcgcgtgcgccgccctggcccagtgcccttggctgcaggaatggctggaaccacccggcttctagccggagtccccggcgcgcagccagcagttgcgcgctacctggcccgcggagggcctggcggacgggctgaactgcagcagctcggcgatcagggccttgcagcgctcggacagctcgaggccttcgggatagagcacgccgcgtttctggcgccggggcaggccggcgatgtccgagtcgtcgaagggcatgcacccggtgaccatgacgtagagcacgacgcccatgctccacacatcgtacttcttggggtcgtaggggatgcccaggagcacctcgggtgacgcgtaggcggctgagccgcagtaggtggtgctcaggtctgggtagccatgggcctggcggccgaagccgaagtcggtgagcttgacgcggcgctcgtccgggctcagcagcacgttttcgcacttgaggtcgcggtgcaccaggtgatgatcgtgcaggtagcgcacggcgccggcgatctgcgcaaagaggtcgcgcgcctgaactccggggatgcgcccgttgcgctgcacggcttgcagcaggtcggtggcggccgcttccatcacgatgtacagtttcccgttgcacacctcgatgaactcgaagacgtgcacgatgtgcgggtgtcgcacgccccgcaggatggacagctctcgcggcaggaacttgttgacgaagtccgggggcgctcgccgccggtccaccaccttgatggccacggtacccttgtacttcttggatgtggccaccttcaccttggagtagctgccctctccaattgtgcggcccagcttataaccgagttcgctcagaagtttgtctcccgacatggtggcgcctagggcgcacggggggcaggaggcggctgctgtcggggggcggccggactccaatctcgggtctaagccatggcgcttggcacctacacccccgcacccccatgtgcccactgccagacattggccgctgttgtgccttttattgccccgtaacaatttttgccttgtgaagtgactgcgggcgtcactccgccttagggtgggggtccgggaccccgccccggggccaccctagcctccctgctttgtgactcataatcatcctgaatggtcagtttccgatgagaggccactagcaagggatacccatcaccaccagggagcagaatccgttccagggattggggtgagtccgacttcgagcagcagctgccccccaacatcatgtacccagcccgtgactacgtggagccctgggcttcgcgtagagtccctagacggggcgaaaacgggaaaaggggccttaactggggcacctggctcctttgagagctcggagtttctgactggcctgcgcaacaccccagaggcaaggtgaacgcgagggcctataatgcaagaaccaaggcgagtcacgccctgtctgggcaaaagaggagtaaagacccctcagctgcagcccggcagcgcattcctacccagggtccgccgccagagctttcccgcgcggtcggatagttacactactgtccgggacttcctagccgtgccgcggaccatctcaagtgcttccgccacactcatcatggcggtggcagtaagtcacttccgcccgggaccggaagtgtgggatactgcgagtatggcggcgtcaaaggtgaagcaggacatgcctccgccggggggctatgggcccatcgactacaaacggaacttgccgcgtcgaggactgtcgggtcagtatcactctgcgccggggtctcagagtctgggcactcggggctcgggggcggggttccggggacacaggcgggcctcagttttcccggcggtgtgaccggaggcggagcccggggatccatcatagcttctgtaataacgctaagtgctgcagtttgttgaggtctttcccagctcctcttccttctcgtaacagcccaggaaatcggtccctctagttatttacgttttacagtgggttaaactgagtcatagcctgtgctctggccctcagccacccttggatttctaagatggggaaactgaggcccaaagaaggccgcggctccccaaggcaaagctgaggccgcaacccggaacctggagggaatttacaagatgttctatgcagtggttccctgctggcagcccccgcctgcatggtgtcacaggaatccatattctttaaat

SEQ ID NO: 813 - DNA, 6000 bp, Homo sapiens
aaatgaaaatctacatccatacaaacacctgtacagcatgaatcttcatggcagccatactcacattattcacagcagccaaagagtaggtggatgacccaagtgcccatcaaaaaatgaaaacacaacacttggtgctggatattaatttgccagaaacaaaaggccacacggtctatgacttcactgataggaaatggccagaacaggcaaatccacagagaaggaagcagattagtgtttgccaggggtgggatgattgctaatagggaagacggggtttcttttgggtaatgaaagtggtctaaattctgatcatggcaatggccatacaactttgtgaatatactaaaaaatcaataaattggacacacttcactatattattattattttttttgagatggagtcttactctgttgcccaggctggagtgcagaggcaagatcttggctcactgcaacctccgccttccaggttcaagcgattctcctgcttgagcctcccaagtagctgggattacaggtgtgcaccaccatacccgactaacttttgtatttttagtagagacagggttttgccatgttggccaggttggtctccaactcctgagctcaggtgatccatccgctttgtcctcaaagggctgagattacaggcatgagccaccgctcacagccattaaattggacagactttaaatgggtgagttgtgtggtatggtattggaacctcaataaatatattaaagacacaagatgaaaaggaaagggctgcctgctaggctcaggagggagtggggacaggagaactgggtgtgggagatagtggaggaggtggggtgaagtcacttcagaagcggcatggattaaaaggggcctgagccagccgggcgcagtggctcatgcctgtaatcccagcactttgggaggttgaggtaggtggatcatgaggtcaggagatcgagaccatccttgcagtgagctgagatcgcgccactgcactccagcctgagtgacagaacaagactctgtctcaaaaaaaaaaaaaaaaaaaaagagaacaaaaagcagcctgagccagcccatcatgtcctgggacgctggcagtgagtgaatggctgacccaggcagacagaagggagtgggtgccaggcttggggccaccaggccttggacaggagcacagaaggtaggtctggtgggaaggccactgtggaccatggctcaggagaggcaggagaggaggacagagggagaggaggcagggcctgtgtgtttgctctttttctgcagagcaggcttcttctcagaggtcctcctggcacatcctggcttaagtgggcccaggttatcccaggcctcaccaacaactagaaatcctggcatgatgtgttgtatctcttcagctcagctgtgagcgcttggggacagggcccggaaccatgtgctcactcaacaatgaaagcagggccataaacaaagagcacaccagcataggggtatcctcctcactcctccaccgggaaaggctggggtgggtgtgtatgtgctgtaacaaaagtccacaccattaggagacacaaccccaggcagtggtatttagggcactgtctggcacagggggggccactgctctgtggtgaactgggagaggaccagggtatttatacaaaaatgagatgctggaagcagggagctcagggagcctccaggcctgaggtccttctgtggcctggtctggctgcaggtcacacaggtgcatatttggaaacagaccttgtgctgcacacctgaaggggtggggtagcccaggttacaccggagaagaatgagactcggccaggcgtggtggctcatgcctgtaataccagcactttgggcggctgaggcagggggaccacctgaggtcaggagttcgagaccagcctggcctacatggtgaaaccctgtcactactaaaaatacaaaaaaaaaaaaaaaaataggccgggcccagtggctcacacctgtaatcccaccactttgggagaccaaggcgggcagatcatctgaggtcaggagtttgagaccagcctgaccaacatggagaaaccccatctctactaaaaatacaaaaaattagctgtgcatggtggcacatgcctgtaatcctagctattcgggaggctgagacaggagaatcgcttaaacctgggaggcagaggttgcggtgagccaagattgcaccattgcactctagcctgggcaataaaagtgaaaactccatctcaaaaaaaaaaaaaaaaaaaaaaaaaaaaatcgcagggcatggtggcgcccacctgtaatcccagatactagggaggccgagggaggagaatcgcttgaacctgggaggcacaggttgcagtgagccgagatcacgccactgcactccagcctgggtgacagagcaagacctggtctaaaaaaaaaaaacacacacacaaaaaacaacaaccaaaaaacaaacaacgccaggcgtggtgggtcgtgcctgcaatattagcactttgggaggccgaggtgggtggataacctgaggtcaggagttcgagaccagtctgaccaatatggtgaaaccccatctctactaaaaatacaaaaattagccggatgtggtggcatccaactgtactcccagctactcgggaggctgagacaggagaattgcttgaacccaggaggtggaggttgcagtgagccaagatcgggccactgcactctagcctgggtgacagaatgagactctgtctcaaaaaataaaaaagaaagaaagaaaagaaaaaagaaaaatgaggaaatagaatgcattatattcctccaatgtgttctgggacagcactcatgggccagatctagcctgaagcctcttttttttttttttaatttttggtagaggtgggggtctcactatgttgcccaggctggtcacaaactcctgggctcaagccatcctcccgcttcagcctcccaaagtgtggggattacaggcatgagccacctggctcacaggcaatctgtttttgtagagcccccaggctaagaacactttccatttgtaaatggttgtctcagtaactgaaactttctggccagccaaacccaaaatacttgtcatctgtcccttttatagaaaaagtctgccaatctcagttctgggatacaagaaaaacaagaggaggttggccgcggtggctcatgcctgtaattccagcactttgggaggctgaggctggaggatcacttgagcccaggagtttgagaccagcctggtcaacatagctgcaccctgtctctacaaaaagtagaaataaaaaataaaaaaaccaagaaggggctggggaggacttttcacctcacactgatttttctactgtctgaattattacgtttttaattaccatgctcatttttgtgtgtgtgttaaaattgaggaataatgtgcataacatgtaatttaaatgtaaagtttgatttgttaagagacatgcattctgccgagcacggtagctcatgccgatagtcccatcactttgggaagccgaggtgggtggatcacttgagcccaggacttcgagaccagcctgggcaagatggcgagatcccatctctatagaaaatacagaaagctgggcgcatgcttgtaatcccagcttctcaggaggctggggtgggaggatggcttgagcccaggaggcggaggttgccaagaaatcactccagcccaggcaacagaaccataccgtcttaaaaaaaaaaaaagaaatgtatgtattcactcttagattacgtttaaaagtttctatttgtctgttaacctggggactgagtatgggcgccttttaagttctctttttcaattttctgtgctgagcccgataacaaaatttaacgtgttacttaaacatttgaaaactttacgccgggcatggtggctcacgcctgtaatcccagcactttgggaggccgaggtgggcggatcatccgaggttgggagttcgagaccaccctgaccaacatggagaaaccccgtctctactaaaaacacaaagttagccaggcgttgtggcacatgcctgtaatcccagctactcaggaggctgaggcaagagaatcgcttgaacccaggaggcggaggttgcggtgagccgagatggcgccattgcactccagcctgggcaacaagagcaaaactccgtctcaaaaaaaaaaaattgaaaatttaaagaatatggattcctgtgacaccatgcaggcgggggctgccagcagggaaccactgcatagaacatcttgtaaattccctccaggttccgggttgcggcctcagctttgccttggggagccgcggccttctttgggcctcagtttccccatcttagaaatccaagggtggctgagggccagagcacaggctatgactcagtttaacccactgtaaaacgtaaataactagagggaccgatttcctgggctgttacgagaaggaagaggagctgggaaagacctcaacaaactgcagcacttagcgttattacagaagctatgatggatccccgggctccgcctccggtcacaccgccgggaaaactgaggcccgcctgtgtccccggaaccccgcccccgagccccgagtgcccagactctgagaccccggcgcagagtgatactgacccgacagtcctcgacgcggcaagttccgtttgtagtcgatgggcccatagccccccggcggaggcatgtcctgcttcacctttgacgccgccatactcgcagtatcccacacttccggtcccgggcggaagtgacttactgccaccgccatgatgagtgtggcggaagcacttgagatggtccgcggcacggctaggaagtcccggacagtagtgtaactatccgaccgcgcgggaaagctctggcggcggaccctgggtaggaatgcgctgccgggctgcagctgaggggtctttactcctcttttgcccagacagggcgtgactcgccttggttcttgcattataggccctcgcgttcaccttgcctctggggtgttgcgcaggccagtcagaaactccgagctctcaaaggagccaggtgccccagttaaggccccttttcccgttttcgccccgtctagggactctacgcgaagcccagggctccacgtagtcacgggctgggtacatgatgttggggggcagctgctgctcgaagtcggactcaccccaatccctggaacggattctgctccctggtggtgatgggtatcccttgctagtggcctctcatcggaaactgaccattcaggatgattatgagtcacaaagcagggaggctagggtggccccggggcggggtcccggacccccaccctaaggcggagtgacgcccgcagtcacttcacaaggcaaaaattgttacggggcaataaaaggcacaacagcggccaatgtctggcagtgggcacatgggggtgcgggggtgtaggtgccaagcgccatggcttagacccgagattggagtccggccgccccccgacagcagccgcctcctgccccccgtgcgccctaggcgccaccatgtcgggagacaaacttctgagcgaactcggttataagctgggccgcacaattggagagggcagctactccaaggtgaaggtggccacatccaagaagtacaagggtaccgtggccatcaaggtggtggaccggcggcgagcgcccccggacttcgtcaacaagttcctgccgcgagagctgtccatcctgcggggcgtgcgacacccgcacatcgtgcacgtcttcgagttcatcgaggtgtgcaacgggaaactgtacatcgtgatggaagcggccgccaccgacctgctgcaagccgtgcagcgcaacgggcgcatccccggagttcaggcgcgcgacctctttgcgcagatcgccggcgccgtgcgctacctgcacgatcatcacctggtgca

SEQ ID NO: 814 - DNA, 6000 bp, Homo sapiens
taaaccagaggggctaggggctaggttttattttatttatttattttttcttttgaggcagagtcttgctctgctgcccaggctggagtgcattggtgggatcttggctcactgcatcctccattttccgggttcaagtgattctcctgactcaggctccccagtagctaggactacaggtgcaagccacccatgcccgactaaattttgtatttttagtagagatggggttttaccatgttagccaggctggtctcaaacgcctgacctcaagtgatccgcctcccaaagtgctgggattacaggtgtgagccaccatgcccggccccaggagctgggttttctacctccactctgatgtggtccagccaagactggaggctaggcactgcccctcttttagcctcggtttcctcatctgcaaaactgaaggggacagggccatgtatctatttggagggatgaagatagagctggcactgcatcaccagggcaccagaaagccattgagactgagtgagcaggggctgggcatggggagacccaccagaggagcagctatgtagggctcatatgcaggtaggcacgattaggatttcctaatatacctaatacatttccccatataccccaaatgggaaccactcccaggctctgtggggtcctctctcaatttcctccttaccttgccatctcctttccctctctccctccttattccaggcaaataagcttactggccttactcaaacacgccagctcccctcttcctggggaacaacctggactgtttctcttaccttcagagtcccttgactttttttttttttttttttttctgagacagggtctcactctgtggtccaggctggagtgcagtggcacgatcatagctcactgcagccttgaactcccaggcccaagcgattctcccacctcaccctcccaagtaactgagacacaccaccatgcctggctaatttttaaattttttgtacagatggccgtctcgctgtgttgcccagattggtctttaactcctgggctcaagcgatccgcccacctcagcttcccaaagttctggaattataggcgtgagctgccacgccctgcccagagtccctccttgaacacctcccaactctacctggcatttagcacaacttacaattattttatttccatgtcattcttttattttacttgacttttcaattgtctcgttttcggcagggatgggcccaagtctcttcgccatgagctctggggcctggcagacagtaggtgctcaagaaatgcatgactacatgaaggaacagaggaaggaacgagctagtgagtccagctgaatctcgcccagccccgccctgactcccccaccccctcttcccgagaggaaagggacccacagcagggagggcttcccccacccccgcaacgtcactgttgctagatctgggttcaaattacagctgtgagccgggtgaagtggctcatgcctgtaactccagcactttggggaggtcgaggcaggtggatcgcctgaggtcaggagttcgagaccagcctggccaacatggtgaaaccctgtctccactaaaaatacaaaaaattagccaggcgtggttgcctgcgcctgtagtctcagctactcaggaggcagaggcatgagaattgcttgaacccgggtagagactgcagtgagccaagatcgtgccactccagcctgggcaacaaagagagaccttgtcctaaaaaaaaaaaaaaaaaaaaaaaaaaaaaatcacagctgtgtcttttttgtttgttttttgagacggagtttcgctcttgttgcccacggtggactgcagtgacacgatctcggctcactgcaacctccccctcccgggttcaagcgattcttccgcctcagcctccgagtagctgagattacaggcgcccgcccccgtgcccagctaaattttttttgtatttttagtagagacggggtttcactatattggccaggctggtctcgaactcctgacctcaggtgatccacccgccttggcctcccgaagtgctgggattacaggcgtgagcaccgcgcccggggtttttctttttctttcttttttcttttccttttttttttttttttttttttttaagaggcagggtccagggcgcgttggctcacgcctgtaatcccaacactttgagaggccgaggcgggtggatcacgaagtcaggagttcaagaccagcctggccaagatggtgaaaccccgtctctactaaaaatacaaaaattagccgggtggggggacacgcgcctgtagtcccagctacttgggaggctaaggcgggagaatcgcttgaacccgggaggcggaggttgcagtgagccgagatcgtgccactgcactccagcttgggcgacagagcgagactctgtctcaaaaaacaaacaaacaaacaaacaaacaaacaagagatgaggtctcggctgtgatgcccaggctgttttcgaactcctgacctcaagatatctgcccgcttcggactcgcagtgttggggttacaggcgtgagccaccgcgcctggcccttggctctgccttttggcaagtgacatccatgtgggcctcagtttccttatctataaactcctactttacgtggagacaggccaccctcgccccacccctggctgttccattcttaaaagatgtggacggcgaggcgctggggtccacttgcttcccagcccatcatcacagcgacatcacgacccggggacaacaaagctcctttgagtttgcccatactggggagctcaaaaggtccaggctcgaatcctcccgactcccttttgagtcttggagcaataacctcaacatgcgtgactctaaaatagggtacccgcgcctgccttccccggatggagcgatcgcttctccactagtccgcaaatgggggccaccgttagagccaggtgcgaggaacagcgagtttattgcaggttccaaccgggaacctggcacccacggctggttgggaagggacgccctccgcgcagaggctgagagttccgcgcaggcgcaatgcttccgtcccctctggtctcgccctctcggggcctggtcgcagggaatcgcggatgcgcatgcgcctccagctcccgggatcgcggggaacgtggattccgaacaagggcaactgcggactcccccgtgggaagaaagggagggaagcggaagggaaaaagcgcatgtgcagcagcacgcggcagcttcgcatattccctcgaagcgcgcctcttgcgcgtgcgccgccctggcccagtgcccttggctgcaggaatggctggaaccacccggcttctagccggagtccccggcgcgcagccagcagttgcgcgctacctggcccgcggagggcctggcggacgggctgaactgcagcagctcggcgatcagggccttgcagcgctcggacagctcgaggccttcgggatagagcacgccgcgtttctggcgccggggcaggccggcgatgtccgagtcgtcgaagggcatgcacccggtgaccatgacgtagagcacgacgcccatgctccacacatcgtacttcttggggtcgtaggggatgcccaggagcacctcgggtgacgcgtaggcggctgagccgcagtaggtggtgctcaggtctgggtagccatgggcctggcggccgaagccgaagtcggtgagcttgacgcggcgctcgtccgggctcagcagcacgttttcgcacttgaggtcgcggtgcaccaggtgatgatcgtgcaggtagcgcacggcgccggcgatctgcgcaaagaggtcgcgcgcctgaactccggggatgcgcccgttgcgctgcacggcttgcagcaggtcggtggcggccgcttccatcacgatgtacagtttcccgttgcacacctcgatgaactcgaagacgtgcacgatgtgcgggtgtcgcacgccccgcaggatggacagctctcgcggcaggaacttgttgacgaagtccgggggcgctcgccgccggtccaccaccttgatggccacggtacccttgtacttcttggatgtggccaccttcaccttggagtagctgccctctccaattgtgcggcccagcttataaccgagttcgctcagaagtttgtctcccgacatggtggcgcctagggcgcacggggggcaggaggcggctgctgtcggggggcggccggactccaatctcgggtctaagccatggcgcttggcacctacacccccgcacccccatgtgcccactgccagacattggccgctgttgtgccttttattgccccgtaacaatttttgccttgtgaagtgactgcgggcgtcactccgccttagggtgggggtccgggaccccgccccggggccaccctagcctccctgctttgtgactcataatcatcctgaatggtcagtttccgatgagaggccactagcaagggatacccatcaccaccagggagcagaatccgttccagggattggggtgagtccgacttcgagcagcagctgccccccaacatcatgtacccagcccgtgactacgtggagccctgggcttcgcgtagagtccctagacggggcgaaaacgggaaaaggggccttaactggggcacctggctcctttgagagctcggagtttctgactggcctgcgcaacaccccagaggcaaggtgaacgcgagggcctataatgcaagaaccaaggcgagtcacgccctgtctgggcaaaagaggagtaaagacccctcagctgcagcccggcagcgcattcctacccagggtccgccgccagagctttcccgcgcggtcggatagttacactactgtccgggacttcctagccgtgccgcggaccatctcaagtgcttccgccacactcatcatggcggtggcagtaagtcacttccgcccgggaccggaagtgtgggatactgcgagtatggcggcgtcaaaggtgaagcaggacatgcctccgccggggggctatgggcccatcgactacaaacggaacttgccgcgtcgaggactgtcgggtcagtatcactctgcgccggggtctcagagtctgggcactcggggctcgggggcggggttccggggacacaggcgggcctcagttttcccggcggtgtgaccggaggcggagcccggggatccatcatagcttctgtaataacgctaagtgctgcagtttgttgaggtctttcccagctcctcttccttctcgtaacagcccaggaaatcggtccctctagttatttacgttttacagtgggttaaactgagtcatagcctgtgctctggccctcagccacccttggatttctaagatggggaaactgaggcccaaagaaggccgcggctccccaaggcaaagctgaggccgcaacccggaacctggagggaatttacaagatgttctatgcagtggttccctgctggcagcccccgcctgcatggtgtcacaggaatccatattctttaaattttcaattttttttttttgagacggagttttgctcttgttgcccaggctggagtgcaatggcgccatctcggctcaccgcaacctccgcctcctgggttcaagcgattctcttgcctcagcctcctgagtagctgggattacaggcatgtgccacaacgcctggctaactttgtgtttttagtagagacggggtttctccatgttggtcagggtggtctcgaactcccaacctcggatgatccgcccacctcggcctcccaaagtgctgggattacaggcgtgagccaccatgcccggcgtaaagttttcaaatgtttaagtaacacgttaaattttgttatcgggctcagcacagaaaattgaaaaagagaacttaaaaggcgcccatactcagtccccaggttaacagacaaatagaaacttttaaacgtaatctaagagtgaatacatac

SEQ ID NO: 815 - DNA, 6000 bp, Homo sapiens
acctgaaaagaaagaggactaactcaggaaatgaaagaggatgtttaattggtttccaattattattataacaatatttaagaagttattacactcaaaaatcaagaacaagatagtacgcaaacagcatgataatgctgcataaacagagtaaggagaataagtaaataaataaatttttaaacggtgcaataagggaacaagaaagtgttcttataaaataaaaatataatggcttaaataaattcaagagaaaggtcagatgataaaacagaagaagccttccataaagtaggacaaaaagaccgagatggaagacatgaaagaaaagggatatgaaagatttatccaggaggcccagtttacagttgtcccagatagagaaagatagaaatcaaagaggaaaaaagtatcaaatggacaacaaaacaaaattgcccaaaagttaaaggtagaagtttccagatcaaaagaatctaccaagcaaacaggacaagggcttttaaaaggcccaaacctttgcaaaatttcagaatcctgggaggaaaaggaaagattctaaaacttttctttctcttctttttctttctctttctttccttccctccttccttcttcctttcccattccccttccccttccccttttcttcccctccctccctctgtctctctctctctctctcactctctctctctctctctctctctttctctctttcggggctcactctcacccaggaaaattcctaggctcaagcaattcccacctcagcttcccaagtggctgggactacaggtatgcaccaccatgccctaatttttaagttgttgtagagagagggttctcactaggctcatcatgttgcccaggctggtctctaactcccagcctcaagcgatcctcccacctcagcctcccaaagtcctgggattacagctgtgagtcatcacacttgaccaaaagctttcagaaagagaaaaaaaaaaaacaccactcacgaaggaataggaatcagatttttgtatcacgaacaccaaatgctagaagacagatgagatgtacctttatactccaaagggagtggacactaaacacaactggatcacgaactgacaagaaaacaaacagtggtggtgaaggttatttgaataactggagagacaaatgtgggctacatcaagtagatgatactattttatctatattaatgtattgggtacaataattatattatatatgagtatatctttgttcttaggatatacacttaggagtgaactgacatatttgaaaccttcaaatggttcaaaaaaactgtgtgtgtgtgtgtgcatatgcacacacgtatgtatgtgtgtgtagacatataaagtcaatgtggcaaacttaatgattaatgaatgtatgggaaagatatatacacgttctttgtactattcctccaatttttatagatttgatggttttcacaatgtaaagtaaggaattttacaaattactaatatataacaaagttagaagggtaaattaaaaataacattttgtattatattttaatttaaagtaattctgaggggaaaatattttatccaaaagtctataaccaaccatgaattagtcaagtgttatggtcaattaaatatttagacatatgacaatatagaaaatttgtctatcacagactttttaaagacaattacttaaaaatgtgtttcaacaaacttaagggttaaaccaagaaagagcataaggaatccaagaaatagaggatgaaactcaagatggcaaggaaggaaaatctaggataagaggtatgcaacagtccccaccattcagtggggaaaggacagtcttttcaacaaatggtgctgggaaaactggatagccacatgcaaaaacatgaagtgggacccttacctaatgccatattaactcaaaatggaccacagacctgaacataatgagctaaaactatagaacttctagaaggaaacaggagaatagcttcataacgttagatttggcagttatttcttgggtatgacaccaaaagcaaaggcaacaaaagaaaaaataggtaagttggactttatgaaaattaaaatattttgtgcattgaaggacacaatcaacagaatgtaaatcccatggaatgggagaaaatagttgcaaatcatatactttgataagggattatctaaaatatgtaaagaactactacaacgcaacaacaaaaaaagaaaagcaaattttaaaatgggcaaagggctagaagagacatttttcttttcttttcttttcttttcttttttttcttgagacagagtctcgctctgtcaccaggctggagtccagtggcgcgatcttggctcactgcaacttccggctcccgggttcaagtgattctcctgcctcagcctcctgagtagctgggactacaggtgcgtgccaccacgcccagctaatttttgtatttttagtagagacagggtttcgccatgttggccaggatagtctcaatctcttgacctagtgatctgccctcctcagcctcccaaagtgctgggattacaggagtaagccatcgcacctggcctagagtagacatttctctaaagaagatatacaaatggccaacaagcacatgaaaagatgctcaacatcactaatcgttagagaaatgcatatcaaaaccacaacacctcacctcatacccgttaggatggttactatcaaaaacaatcaaaaaacaaacaaacaaaaaaacagaacacaacaaatattggtgaggagacggtgaaattggaaccttcattcactgttggttggaatgtaaaatagtgcagttgctgtggaaaatggtatggccattcctcaacacagaattatcacattatccaacaatttctcttctgggtatatatccaaaagtgaaagcacagacctgaacagatatttctacacccatgttcatagctgcattattaataatagccaaaaggtggatgcaacctaagtgtccattgtcagatgaatggataaacaaaatgtgctaggtatatccatacaatggaatatattcagtctaaagagggaaagaaattctgccacatgctacaacatgaatgaacctttaagacatatgctaggtggagtaagccagtcacaaaaggacaaatattgtatgattccacatatacaagatacccagaataggcaaattcatagaaactagaatgagaatgggtggagactgattattattctcagacccctcccacccccacccattcccattagaggcccctcacaccaacctaaatctttactgggtagagttccagttcaggatgataaaaaaaaaaagttgtagagattgatggtggacaaggtggttcatgcctgtaatcccagcactttgggagaccaaggcaggtggatcactttaggtcagaagttcgagaccagcttgaccaacatggtgaaaccccatctctactaaaaaatacaaaattagccgggcacagtggtgcacgcctgtggtcccagctacttgggagactgatgcaggagaatcgcttgaacccgggaggtggaggttgcagtgagctgagattgagtgacaactgcacgataatgcatttcataccactgaaaagtacacctaaaaatggtgaaaatggtaaattttgtattgtgtatattttgccacaattaaaacacacaggccaggtgtggtggctcatgcctgtaatgttagcagtttgggaggctgaggcaaaaggattgcttgagctcaggagatagaggccagcctaggcaacatagcgagaccccatctgtatttttttaatgtaaaaaataaaataacacacacacagacaaacaaacagaatctgtatgagtcacacgtttaggtagctgaatatcctctctgcccccaattcccccaagtcaaaggcagaagggatttgttccaccaaagagtttacaccagccacagctgcccactgcagtatcctcccaggaaaagcccttttgtgcgtggaggaggcagatggcgaggaggcagatgtgcactttttttttttttttttttttttttagagacagggtctggctgtgtctcccaggctggagtgcagtggcgagatcaaggctcactgcagcctcgaacttccgggctccagcgatcctcctgacacagcctcctgagtagctgggactacaggtgcacatcaccgcgcccaactagttttttaaaattttagtagagataggctcttgccatattgcccaggctggtctctaactcctgacctcaaatgaccctaccgcctcccgaagcgtcgggaccacaggcggcgagccaccggccggcctctgtgtgcaccgaggagccgggcagccaccgccacgatccagctttaggacatttccatcaccccactcagccttcctgcgcccctggttcctcatctataaatagagataatatacgcctaaccctctaggtcaccagcacattgcacccataattattatacttgttgatgccacactttcaggttttaacctttccaaagcgcagccccgccccagcgcagcccaagtccctgcacgcagaggcgccgatcacgggtgggaggtggatcccggaggccccgccccaggccccgcccctccgtgcgcccaagctcgaccgcctgaaatcggggaatcgggcctctgccggcgccctggcagcggcgcggggcgtggctccgggctggattggtggcgcctgggccccgcgagcgcctgcgcagtggtcaaggccgcgctcgcgccgaggggctgcgagagtgaccgcggctgctccagcgctgacgccgagccatggcggacgaggagcttgaggcgctgaggagacagaggctggccgagctgcaggccaaacacggggtgagcgcatcagcccccgccaggcttggccctcgcggggcgccgccctcgcccggagtgtagggcgcgcctccggggcggaggctctgggcgcctccccggggccccggtcccctgcgctgccctggcggcctcgtggccggctcagaggtggcctcgtcgctttcctcgtcgcgaggggcccaggaggctggcggcgggggccgccacgtgcgggacctgccctggcgttggggtgtggggtcccctagcctggagcgggctcgtcctggcgggcctggatccaagcacaatctcagcttttggagccagcagccggaccgaattcagtttttccggagttcagttgttatgacccaagtttagccgacaggtattgagggtccgctgtgttcccggtgctgagagcgcggcagggtcggaggaacgcttgccccgccgggatgacagggaggggccgcctgggaagcttggatggatcacacgcccggagaggcgtttctgataagggaccgggaccttagggacggagggcgcagtctttgagttatcgttgtccctaataccgaggcccgttttattttccagaaattattcctacatgtgaaacacggtttcgtaatacagggattcccctccccagggtgctctgtattccaaagccttctgaggttgtggttttagacgttcatcaaaacgttgtaagtgggaactagttcattgatttctgtgaggcccagtttcttatttggggagttgtttctaccaccgcaagagactgttatgtataggaaacaacagaaccgttcctttttcccgccgcctcccgtgaaatttctctattaaatttaagttttttttttccaggatcctggtgatgcggcccaacaggaagcaaagcacaggtatgggctggaaacgtgaactttttgaagggtggtttcaccaaatggatttcttttgctgtagttattttaagcaggtgtgtgactcagatttttttgttttgctggaatggtgatttggccaaaatcatccgcagggtatcttcat

SEQ ID NO: 816 - DNA, 6000 bp, Homo sapiens
cctcaggtgatccacccgcctcgacctcccaaagtgctaggattacaggcatgagcctccacgcccggcctgagggctcaagtctttttttttctttctttcttttttttgagacggagtcttggtctgtagcccaggctggagtgcagtggcgcgaactcgactcactgcaagctccacctcccgggttcacaccattctcctgcctcagcctccagagtagctgggactacaggcacccgccaccatgtccagctaatttttttgtatttttagtagagacgaggtgtataccgtgttagccaggatggtctggatctcctgacctcgtgatccgctcgtctcggcctcccaaagtgctgggattacaggcgtgagccaccgcgcccggccaagggctctagtcttaacagtgaccccacacccaaatgtcacccaagtccatgcccctgacccaattattccctaggcccagtatgtccccacagcccgtttttgttgttgttgttgttgttgttgttgtttttgagatagagtcttgctctgtcgtccaagctggaatgcagtggtgcaatccagactcactgcaccctccacctcccagttcaagtgattctcgttccttagcctcctgagtagctgaaattacaggtgcctgccaccatgcctgcctattttttgcatttttagtagagacagagtttcggcatgttagccaggctggtctcaaacttctggcctcaagtgatactcctgctgcggcctcccaaagtgctgggattacatgcatgagccactgtgctggcttcttacagcccttttattgtcctgagtgcagtccccagctcttgggtgctcttactccctcctgcctggcctccactggctggctgaaggtccttggggtctggcattggggcggggggatcctctgactattccctctcactaagttccctaccccagggccccattgtgcacactgaccacagtgatctggttctggaggagaaagggactctggagaccaaggtgagtgttgagaggggtggggctcccttcactgttgggagaggcggggctcccttcattgtgtttccgtctctctcccacgcctgtcccctcctttttccttctgttgtcctcagagttgggactcagctccccaccccactcctcctgccccctgggccatctcactcagctcccagcctcagtttgcctgtctgcagactcttcccacacatctgtcccagccctagcctccatctggagccccagaccagggctcaccctgcctgtgctctcctcatcacggtcaagccccctttcagccaccaggtcctacactggccccacatctccccagactggttcttcctctggggtcctacctcaggacagccacattgactccaggccatccccaggccagagcacttctctctctctctctctcctgcgtacctagcacatgccattctctctcttcttttttttttttttttttttgagacggagtctcattctgttgcccaggctggagtgcagtggtgcaatctcagctcactgcaacctctgcctcctgggttcaagccattctcctgcctcaggctccctaatagctggctaatttttcttgtatttttagtagagatggagtttcaccatgttggccaggctgatctggaactcctgacctcaagtgatccgctcgccccagcctcccaaagtgctgggattacaggcgtgagccactgtgcccagccgacatgccattctcttggcctgaaacactcctaccttccttcccatgtctacctaattccttcctttagtcctccagtctcagctcagacatttcttgttctaggaagcccatgcttccgtcatgacagctcgatcattttgcctgtgttccacccatcacagccatgaccactctgatctgggcttccttatcccacccactatgctgagggctctaccatcacagcccctgtcattgcctatgcctttcccaggcacagccctgacccctctgggtactgtctcatgatctgtcatttttcctttggtgtgggattctgtgaggacagggtccagttctatcctagtgacatgccttgtagcagcaacacagggtgtgacactgaatcaaagcctagaggctgttgggcaggtgagtgtctctctcctgttccctctgcaccttccacaccgacacccctcagcaggcctatatccctccgtctctacctttctctgcctatgtcctatccatttgcctcttatcactgttcctctgtctcactttctctctctcccagtccatgtgtgtctctgtgtctctgcccactcctgtctctttttgtctctctcaaggtctggtctatttcagtgtgtctctccatcagtgaccctcatcccccctgcacgctcacagactttactgagtcccatttgtcccctcaggacccaaccaacggttactacaaggtccgaggagtcagtgtgagcctgagccttggcgaagcccctggaggaggtctcttcctgccaccaccctccccccttgggcccccagggacccctaccttctatgacttcaacccacacctgggcatggtccccccctgcagactttacagagccagggcaggctatctcaccacaccccaccctcgagctttcaccagctacatcaaacccacatcctttgggcccccagatctggcccccgggactccccccttcccatatgctgccttccccacacctagccacccgcgtctccagactcacgtgtgacatctttccaatggaagagtcctgggatctccaacttgccataatggattgttctgatttctgaggagccaggacaagttggcgaccttactcctccaaaactgaacacaaggggagggaaagatcattacatttgtcaggagcatttgtatacagtcagctcagccaaaggagatgccccaagtgggagcaacatggccacccaatatgcccacctattccccggtgtaaaagagattcaagatggcaggtaggccctttgaggagagatggggacagggcagtgggtgttgggagtttggggccgggatggaagttgtttctagccactgaaagaagatatttcaagatgaccatctgcattgagaggaaaggtagcataggatagatgaagatgaagagcataccaggccccaccctggctctccctgaggggaactttgctcggccaatggaaatgcagccaagatggccatatactccctaggaacccaagatggccaccatcttgattttactttccttaaagactcagaaagacttggacccaaggagtggggatacagtgagaattaccactgttggggcaaaatattgggataaaaatatttatgtttaataataaaaaaaagtcaaagaggcaagtgtgtcttagggagtctactggcattatcactctccaccaaggaaggggtcccttagacctgtcccaaggtccctcctctaccctagcctatgaggtggctgtaggagtaaaactgtgagccacctctcagcctcttgctacctgcaaagcactctaggctctttttttttttttcttgagacaagatctggctctatggcccacattggagtgcagtggcatgatctcagcccactgctacctctgcatcctgggctcaagccatccttccacctcagcctcccaagtagctgggactacaggtgcatgccaccacacccagctaatttttgtatttgtttgtagacagggtttcaccatgttggccaggctggtctcaaactcctgacctcaagtgatccgcccacctaggcctcccaatgtgctgggattacaggcatgagccactgtgcccagccatgggctcttttaatatacatcttcacacacacacacacacacacacacacgcacacacacacatgagttgcaaacagaaaagacacacacataggcatgtatgcacagacacacgcatagatgtccacacagttgcacacaagtgacagggctgccccaggggtcctggggaagactgaattctaactctcattagaggagacaaacaagtgagccctgaagtggagcagggaaggggagactatgggtaggaaaatggcaatcccctggtccttacagcaagcgtggagatccagaccctaatcctgaggtgctgcatccacagtgggcatggtgctggtgcctgcttggatgatccttaaagaaaggtcctgggggctttggttcatggatccttgagctaggagttaaaggtccaggcccctgggacccttgggaagcagagcaagaagagtgaactcctgggtctgaaggagaatgggctgggggcttggtctctggtcctgagagagaaggtgcccagacttctggatctgaaagaggaagggactaggtctcaactgctgccttcttgactggggacattttggaggcctgtattcctgagccctcaacagaggaatgtactaggggatgggggtctctgatgcttgcatccttggaaaaggacaaaactgtgagtgtctgggtctaaagagggtgagagtcctgcgggaggactcaaaatccacaacgggcggagcccatagccggactcctggctgggcccttcatggggcgggacgcctggaatctcgaggggcgggggcctggcgcaggctcccgcccggggttcccgagctgctccactctgcgcgaagccgccacgctattgtcctgaccaggaaggcggggccggcgcggggcggggctggcggcgccggcgcagcccgggggcggcgggaggaggaggtggcggcggtggcgctgggagctcctgtcaccgctggggccgggccgggcgggagtgcaggggacgtgagggcgcaagggccgggacatggggcccgccagccccgctgctcgcggtctaagtcgccgcccgggccagccgccgctgccgctgctgctgccactattgctgctgcttctgcgcgcgcagcccgccatcgggagcctggccggtgggagccccggcgcggccgaggtgaggccgggccgggtcctgggggatgggggaaggggcgggaccgggtctctggacgccggcgcggacatgtccagggcagaaagcgcggtctttccagccaggtggtcagcccccaggcgcccccaatcacatttatgaacccagggttccaggccccagctcccccatcatgcgacgtcccagccccctcccatctcgagcataggaactggtctattcagagcccctggtcccagaagtccagccccctctccagacccaggtgactcggccccaaccccctcccgcctggacataggacccaccaagcagcgaggcatttagatccaataatccagaccccttgtattctctggacccatatggaggcccttgcagcctcccaggacccaggagtccagtccttcagtcaccacccaccccaaccagatgtagctctccagtcctcaaggacctggtgtccaggactgtaggcccctgaagccaggccttgtcagctttgcatcctgcaacgggagcctgagcaagggatggagggaggaggggccagaactcctgggttctggcctcctcctccgcgattcaggtttaaccccttcgggctccagagcggctgcgctggggtgggggcggagtctgtctccgcggcaacaaggcagaaagaatcccgggggacccaggtcgccatagcaacgggagcgctggggcgcccccgccctacgggagctgtttcccagggaacggtgcctccatggaggcggtgtgcggtgcttgggggagggggctggtgctgggggtctcggtcctagggagcaaagaaccaggggaccctcatgccaacgccccccgagccctcactgtcctttccacttccatccaggccccggggtcggcc

SEQ ID NO: 817 - DNA, 6000 bp, Homo sapiens
gaaaaaggcgtggtccagggtgctgcgcgatctaaggcgtggaggctggggggcgtggccaataaagaggcgcaactatgctaggggcaggggacctgttttgagatactaagtcaggaaaaggggagagccgcgagatagccagagaggaagtggaatttaggaatctggtggtctttgtaaagagtagaggtgtaggggggagtggcgaaaggataggcggggctaagacagaaagagaccttaaggaccagcaagatggggaaaggggtggagcccaatgagagcgcggagagctgggggggcgtggccatgaaaagacaaatttataacgggaagggagagttttggagaggcggaatagaggaaaaggcggggcctaaaggagggtgagacctttggggagacgaatctgactgcggggaggggtgaccagagaggtgggcttagagggaccttcagaaagaaacagcacaggaaaagagatagggcttaaagatgacgggacttttaagggaaaactgctagtgggcgtggccaatgagcacaaggagcttggatatctaaggctggtgctagggagaagcagggcctagggaagcgatgtcctcatgaatactagagccttgaaaacggacctggccgggcgcggtggctcacgcctgtaatcgcagcacttggggaggccgaggcaggcggatcacctgaggtcagaagttcgagaccagcctggccaacacggcgaaactccgtctctactaaaaatacaaaaattagcctggcatggtggtgcgtgcctgtaatcccagctactcaggaggctgagacaggagaatcgcttgaacctgggaggaggaggttgcagtgagccgagattgtaccattccactccagcctgggcgacaagagcaaatctccgtctcaaagaaagaaagaaagagggagaaagaaagagaaaagggacctgactactggagaggggtggctggcaggggcggggcagtgggctgattgcccccatctgatccccccagatgtacccggagctgcagattgcacgtgtggagcaggctacgcaggccatccccatggagcgctggtgcgggggttcccggagcggcagctgcgcccacccccaccaccaggttgtgcccttccgctgcctgcgtgagtcccaggcggggagaggggaactgaggtgggagtttctgaggggcaaggttctgagcccctctctcaggcctacattaaggggctgggtgcttgtgtcctaagtggggcagagaagcctctgaggataaaatatctggattctgaggagggtggggttggtggctataggaggatctcaccctggtgtcccgtgcttccccagctggtgaatttgtgagtgaggccctgctggtgcctgaaggctgccggttcttgcaccaggagcgcatggaccaatgtgagagttcaacccggaggcatcaggaggcacaggaggtcaggacgttggcccacccgtccccagcccccacaacccaggaactgggacctctaacaccctccgccaccagaaccgaggagtctgggccaccagcatcctcttcgcacttgggatctaagaatttcatcccccaaccccttcctctagaagcaggaatccaggctcccagcctcatcaacccccaaccctggcagcccagttccccatctaccccctcccatcccacaatcctggcatctgggcccactcttcctacaggcctgcagctcccagggcctcatcctgcacggctcgggcatgctcttaccctgtggctcggatcggttccgtggtgtggagtatgtgtgctgtccccctccagggacccccgacccatctgggacagcagttgggtgagtgggagggaaccctccatgcccatctcaaggttcctgaggcaggggatggaagcctgggagcccaggcctgggttcttactgcctgggtcctctcctgctccctcagtgacccctccacccggtcctggcccccggggagcagagtagagggggctgaggacgaggaagaggaggaatccttcccacagccagtagatgattacttcgtggagcctccgcaggctgaagaggaagaggaaacggtcccacccccaagctcccatacacttgcagtggtcggcaaaggtgaggcagtctctgaacccctggggcctctccaccatagagggagaaagatctgggggagtcttgctggggggtgtctttgggaggggcctataggggaaaggcccaactgaggagaaaagacgagagtatctttggataaaatagaagtagaagggctaacctgccaagggagggggtggtttgggggtacttgggagtagaggggccattgggtaggtcttgaggatcatttcaggaaagcttggaagatggtgtaatggattcctaagctttgcaagaacaggcccagtccagaactacatctcccataatgccaggcagcagcggtggctaaactgggtgcatgatggtctccagtgcactctaggaaatgtggttctctaggtagaaaaggcgacctggaggtgggctgcagactgacctcctgatccctggtcttgcagtcactcccaccccgaggcccacagacggtgtggatatttactttggcatgcctggggaaatcagtgagcacgaggggttcctgagggccaagatggacctggaggagcgtaggatgcgccagattaatgaggtgataatactgggggccccaggaccccctacagtacagagctccctaaataccaggaaattcctccaggacacattgatactacctccaaaggctccctaagcccctttgaccttgagctctcaacaccaccccctaagatggccagagatccatggcccttctagaatcccactgagacgctaccaggttctctggaaactctggtctatggtactctttcactttattggtttttttttttttcttttgttgttgttgttgtgacggagtttcgctcttaacacccaggctggagtgcaatggtgcgatctcggcccactgcaacctctgcctcccgggctccagcgattccccttcctcagtctcctgagtagctgggattacaggcacccaccaccacgcccggctaatttttgtatttttagtagagacagggtttcaccatgttggccaggatggtcttgaactcccggcgggaggagatccacccgcctcggcctcccaaagtgctgggattacaggcatgagccaccacgcctggcctctctttcactttaaactccttctggatcttccctcttgggaacccaggagccagcgagacttaagggatctggggcctttaaatctttttttttttttttttttgagacagagtttcgctctgttgcccaggctagagtgcagtgacgtgatctcccactcactgcaagctccacctcctgggttcacgccattctcctgcctcagcctcccgagtagctgggactactggtacccaccacagcgcccagataattttttctgttttcagtagagacagggtttcaccatgttagccaggatggcctcaatctcctgaccttgtgatccacccacctcggcctcccaaagtgctgggattacaggcatgagccactgcgcccagccatggggcttctaaaatcttaaagaggggttgggggacttgccaggtggatcagggtggattctgggatcctgaagctcccctccctatgcaggtgatgcgtgaatgggccatggcagacaaccagtccaagaacctgcctaaagccgacagacaggccctgaatgaggtaggacagccccagtgggtcctactcatgcctgtccaccacctggagcacactcagtttcacctggctctggctgtgccctgcccatccagttccaccccttcccacctatctcagcctttcctggccccatgcctacatgcagctctgcccctcttagccgtcatctgacctgacactgctctcctccccagattggccatattcggccccatctacagacttgacttgcctctcagggctggctctggagtcctgtcccaagccagggcctctgcagatgcagccagggccttcttggtctctctttgatgcatttatgtctctatcaggccccgccccctgattctggctctgctgggccaatctcacctttattaacctgacctaccccatggagaccccactcatgttagcccccattccagctctttgtcccacccctatcgtgtcatttatacacagcctgtctccagtttgaccctgcccaggccaggagccctgcaaggctttgtccctttcaccttaacattggtcagttctgctcccagattgctcccactcaatcttacagtttacatcctcacattggctcccagtgggcctagtcccacctccactctgcctggccctgtagcccaccccttccagtccataacctttggttctgcccaggcctggacccctggaacgccccccaaccccatgtagccctgcctttccaggctctctttgaccaggctttgacccatcttctcctctcctgaccctgtgcccacccgctccccagcacttccagtccattctgcagactctggaggagcaggtgtctggtgagcgacagcgcctggtggaaacccacgccacccgcgtcatcgcccttatcaacgaccagcgccgggctgccttggagggcttcctggcagccctgcaggcagatccgcctcaggtgcggggaccgtgggggcagagagcagagggtgagaagggtcagggcgggcttgggcatcctgtgtcccttccacaggcggagcgtgtcctgttggccctgcggcgctacctgcgtgcggagcagaaggaacagaggcacacgctgcgccactaccagcatgtggccgccgtggatcccgagaaggcacagcagatgcgcttccaggtgctcacatccttccagctcccaaatgcgccgctattcctcagacgcccgcgcctcaggctcttctcttgtcccttagaccctctttctgtctcttggaccccttcctatcccctgaacaccgcttctctgccccttcccagtctctcagctcagcttcctgaccctgaaacatggaccctcacatgctgtgtctttgacccctgcttcttggcccttggattcctactccccccgccgtcgatcctatgttctgtcccttggattttcactgcctttcccagaatcgtcttttttttttttttttttttgagacaggttcttgctctgtcgcccaggcaggagagcagtgtgcgatcttggctcattgcaacttccacctcctgggttcaagcaattctcctgcctcagcctctcgagtagctgggattacaggagcctgccaccacactgggctaatttttttttttttttttgacagagtctcgctctgtttcccaggctggagtgcagtgacatgatctgggctcactgcaacctccgcctactgggttcaagctattctcctgcctcagcctcctgagtagctgggactacaggcgggtgtcaccacatctggctgatttttgtatttttagtagagacagggtttcaccatactggtcaggctggtcttgaactcgacctcaggtgatccacccttggcctcctaaagtactcggattacaggtgtgagccaccacgcccggccccagctaatttttgtatttttggtagacacgggtttcagcatgttggccaggctggtcttgaactcctgacctcaggtgatctgcctgccttggcctcccaaagtgctgggattacaggcgtgagccaccatgcccagccagaaaccccaataacttttgcaccaatctaatatttttagcagagacagggttttgccatgttgcccaggctggtctcgaactcctgacctcaggtgatct

SEQ ID NO: 818 - DNA, 6000 bp, Homo sapiens
atatttactcatttaatcctcacaacactccagtgaggcatcatcctctttttacagatgaggaaactgaggcccagaaaggttaagtcatttgccaaggtcacatggccaccaagtggcagagctaggatttgaaccctggaggtgtgactactgtttctaacctgcactgctgctgtcaggcctgcagaaggcgttgagcagggcggggtgaccgtgagcgtggctgctgggagagacagccccgggtggggtctctggagccaggagggacttgggtggggggcggtgagggggtgtctgctggaagcatgttggtgagaagtctgtgtgggcacctgggaggtgtctctgcgtctcttagtattgcagtgtgtgtgcgtgtggctgtgtgagtccgtgcgaaggtgtgtgagtaggagtgtgtgggaggctgtgagtatccgcgtgaatgtgtgtgtaaactgccatgcgtgggcgtgtgcgagtccaggtgtgcatgtggttgtgtgcacgcgagagcaggatatgtggacgagtgagggcgggtgagtgacggtgcgtgccccgggcccctcctccgcgccgtcccgtccccgcggggtcccgggggccccctggcctgggactaccactcccagcatggcccgggcgggcccgccccgtcgccgcgattggccgtggccctcgtgctcccgccccccgggaatgaatggatgggcggcctcagcgcccgcccgaccgctgggaggaccgacccggcggggacctgctgggggcaggacccggggagcaagatggccactgtcatccctggccccctgaggtggtgcgggccggcgggaggcggagaggaagcgcgggcgggtctacgcgggcctgtgtgtgtgtggcgaccgggggtggggccgaaggggtgtctggggggctgtcaccgagtgcggggctgcgcgggggtgcgagagtgtgtgactgtgggtctctgacaagaatggtgtcggatgcaccgctccctggcggggtggagggcgtggggggcctccagattctttttggggaagggagacatcatcccttccctgcaaccctcgggtctgggagagactgaaatgacccgggggtgcgggggccttggcaactggagtgaagtccacactacctttgtcttgggatgtggagtgtgtgtgtgtatcacttatttgtgttctggtttttttaagaatttttgggggataggtgtgtggacatgtgtctgtttccttttattctgcactagatatctttggatatttgggtctcccagtgtgtgtccgtgtcctttggaactatatgtcatttgtcttgtgttctgtgtttttgggtatgtagggctgcgtgtatttgtgtgtaaatttttgtgtgactatgggtggatttggctgtttctgtgttttatatgtgtgtgtgtctgtgtggatgtgtgatattttagatactggttgcgcatcgtgcatctttgtaaatgtgtgtgtgtacctgtgtgaatctgtgtgatttctttgtgttgtgtgtctggatattgtgtgtgtggtttgtgttgtgtctttggatacatgggtaagtgcctaggggcgcaagtggtttctgtagttcctgtcttttgacatgcttgtgtctttggatgcatgagggggtgtatgtgtgtgtggtgtgatgtttccatgttgtgtgtctttgtgtgggtgatgtgtttctggtgtgtgtctgtggatatgtgatgtgtctttgtgcatggttatttgtgtgatttgtctccacactatggaacttgggatatttgtctttttcagtagatatttatgtgtgcacgtgtgtgaggtttgtctgtttctcctttgtgagtattgggatttgtctctctttgtgtgtgaatcccgtgtgactgtgtgtgatttgtgttgtgtgtctgcatgtgttcaggtagggatacgtcccggtgtgtttttgtttgtttctgtatcgtgtttctactcatgagctgggggcctgtttgagtcccagtttgggggcccctgggccctgtccccttcccccagcctgggtcccggagtgggaggaggggagaggtgaggctggaggggtcggcccacccctcccgagcctgggcggcccggcagccggggaaggggtgctgggcgaccctgtgcgcctgcccttgctgacagccgcccgcccgttcgccgcccctctagcctaggcgaggacttctaccgcgaggccatcgagcactgccgcagttacaacgcgcgcctgtgcgccgagcgcagcctgcgactgcccttcctcgactcgcagaccggcgtggcccagaacaactgctacatctggatggagaagacccaccgcgggccgggtaccgccgggagggctggcgcagggcggggcggggccaggccgccccaccgccgccgccctctcacccccctctctctccaggtttggccccgggacagatttacacgtaccccgcccgctgttggaggaagaaacggagactcaacatcctggaggaccccagactcaggccctgcgagtacaagatcggtgggtgcagccgctggggcccccatcggtgtcccagcgcctgctgtgtgtcctagcactcgtccatcacctttatcgccttctagcaagtgtctgcctggctggctgtgtgtctgtctgcccatgtgcgtcccgggtgtttcccagagattccacagtttctctgagtcactgagtggcgactgcatctcctcctacatgggcccaggtgcccagttgttgttatttatttatttatttatttatttatttatttttgagacagagtttcacccaggctggcgtgcaatggcgtgatcccccaacctccacctagcggggagttgaaccttgaacccgcaacttccgcctagcaggttcaagcgattctgcctcagccttccgagtagctgggattacaggcatgcgccaccatgcccggctgattttgtatttttagtagaaacggggtttcaccatgttggtcaggctggtctggaactcctgacctcaggtgatctggccacctcggcctcccaaagtgctgggattacaggtgtgagccaccgcgcctggcctgttgttttttaaatagaggcagggtgttactatgttgcccagtctggtcttgaactcctgagctcaagggatcctcctgtctcagccctccaaagtgcagggattataggcgtgaaccaccatgccccaccaagggtcccagtggtattggagggcatagtgatatctgttaggtgtgtgtgggtgtatggagttgctgactgtgtcccttcccctgggaactgggatggatcagtctgcctgtattttttttttttttgagatggagtctggctctgtcacccaggctggagtacagtggcgcaatctcagctcactgcaacctccgcctagtgggttcaagcgattctcctgtctcagcctcctgagtagctgggattacagatgcacactgacatgcccggctaatttttttgtatttttagtagagacagggtttcaccatgttggccaggctggtctcgaactcctgacctcaggtgatccacctgccttggcctcccagagtgctgggattacaggcttgagtcaccatgcccggccatctgcctgtatttttttctgtgggtgcctgagggtgtctgcctctgtatctccccaagggcgtctggatgtctcagtgtctggttggagctctttcctctcttaggtgtatcttcccaggtgtctccaagtgtcttagaaggcttgtgtcttgtgtatgtctggtctgtcagggtgtccggctcctcccgagtgtgtctgggtgtgttaggcggtgcggccgtctctttctgtgggtgtgtgggtgcctcggagtgtctgggagaatcttcctgatggtgtctggcgtatcaggtgtatttctgcacgtgtgtgccagtccatcagaggatctggacttacccttgaatgtgtttaggaatatcgggatcctcggggtcagtttctcttcctgagtccgagggtctgtgtgtacccaggagcgtggcagtgcccacctggctgtgtctcttcctgtctgtctcctgtgtgtgtttgtgtgtatctagctgagtgattctccctgagtatgtcggtatctccccgctatgtgtccaagcatctcatctggctgtgtcttccccagggtctaggtgtatctggagggctaattgtttctttctttttttcttttttctttttctttttcttttttttttttgagacggagtcttgctctgtcgcccaggctggagtgcagtggcgcgatctcactgcaagctccgcctcctgggttcacgccattctcctgcctcagcctcccgagtagctgggactacaggcgcctgccactacgcccagctaattttttgtatttttagtagagacggggtttcaccgtgttagccaggatggtctcgatctcctgacctcatgatctgcccgcctcggcctcccaaagtgctgggattacaggcgtgagccaccgcacccggcctctttctttctttctctttctttctttctttctctttctttctctctctctctttttcttttctttccttccttcctttctttctttctttccttccttctttctttctttctctctctttctttttcttttctttccctccttccttccttcttcctttctttttttttttcacccagtttggagtgcagtggcacgatctcggctcactgcaacctccgcatcccgggttcaagtgattctctgcctcaacctcctgagtagctgggattacaggcatgtgcccctacacccggctaatttttgtatttttttttttttaagtagagatgaggttttaccatgttggccaggctggtctcaaactcctgacctcaagtgatccacccgcctcagcctcctaaagtgttgggattacaggtgtgagccaacgcgcctggccagctaattgtctctgagcatttctgagtgtacccatgggtccagctatgtctcctccctgtgtctgggtgtctccaaggatctggctatacctctttgagtctctaggctgtatctgagagtgtggcttatgcctgtaattccagcactttggaaggccgaggcagaggatcgcttgaactcaggagtttgagaccagcctgattaacacgatgaaaccccatctctaccaaaaatacaaaaattagcccagtgtggtagcatgccagctactctgcctgtagtcccagctactcaggaggctgaggtgggaggatcacttgagcctgggagtcgcagtgagctgagattgcgccactgcactccaacctgggtgacagagcgagaccctgtctcaaaaaaaaaagaaaaaagacagcatggctgggcctcttccttcccgcatctgtctcagacgatctgtctggatgtcccctgcgggtgtccctgtgtctcctctgcgagtgtctggatctgtccatatttgtctgggtatgtttgagagtcgctgtgtcttccctgagtaggtctgggtgtgcctgatggcctaactgtgtctttttctgaggctttctggtgtatccaaagttctgaccgtgtctcctgctgtgcatcccagggcatctgagggcgtgactgggtctccccagagtctgggcctccctcctagggcatgtggttaaatccttgcctctgcagcctcttccctcctgcaaagagcatggtccccccacctgcatagtttgaggagtcctccggggtcaacttccccatctgacccccccatggccctgtccccagactgtgaagcacccctgaagaaggagggtggcctcccggaagggccggtcctcgaggctctactgtgtgcagagacgggggagaagaagattgagctgaaggaggaggagaccattatg

SEQ ID NO: 819 - DNA, 6000 bp, Homo sapiens
cgggaatgggggtgggaggtggagggtgggagttgggagaggaaggggggcagggacttagaggcaagcgcctacacgtgtggcttcgccgtgagcagggtgccgggagcgggtgtgtggggctcgggtccgtgtgaggtggtgtatgatggtgacacccctctgctgccctctcaccctaagtggcacacacagacagctgtctctcctgtgaggggacatccgcaaaatggctgggaacggggctcttgtgcaggttggtggatctacaggcgatggggcccctcaccctgaccctggcccagacccctgggaggaggtgtgctacagccgtgagcaggggcccagctacagtaagcctggactgggagggccctacccctctgtgcccttcccttccaaaaggtctctgtgggggtgaaggtggggactccctggctcctgaaagaatgtgagtcaaatcccctggggagaaggagctgcagggtgccgccctcggaagttccgactgcctgagttccaaaaccagcttgagccacgaatgttccctgccgtgagcctcagttttgccatctgtgtatgggggcttctaacagcccttaccacccgatgggactgtcgtggggctaaggccatctttgtaaagcagttagcacagagactgacactgaccaaatgtagtgattattattagtagtatcaatattgatttatgaaattgatttctactgtgggccagctcccacacagggcattgggggatggggcaggaggattgtttgggccagggagaggactgggagttcaagtgtgtaggagagtatgtgggagtggtgtgtgcaggtggttagggcagaaggaaagaaaggagagcccgctgcaagtgtcagcctgcgtctgtgggtagatatcctgctggtgggccgggcatggtggcttatgcctgtaatctcagcactttgggagggcagggtgggcagatcacttgagcttaggagtttgagactagcctggccaacacagggacaccctgtttttacaaaaatacaaaaattagccgggtgcggtggcacaggcctgtagtcccagctacttgggggtttgaggtgggaggatcgcttgagcctgggaggtggaggctgcagcgagctgtgttcatgccatggcactccagcctgggccatcgagtgagacgctgtccaaaaaaaaaaaagagaaaaagagaaagaggaaagaaagagaagaaaagaaagaaagaaagaaaggaaggaaggaaggaaggaaggaaggaaggaaggaaggaagagaaataaaagaagaaaagaaaagaaagaaaaatagaaattctgctggtagaggaggactgttaggaaggtctgcactcagtgtctacactcgggcttctcttaatcaaatcgacatgagagtttggggtggggcaggagtgagtctgcgtgtctgaggctagcggtgtgggaatcaagtgtaagagggtgtgttacgggacctgtgagctaatgggaggtgagagaggaaggtggggtcacagctcaccgtgggtaaggtgtgaggtggccactatagggccctggaggccagagtgatcgtaggggtgtcagtgcccctcacttaatccccttgtcaccactccaggccatatgtgaatcagagacctacctcctgttccaggagaggggccggccaagaccttacctggcttagatgggcgagtttgtggaaagggtctaagactagaggagtgtgtgtgtgtgtgtgtgtgtgtgtgtgtgtgtgtagaagtgaccgtgagtgtaggaggccttgactggatctctctcttggggggatttcaagtgacaaaaatggtgaaggctagcgggccacttctgtcggctggggcgccccctggtggatgagggcgtttgtgggcgtgttaattacagcagccgcccaaatttgaatgctggctctacaggggtccgggtggaagaggggaaggggaaagggggagaaggggtgggaaggggaaagggggaggaggggtgagacgggaggggggacggggtggtggtgttgcagagagactgggtcagtttgtgactcagtgggtctgctcactccctggggatctcttcgggtggagtcagtgtgggtgacagtgggagagagaaggaggtcaggactacttggggagggccgtcaggggtgcctgcctccttccttcagtcttaccttcaaagagccgccagggcatgcgggcatgtgaggttaccttcctgtgcctcagattcctcacctggaaaatgcagataataaaagcatcccggggtgaactgtgcccagcacatgatgggtgcatttactcattcaacaaatatctactgagcatctatttttttttttttttttggagacagggtcttgctcagttgtccaggctggagtgtagtggtgtgatcatagctcactgcagcttcgatctcctgggttcaaccaatcctcctgactcagcctcctgagtagctgggaccataggcatgtgccaccatgcccagctatttattttttttttagtagagaccaggtctcgctatgttgcccaggctgttctcctgagctcaagcggtcctctcatctcagcctcccagattgctgggattacaggcatgagtcacggcgccctgcttacttagttttttgtttgtttgtttgtttgtttgtttgcttttagagacagagtctcgctctgccacccaggctggagtgcagtggtgagaccacagctcactgcagcctcagcctcccaggttcaagctatcctcccactttagccttgcaagtagctgggactacactgctgcgccatcatgcccagctaattttaatttttttttgtagacacaggggtctggatatgttgcccaggttggtctcaaactcctgggctcaagcagtgctctcatctaggcctcccgaagtactgggattgcagactggagccatcgcacctggccgcattattctttctttcttattatttatttatttatttttgagagggagtctcactcttgttgcccaggctggagtgcaatggcacgatctcagctcactgcaacctccacctcctgagttcaagtgattctcctgcctcagcctcctgagtgggggagtataagcatgcgccaccatgcccggctaattttgtatttttagtagagactactaccatgttggccaggctggtctcgaactcccatcctcaggtgatccacctgcctgggcctcccaaagtgccgggattacaggtgtgagccactgcgcctggcctgccagtcacctcttaaaatgctttacctatatttactcatttaatcctcacaacactccagtgaggcatcatcctctttttacagatgaggaaactgaggcccagaaaggttaagtcatttgccaaggtcacatggccaccaagtggcagagctaggatttgaaccctggaggtgtgactactgtttctaacctgcactgctgctgtcaggcctgcagaaggcgttgagcagggcggggtgaccgtgagcgtggctgctgggagagacagccccgggtggggtctctggagccaggagggacttgggtggggggcggtgagggggtgtctgctggaagcatgttggtgagaagtctgtgtgggcacctgggaggtgtctctgcgtctcttagtattgcagtgtgtgtgcgtgtggctgtgtgagtccgtgcgaaggtgtgtgagtaggagtgtgtgggaggctgtgagtatccgcgtgaatgtgtgtgtaaactgccatgcgtgggcgtgtgcgagtccaggtgtgcatgtggttgtgtgcacgcgagagcaggatatgtggacgagtgagggcgggtgagtgacggtgcgtgccccgggcccctcctccgcgccgtcccgtccccgcggggtcccgggggccccctggcctgggactaccactcccagcatggcccgggcgggcccgccccgtcgccgcgattggccgtggccctcgtgctcccgccccccgggaatgaatggatgggcggcctcagcgcccgcccgaccgctgggaggaccgacccggcggggacctgctgggggcaggacccggggagcaagatggccactgtcatccctggccccctgaggtggtgcgggccggcgggaggcggagaggaagcgcgggcgggtctacgcgggcctgtgtgtgtgtggcgaccgggggtggggccgaaggggtgtctggggggctgtcaccgagtgcggggctgcgcgggggtgcgagagtgtgtgactgtgggtctctgacaagaatggtgtcggatgcaccgctccctggcggggtggagggcgtggggggcctccagattctttttggggaagggagacatcatcccttccctgcaaccctcgggtctgggagagactgaaatgacccgggggtgcgggggccttggcaactggagtgaagtccacactacctttgtcttgggatgtggagtgtgtgtgtgtatcacttatttgtgttctggtttttttaagaatttttgggggataggtgtgtggacatgtgtctgtttccttttattctgcactagatatctttggatatttgggtctcccagtgtgtgtccgtgtcctttggaactatatgtcatttgtcttgtgttctgtgtttttgggtatgtagggctgcgtgtatttgtgtgtaaatttttgtgtgactatgggtggatttggctgtttctgtgttttatatgtgtgtgtgtctgtgtggatgtgtgatattttagatactggttgcgcatcgtgcatctttgtaaatgtgtgtgtgtacctgtgtgaatctgtgtgatttctttgtgttgtgtgtctggatattgtgtgtgtggtttgtgttgtgtctttggatacatgggtaagtgcctaggggcgcaagtggtttctgtagttcctgtcttttgacatgcttgtgtctttggatgcatgagggggtgtatgtgtgtgtggtgtgatgtttccatgttgtgtgtctttgtgtgggtgatgtgtttctggtgtgtgtctgtggatatgtgatgtgtctttgtgcatggttatttgtgtgatttgtctccacactatggaacttgggatatttgtctttttcagtagatatttatgtgtgcacgtgtgtgaggtttgtctgtttctcctttgtgagtattgggatttgtctctctttgtgtgtgaatcccgtgtgactgtgtgtgatttgtgttgtgtgtctgcatgtgttcaggtagggatacgtcccggtgtgtttttgtttgtttctgtatcgtgtttctactcatgagctgggggcctgtttgagtcccagtttgggggcccctgggccctgtccccttcccccagcctgggtcccggagtgggaggaggggagaggtgaggctggaggggtcggcccacccctcccgagcctgggcggcccggcagccggggaaggggtgctgggcgaccctgtgcgcctgcccttgctgacagccgcccgcccgttcgccgcccctctagcctaggcgaggacttctaccgcgaggccatcgagcactgccgcagttacaacgcgcgcctgtgcgccgagcgcagcctgcgactgcccttcctcgactcgcagaccggcgtggcccagaacaactgctacatctggatggagaagacccaccgcgggccgggtaccgccgggagggctggcgcagggcggggcggggccaggccgccccaccgccgccgccctctcacccccctctctctccaggtttggccccgggacagatttacacgtaccccgcccgctgttggaggaagaaacggagactcaacatcctggaggaccccagactcaggccctgcgagtacaagatcggtgggtgcagccgctggggcccccatcggtgtcccagcgcctgctgtgtgtcctagca

SEQ ID NO: 820 - DNA, 6000 bp, Homo sapiens
ctccgctcatcaaagcgcctttctctctttccccttctttctctgaggaccccggccctcgcggccgcagggtgggagctgagacgtcgggggtccccagttccatccccgctgcctcccctttttcctcccgggatcccgggaactggaagccccgaacccgccgtcagtctggaccgcggcatccctccctctccccgcgcatacacatcaaacgggagcatctctgatccctttggggaccggctgcccaggagggggtgccgggagcgccctcggtctccggggattccctccctttctccctggccgcggtcctccgagcgttcgcctcttcccgggcccggtggctgggaatccggaagcctgggtccgagcctggcccctcctgaccctctcctctccttgccatccctcgcgctctccacacctccccttccccctctccatctcgctcttgcttcctcttcgggatcccggactccacgtcccagcgctccccaccccccgttcccaggcggtgacagcgggctccaagtgacaggcactcggccgctcccgccctccctccccgcaggcgagcgaggcgctcccctccccctcctcccgggcctggtggaggaggcggagggcgagcgcccgcggcgtcgcacaaaggggccggggcgacctcccccacccttcccccaaccccgtgcgctggctgccttgaccttgaacatcgagggctgggggcgggggtggggggtggggggagagagggagagagggagcgcccccctaccccacccacgagaagggatgcgcctgctggctggaccagaggccgccagttgcttctggtttctggcgggaatgggggtgggaggtggagggtgggagttgggagaggaaggggggcagggacttagaggcaagcgcctacacgtgtggcttcgccgtgagcagggtgccgggagcgggtgtgtggggctcgggtccgtgtgaggtggtgtatgatggtgacacccctctgctgccctctcaccctaagtggcacacacagacagctgtctctcctgtgaggggacatccgcaaaatggctgggaacggggctcttgtgcaggttggtggatctacaggcgatggggcccctcaccctgaccctggcccagacccctgggaggaggtgtgctacagccgtgagcaggggcccagctacagtaagcctggactgggagggccctacccctctgtgcccttcccttccaaaaggtctctgtgggggtgaaggtggggactccctggctcctgaaagaatgtgagtcaaatcccctggggagaaggagctgcagggtgccgccctcggaagttccgactgcctgagttccaaaaccagcttgagccacgaatgttccctgccgtgagcctcagttttgccatctgtgtatgggggcttctaacagcccttaccacccgatgggactgtcgtggggctaaggccatctttgtaaagcagttagcacagagactgacactgaccaaatgtagtgattattattagtagtatcaatattgatttatgaaattgatttctactgtgggccagctcccacacagggcattgggggatggggcaggaggattgtttgggccagggagaggactgggagttcaagtgtgtaggagagtatgtgggagtggtgtgtgcaggtggttagggcagaaggaaagaaaggagagcccgctgcaagtgtcagcctgcgtctgtgggtagatatcctgctggtgggccgggcatggtggcttatgcctgtaatctcagcactttgggagggcagggtgggcagatcacttgagcttaggagtttgagactagcctggccaacacagggacaccctgtttttacaaaaatacaaaaattagccgggtgcggtggcacaggcctgtagtcccagctacttgggggtttgaggtgggaggatcgcttgagcctgggaggtggaggctgcagcgagctgtgttcatgccatggcactccagcctgggccatcgagtgagacgctgtccaaaaaaaaaaaagagaaaaagagaaagaggaaagaaagagaagaaaagaaagaaagaaagaaaggaaggaaggaaggaaggaaggaaggaaggaaggaaggaagagaaataaaagaagaaaagaaaagaaagaaaaatagaaattctgctggtagaggaggactgttaggaaggtctgcactcagtgtctacactcgggcttctcttaatcaaatcgacatgagagtttggggtggggcaggagtgagtctgcgtgtctgaggctagcggtgtgggaatcaagtgtaagagggtgtgttacgggacctgtgagctaatgggaggtgagagaggaaggtggggtcacagctcaccgtgggtaaggtgtgaggtggccactatagggccctggaggccagagtgatcgtaggggtgtcagtgcccctcacttaatccccttgtcaccactccaggccatatgtgaatcagagacctacctcctgttccaggagaggggccggccaagaccttacctggcttagatgggcgagtttgtggaaagggtctaagactagaggagtgtgtgtgtgtgtgtgtgtgtgtgtgtgtgtgtgtagaagtgaccgtgagtgtaggaggccttgactggatctctctcttggggggatttcaagtgacaaaaatggtgaaggctagcgggccacttctgtcggctggggcgccccctggtggatgagggcgtttgtgggcgtgttaattacagcagccgcccaaatttgaatgctggctctacaggggtccgggtggaagaggggaaggggaaagggggagaaggggtgggaaggggaaagggggaggaggggtgagacgggaggggggacggggtggtggtgttgcagagagactgggtcagtttgtgactcagtgggtctgctcactccctggggatctcttcgggtggagtcagtgtgggtgacagtgggagagagaaggaggtcaggactacttggggagggccgtcaggggtgcctgcctccttccttcagtcttaccttcaaagagccgccagggcatgcgggcatgtgaggttaccttcctgtgcctcagattcctcacctggaaaatgcagataataaaagcatcccggggtgaactgtgcccagcacatgatgggtgcatttactcattcaacaaatatctactgagcatctatttttttttttttttttggagacagggtcttgctcagttgtccaggctggagtgtagtggtgtgatcatagctcactgcagcttcgatctcctgggttcaaccaatcctcctgactcagcctcctgagtagctgggaccataggcatgtgccaccatgcccagctatttattttttttttagtagagaccaggtctcgctatgttgcccaggctgttctcctgagctcaagcggtcctctcatctcagcctcccagattgctgggattacaggcatgagtcacggcgccctgcttacttagttttttgtttgtttgtttgtttgtttgtttgcttttagagacagagtctcgctctgccacccaggctggagtgcagtggtgagaccacagctcactgcagcctcagcctcccaggttcaagctatcctcccactttagccttgcaagtagctgggactacactgctgcgccatcatgcccagctaattttaatttttttttgtagacacaggggtctggatatgttgcccaggttggtctcaaactcctgggctcaagcagtgctctcatctaggcctcccgaagtactgggattgcagactggagccatcgcacctggccgcattattctttctttcttattatttatttatttatttttgagagggagtctcactcttgttgcccaggctggagtgcaatggcacgatctcagctcactgcaacctccacctcctgagttcaagtgattctcctgcctcagcctcctgagtgggggagtataagcatgcgccaccatgcccggctaattttgtatttttagtagagactactaccatgttggccaggctggtctcgaactcccatcctcaggtgatccacctgcctgggcctcccaaagtgccgggattacaggtgtgagccactgcgcctggcctgccagtcacctcttaaaatgctttacctatatttactcatttaatcctcacaacactccagtgaggcatcatcctctttttacagatgaggaaactgaggcccagaaaggttaagtcatttgccaaggtcacatggccaccaagtggcagagctaggatttgaaccctggaggtgtgactactgtttctaacctgcactgctgctgtcaggcctgcagaaggcgttgagcagggcggggtgaccgtgagcgtggctgctgggagagacagccccgggtggggtctctggagccaggagggacttgggtggggggcggtgagggggtgtctgctggaagcatgttggtgagaagtctgtgtgggcacctgggaggtgtctctgcgtctcttagtattgcagtgtgtgtgcgtgtggctgtgtgagtccgtgcgaaggtgtgtgagtaggagtgtgtgggaggctgtgagtatccgcgtgaatgtgtgtgtaaactgccatgcgtgggcgtgtgcgagtccaggtgtgcatgtggttgtgtgcacgcgagagcaggatatgtggacgagtgagggcgggtgagtgacggtgcgtgccccgggcccctcctccgcgccgtcccgtccccgcggggtcccgggggccccctggcctgggactaccactcccagcatggcccgggcgggcccgccccgtcgccgcgattggccgtggccctcgtgctcccgccccccgggaatgaatggatgggcggcctcagcgcccgcccgaccgctgggaggaccgacccggcggggacctgctgggggcaggacccggggagcaagatggccactgtcatccctggccccctgaggtggtgcgggccggcgggaggcggagaggaagcgcgggcgggtctacgcgggcctgtgtgtgtgtggcgaccgggggtggggccgaaggggtgtctggggggctgtcaccgagtgcggggctgcgcgggggtgcgagagtgtgtgactgtgggtctctgacaagaatggtgtcggatgcaccgctccctggcggggtggagggcgtggggggcctccagattctttttggggaagggagacatcatcccttccctgcaaccctcgggtctgggagagactgaaatgacccgggggtgcgggggccttggcaactggagtgaagtccacactacctttgtcttgggatgtggagtgtgtgtgtgtatcacttatttgtgttctggtttttttaagaatttttgggggataggtgtgtggacatgtgtctgtttccttttattctgcactagatatctttggatatttgggtctcccagtgtgtgtccgtgtcctttggaactatatgtcatttgtcttgtgttctgtgtttttgggtatgtagggctgcgtgtatttgtgtgtaaatttttgtgtgactatgggtggatttggctgtttctgtgttttatatgtgtgtgtgtctgtgtggatgtgtgatattttagatactggttgcgcatcgtgcatctttgtaaatgtgtgtgtgtacctgtgtgaatctgtgtgatttctttgtgttgtgtgtctggatattgtgtgtgtggtttgtgttgtgtctttggatacatgggtaagtgcctaggggcgcaagtggtttctgtagttcctgtcttttgacatgcttgtgtctttggatgcatgagggggtgtatgtgtgtgtggtgtgatgtttccatgttgtgtgtctttgtgtgggtgatgtgtttctggtgtgtgtctgtggatatgtgatgtgtctttgtgcatggttatttgtgtgatttgt

SEQ ID NO: 821 - DNA, 6000 bp, Homo sapiens
gccaggctggtcttgaactcctgacctcaggtgatccgcctgcctccgcctcccaaagtgctggggttacaggcgtgagccaccgcactgggcctgggcaggaaacttctgaaaggtacatctgaacatcccaagggccacttagggaaggcttcctctgaattgtagcgggcaggagaggggagaagtggctgttagcagttgcatttccttcagaggccaaagctggacccagtgggtatggggcagagttttctgtgattccaggtccaccggaaccttggattagaggcgtgtgtgtgtgagagagagaaggagagggagataccctggtgaccaggtcctgggcagggtctgaggctcagggttgggggcccagtgtctctgcgggcagccccatggcctgcaggatgtctcccggatctgaggcttccgaagcagcctctgctggacaaagactggggccacagcgccctctggtgggcaaacccttgggttccagggttaggagaagtgaccacaggttgagacttttagggtttgttcctcaaagcttgagtgatgggcattaagaagatcaggcattaaggccccaagaggtcagagcaggaaccttgccctgtgtctgggtagatcagggggtcaggactcaaaaggattcacatgcaggccgggtgtcctctcctccaggaaggcatccctgactgtcaggctaggccaggagacagccgcctctgggctcccacagtgccctgtgtctcccccgctccagccccgacccctctgcctgtgccccccaatccctgcccggacccctctgcctgtgtcctccttgtcccagccccgacccctctgcctgtgccccccaatcccggcccggacccctctgcctgtgtcccccttgtcccagctccgacccctccgcctgtgctccccatcccacctggacccctctgtctgtgctccccatcccacctgggcccctctgcctgagtcccccttgtcccaaacccaacccctctgcctgtgctccccaatcctggcccagacccctctgcctgtgtcccccttgtcccagccccgacccctctgcctgtgtcccctaaccccacctggacccctctggacatcactgtctggtgatgagtctgttactcttctggactccaagcttaaggcaaagtctggggccatcttatttgctgctgtgtccccagcacatccacagagggatggagaccatcatcgttctctagaaatgagtggatgtgacatttatttatttatttattttgggatggagtctcactctgttgctcagactagagtgcagtggtgccatctcagctcactgcagcctccacttcctgagttcaagtgattctcctgcctcagcctccctaatagctgggactacaggcgcccgccaccacgcccggctaatttttgtatttttagtagagacagggttacaccatgttggccaggctggtctcaaactcctgacctcaggtgatccaccctcctcggcctcccaaagtgttgggattataggcatgaggcaccgcgcccggccaagtgtgccttttaatgtatcccttctctctgccttgaagccttaggtccagatgctgtgctgggcacttttccttaaaaaaggccccaaatttgcccctcacttcaggttgtccaagtgtccatatggggtagggcagagcctggatcccacctgattctcttcatgctgggtgcatgcttttggacactggggagaggcatggagcatgactaattgatacatttattttattttattattttattttgagatggagttttttgctcttttgcccaggctggagtgaagtggcacaatctcgactcactgcaacctccgccccctgggttcaagtgattctcttgcctcagcctcttgagtggctgggattacaggcacgtgccaccacacctggcttatttttgtatttttagtagagctggggtttcactgtgttggccagttggtccctaactcttaacttcaggtgatccacccgcctcgggctcccaaagtgctaggattacaaacatgagcaaactgcacctggccaatacatttatttattcataattttggctgggtgttgtggctcgcgcctgtaaccccagcactttgggaggctgaggcaggaggctaggggctgcaattttagctagggttgtgtctgaggaggtggcatttaaccggagacctgaatgaagtgcgggatggagtgaggcaggtgtctgtgggaggagcactctaggcagaggtgcaaaggtcctgtggctggagtgggattggaatgttccagaaatagggaggaagctagtggggctggagtgaagttagccaagggaaggaaggaggtgaaagaggccagaaatgtgatgagggttgaggagggatggaggagggcgtagcgagggctttgcattttattcaaattatgaaagaagccgctggaggtttgagccagagagtggttggatgcagatatatgcttaattaattaatcattattattattagttgagatggaatctctcttttgcccaggctggagtgcagcagtgcgatcttggctcgctgcaacctctgtctctcaggttcaagcgattctcctgcctcagccttccgagtagctgggattacaggcatgcaccaccacagctggctaatttttgtatttttagtagagatggggtttcaccatgttggccaggctggtctcaaactcctgacctcaagtgatccacccaccttggcctcccaaagtgttgggattacaggcatgagccactgtgctcagcacagagatatgcttcagatagcctgctctggctgtgtggggagagcagacttgaggggcaggagcccagtgatgaagctgctaccatagtccaggcagcagacaatgatggacaggactggggtgcaggccatgaagtgcagagagtgggtggaatctggatatgttttgaatgtagagacaacagaatttgccgatgggcttggagtgtgtgtgcgaaaaagaagaggagaaggagagttcaggatgattgattgcacttagaacaaaatccattttctttataatgacctacaaggtactacatgagccgggtccttgctctctccccaggctgtctccccctgctcactctgctccagtcacactcaattgcttcctgatctttgaacatgccacacttgttcccagcccagggcatttgcacttggtgatcctgtgcctagacatgcttcttagtgcatgctggcaacttctagaccttagctcaaatgtcatctcttcagagaagccacttcttcactccttcaaatcaatctgttttctttttttaaaattatcttttatttgcttcttttttctttctggaatctgtgttctgctgaatctattttattttcttcttttctttctttttctttctttctcttgcttgcttgcttgctttcttgcttttgacggagactctctctgttgtccaggctggagctcactactgcctccaactttcaggctcaagtgatcttcttgcctcagcctcctgagtagctgagactccagacatgcatcaccacacccagataatttttaaactttttgcagagatgggatctcactatgttgcccaggctggtcttgtgctatggggctcaagcaatcctcctgcctcaggctcccaaagtgctgggattataggtgtgtgcctggactcttctctttttctttttctttctttctctctctctctctctcttttttttttttttttttttgagacagggtctcgctctgtcacccaggctggaatgcagtggtacaatctcggctcactgcaatctctgcctcccaggctcaagtgatcctcccacctcagcttcctgagtagctgggactacaggcatgcaccaccacacccagctaattttttgtattttgggtagagacggggtttcgccatgttgcccatattggtcttgaactcctaagctcagatgatccacctgccttggcctcccaaagtgatgggattacaggcctcccaaagtgatgagcaaccacgactggccccattttcttttctttatagcacctttcactgtctgaaatgattttatctatttattttcttattatctgtctttctccactagaatgtcagctccttgagagcggcaactttgttttggtcattgctgtatccccagtgcctagaagagttcctggaacacagcaggcactcagtaaatgaacaaaggcactgattaacccctgtgcttgttcacaggctgtccgacatagaagagacacccaaataggcctagacaagaatacacgacagaccctagggtcatccacataccctggggacatctagaagctagggaccacctgcttccgcgcccgcggtgcctggagggtggagatcccgagttggagaccgagcactcccagggagggaggaaagatgctctggggggagccccgcccctccctgtatccccagcagccaatgggagcgcggtcctcctgacgccccctgggacgtgtagtccgggcaggggcgccctcgggcgccgccgcgcgcccctagactccacgtcccgtcgtgcgctgggaggcgcggggattggctgagccccgcccccggcccgccccgctccgctcgcgccgcagccccaagaatgaatgaaatcgtagcgcgctgggcggcagagcgggcggcgcaggccgggctgggcccgcgcgcggcggcagcggcgccccgggccggaggcggcccagccgagcgggccatggccaccgccattcagaacccgctcaagtcgtgagtgtccctgccgtccccgccccctgtccagacccccccaccaggagcccttcccccgcccgccctggggctgaggagggggacgcagcgcgcggaccgtagttgaatgggggcccccagcgcgaacccttgccccgggggtccccaccccctgtcgccccctggggttgggggcgggagcccctccagggtcgcgggggcgcctcttctttgtcgctgtcagtgaaggaatgcggcgcgggctgggggtggcggaggccgtttccccacccagagtgggggtaggggtttccctctcctccatctctccctcagggtctccggaggtgccgggcctgccccggccggggctgaaagctcgaacacctaagtccggacctcggtctccagggtttccatcacccgctctccgctcatcaaagcgcctttctctctttccccttctttctctgaggaccccggccctcgcggccgcagggtgggagctgagacgtcgggggtccccagttccatccccgctgcctcccctttttcctcccgggatcccgggaactggaagccccgaacccgccgtcagtctggaccgcggcatccctccctctccccgcgcatacacatcaaacgggagcatctctgatccctttggggaccggctgcccaggagggggtgccgggagcgccctcggtctccggggattccctccctttctccctggccgcggtcctccgagcgttcgcctcttcccgggcccggtggctgggaatccggaagcctgggtccgagcctggcccctcctgaccctctcctctccttgccatccctcgcgctctccacacctccccttccccctctccatctcgctcttgcttcctcttcgggatcccggactccacgtcccagcgctccccaccccccgttcccaggcggtgacagcgggctccaagtgacaggcactcggccgctcccgccctccctccccgcaggcgagcgaggcgctcccctccccctcctcccgggcctggtggaggaggcggagggcgagcgcccgcggcgtcgcacaaaggggccggggcgacctcccccacccttcccccaacccc

SEQ ID NO: 822 - DNA, 6000 bp, Homo sapiens
gagaccagcctggccaacatggtgaaaccccatctctactaaaaatacaaaaatcagccaagagtggtggtgcatgcttgtaatcccagctactaagtaggccaaggcaagagaatcgcttgaacccaggaggcagagctgagattgagccactgcactccagcctgggcaacagagtgagactccatctcaaaagaaaaaaaaaaaagaacccatcaaggacgtagatctgttatcagaaatgagtcaggacttcgggctgataacagagttaatgtgcaaacccttggccaatcagcaaaggcacattgggacttgcagtatgttggctacatgtgaagttacatccagccacagtgaagcaatcactaaaaaaaaatcaaaaataaaacaaaaaacaataactcaaaatatcactaacaaaatggcactgacagaacctggggttttaaatccctacaaacacttagtgtgcgattagttacttttcaactaagttatatcctgaaagaggcctaaaatcagaaaaatcagtctgtcccaacccactttctcattttcacggcaaatgaacttatttttcttttcttttcttttctttttttgagacggaatcttggagtcttgctctgttgcccaggctggagtgcagtggcgcgatcttggctcactgcaagctccacctcccaggttcatgccattctcctgcctcagcctcctgagtagctgggactacaggtgcccgccaccacgcctggctaattttttgtatttttagtagagacggggtttcaccgtattagccaggatggtctcgatctcctgacctcgtgatccgcccgcctcggcctcccaaagtgctgggattacaggtgtaagccaccgcgcctggccttttttttcttttttgagaccgagtctcgctctgtcacccagtcttgagtgcagaggtgcgatcttaactcactgcagcctccgcctcccaggttcaagtgattctcttgcctcatcctccccagtagctgggactacaggcaggcgccacgctgtcgcattggccaggctggtctcaaactcctgacctcaggtgatccgcccgccttgttacccaggctggagtgcagtggtgtgatcttgggtcactgtagcctccacctccagggctcaggtgatcctcctgccctagcctcccgagtagctgggactacaggcacatgccaccacaatggatcaaaggaaactttgtggctactaactgctcaggagtgacagtggcttcatgtggcagaaggagcagtgactgtttctaggggcaccaggaaacttgattggggaggtggttacacaggtgactatatgtgtcaaaactcattgaactattccattaaaatctgaaccctgagcaggggctcacacctataatcccagcactttgggaggccaaagcaggtggatcacttgagtccaggagtttgagaacagcctggacaacatggcgaaaccccatcagtacaaaataatacaaaaattaggcaggtgtggtggcacactcctgtagtcccagccactcaggaggatgaggtgggaggatcacttgaatctgggaggcagaggttgcagtaagttgagatcataccactgcactccagcctgggcgacagaacaagaccctgtctcaaaacaacaacaacaacaacaaaatctgaaccttttatttaatgggaaaaatacctcaatgaaataacaattgggaaataaacacattagttatttaaaaccgaaaaaagacacacaaatattaccgtggccaggcctgtaatcacaacattttaggagaccaaggtgggaggatcgcttgagcccaggagtttgagaccagcctgggcaacatggtgagacctcctctctaggaaaaaaaaaaaaaaaaaaaaaaaagctgggcatggtggcgtgcaactgtagtccaagctactccagaggcgggaggattcccaagcccaggaggccaaggctgcagtaagccatgatcacagagagagccagaccctgtctcaaaaaaaaaaaaaaaaaaaattattgcacaactaatgagaaagataacacaattgaataagaactcatcaagggctggatgcagtggctcatgcctgtaatcccagcattttgggaggctgaggtgggtggatcacttgagggcaggagttcaagaccagcctggccaacatggtgaaaccctgtctctactaaaaatacaaaaattagccatgagtggtggcacatgcttgtaatcccagctactcaggaggctgaggcaggagaatcacttgaacctgggaagcagaggttgcagtgagtcgagatcgtgccactgcactccagcctgggtgacagagcaaaactctgtctcaaaaacaaacaaacaaacaacaacaacaacaacaaaaacccatcaaggatgcaatcaaggatgcagatctgttaccagaaaggagtcaggacttcaggctaataatagagtgaatggaaagctttggccagtcagcaaaggcacgttgggacttgcagcatgttggctgcatgtgaagttacatccagccacagtgaagcgatcactaaaaagttgagttcctgggaaacacggtacacagcatgaggcgtcagtaatgtgaggagtgtgttctttagaatggtcaataatgttagaatgatggagttcaccattcaagggaacattctcgggaactaactgagctgcgctggtggtgtgatcaccggacaccctgctgtcctctctgtccgtgcccatgacatgtccttggcacagacacccctgtggagcccagggcctggccgcttccttggctgagaagctgtccctgtctaggcctcagttttgtcttctgcagaatgggggtgcttgcagctcccactgaaatgcagctgcaagcctccctctctgagctcacgtccctaggaactggtcccccaccttggtgccttggagtgtgtggggagggggcaagaggctgggggcctgggacaaagagggtggaggatggttctgggtctggtgtctccacccaaactttccactgccagcctgcctctgcccaggcctctcagcagcctgctgggtggggcaggagtgcaggagttgggtggggagtggaaaaggtccaggagggctgctgcattgctaggagtggtttatttttatttatttatttgtttgtttgtttatttatttttgagatggagtcttgctctgttgcccaggctggagtgcagtggcgcgatctcggctcactgcaagctctgcctcccgggttcatgccattctcctgcctcagcctcccgagtagctgggactacaggtgcccgccaccatgcccggctaattttgttttgtatttttagtagagacggggtttcaccgtgttagccagtatggtctcgatctcctgacctcgtgatccacccgcgtcggcctcccaaagtgctgggattacaggctttatttttattttttgagacagagtctagctctgtcgcccaggctgcagtgcagtggtgtgatctcggctcactacaacgtccgcctccccagctcaagcaattctcctgcctcagcctcccaggtagctgggattacaggtgtccaccaccacacctggccaattttttgtattttctatagagaaggggtttcaccatgttggccaggctggtcttgaactcctgacctcaagtgatccacctaccttggcctcccaaagtgctgggattacaggcgtgagctaccatgcccagccaggagtggtttctgttcagctcccacaccatccctgcctttcagaaacagatttcagtcctgcccgcccccccccccccccccgcctcccccagtctacttccccaaccctggattctcttctagagtcttgggcccaagcgggctatattggggctggcgggagggtccccaccttgctctgcttttgatctaggtggtgatggaatgctaggccacccaccaccctaaaacccacctcatcctgacctgcaaaattggtgggaagatggtaacagtcctggaaggaggaacaagagagacttgaaggagagaagtgggacaggaatacgcggtagacagttatagacagagacaaacagagccagacagccagccccagagacagaacccacaggagaggcacgcccagaggtgaggaaaggcagaggttggggcaatgggtcctgcccggcttgtggaaaatcacttcccatcccagcctcagcctccttctctgtacaatgggggtgacccatgcttctctctgttggaatggtggggtcccaatcagtgatttcctgcatatcctgggcagcccaagggcctgggaaatgacaagcgtagtcctagtggatcccctcctttcacccctcctgactgaggacttcccatgaacccggcacactccaggacccaggggtgcagcactgagccaaccaggccgccctccgaccctgtgaagtccccctgtctggcactatcgtcgttgttgtggctgctgttccactggagacttagaagcagggatttcagcgcagacatttccagtctaggcaggaggttctcagctggagagaagggtctagagttcccgctgggcttggcttctcaggacccaacatgtctgtggataaaatgagcatgagagactctcctgtgtgccaggcagtgggaagacaggggtggaggggcggtggctcttattatcagctcctaggagaggggcagtgcacccgggctctgggtgatggggggatcagggcccccaagaagaggcgccactcccacttcgccaggcttgccccagggccagggtccgtgccaggtgtgggtggtgggtgggaaggggtggggtgagtcatcagggccagccccgccctgcttttatttaaggtccccagcaggccccaccaccacggctgcccaacccggtcccagccatgtccgtgagtgctccaggggcccggggcggggccaagcagggagggggctgggggctcctctttcaaaggagcaagtgggcagtgagtgtgccacggactggcctgggctgtggcctccgggtaacccccatcccgactgtcccctctacctctttgtggcttcctctggggccctctttgaggatctttctgtttgtctttgttgctctccccatctgtttccctgtctgtttctggtctctttcctgcctctccgccaccctttcctcttccactgatttctgccagtctcagccctggtcggctcctctgaggggtgacccaccttctgcctccctccttcggtctcaccggctcacagtggcccctgcaccccactcttgcagaacgtcccccacaagtcctcactgcccgagggcatccgccctggcacggtgctgagaattcgcggcttggttcctcccaatgccagcaggtgaggccccaggccctaggggtaaagggtacaggtctcaggatcagctgactcccaatttttgcagtccagaagtaggggcccgaggccacctgtatccaccaggctaggagtccgaggccatttctgacctcaaatctgatgtattcgtatttgcccccgtgcctttgtggctggggtccctaagtttccctaagcatttgaggtccctgggtaatctcagggttcctagatatagtcctatgacttccatgtctgagtcccagggaactctggaaatactccaagtcctggagacaccctggaccctgggagtccttgccaagccatcctttgacttcctggctaaggaacttcgggccttctggattctgaggtaccctggaaatactggggttcctggtattattctttgtcctgtagaagctgagggttccctgagcatcaggagcaccctggctatcacccagacctcctgggcagctcccaggctctttggaaatgagggc

SEQ ID NO: 823 - DNA, 6000 bp, Homo sapiens
tcatgcctgtaatcccagcaccttgggaggccaaggcaggtggattccttgaggccaggatttggagaccactccggccaacatggcaaaaccccatgtctactaaaaatgtaacaattagctgggcacagtggcatgcgcctatagtctcagctctggaggctgaggtgggagaatcgcttgaacccaggaggtgggtgagctgagatatcaccactgcactatagcctggatgacacagcaaggctgtctcaaaaaaaaaaaaaaaagaaaagaaaagaaaagaaatgcaaaacaaccctaaataaagtattattaaatcaaatccagcaatggtgaaagcaagaaagaggagataatcaacattaatggattaaaggcagaaaaaccatctgattgcataaataaatgcataaaaagcatttgataaaatgtaacacctgcatttaaaaaagaaagaaagaaagaaagaaagaaaaatctctagcaagttaggaatagaacctgataaaggacttctactagaaatctactgaaagcatcatatttaatgatgaaaccttaggatcattcccttaaatgtctaggacaagacaagaattgtccattaataccactgccattcaacattgtattggaactcctagccaaagaggagaggattaagaaaaaaagcatagacatcagattttttaaagctgtaatttttttcttttttctggacaacaggatcatctagctagaaaatcgaagagaattatctgtcaagctattctagaacaagcaagagtgagttcaacaaggcagccaaatccaagataattttttttctttttttttttgagatggagtctcactctgtcaccaggctggagtgcagtggcgcaatctcggctcactgcaacctctgccacccggttcaagcgattcccctgcctcagcctcccgagcagctgggattacaggtgactgccaccatgccctgactaaatttgtatttttagtagagacagggtttcaccatgttggccaggctggtcttgaactcctgaccttgtgatccacccgccttggcctcccaaagtgctgggattacaggcgtgagccaccgcaccgggcccagagacaacctgttctgcagcccatttgcttcttccagagtctccctctgtcgtccgggctagagtacactggctcgatctcggctcactgcaacctccgcctcccaggttcaagcgattctcctgcctcagcctcctgagtagctgagattacaggcacctgccaccacgcctggctaatttttgtatttttagtagagatgaggtttcaccatgttgtccaggctggtctcaaactcctgacctcaggtgatttgcctgcctcagcctcccaaagtgctgcgattacaggtgtgtgagccaccgcccccaccctctatttgcttctttgagatgaatcaccccataaatgattggtaaacagagtaatgatgtcagcataacacaagcatgttggttaacatgcaattttctccaggaagttaacattttgaagcaatcagggccaagctttctcacagttaaaggggaagccttagtactaaaagaagatcttcagaggaaaaagctgcaaatctacagaagtgtcttcctttggatccacggtggctggtttagtgacttcaaagaccaccatatttgtcacagtgttatgcctatggcaaatccatgaatgcagatgaagaaattgcaaatatatttctcccatattaaaataacagattaatgaaaaagatcacaccttggatcacatttcgagttttgatgaaaatgatccccatcaatagttaatatctccaaccagcatccccaaagaggaagcataagccccaccttcaaggctgcaaagtgctgctgaaagcaaatgctcatggaaatttacctattctagtgtttctattagcatcattattggttttgtagcactctgaatataaagttgtatacaagaggccgggcatggtgcctcacacctgtaatcccagcactttgagaggccaaggcgggcggatcacgaggtcaggagatcgagactatcctggccaacatggtgaaaccctgtctctactaaaaatacaaaaattagctgggcatggtggcgcccacctgtaattccaactactcggaaggctgaagcaggagaatcacttgaaccagggagtcggaggttgtggtatgccaagaccgtgccactgcactccagcctggcaacagagtgagactccatctcaaaaaaaaaaaaagttgtatacaggtttttatttttacttttttttttttgagtcagggtctcgctctgtctctcaggctggagtgcagtcagtgccacaatcacagctcacagtagcctcgacctcctgggctcaggtaatacccctatacctcagtctcccgagtagctgggaacacaggtgcacaccaccacacccgcctaattttttatttttttgtagagacggagtctccctatgttgcccaggctagtctgaaactcctggactccagtaattctccctcctcggcctctgaaagtgctgggattacaggcatgagccaccgtgcccagctagttgcatatattttgagcaatctgtctctaactctattttttccatgaagtcttgttaattttagtgcaccgttttgaagaactgaaggttttttaagaatgcatatagcaggttatagcagaaacacttatactcagaatgaagctggggctctctcttccaacaagcatttttgatatgctccgagtgtccctgctaggtagccaggagaccaggtaacccacttccctctgacaatggaacaattccccaaggaccctgaggggcagttctctggagtttgggcactagagtccctcttatttcctcttcttctctcctccctctagaccccataccactcaggagaggccaagtaaaaagacccagaattttgcctcttacaagcttagagatcttgaagaagtcactgaacctctgcgggacctactttcctcattctttaaatagaaaggcagtgggttttttgtttgtttgttttttgttgtttttttttttgttgttgttgtttttgttaatcgtggcgatggttatttatttatttatttattttgagacggagtcttgccctgtcgtccaggctggagtgctgtggcgtgatcttggctcactgcaacctccacctcccaggttcaagcgattctcctgcctcagcctcccgagtagctgggatagattacaggcgcacaccaccacgcccggctaatttttttttttttttttaaatagtagagacgggggtttcaccatgctggccaggctggtcacgaactcctggcctcgtgatccgcccgccttggcctcccatagcgctgagattacaggcgtgagccaccgcgcccggcctggttgttaatttttaaaactgcctttcatttttgctttgccatttatagctctgtagccttgcacaaatgacttcacttctctatgagtcatctgtaaaatggggctctttgtgaagacttaacgataccacgtgtacaaagcactgaatacaacatgcacattaagctccccgaaattgaaactcctataaaataggaatcggggattctcaagagcaggagttctgacttcagcagaggaacccagagctggtggggaaagcagacgtggctgtgacatccccagggacactaaacacatcctcccagccccatcttccccgcagagtcccgccaccggcccgacccctaacttgctccaaccacccgccgacgcccgcagcccgctgtttgggggccgccccctgcagcgccaggtccccgcgcggactacagttcccagcgtacatctcggtcggggggtccgaggggccgtcctgcctcagggataaggtccaggctgcgttcgcggctccgggcagtcacagtcatgcacgcagctcctatttttcgcgttgctaatcgcgtccgttgcagtccaacccatcctgggccgcggcccccacagggtctgtgaggagcgcttccccccgccccgggcgcccgctacgccgcgtccgaaggaggggccgaggccgggctcatctccccgggaggactccttcggcttcgtggggtgtcatgtccattgcggcccgaggctggccgcggggctctgctggagggcgctgagagccgggccccgaggccgcacggccggagactacaactcccaggaggcaccgcggcggcggcgcccacacgtcactcgggccccgccggtggcccggggaagcagcacgggcggggggcaggggctggggccgaccgggaggccggtgccaaggatgggggccgcccggctgccccgcgcgtgaggaggccgaggggcgcgccaccccggcccggggcggccgccccaggggccccgccacccccgcccggcccggcagtcgtggcccgggatgcggagccgggggccgccggtggagctgcgcggggtgagcggcgcggggaacggggactgcctgccgccctcgccctcgtcccccaccggcggaccccggcgggcattcgagagccgcgcggccaggccctcttagccctctgccgtttggggggcacgggtgaacctgccgccccactcccaccccgccccgccccgcccgtacagccaaatcggaagggacgagcctgccctttgaaagggttttttttcttgctcctgcggagggcgccccagccatggccctcaggagctccctagaccccgcagggactgccctccatcccggccgccggggcccgccctctgcatcccgcgggcagcctgtgtgaagcggcctcccgcagcccccggcccctcccccatggaggaggaggagggggcggtggccaaggagtggggcacgacccccgcggggcccgtctggaccgcggtgttcgactacgaggcggcgggcgacgaggagctgaccctgcggaggggcgatcgcgtccaggtgctttcccaagactgtgcggtgtccggcgacgagggctggtggaccgggcagctccccagcggccgcgtgggcgtcttccccagcaactacgtggcccccggcgcccccgctgcacccgcgggcctccagctgccccaggagatccccttccacgagctgcagctagaggagatcatcggtgtggggggctttggcaaggtctatcgggccctgtggcgtggcgaggaggtggcagtcaaggccgcccggctggaccctgagaaggacccggcagtgacagcggagcaggtgtgccaggaagcccggctctttggagccctgcagcaccccaacataattgcccttaggggcgcctgcctcaaccccccacacctctgcctagtgatggagtatgcccggggtggtgcactgagcagggtgctggcaggtcgccgggtgccacctcacgtgctggtcaactgggctgtgcaggtggcccggggcatgaactacctacacaatgatgcccctgtgcccatcatccaccgggacctcaagtccatcaacagtaagtggtgtcctctccccaaaattccttccacagaacctctcaaggccaggcctaggtggtgggaaacagggtgagggacaccagatgacactgtgcctggagtgagaaggggcagcagtatgataccttcagggtgaaggtgaggtaggccttgcctgccttaagggagaaaaaggaggctcagaaaggttgaaggacttacctgcctcccaggctgcagagtcacaatcgctcagtaaacatgtatccatgaacacctgcgttccctgcatgaacaggacagatgcagtgcctgccttcaaggtgcttgccatccagccatgctgccagagtccaccaggcagagacaaaaagagcctaccccgtctggagtcagtgtctctcaac

SEQ ID NO: 824 - DNA, 6000 bp, Homo sapiens
caacaaaacctctgagcagggacaggaattttaactttcaaacttccctctatatgccccatcttcccttctacgtatgtgggctcaaccccacccaggccccttcacacagcagggactcagagtacactcaacaaatgactgcctccctcccaggcctagcagctaattttatgaattcaaacccaccttctttacctctttttcacctaatctattagtgccagagggcaggtggagtctggtttacagccttgcatatagaagttgctcatattgccgggcgcagtggctcacgcctgtaatcccagcactctaggggccaaggcaggcgatcacaaggtcaagagatcgagaccatgctggccaacatgatgaaaccccgtctctactaaaaaaaatacaaaaattagctgggcgtggtggtgcacgcctgtaatcccagctacttgggaggctgaggcaggagaatggcttgaaaccgggaggcggaggttgcagtgagctgagattgcgccactgcactccagcctggagacagagtgagactctgtctcaaggaggaaaaaaaaaaaaaaaagttgctcatattaagcacctagacggtagcagtttagcctgcacatcactgaagcacgtccagtgccaagaacaatgtctagcacacagtacatatttagtgactgagaaatgctcccaggccaggtgtggtggctcacatctgcaatcctagcactttgggaggctaaggtggtttgatcacttgagcccaggaggtggaggctgcagtgagcctcccttgggaagtgagaccttgagaggtttttttttttttttcctccttttgagacagggtctcactctgttgcccaggctgcagtgcagtggtgcgatcttggctcactgaggcctccacctcctggactcaggtgatcctcctgcctcagcctcttgagtagctgggaccacaggtatctgccatcatgcctggcaaatttttatttttatttattttattttactttttttgagacagagtttctctctttttgcccaggctggagtgcagtggcacgatctcggctcactgcaacctccgcctcttgggtccaagcgattctcccgcctcggtcacctgagtagctggaactacaggcattcaccaccacgcctggataatttttgtatttttagtagagatggggtttcatcatgttgcccaggctggtcttcaactcctgacctcaagaaatccacccaccatggtctcccaaagtgctgggattacaggtgtgagccaccacacctagcccctggctaatttttaaattatttgtagagaggtctccctatgttgcccaggctggtctcgaactactgagctcaagcaatcctcccacccaggcctcccaaagcgctggaattagaggtgtaagccactgcctggccgaccctgagtttaactgtccctatgcacagtccatttctaccagaccaacttccccattagactgtgaattcccaaaacacacagcccagtacagggccctgctttcagttaatgcccaatacatactccttgagtaaattattcactaaaggagctggagctaaactttccttatctactattccaatccccttcctaatttttgagttgccaggcccctgcacacaacagccattccacaaaggaccttcctggaagtaggcaaccaggggcccgagagttccatttttccttgattacagccccatttccaacagagaactcccctagggcgaggcccagtgcctgctgcaaagcttgcacaaagcaggtacccaataaatgtctacgaggtggcccgggagacttgaaatttgccctttcctcgtctacgattctttctcccactcttgaattgtgaactacttagggaaagaatgggggtttttcacacagtatatcagtaagtctttccaggaaggaacccactagggccctggaaattcaactttcccgctttacaacgcttgtctcctaccagactgagctcctcggcagggtgagagctcgcagcagtgggtggtgggcgagttccagcgtaggctcccgcacactaaaggagccccagggcacacaggaaggagtgctctccttccagcccgcgccgctcccgccctagcgcaggccccaaggctcttcgatccctgcagaccccttagttttccttccgccccctccgtccgcccagcgttctcttcccagtccagccccgcgcggcgccctcacccgtttctcttatctcctgcagcccctgccgctcttgacacagaccctcggctccaggcgtgtgggacccctcactatccacacctcccattgggcggtgcccttacccgtggcgaccaatcagagcctgcagcgcagggcacgcgaccttgcgcctgcgtgttgccacacaggcggggctctgggagttatccacgcacacatcttcgccctgtgggcggggctcagggcgaggagatgcgcctgcgcatttctctgggtcgctcccgggctaagcgtcggcaagttctgtagagaaactcgggcaacctttggtgagcgttgggcccatggagtgaactgggcggcgggagaccttgacagagatgtcatttcaaagctgaagagacggagcatttctgagagtacagctttagagcccgacacacttggagttattctcctctccgggcctctgttttactggtgtgaagtgagcttgagtcacagccacctcaaagattgtttaggggattggatgatatcacacatgcacagcgctcatacactgtaggcgcccactacaacccacttagcaagacagaatccttcacagtttgttaaattgctttcctattctccctactcttcgtttgatttaatgatagtcacttaccaggcccccttgtgagtttagcccaggactatgcttccgtagcttaccattgccatccatttgtttcacaagtagggaaactgaggcccagagaggggaagggatttcttggagggtttgtttgtttgtttgagacggagtctcactctgtcgcccagactggagtgcagtggcacgatcttggctcactgcaacctccgcctcccgggttcaaccgattctcctgccttagcctcccgagtagttgggattacaggtgtccaccaccacgcccggctaatgtttgtattttttagtagagacggggttttgccatattggtcaggctgctctcgaactcctgatctcaggtgatccacccgtctcggcctcccaaagtgctgggattacaggcgtgaaccaccgcgtccggtcttgtttgtttgtttgagacagagttttgctattgttgcccggactggagtgcaatggcgcaatctcggctcacggcaacctccgcctccagggttcaagcgattctcctgcgtcagcctcccgagtagctgggattacaggcatgcgtcagcacgcccggctaattttgtatttttagtagagatggggtttctccatgttggtcagactggtctcgaactcccgacctcaggtgatccgcccgcctcggcctcccaaagtgctgggaatgcaggcgtgagccaccgcacctggcgtttgtttgtttcttgagacaaagtctcgccctgtggcccaggctggagtgcagtggcactatctctgcttactgctccctggttcaagagattctcttgtctcagcctcccaagtagttgggatttcaggcgcgtgccaccacatccggctaagaacagacagggtttcatcatgttggccaggctggtctcgaactcctggcctcgtgtgatccgcccacctcggcttctcaaagtgctgggattacagacgtgagctaccgcgcgcagccgattcttttgaattcactgctacagctcaggcagagccagtactgggccagtgctaggcaggacccagatctcccgactcccaagaggagttaattgcgggggtgggaagaggtccagggaggggacttgtctcaagtacatgcaggtcctgaccttgagtcacctaagtggggggcgtggcgaccgtcacacccaaggccccgcggtaaggggacacgcatacaccacagcctagactccctgacagaccctctctagttgttgcaagttagggagcgggtatctgggcgaccctggagggcagagattggaaggggttacggaggggccgttttggctctgggtggagacatctgactgtgatgggggtcgtgatggacgccatcgagatgtacacagtcggaatggagggttctgttgccgcttggaaggaggtatccgtcctgaacgtgagatgagggaattctggttttgatcaggggaaggaacttatagactgcgggggtggtggtgggggggcgggatttccatttgggatcacgagagagcacagttgagatgtagatccctggttgtcactagaagtgagggacaatctaatggaggagtgcccaggaccagatcatataaggcctgggagtttactgggagacgggaaagtagtgattgtgttactttgccacgggcaactaggggcagtggtgatgtgggcgtctagctcgtgatcaggagggggctgtagtttatgagatgagtagttacaactactcgtgacgtggcgctacatggccccggtggcttgagtcacgggcaggaagtagggacctggaaccgggtaccagatacagcccaagaggcggcgtgctctcgctctgcgcaagcgcagcactcgcgaaccaagatgcttcggttgggggcaggtcaagcggcccaggaagggcggggcttggaggcctcgttctgcgcatgcgccgaaggggcgtggcggtcgcacctgcgcgagttgggggaaggaggaggggcgaggtgacgcaggcgtaataatagagaaggtgccagaaagatccaaaacaagtggctgcggccgtcgcccaggagtcatcggacgccagaatctggtgaggatccagagaggcctaatggtgactggtggcgggtagacaggaccacctgggctctggggagcgggcggggccgcccttgcagggcgagggggtcgggttcggacggtaccacctgtgtggagcaaaggggctgcctgggtcgctcctctgtgtagggggcagagggtcactttcgggaggtaccacttgcgtagagccgggggactcatcagacggtaccgctggacggagaaaaggggctcgtctgggcagtcctacccagagtcaggggcagtcagcagggagccccggggtgggccccgaggcttgtttgggccgcatcgtttggtcaggtccggaggcgagctccgaacgtagcacggtggtgggggcagaagccgagcgggctccggcgtcccgacctgttcttaggggacctcgggcgggaccattccctcccgggggagggggaggccgaggcggttgggggtgcgggagcggccctgcccggcgcgattgggcgggggagacgcgctggcggtgtggggttcgggcctccgcgtcgctgaccactgccccctccccgctgtgtgggttctaggccgggttctgagcttgttccgcctccctcccccgggaatggcgctatccgggtcgaccccggccccgtgctgggaggaggatgagtgcctggactactacgggatgctgtcgcttcaccgtatgttcgaggtggtgggcgggcaactgaccgagtgcgagctggagctcctggcctttctgctggatgaggctcctggcgccgccggaggcttagcccgggcccgcagcggcctagagctcctgctggagctggagcgccgcgggcagtgcgacgagagcaacctgcggctgctggggcaactcctgcgcgtgctggcccgccacgacctgctgccgcacctggcgcgcaagcggcgccggccaggtacggttgaatgggag

SEQ ID NO: 825 - DNA, 6000 bp, Homo sapiens
ctcctcatcgtcctcttcctcctcctccaacccattgcgctcctctttctctagggagtcaaagtgggtgccctgatgctccaagaactcctcaggggtggcgcagagggtagagcactcaggacactcatagggctccatcttgacttcggatgggggagaaggtggaggcagtggtgttgggggaggcaaaggaggtggcactggtggctcagctaccgtagcagaaaggtgctgggcctttcgatgagccacccacagctcgggcgaggggaacagctcctggcagtcccagcactggtattggatctggtttgcagactctcggaggtgggcatcctggtgggccaggagctccccaggggagaggatgagctggctgcattcaccacactggaagggcccctcagcacccggcaccagctccggctccaggccaacattctgtgtggtcagtgcctcctcctctgagacagcaagcatgtgctgctcctggtgtgagaggacttcctccagtgtgttatagaggctgccacactcagagcacatgaactggtgatgctggaagaagagggatgaggcaagggcctccccaggtgtcatctcagtcacttctgttgacatctccatcatctctgccgacataggtgttgacatctccactgcccctggtgacatctgtgttggcatctcggccacctcagccaccacctctgccattgtggggaaggcagtgcctggagaaagaggggcaggagccagtgagacagcaggaaaccaaggggaggtggaattctcttgcacatcccactactcaccagctatcgctcaggaagtcttaatccactgtttctgcttcagtcttccgtgatcccatgtctctgaagcctacacacaccccacggcagcctgcaggagagaaacaccactcagcccagcctcttttttttttttttttttcttctgagacagagacttggtctgtcacccaagctggagtgcagtggcacaatcttggctcactgcaacctctcgctcctgggttcaagctattctcgtgcctcagcctcctgagtggccgggactacaggggtgtgccaccatgcctggctaatttttgtatatatatatatatatatatatatatattttagtagagacaaggtttcaccatgttggccaggctggtcttgaactcctgacctcaggtgatccacccgccttggcctcccaaagtgctgggattacagatgtgagccaccaccccggccaacagcccggcctctttttttttttttttttttttttgagatggactcttgctctgttgccaggctagagtacagtggcgcaatctcggctcactacaacctccacctcctaggttcaagtgattctcctgtctcagcctcccgagtagctgggactacaagtgtgcgccaccatgcccagctaatttttgtatttttttgttgttattgttgagatggaggctcgctctgtcgcccaggctggagtgcagtggtgcaatctctgctcactgcaagctctgcctcccaggttcaggccattctcctggctcagcctcccgagtagctgggactacaggcgcctgcaaccacgcccggctaattttttgtatttttagtagagacagggtttcaccgtgttagccaggacaatctcaatctcctgacctcgtgatctgcccgcctgggcgtcccaaagtgctgggattacaggcatgagccaccacgcccggccaatttttgtatttttagtagagatggggtttcaccatgttggccaagatggtctcgatctcttgccctcgtgatccgcctgcctcggcctcccaaagtgctgggattacaggtgtgagccaccacacccggcccagccagcctggcctctttaccgagagggccaggcacaccttttctgagaataccatagcctttgcctgcgtgcagctttctctttgtgcaatgcttttcctctgcctcttacatatacacacacagatacacccaagtgtttaaaaacacaggccctggaaccagactgcccttggcttgaatctgagctctaccacttacttcctctgaggttgtcttcttacctgtaaaatggggctaaaagtagtactgacacaaagtccctggtacttgtaaaggtcagctgtaaccctgtgtagttctccagaaagattgtttttagaccctaagtctttgatgttgctattccctttgccaagaaacttctctcctctttttgtctgacaaactcctacccagcaccttttgtgaagccttctctgacatctctacatcctcagggttcctatggtatcctgtgccacctctatcatggcaaatatcatgagtttggggtggcatctcactgttcctcactggactgagagtttgtgggtctgattcattgtggaggctccagtcagcaacaaaacctctgagcagggacaggaattttaactttcaaacttccctctatatgccccatcttcccttctacgtatgtgggctcaaccccacccaggccccttcacacagcagggactcagagtacactcaacaaatgactgcctccctcccaggcctagcagctaattttatgaattcaaacccaccttctttacctctttttcacctaatctattagtgccagagggcaggtggagtctggtttacagccttgcatatagaagttgctcatattgccgggcgcagtggctcacgcctgtaatcccagcactctaggggccaaggcaggcgatcacaaggtcaagagatcgagaccatgctggccaacatgatgaaaccccgtctctactaaaaaaaatacaaaaattagctgggcgtggtggtgcacgcctgtaatcccagctacttgggaggctgaggcaggagaatggcttgaaaccgggaggcggaggttgcagtgagctgagattgcgccactgcactccagcctggagacagagtgagactctgtctcaaggaggaaaaaaaaaaaaaaaagttgctcatattaagcacctagacggtagcagtttagcctgcacatcactgaagcacgtccagtgccaagaacaatgtctagcacacagtacatatttagtgactgagaaatgctcccaggccaggtgtggtggctcacatctgcaatcctagcactttgggaggctaaggtggtttgatcacttgagcccaggaggtggaggctgcagtgagcctcccttgggaagtgagaccttgagaggtttttttttttttttcctccttttgagacagggtctcactctgttgcccaggctgcagtgcagtggtgcgatcttggctcactgaggcctccacctcctggactcaggtgatcctcctgcctcagcctcttgagtagctgggaccacaggtatctgccatcatgcctggcaaatttttatttttatttattttattttactttttttgagacagagtttctctctttttgcccaggctggagtgcagtggcacgatctcggctcactgcaacctccgcctcttgggtccaagcgattctcccgcctcggtcacctgagtagctggaactacaggcattcaccaccacgcctggataatttttgtatttttagtagagatggggtttcatcatgttgcccaggctggtcttcaactcctgacctcaagaaatccacccaccatggtctcccaaagtgctgggattacaggtgtgagccaccacacctagcccctggctaatttttaaattatttgtagagaggtctccctatgttgcccaggctggtctcgaactactgagctcaagcaatcctcccacccaggcctcccaaagcgctggaattagaggtgtaagccactgcctggccgaccctgagtttaactgtccctatgcacagtccatttctaccagaccaacttccccattagactgtgaattcccaaaacacacagcccagtacagggccctgctttcagttaatgcccaatacatactccttgagtaaattattcactaaaggagctggagctaaactttccttatctactattccaatccccttcctaatttttgagttgccaggcccctgcacacaacagccattccacaaaggaccttcctggaagtaggcaaccaggggcccgagagttccatttttccttgattacagccccatttccaacagagaactcccctagggcgaggcccagtgcctgctgcaaagcttgcacaaagcaggtacccaataaatgtctacgaggtggcccgggagacttgaaatttgccctttcctcgtctacgattctttctcccactcttgaattgtgaactacttagggaaagaatgggggtttttcacacagtatatcagtaagtctttccaggaaggaacccactagggccctggaaattcaactttcccgctttacaacgcttgtctcctaccagactgagctcctcggcagggtgagagctcgcagcagtgggtggtgggcgagttccagcgtaggctcccgcacactaaaggagccccagggcacacaggaaggagtgctctccttccagcccgcgccgctcccgccctagcgcaggccccaaggctcttcgatccctgcagaccccttagttttccttccgccccctccgtccgcccagcgttctcttcccagtccagccccgcgcggcgccctcacccgtttctcttatctcctgcagcccctgccgctcttgacacagaccctcggctccaggcgtgtgggacccctcactatccacacctcccattgggcggtgcccttacccgtggcgaccaatcagagcctgcagcgcagggcacgcgaccttgcgcctgcgtgttgccacacaggcggggctctgggagttatccacgcacacatcttcgccctgtgggcggggctcagggcgaggagatgcgcctgcgcatttctctgggtcgctcccgggctaagcgtcggcaagttctgtagagaaactcgggcaacctttggtgagcgttgggcccatggagtgaactgggcggcgggagaccttgacagagatgtcatttcaaagctgaagagacggagcatttctgagagtacagctttagagcccgacacacttggagttattctcctctccgggcctctgttttactggtgtgaagtgagcttgagtcacagccacctcaaagattgtttaggggattggatgatatcacacatgcacagcgctcatacactgtaggcgcccactacaacccacttagcaagacagaatccttcacagtttgttaaattgctttcctattctccctactcttcgtttgatttaatgatagtcacttaccaggcccccttgtgagtttagcccaggactatgcttccgtagcttaccattgccatccatttgtttcacaagtagggaaactgaggcccagagaggggaagggatttcttggagggtttgtttgtttgtttgagacggagtctcactctgtcgcccagactggagtgcagtggcacgatcttggctcactgcaacctccgcctcccgggttcaaccgattctcctgccttagcctcccgagtagttgggattacaggtgtccaccaccacgcccggctaatgtttgtattttttagtagagacggggttttgccatattggtcaggctgctctcgaactcctgatctcaggtgatccacccgtctcggcctcccaaagtgctgggattacaggcgtgaaccaccgcgtccggtcttgtttgtttgtttgagacagagttttgctattgttgcccggactggagtgcaatggcgcaatctcggctcacggcaacctccgcctccagggttcaagcgattctcctgcgtcagcctcccgagtagctgggattacaggcatgcgtcagcacgcccggctaattttgtatttttagtagagatggggtttctc

SEQ ID NO: 826 - DNA, 6000 bp, Homo sapiens
caaacacctcctgcagaggttgctcagatgcctcctaagagagagaacttatcacgacttggggcaatctaacccacgtctacggcagctcaaactgtcaaggttattctgttgatagtcatggtaagggtccctgtaatggccctttgccctggcatcaactgcccccagctctccccaaggagtaagcaggcctctgtgcaggctccccaaatcttctcttctagagcgtgatcttcagacatagatatccaaaaatgctgtcagctcttccctagagctgtccttctcctgcttatctaaatcctgtgggcttactctgggtcagggaaggccataatcccccctccccaaactagccactgcccctttagtaacccagacaaaggcttggtctattcatgcacacggctaccggcagcctgaacccctcccagcttctcatgtgaaggctgctatcctccaggagcacttccttcacaaggattaagggcatcaactctggggacaagttggctaggtttgaatcctggctcccacacttcccagctacgttctctgcaagccccttcatgacataacttcttacctccctctcttccctagcttgggtcccctctgctcctgccacactggcctctgatgatgccaaactcattcccacctcaggccttggatgctccctgggattttctcccctggggtctatgcatggctggcagtgcagcctcagggcaaagcctcccttcaccttgctgctctcctgactctctctattccattacttttagtcttcctacaacagcgtctaaaaataagttctcttattatctgattgcccccactaaacttaaacttcatggaacaaacaccttgtcagctccatcatcctgtatccctcctaggcccagcaaacaggattgttattatacgtgcaaactgcttaacttctctgaacttgttattttcttggttacagtgaagacagtaacaggacttccttgtgagattactgggagactataaggcactagttcatatgaagggctgacagctgtgcctggcatgaaacaagccctccgtaaacagtggccaaaatcatcatcactgatgtggccaaattcccaaagccatgctttcttcctcttatgttgctcattgatattgtgggaagagagagtagcagaatgggacataagctgcctgatatggcactgtccgtatcagggcaccagggaggcccagcgggagccaggccctttcctcccaggaagtgtgacaccctcccattcaaccgtacctggccggcgccgcttgcgcgccaggtgcggcagcaggtcgtggcgggccagcacgcgcaggagttgccccagcagccgcaggttgctctcgtcgcactgcccgcggcgctccagctccagcaggagctctaggccgctgcgggcccgggctaagcctccggcggcgccaggagcctcatccagcagaaaggccaggagctccagctcgcactcggtcagttgcccgcccaccacctcgaacatacggtgaagcgacagcatcccgtagtagtccaggcactcatcctcctcccagcacggggccggggtcgacccggatagcgccattcccgggggagggaggcggaacaagctcagaacccggcctagaacccacacagcggggagggggcagtggtcagcgacgcggaggcccgaaccccacaccgccagcgcgtctcccccgcccaatcgcgccgggcagggccgctcccgcacccccaaccgcctcggcctccccctcccccgggagggaatggtcccgcccgaggtcccctaagaacaggtcgggacgccggagcccgctcggcttctgcccccaccaccgtgctacgttcggagctcgcctccggacctgaccaaacgatgcggcccaaacaagcctcggggcccaccccggggctccctgctgactgcccctgactctgggtaggactgcccagacgagccccttttctccgtccagcggtaccgtctgatgagtcccccggctctacgcaagtggtacctcccgaaagtgaccctctgccccctacacagaggagcgacccaggcagcccctttgctccacacaggtggtaccgtccgaacccgaccccctcgccctgcaagggcggccccgcccgctccccagagcccaggtggtcctgtctacccgccaccagtcaccattaggcctctctggatcctcaccagattctggcgtccgatgactcctgggcgacggccgcagccacttgttttggatctttctggcaccttctctattattacgcctgcgtcacctcgcccctcctccttcccccaactcgcgcaggtgcgaccgccacgccccttcggcgcatgcgcagaacgaggcctccaagccccgcccttcctgggccgcttgacctgcccccaaccgaagcatcttggttcgcgagtgctgcgcttgcgcagagcgagagcacgccgcctcttgggctgtatctggtacccggttccaggtccctacttcctgcccgtgactcaagccaccggggccatgtagcgccacgtcacgagtagttgtaactactcatctcataaactacagccccctcctgatcacgagctagacgcccacatcaccactgcccctagttgcccgtggcaaagtaacacaatcactactttcccgtctcccagtaaactcccaggccttatatgatctggtcctgggcactcctccattagattgtccctcacttctagtgacaaccagggatctacatctcaactgtgctctctcgtgatcccaaatggaaatcccgcccccccaccaccacccccgcagtctataagttccttcccctgatcaaaaccagaattccctcatctcacgttcaggacggatacctccttccaagcggcaacagaaccctccattccgactgtgtacatctcgatggcgtccatcacgacccccatcacagtcagatgtctccacccagagccaaaacggcccctccgtaaccccttccaatctctgccctccagggtcgcccagatacccgctccctaacttgcaacaactagagagggtctgtcagggagtctaggctgtggtgtatgcgtgtccccttaccgcggggccttgggtgtgacggtcgccacgccccccacttaggtgactcaaggtcaggacctgcatgtacttgagacaagtcccctccctggacctcttcccacccccgcaattaactcctcttgggagtcgggagatctgggtcctgcctagcactggcccagtactggctctgcctgagctgtagcagtgaattcaaaagaatcggctgcgcgcggtagctcacgtctgtaatcccagcactttgagaagccgaggtgggcggatcacacgaggccaggagttcgagaccagcctggccaacatgatgaaaccctgtctgttcttagccggatgtggtggcacgcgcctgaaatcccaactacttgggaggctgagacaagagaatctcttgaaccagggagcagtaagcagagatagtgccactgcactccagcctgggccacagggcgagactttgtctcaagaaacaaacaaacgccaggtgcggtggctcacgcctgcattcccagcactttgggaggccgaggcgggcggatcacctgaggtcgggagttcgagaccagtctgaccaacatggagaaaccccatctctactaaaaatacaaaattagccgggcgtgctgacgcatgcctgtaatcccagctactcgggaggctgacgcaggagaatcgcttgaaccctggaggcggaggttgccgtgagccgagattgcgccattgcactccagtccgggcaacaatagcaaaactctgtctcaaacaaacaaacaagaccggacgcggtggttcacgcctgtaatcccagcactttgggaggccgagacgggtggatcacctgagatcaggagttcgagagcagcctgaccaatatggcaaaaccccgtctctactaaaaaatacaaacattagccgggcgtggtggtggacacctgtaatcccaactactcgggaggctaaggcaggagaatcggttgaacccgggaggcggaggttgcagtgagccaagatcgtgccactgcactccagtctgggcgacagagtgagactccgtctcaaacaaacaaacaaaccctccaagaaatcccttcccctctctgggcctcagtttccctacttgtgaaacaaatggatggcaatggtaagctacggaagcatagtcctgggctaaactcacaagggggcctggtaagtgactatcattaaatcaaacgaagagtagggagaataggaaagcaatttaacaaactgtgaaggattctgtcttgctaagtgggttgtagtgggcgcctacagtgtatgagcgctgtgcatgtgtgatatcatccaatcccctaaacaatctttgaggtggctgtgactcaagctcacttcacaccagtaaaacagaggcccggagaggagaataactccaagtgtgtcgggctctaaagctgtactctcagaaatgctccgtctcttcagctttgaaatgacatctctgtcaaggtctcccgccgcccagttcactccatgggcccaacgctcaccaaaggttgcccgagtttctctacagaacttgccgacgcttagcccgggagcgacccagagaaatgcgcaggcgcatctcctcgccctgagccccgcccacagggcgaagatgtgtgcgtggataactcccagagccccgcctgtgtggcaacacgcaggcgcaaggtcgcgtgccctgcgctgcaggctctgattggtcgccacgggtaagggcaccgcccaatgggaggtgtggatagtgaggggtcccacacgcctggagccgagggtctgtgtcaagagcggcaggggctgcaggagataagagaaacgggtgagggcgccgcgcggggctggactgggaagagaacgctgggcggacggagggggcggaaggaaaactaaggggtctgcagggatcgaagagccttggggcctgcgctagggcgggagcggcgcgggctggaaggagagcactccttcctgtgtgccctggggctcctttagtgtgcgggagcctacgctggaactcgcccaccacccactgctgcgagctctcaccctgccgaggagctcagtctggtaggagacaagcgttgtaaagcgggaaagttgaatttccagggccctagtgggttccttcctggaaagacttactgatatactgtgtgaaaaacccccattctttccctaagtagttcacaattcaagagtgggagaaagaatcgtagacgaggaaagggcaaatttcaagtctcccgggccacctcgtagacatttattgggtacctgctttgtgcaagctttgcagcaggcactgggcctcgccctaggggagttctctgttggaaatggggctgtaatcaaggaaaaatggaactctcgggcccctggttgcctacttccaggaaggtcctttgtggaatggctgttgtgtgcaggggcctggcaactcaaaaattaggaaggggattggaatagtagataaggaaagtttagctccagctcctttagtgaataatttactcaaggagtatgtattgggcattaactgaaagcagggccctgtactgggctgtgtgttttgggaattcacagtctaatggggaagttggtctggtagaaatggactgtgcatagggacagttaaactcagggtcggccaggcagtggcttacacctctaattccagcgctttgggaggcctgggtgggaggattgcttgagctcagtagttcgagaccagcctgggcaacatagggagacctctctacaaataatttaaaaattagccaggggctaggtgtggtggctcacacctgtaat

SEQ ID NO: 827 - DNA, 6000 bp, Homo sapiens
gggcactgtcatgtctctagctgggaaatacacatgtgagcctggcgcctgggtccgagggtggaggggctgggcccctggactcctcctgggtctgagggaggacgggctagggccctggacactcaggtctgagggaggaggcctgggttcccagatgcccaaatccccttggtaatgagaccccgcctccaccccactctctgacagtgaacaactggttggcaacggtaacgttgggccaggcgggcatgcacgcaacatactaccacaaagccagtgaccaggtgagtgggtgcagggactagctggtgctgccaggggctgctgggcctggaagtccaggtggggccacttgctaattctcatgtgttgctccggcccctccagctgcaggtgggtgtggagtttgaggccagcacaaggatgcaggacaccagcgtctccttcgggtaccagctggacctgcccaaggccaacctcctcttcaaaggtaaaggtctcggttcccctacgcgggaaacaggcaggaggtgactcaactctgagtggatgtgtgggccaccacaggtgctggaggacagtgtgctgccaccctgtgggcctccacattaccagggaacacttgttaaaaggtaggtggggccgggtgcggtggctcacgcctgtaatcccagcactttgggaggccaaggcgggccgaggtaaggagattgagaccatcctggctaacacggtgaaactccgtctctactaaaaatacaaaaacaaaattagccgggtgtggttgcgggtgcctatagtcccaactactgaggctgaggcgggaaaatggtatgaacccaggaggcggagcttgcggtgagccgagatcgtgccaccgcactccagcctgggtgacagagcaagactccatctcaaaaaaaaaaaagtaggtggacaaccctctactatgttttatgcttggaaaaaaaaagtaggtagagcagccaggcgtggtgactcacgcctgtaatcccagcattttgggaggccaagccaggtagaatacttgaggccaggagttggagaccagcctggccaacgtggtgaaatcccctctctactaaaagtacaaaaattagccaggtgtggtagcgtgctgcaactgtagtccccgctacttaggaggctgaggcacaagaatcacttgaacctgggaggcggaggttgcagggagttgagactgcaccactgcactccagcctgggtgacagagtgagactccatctccaaaaaaaataaaatgaaataaataaataaatgttaaaaaaaatctggtggagcatctgatgggtgtttgggccaagctggagctttgtccatcccctcttatttttctgcacttgactctcttatttttctgagactggtctccctctgtcgcccaggctagagtgcagcagtgcaactgcggctcactgcagcctccacctcccgggctcaagcagccttcccacctcagcctcctgagtagctaggaccacaggtgtatgccaccaggcccagctaatttttttgatagttttgggagacatgggggtttcaccatgttgcccaggctggtctcgaactcctggactcaagccttggcctcccaaagtgctgggattataggtgtgagccaccacacccagccagggtagaaggcactttggaagcctcgagcctgccccattcatcttacgttagtggaaactgaggcttccagaggtttcaaggtcacaactaaatccagaacctcatctcaggcacactggtcgtagtcccaatgtccagtcttaagtcttcttggatatctgtggctcacagattttgggtgtttgagcctcctgctgagcactgctggggccacagcggtgaccagccctgtcttcacgggactcagtgagaggaacagattcatccgcagagtgggcaggactaggttgggggaacccaggggtctagagggcttttcagagggcaggggtcactgagcggagagcagaggaggagtgagccatttgctccagcgtgaagttgttggtgtgatggggtttcagggtggcaggagcagtgtggttaaaggtctggaagctgtcggcatgtggctggtatccaaggtggccaggaactctgcatggatatggtgggaagctggcacgcctctcacctcagctcttccctgcaggctctgtggatagcaactggatcgtgggtgccacgctggagaagaagctcccacccctgcccctgacactggcccttggggccttcctgaatcaccgcaagaacaagtttcagtgtggctttggcctcaccatcggctgagccctcctggcccccgccttccacgcccttccgattccacctccacctccacctccccctgccacagaggggagacctgagcccccctcccttccctccccccttgggggtcgggggggacattggaaaggagggaccccgccaccccagcagctgaggaggggattctggaactgaatggcgcttcgggattctgagtagcaggggcagcatgcccagtgggcctggggtcccgggagggattccggaattgaggggcacgcaggattctgagcaccaggggcagaggcggccagacaacctcagggaggagtgtcctggcgtccccatcctccaaagggcctgggcccgccccgagggggcagcgagaggagcttccccatccccggtcagtccaccctgccccgtccactttcccatctcctcggtataaatcatgtttataagttatggaagaaccgggacattttacagaaaaaaaacaaaaaacaacaaaaaatatacgtgggaaaaaaaacgatgggaggcctccgttttctcaagtgtgtctggcctgttttgagcatttcatccggagtctggccgccctgaccttcccccagccgcctgcagggggcgccagagggccggagcacggaaagcagcggatccttgatgctgccttaagtccggctcagaggggcgcagcgtggcctggggtcgctatcttcccatccggaacatctgccctgctgggggacactacgggccttcccttgcctgagggtagggtctcaaggtcacttgcccccagcttgacctggccggagtggctatagaggactttgtccctgcagactgcagcagcagagatgacactgtctctgagtgcagagatgggggcagggagctgggagagggttcaagctactggaacagcttcagaacaactagggtactaggaactgctgtgtcagggagaaggggctcaaggactcgcaggcctgggaggaggggcctaggccagccatgggagttgggtcacctgtgtctgaggacttggtgctgtctggattttgccaacctagggctggggtcagctgatgcccaccacgactcccgagcctccaggaactgaaaccctgtctgcccccagggtctggggaaggaggctgctgagtagaaccaaccccaggttaccaaccccacctcagccaccccttgccagccaaagcaaacaggcccggcccggcactgggggttccttctcgaaccaggagttcagcctcccctgacccgcagaatcttctgatcccacccgctccaggagccaggaatgagtcccagtctctcccagttctcactgtgtggttttgccattcgtcttgctgctgaaccacgggtttctcctctgaaacatctgggatttataacagggcttaggaaagtgacagcgtctgagcgttcactgtggcctgtccattgctagccctaacataggaccgctgtgtgccagggctgtcctccatgctcaatacacgttagcttgtcaccaaacatacccgtgccgctgctttcccagtctgatgagcaaaggaacttgatgctcagagaggacaagtcatttgcccaaggtcacacagctggcaactggcagagccaggattcacgccctggcaatttgactccagaatcctaaccttaacccagaagcacggcttcaagcccctggaaaccacaatacctgtggcagccagggggaggtgctggaatctcatttcacatgtggggagggggctcccctgtgctcaaggtcacaaccaaagaggaagctgtgattaaaacccaggtcccatttgcaaagcctcgacttttagcaggtgcatcatactgttcccacccctcccatcccacttctgtccagccgcctagccccactttcttttttttctttttttgagacagtctccctcttgctgaggctggagtgcagtggcgagatctcggctcactgtaacctccgcctcccgggttcaagcgattctcctgcctcagcctcccaagtagctaggattacaggcgcccgccaccacgcctggctaacttttgtatttttagtagagatggggtttcaccatgttggccaggctggtctcaaactcctgaccttaagtgattcgcccactgtggcctcccaaagtgctgggattacaggcgtgagctaccgcccccagcccctcccatcccacttctgtccagccccctagccctactttctttctgggatccaggagtccagatccccagccccctctccagattacattcatccaggcacaggaaaggacagggtcaggaaaggaggactctgggcggcagcctccacattccccttccacgcttggcccccagaatggaggagggtgtctgtattactgggcgaggtgtcctcccttcctggggactgtggggggtggtcaaaagacctctatgccccacctccttcctccctctgccctgctgtgcctggggcagggggagaacagcccacctcgtgactgggggctggcccagcccgccctatccctgggggagggggcgggacagggggagccctataattggacaagtctgggatccttgagtcctactcagccccagcggaggtgaaggacgtccttccccaggagccggtgagaagcgcagtcgggggcacggggatgagctcaggggcctctagaaagagctgggaccctgggaacccctggcctccaggtagtctcaggagagctactcggggtcgggcttggggagaggaggagcgggggtgaggcaagcagcaggggactggacctgggaagggctgggcagcagagacgacccgacccgctagaaggtggggtggggagagcagctggactgggatgtaagccatagcaggactccacgagttgtcactatcatttatcgagcacctactgggtgtccccagtgtcctcagatctccataactggggagccaggggcagcgacacggtagctagccgtcgattggagaactttaaaatgaggactgaattagctcataaatggaacacggcgcttaactgtgaggttggagcttagaatgtgaagggagaatgaggaatgcgagactgggactgagatggaaccggcggtggggagggggtggggggatggaatttgaaccccgggagaggaagatggaattttctatggaggccgacctggggatggggagataagagaagaccaggagggagttaaatagggaatgggttgggggcggcttggtaaatgtgctgggattaggctgttgcagataatgcaacaaggcttggaaggctaacctggggtgaggccgggttggggccgggctgggggtgggaggagtcctcactggcggttgattgacagtttctccttccccagactggccaatcacaggcaggaagatgaaggttctgtgggctgcgttgctggtcacattcctggcaggtatgggggcggggcttgctcggttccccccgctcctccccctctcatcctcacctcaacctcctggccccattcaggcagaccctgggccccctcttctgaggcttctgtgctgcttcctggctctgaacagcgatttgacgctctctg

SEQ ID NO: 828 - DNA, 6000 bp, Homo sapiens
agccaaagcaaacaggcccggcccggcactgggggttccttctcgaaccaggagttcagcctcccctgacccgcagaatcttctgatcccacccgctccaggagccaggaatgagtcccagtctctcccagttctcactgtgtggttttgccattcgtcttgctgctgaaccacgggtttctcctctgaaacatctgggatttataacagggcttaggaaagtgacagcgtctgagcgttcactgtggcctgtccattgctagccctaacataggaccgctgtgtgccagggctgtcctccatgctcaatacacgttagcttgtcaccaaacatacccgtgccgctgctttcccagtctgatgagcaaaggaacttgatgctcagagaggacaagtcatttgcccaaggtcacacagctggcaactggcagagccaggattcacgccctggcaatttgactccagaatcctaaccttaacccagaagcacggcttcaagcccctggaaaccacaatacctgtggcagccagggggaggtgctggaatctcatttcacatgtggggagggggctcccctgtgctcaaggtcacaaccaaagaggaagctgtgattaaaacccaggtcccatttgcaaagcctcgacttttagcaggtgcatcatactgttcccacccctcccatcccacttctgtccagccgcctagccccactttcttttttttctttttttgagacagtctccctcttgctgaggctggagtgcagtggcgagatctcggctcactgtaacctccgcctcccgggttcaagcgattctcctgcctcagcctcccaagtagctaggattacaggcgcccgccaccacgcctggctaacttttgtatttttagtagagatggggtttcaccatgttggccaggctggtctcaaactcctgaccttaagtgattcgcccactgtggcctcccaaagtgctgggattacaggcgtgagctaccgcccccagcccctcccatcccacttctgtccagccccctagccctactttctttctgggatccaggagtccagatccccagccccctctccagattacattcatccaggcacaggaaaggacagggtcaggaaaggaggactctgggcggcagcctccacattccccttccacgcttggcccccagaatggaggagggtgtctgtattactgggcgaggtgtcctcccttcctggggactgtggggggtggtcaaaagacctctatgccccacctccttcctccctctgccctgctgtgcctggggcagggggagaacagcccacctcgtgactgggggctggcccagcccgccctatccctgggggagggggcgggacagggggagccctataattggacaagtctgggatccttgagtcctactcagccccagcggaggtgaaggacgtccttccccaggagccggtgagaagcgcagtcgggggcacggggatgagctcaggggcctctagaaagagctgggaccctgggaacccctggcctccaggtagtctcaggagagctactcggggtcgggcttggggagaggaggagcgggggtgaggcaagcagcaggggactggacctgggaagggctgggcagcagagacgacccgacccgctagaaggtggggtggggagagcagctggactgggatgtaagccatagcaggactccacgagttgtcactatcatttatcgagcacctactgggtgtccccagtgtcctcagatctccataactggggagccaggggcagcgacacggtagctagccgtcgattggagaactttaaaatgaggactgaattagctcataaatggaacacggcgcttaactgtgaggttggagcttagaatgtgaagggagaatgaggaatgcgagactgggactgagatggaaccggcggtggggagggggtggggggatggaatttgaaccccgggagaggaagatggaattttctatggaggccgacctggggatggggagataagagaagaccaggagggagttaaatagggaatgggttgggggcggcttggtaaatgtgctgggattaggctgttgcagataatgcaacaaggcttggaaggctaacctggggtgaggccgggttggggccgggctgggggtgggaggagtcctcactggcggttgattgacagtttctccttccccagactggccaatcacaggcaggaagatgaaggttctgtgggctgcgttgctggtcacattcctggcaggtatgggggcggggcttgctcggttccccccgctcctccccctctcatcctcacctcaacctcctggccccattcaggcagaccctgggccccctcttctgaggcttctgtgctgcttcctggctctgaacagcgatttgacgctctctgggcctcggtttcccccatccttgagataggagttagaagttgttttgttgttgttgtttgttgttgttgttttgtttttttgagatgaagtctcgctctgtcgcccaggctggagtgcagtggcgggatctcggctcactgcaagctccgcctcccaggtccacgccattctcctgcctcagcctcccaagtagctgggactacaggcacatgccaccacacccgactaacttttttgtattttcagtagagacggggtttcaccatgttggccaggctggtctggaactcctgacctcaggtgatctgcccgtttcgatctcccaaagtgctgggattacaggcgtgagccaccgcacctggctgggagttagaggtttctaatgcattgcaggcagatagtgaataccagacacggggcagctgtgatctttattctccatcacccccacacagccctgcctggggcacacaaggacactcaatacatgcttttccgctgggcgcggtggctcacccctgtaatcccagcactttgggaggccaaggtgggaggatcacttgagcccaggagttcaacaccagcctgggcaacatagtgagaccctgtctctactaaaaatacaaaaattagccaggcatggtgccacacacctgtgctctcagctactcaggaggctgaggcaggaggatcgcttgagcccagaaggtcaaggttgcagtgaaccatgttcaggccgctgcactccagcctgggtgacagagcaagaccctgtttataaatacataatgctttccaagtgattaaaccgactcccccctcaccctgcccaccatggctccaaagaagcatttgtggagcaccttctgtgtgcccctaggtactagatgcctggacggggtcagaaggaccctgacccaccttgaacttgttccacacaggatgccaggccaaggtggagcaagcggtggagacagagccggagcccgagctgcgccagcagaccgagtggcagagcggccagcgctgggaactggcactgggtcgcttttgggattacctgcgctgggtgcagacactgtctgagcaggtgcaggaggagctgctcagctcccaggtcacccaggaactgaggtgagtgtccccatcctggcccttgaccctcctggtgggcggctatacctccccaggtccaggtttcattctgcccctgtcgctaagtcttggggggcctgggtctctgctggttctagcttcctcttcccatttctgactcctggctttagctctctggaattctctctctcagctttgtctctctctcttcccttctgactcagtctctcacactcgtcctggctctgtctctgtccttccctagctcttttatatagagacagagagatggggtctcactgtgttgcccaggctggtcttgaacttctgggctcaagcgatcctcccgcctcggcctcccaaagtgctgggattagaggcatgagccaccttgcccggcctcctagctccttcttcgtctctgcctctgccctctgcatctgctctctgcatctgtctctgtctccttctctcggcctctgccccgttccttctctccctcttgggtctctctggctcatccccatctcgcccgccccatcccagcccttctccccgcctcccactgtgcgacaccctcccgccctctcggccgcagggcgctgatggacgagaccatgaaggagttgaaggcctacaaatcggaactggaggaacaactgaccccggtggcggaggagacgcgggcacggctgtccaaggagctgcaggcggcgcaggcccggctgggcgcggacatggaggacgtgtgcggccgcctggtgcagtaccgcggcgaggtgcaggccatgctcggccagagcaccgaggagctgcgggtgcgcctcgcctcccacctgcgcaagctgcgtaagcggctcctccgcgatgccgatgacctgcagaagcgcctggcagtgtaccaggccggggcccgcgagggcgccgagcgcggcctcagcgccatccgcgagcgcctggggcccctggtggaacagggccgcgtgcgggccgccactgtgggctccctggccggccagccgctacaggagcgggcccaggcctggggcgagcggctgcgcgcgcggatggaggagatgggcagccggacccgcgaccgcctggacgaggtgaaggagcaggtggcggaggtgcgcgccaagctggaggagcaggcccagcagatacgcctgcaggccgaggccttccaggcccgcctcaagagctggttcgagcccctggtggaagacatgcagcgccagtgggccgggctggtggagaaggtgcaggctgccgtgggcaccagcgccgcccctgtgcccagcgacaatcactgaacgccgaagcctgcagccatgcgaccccacgccaccccgtgcctcctgcctccgcgcagcctgcagcgggagaccctgtccccgccccagccgtcctcctggggtggaccctagtttaataaagattcaccaagtttcacgcatctgctggcctccccctgtgatttcctctaagccccagcctcagtttctctttctgcccacatactggccacacaattctcagccccctcctctccatctgtgtctgtgtgtatctttctctctgcccttttttttttttttagacggagtctggctctgtcacccaggctagagtgcagtggcacgatcttggctcactgcaacctctgcctcttgggttcaagcgattctgctgcctcagtagctgggattacaggctcacaccaccacacccggctaatttttgtatttttagtagagacgagctttcaccatgttggccaggcaggtctcaaactcctgaccaagtgatccacccgccggcctcccaaagtgctgagattacaggcctgagccaccatgcccggcctctgcccctctttcttttttagggggcagggaaaggtctcaccctgtcacccgccatcacagctcactgcagcctccacctcctggactcaagtgataagtgatcctcccgcctcagcctttccagtagctgagactacaggcgcataccactaggattaatttgggggggggggtggtgtgtgtggagatggggtctggctttgttggccaggctgatgtggaattcctgggctcaagcgatactcccaccttggcctcctgagtagctgagactactggctagcaccaccacacccagctttttattattatttgtagagacaaggtctcaatatgttgcccaggctagtctcaaacccctgggctcaagagatcctccgccatcggcctcccaaagtgctgggattccaggcatggggctccgagcccggcctgcccaacttaataatacttgttcctcagagttgcaactccaaatgacctgagattggtgcctttattctaagctattttcattttttttctgctgtcattattctcccccttctctcctccagtcttatctgata

SEQ ID NO: 829 - DNA, 6000 bp, Homo sapiens
ctccactcccaccttcccagcgctggccatgaaacacatggatctgaagcagatggagctggacacggcggcggccaaggtggatgaactgaccaagcagctggagtcgctgtggtcagactctcccgcgcctcctggcccgcaggccggacccccttctagggtaagcctggttcccaccttgatctccaaagccagcctctcgccacagtccagaccagaggcctggatttcaggcaaaattgccccatatagttatgcaggttgtgggctcttcaagggaacttgaaaaaaggggaccaggccaggcgcgatggctcagacctggaatcccagcactttggaaggcgaggtgagagaattgcttgagactaagagtttgagaccagcctctacaaatgattttttaaaaatctggctgggcacggtggttcacgcctgtaatctcaacactttcagagacaggcggatcacttgaggtcaggagtttaagaccagcctggctaacatggtgaaaccctgtctctactaaaaatacaaaagttagccaggtgtggtggtgcatacctgtaatcccagctacttgggaggctgaagtgggaggatcacactaagccagggaggttgaggctgcaatgagccgagatagaaaagaaagaaagaaagaaagaaagaaagaaagaaagaaagaaagagagagagagaaagcaagcaagcagggagggagggagggagggaaggagagagagagaaaggaaggaaggagagagaggaaagaaagaaagaaaagaaagagagagaaagaaagaaagaaagaaatagaaaagaggggaccagtggaagtggacatctaaagggaccctcagaaggaaagaggtgtttacctaagtggcataaaggtgacatagagtaatgggctagccacagtgctgattcagggctgtctccccaccactactcacctgggctctctgtgcctgaatttccatggccggtcagcctcctctgggttgacctccagtgatctctcttgacacccccgcccacacaccaacccttccactaatgtctcctttgatccatccctcaatgccctggcctccccacagccgccccggtacagctccagctcgatccctgagcccttcggcagccgagggtccccccggaaggcggccaccgacggcgcagacaccccgttcggacgatcagagagtgccccaaccctacacccctacagcccgctgtcccccaagggacggccgtcgtcgccgcgcaccccgctctacctgcagccggacgcctacggcagcctggaccgcgcgacctcgccccggccccgcgccttcgatggcgcaggcagctccctcggccgtgcgccctccccgcggcccgggccaggcccgctccgccagcagggtccccccacgcctttcgacttcctgggccgcgcaggctccccccgcggcagccccctggcggaggggccccaggccttcttccccgagcgtgggccgtcaccgcgcccccctgccacagcctacgacgcgccagcgtccgccttcgggagctccctgctaggctccggcggcagcgcattcgccccgcctctgcgcgcgcaaggtgaacccaggggcccctcgcggggcctttgactcgcggggtcaaagcgggcaggatccggggctcgccacccctcccgtctcatcctccctggaaacttctccccagacgacctgacgctgcgccggcggcctccgaaagcctggaacgagtctgacctggacgtggcgtacgagaagaagccttcgcagacagcgagctatgaacgtgagtggtggaggcccggggaatggaggacccggaggagaggcagccccacagaccctaatgattcccgccccgcaggcctggacgtcttcgcaaggcctgcctcgccgagcctgcagctgttgccttggagggagagcagcctggatggactggggggcaccggcaaggtgaggaggcgacgcctggggaggagaggctggggaaggtcgaggagtggggtgggggagcggggtcaaggccagtctccccctcggggctgcgatctgggtctcggcgcccgttcccacgctctcccttcactgtgctgggtttctgctccttcctcaccctttcttctccctcactcccagggcttccctcacctcctctcccttctcgtcttttgtctttacctcccctccaccttccctctctcacccgatccccttctcccttccctcttccccaggacaacctcactagcgccaccctgccgcgcaattacaaggtctctcctctggccagcgaccggcgttcagacgcgggcagctaccggcgctcgctgggctccgcggggccgtcgggcactttgcctcgcagctggcagcccgtcagccgcatccccatgcccccctccagcccccagccccgcggggccccgcgccagcgtcccatccccctcagcatgatcttcaagctgcagaacgccttctgggagcacggggccagccgcgccatgctccctgggtcccccctcttcacccgagcacccccgcctaagctgcagccccaaccacaaccacagccccagccacaatcacaaccacagccccagctgcccccacagccccagacccaaccccaaacccctaccccagccccccagcatccccaacagacatggccccctgtgaacgaaggtgagtcagcaatgagggccctagaggactgggtgaagggaggacaaatggcagggggaccagaccagccctgggaggtggggagatcacagccaaatgcctctttacaagcactgtccctgcagagagctaggccaggtgagtttgggaatttgggtaggagccagggatagctcaaaggttaagtgtggaccctgaagccagactgcctggttccacgctgtgtgaccttgggcaagtcacttaacctcactgggcctcaattttcttgagtgtaaaagggaaataatgggccgggcacggtggctcatgcctgtaatcccagcactttgggaggccgaggcgggcggatcacaaagtcagaagttcgagaccagcctggccaatatgaaaccccatctctactaaaaatacaaaaattagccaggcatggtggcgggcgcctgtagtcccagctacttgggaggctgaggcaggagaatcacttggacccgggaggtggaggttgcagtgagccgagattgcgccactgcagtccatcctgggtgacggggagactctgcctcaaaaaaaaaaaaaaaaaaaaaggcaaataatgatagaatcgatcctattgacatatgttattaaattcatataaagcctttaaaacagcacctgatgggccaggtgcagttgctcacacctgtaatcccagcactttgggaggccgaggtgggcagatcacttgaggtcaggagttcaagaccagcctggacaacatgatgaaatcccatctctatcaaaaaaaaaaaaaaaaaaaaaaattagctgggcatggtggctcaccactgtagtcctagctactcagcttgagccaaggaggcggaggtggcagtgagccaagatcatgccactgcactccagcacaggtgacagggtgagactctgtctcaaaaataaataaataaataggatctgatacatagtaagctatcaatagctaccatattagccaggcaccgtggctcacccttgtaatcctagcagtttggtgggctaatgcagacaggattgcttgagctctggagttcaagaccagcctgggcaacatagtgaaactaaaatagactttactaaaaataaaagtacaaaaaatctgccgggcatggtagtgggcgcctgtagtcccagctactcaggatgctgaggtgggaggatcatttaagcctgggagatccaggctgcagtgagctgtgatagcgccactgcactccagcctgggtgacagagtgagacccagtctcaaataaatagctaccatattagttataataatttattaatattttgaggtgtgagatcagtgagttaagcagatgggctggagtctctcttcactgctaacttgctgtgtgactgaagataaattacttgtccgaaactctgtttcccgtctgtgaagagagattaataatatctaccctatagaattgtgacggggattcaatgaaataatgtgtatgtgtgtgtgttttggggtttatttatttatttatttttgagacagagtttcactctttttttttgagacagagtctcgctctttcttccaggttggagtgcagtggtgcttgctcactgcaagctccgcctcccgggttcacgccattctcctgcctcagcctcccgagtggctgggactacaggcgcccaccaccacccccagctaatttttgtatttttagtagagacggggtttcatcatgttagccaggatggtctcgatctcctgacctcatgatctgcccacctcggcctcccaaagtgctgggattacaggcgtgaaccaccgtgcccagccaagatggagtttcactcttcttgcccaggctggaatgcagtggtgaggtttcagctcactgcatcctacacctcccaggttcaagcgattctcctacctcagcttcccaagtagctggggttacaggcatgcaccaccacacccaactaattttttgtgtttttagtagagatgaggttttgccatgttggccaggctggtctcgaacccctgacctcaggtgatccacccacctcagcctcccaaagtgctgggattacaggcatgagccaccatgctcagccgtgtgtgtgtgtgtgtattatttatatgtatatgcatactatataaaaatatatatacactatatatataatgtgtgtgtgtgtttgtgtgtgtgtgtgtatatatatatattttgagatgaaatctcactcttttgcccaggctggagtgcagtggtgcagtggtgcaatctcggctcactgcaacctccgcctcctgggttcaagcgattcctgtgcctcagccttccgagtagctgggattacaggcatgtgccaccacgcccagctaatttttttttttttttttttttttttgtatttttagtagagacagggttttaccatgttggccaggctggtctcaaactcctgatctcaagagatctgcctgcctcggcctcccaaagttctgggattacaggtgtgagccactcgactcagccaataatgcatatttttatttccacctgctttactgtcagaatgagtaagacagagaagaaatcattaaacaccaggattctacttcctgctggagttttctgcctgagatgttaggagaggaaactctcaggatctcagaaaatcacatctatcacggttggtagaagtagattctagagtcagccagaactgagttcaagtcccaactgcatggctttgggcaactgacttgtcctctctgaggcccagattccctttcggtaatgtggagatggcagtgtatctacctcacaaagcagtggtgagattacaataaggtaggcatgtaaagcgccaggcacatactaactgctcaataaatgggaggcatcataattgtatattattcacagcccaaggaaagtgtagcccagagagggcaaggaacttccctgaggtcacacagaaaatcatgtgctggttgtatgccctggaagttgtggagagggagtgttgggtgtctcctggggacctgtcctctgatgggctcttgttccggctaggaccccccaaaccccccaccgagctggagcctgagccggagatagaggggctgctgacaccagtgctggaggctggcgatgtggatgaaggccctgtagcaaggcctctcagccccacgaggctgcagccagcactgccaccggaggcacagtcggtgcccgagctggaggag

SEQ ID NO: 830 - DNA, 6000 bp, Homo sapiens
tagtcccagctactcaggaggctgaggcaggagaatggcgtgaacccgggaggcggagcttgcagtgagccgagattgcgccactgcactccaacctgggcgacagagcgagactccatctcaaaaaaaaaaaaaataataataataataataacttaaaaagattgtaactggattgtttgtaactcaatggataaatgcttgagggtataggggaaaataaagaaccaaaaccccactctagatttacccaggaaacagctcctttaatgactggttcctcatttttttctccctcccatccaggcccggaggctgtttgatgtcctgcacgagcccttcttgaaagtaccctgatgaccccagctgccaaggaaacccccagtgtaataataaatcgtcctcccaggccaggctcctgctggctgcgctggtgcagtctctggggagggattctgggggtgtcaccttctggtggcccaggtgggcaccttcagctttctttagttcctcagtttcccgggggcagactacacaggctgctgctgctgctgcttccgcttcttgtcccggcctgtgggagcctcctccccagactctgaattcagtggcggccctggcatctcctcttggggcactgtctctggcatccggctttcctgactctgcttcttcctcttcttggtggatcccggagttgccctggcttcaggctgtccctcccctggcagttcaggctctagtggctgaattggctcagtcactgtgtgacctctctctttcttcttcttcttcttcttggtggatgtgggagctgcctgaggctcaaggtcatccggcagctcaggccccaccacctctgtctctggctccactgtggcatcttgctgtttttctttcttcgtcttctttttgggagctgccagagctgcctgggcctgaggcttcgctccttctggctgttgaggcgccatggtcccccctggggactccagaggcttcatctccggctccactggctccatcgcctccgtccctggctccatcattgccatctgtcccttttcttttttcctcttcttcgtagggggcagagggatggcttcctccagtggctccaccttcacctgtggctgagactcaactgtcaccccctcctctggctccatcccttccgtccccttttgcctctttctctttttggtcggggacaggactgtgtcttctagaggctcagtgttaatctgttcctgcttcactgtcttgtcttctggctcgaaggtttctttccctttgggcttcttcctcttcttggtggtggacgggaacagcactcccagaggctccagtgtctccactgtgggctctgtccccacaggccctgctgcctctggttctttcagctgctgattttttttcttcttcttcttccgcacatccatttctggcgaccccaaagccatgtccacctccagggccccgtgcccattcactgcctcctgagtgactggggcctctgtcacctgcatctcctttttcttcttccctgaggtgagcaggttgggggccaaggctgacctaggccctgtgactggtgggttgcccccaaaggcacagaaccgaggcctcaggccaggagggatctgtggtgggggacttgctgggatgggctgcagagggctccctgacagggattgctggggaccctcaaggatccttagggtgccctggggggctgaggcacaggtgagtccacctcctgcctccgttgagggggccagcagggtcgcttctccagcttggggacagctgctgaggactcgatagcggtgccgcttgcctgccaatttgcccttgacgatctgggagccagagagaggcacatgccgcccattgaagctacagagagaaacagggagggcagaggcttaagtggaacaggagagggaaggttttttgattttttttttgtttttttttgagagagtcttgctctgttgcctaggctggagtgcagtggcatgatctcggctcactgcaatgtccacctcctgggttcaagcgattctcctgcctcagcctctcaagtagctgggattacaggcacctgccaccacgcccagccaatttttgtatttttagtagagacaatttcactatgttggccaggctggtcttgaactcctgacctcaagtgatctgctcgcctcggcctcccaaaggatgggattacaggcaccagccactgcgcctggctggcctctggtttttaataaaacatgactagagtgactccatcttaaagtgagtagctaggcacttacaaggttcatgcttatggcctgaaaataaccacatcccaggctgaccaccaattataattacagaatatttatggccatacagaacatgttccaccaagcctgcagaatgtccaaatgtcctaagaatgcagcccccattacttaaatataacataaatgagcaagcttaggttgcaggattaatggtcgtggataacaccaatagcccctacctttagtgagcttatctgcacactccaagtttaactatagttccttatagtttcttataagtagaaatactaacaaagggctgtgggtttctccccctgctttctgaggacactctactctgtaaaggagtagtttccaataaacttgtttctttcactgtgctctgtgactcacctctaattctttcctgtgacaaattcaagaacccgctcttggggtctggaccgggaccctcttttccgtcaacaagaccactcaccattctggggcaaagtctgcaggggcctgaataagccacagctccgtatctggacccgtcagcgcctccaaggagaaacgaggggactctgaggctgggggcttcgcggtaaagttggggggacaagagaaccgagcagcatctgcagcagaaggggaaatggggtcgactgacacctccttgccggtccaatcttgcagggcgcgcctatcggtccattggtcttaacctcgtgagcactccagtcccctcaacctggtttctcctttctgcccacctgttccccaggggcgacctcaatttcaccgatccaacccctgggggcgccttgctctccacgggtagccccccacaagataaccctctctccgttcgaattcccgttcgcccactgggaatgcacgctcttcgcaagtcctgcttgcaggtacgcctccttttccgcccgaaccctctcggacgcccctttctccttccaccaacgcaccctccgcaccccgtcaacccgcaccctcaccgccggcctggggctcctccatcctgggacccacacctcaggcaaccctgtagcccgggctgctcgcaccaggttgcagaccacgtggatccaaaggggtagggcatcatccgggagcgcccaactggtgcgggagcgcgggggtaggcattgctcgactcccgatctgcaggaaaaactggggaaaatttcaacgtgtgcagagcagaaaaccgaggaagaagtctttttccgaaaaatgtattcccgaaagccgctgattcgctgtattgctggagtcagaggcccgtcgggtcccgatgggtcgcccccatcgtctgtccaatatggtttgttgcaacgcctccttaaaggggcagccacactgctcttcctaagccttaaagagacaggacggtcgattggtctgaaattcttgaagagacaggtaagaatactagttagtagggctgtgctttctgtgttaaatgtcttctggggaggcccagatgcctcacaagttcagaacttgactgggagaagcgggaaaatggagaaataggggcaatccgtccggagggcgtgaagttccagccaggggcggggcttctggactccgggggagcgggaaacatagggggaggagcttgtggttctcgagggcggagcctcggacccaggagccccacacgcgtggagtggtgctgggcacggtgtagcgtttgtggatcaaatgggacttgtagatgccctcgggggtttagtctcatgcgtgggaaacctcgatgactttcaggaagggacctgatcggcgactcctccctgccccagggagcgtgtaaacagcggcacgtggacacagatttgggggacgcacccacttcccttcccactggggccgccccgcgttgggcggcggttggagccgcgagacggtggctagacagggtgacccgactgcattcctggccagtgtgtcagcgccacttcccgccccctctgccaagatttaggatcctactccagaattggggcaccccttctccccaggtgggagaggctttccagagcggagggagggtcaaggggaaggggaaatgtttcccctatccaggatctccagacggtttccttcgcgtgggcgagagagacaccggggtgcagcccctgcgggctccaggactacaattcccacaggacccgaggcaaagagtcgcccgagggcggtcgcggaggctgctgggggttgtagtccaaactaagattttgaactcttgctgggacatcctttgaagatccaacccgcgctttttatcgacggggagattcgggctcagagaccctgggggatactgatcaggaaaggggatagtgcgcctgaaggggtggggcaagggctcaggagtcagtctccagccacagcgaggcaggcgtctcggctcttctgtatctccctggcctggtcgctctcggcttctgggcctcgcccttcctgtctgtgaaatggactctgggtgaatccaaatgggatcgtcttgggctacgtcctgtccctccgggactacaagtcccaaggtgctcgaggcgaccttggctccccctccccaccgggacccgcctccctccagcccaagtcacgtcgtctaacctgttcccagctcctgccccgccccgttctccgctccccaagccggagcccgagctggaggaagcccccaggtgccaggatctgcccggatccgtgagtttcaccctcctggggaccagaggccctgaaaaagcccaacacccgcgtccctgggaggattgggaggggactcggacgccaggtcccagggcggaatttggggcgcgccgacacctggatccttagaaggaaactccgttgcctgttttactggagggaaggaaagcgggttcggatgcctgaattcttggaatggagggattctaccccttcatcccggggagacgttggagctggaattcctgagtccctcgaactggggggctctaggaagccgagtctttgggtagtataggggttcgaatccccgagtcttggtcagaaatgagaggctcagactggtggggctcaaggtggaatgggtgaccaccctgccagcctcaagctgctgtctcgaccgatcttctaggtctctgagcagaattaagggtggggcagggatagtggagcctgggttcctgaagtggagcaggacaggtacccggggtccctccggaggctgtgtcccggctctcccccgacttttcggctcggggatgggggcggggtaggagagaaaacaccgaggcagatctccaacctcctctgtgccgctgagcgaacccaacatgtcattaacctgggcgtcagacctgcctaaccagagaagggacatccgccctagggcaccccctggcggaggtgggctcccctattgccttatggggtgggaaacagctgggtttgcagaggtagttctagaacccagggcagaattccggaaagcggctattggattctgggaggtttgcatagccgggcatttaaccattacacggagaggaaggggtaaactgaggcttggagctcacacaggcagtagagtttgtagggtcaggattctgcctcctccttcttctgcagctctctgggggacgggattccatccgcccccgccagattttctgactaaccttctgcc

SEQ ID NO: 831 - DNA, 6000 bp, Homo sapiens
tgggtatatccccaaaaaaaggaaatcagtgtatggaacaggtatctgcactcctgtttgttgcagcacagttcacattgccaaaacttagaaccaacctgtgtccatcagcagatgaccaggcaaagaaaatgtggtacttacacacaatggatactcttcagccataaaaaagaatgagatcctggctgggcgcggtggctcacacctctaatcccagcactttgggaggccgaggcgggcagatcacttgaggccagaagttcaagaccagcctggccaacgtggtgaaaccttgtctctactaaaaatgaaaaaatgagctgggtgtggtggcgcgtgcctgtaatcacaactacttgggaggctgaggcaggagaatcgcttgaatccgggaggcggaggttgcagtgagccaagattgtgccactgcactccagcctgggcgacagagcgagacccttttcaaaacaaaacaaaacaaaacaaaaaaaacatgagatcctgtcaattacaacataatgaactggggattattatgttaagtgaaataagccaggcacagaaagacaaacattgcatgttcttatttatttgtgtatctaaaaatcaaaacaattgaactcatggagataagagtggatggatagttcctggaggctggggagggtagttaggggctggcagggagatggggaaggttaatgggtaccacacacacacacacacacacacacacacacaaagaaagaatgaataagacatactatttgataacacaaccaggtgactatagtcaataataatggtacattttaaaataacttggcagggtgcggtggctcacacctgttatcctagcactttgggaggtcaaggcaggtggatcacgaggtcaggagttcgagaccagcctggccaatatggtgaaacccctgtctctactaaaaatacaaaaattagccgggtatagtggtgggcacctttaggcccagctactcgggaggctgaggcaggagaatcgttggaacccaggaggcggaggttgcagtgagccaagatcacaccactgcactccagcctgggtgacaccaggagactgtctcaaaaaaataataataacttagccaggcgcagtggctcacacctataatcccagcactgggaggctgaggcaggcgcatcaggaggtcaggagatcgagaccatcctggctaacgtggtgaaaccccatctctactaaaaaaaaatacaaaaaattagctgggcaggggcctgtagtcccagctactcaggaggctgaggcaggagaatggcgtgaacccgggaggcggagcttgcagtgagccgagattgcgccactgcactccaacctgggcgacagagcgagactccatctcaaaaaaaaaaaaaataataataataataataacttaaaaagattgtaactggattgtttgtaactcaatggataaatgcttgagggtataggggaaaataaagaaccaaaaccccactctagatttacccaggaaacagctcctttaatgactggttcctcatttttttctccctcccatccaggcccggaggctgtttgatgtcctgcacgagcccttcttgaaagtaccctgatgaccccagctgccaaggaaacccccagtgtaataataaatcgtcctcccaggccaggctcctgctggctgcgctggtgcagtctctggggagggattctgggggtgtcaccttctggtggcccaggtgggcaccttcagctttctttagttcctcagtttcccgggggcagactacacaggctgctgctgctgctgcttccgcttcttgtcccggcctgtgggagcctcctccccagactctgaattcagtggcggccctggcatctcctcttggggcactgtctctggcatccggctttcctgactctgcttcttcctcttcttggtggatcccggagttgccctggcttcaggctgtccctcccctggcagttcaggctctagtggctgaattggctcagtcactgtgtgacctctctctttcttcttcttcttcttcttggtggatgtgggagctgcctgaggctcaaggtcatccggcagctcaggccccaccacctctgtctctggctccactgtggcatcttgctgtttttctttcttcgtcttctttttgggagctgccagagctgcctgggcctgaggcttcgctccttctggctgttgaggcgccatggtcccccctggggactccagaggcttcatctccggctccactggctccatcgcctccgtccctggctccatcattgccatctgtcccttttcttttttcctcttcttcgtagggggcagagggatggcttcctccagtggctccaccttcacctgtggctgagactcaactgtcaccccctcctctggctccatcccttccgtccccttttgcctctttctctttttggtcggggacaggactgtgtcttctagaggctcagtgttaatctgttcctgcttcactgtcttgtcttctggctcgaaggtttctttccctttgggcttcttcctcttcttggtggtggacgggaacagcactcccagaggctccagtgtctccactgtgggctctgtccccacaggccctgctgcctctggttctttcagctgctgattttttttcttcttcttcttccgcacatccatttctggcgaccccaaagccatgtccacctccagggccccgtgcccattcactgcctcctgagtgactggggcctctgtcacctgcatctcctttttcttcttccctgaggtgagcaggttgggggccaaggctgacctaggccctgtgactggtgggttgcccccaaaggcacagaaccgaggcctcaggccaggagggatctgtggtgggggacttgctgggatgggctgcagagggctccctgacagggattgctggggaccctcaaggatccttagggtgccctggggggctgaggcacaggtgagtccacctcctgcctccgttgagggggccagcagggtcgcttctccagcttggggacagctgctgaggactcgatagcggtgccgcttgcctgccaatttgcccttgacgatctgggagccagagagaggcacatgccgcccattgaagctacagagagaaacagggagggcagaggcttaagtggaacaggagagggaaggttttttgattttttttttgtttttttttgagagagtcttgctctgttgcctaggctggagtgcagtggcatgatctcggctcactgcaatgtccacctcctgggttcaagcgattctcctgcctcagcctctcaagtagctgggattacaggcacctgccaccacgcccagccaatttttgtatttttagtagagacaatttcactatgttggccaggctggtcttgaactcctgacctcaagtgatctgctcgcctcggcctcccaaaggatgggattacaggcaccagccactgcgcctggctggcctctggtttttaataaaacatgactagagtgactccatcttaaagtgagtagctaggcacttacaaggttcatgcttatggcctgaaaataaccacatcccaggctgaccaccaattataattacagaatatttatggccatacagaacatgttccaccaagcctgcagaatgtccaaatgtcctaagaatgcagcccccattacttaaatataacataaatgagcaagcttaggttgcaggattaatggtcgtggataacaccaatagcccctacctttagtgagcttatctgcacactccaagtttaactatagttccttatagtttcttataagtagaaatactaacaaagggctgtgggtttctccccctgctttctgaggacactctactctgtaaaggagtagtttccaataaacttgtttctttcactgtgctctgtgactcacctctaattctttcctgtgacaaattcaagaacccgctcttggggtctggaccgggaccctcttttccgtcaacaagaccactcaccattctggggcaaagtctgcaggggcctgaataagccacagctccgtatctggacccgtcagcgcctccaaggagaaacgaggggactctgaggctgggggcttcgcggtaaagttggggggacaagagaaccgagcagcatctgcagcagaaggggaaatggggtcgactgacacctccttgccggtccaatcttgcagggcgcgcctatcggtccattggtcttaacctcgtgagcactccagtcccctcaacctggtttctcctttctgcccacctgttccccaggggcgacctcaatttcaccgatccaacccctgggggcgccttgctctccacgggtagccccccacaagataaccctctctccgttcgaattcccgttcgcccactgggaatgcacgctcttcgcaagtcctgcttgcaggtacgcctccttttccgcccgaaccctctcggacgcccctttctccttccaccaacgcaccctccgcaccccgtcaacccgcaccctcaccgccggcctggggctcctccatcctgggacccacacctcaggcaaccctgtagcccgggctgctcgcaccaggttgcagaccacgtggatccaaaggggtagggcatcatccgggagcgcccaactggtgcgggagcgcgggggtaggcattgctcgactcccgatctgcaggaaaaactggggaaaatttcaacgtgtgcagagcagaaaaccgaggaagaagtctttttccgaaaaatgtattcccgaaagccgctgattcgctgtattgctggagtcagaggcccgtcgggtcccgatgggtcgcccccatcgtctgtccaatatggtttgttgcaacgcctccttaaaggggcagccacactgctcttcctaagccttaaagagacaggacggtcgattggtctgaaattcttgaagagacaggtaagaatactagttagtagggctgtgctttctgtgttaaatgtcttctggggaggcccagatgcctcacaagttcagaacttgactgggagaagcgggaaaatggagaaataggggcaatccgtccggagggcgtgaagttccagccaggggcggggcttctggactccgggggagcgggaaacatagggggaggagcttgtggttctcgagggcggagcctcggacccaggagccccacacgcgtggagtggtgctgggcacggtgtagcgtttgtggatcaaatgggacttgtagatgccctcgggggtttagtctcatgcgtgggaaacctcgatgactttcaggaagggacctgatcggcgactcctccctgccccagggagcgtgtaaacagcggcacgtggacacagatttgggggacgcacccacttcccttcccactggggccgccccgcgttgggcggcggttggagccgcgagacggtggctagacagggtgacccgactgcattcctggccagtgtgtcagcgccacttcccgccccctctgccaagatttaggatcctactccagaattggggcaccccttctccccaggtgggagaggctttccagagcggagggagggtcaaggggaaggggaaatgtttcccctatccaggatctccagacggtttccttcgcgtgggcgagagagacaccggggtgcagcccctgcgggctccaggactacaattcccacaggacccgaggcaaagagtcgcccgagggcggtcgcggaggctgctgggggttgtagtccaaactaagattttgaactcttgctgggacatcctttgaagatccaacccgcgctttttatcgacggggagattcgggctcagagaccctgggggatactgatcaggaaaggggatagtgcgcctgaaggggtggggcaagggctcaggagtcagtctccagccacagcgaggcag

SEQ ID NO: 832 - DNA, 6000 bp, Homo sapiens
ctgagtctttctgtaccacattctacctaacccagggttgcactgctctggaagtctagatggatggtatagtgcagctggtaaaagcatgagtaagaagtcagacttcaaaaattcaaatctgagggccgggcatggtagcttctgcctgtaatccttgcactttgggaggccgaggggggaggatcacttgaggccaggagttcaagaccaacatggccaacacaatgagaccccatttcttaaaaaaaattaaaataaaatcatcaaatctggcagcaccaccgtccaaccctgaccacagtacctcagtctcgtaatccgtaaaatggggatgaaagttcacctcataggactactgtaagaatccacctggtcagaaggtgcaggaagaattcagagctctgagaattgaggcctcaggaagaagagactacaggaataaaaactcgggcatttagaatttcagagatacacaaacaatactttgttaactgttaaaatagataaatgagcaagtctgtgcagccctaatgccagctgtaagtgactctttttttttcttttggtagagatttagtctctctcgcgcctgtggttaggctggtctcgaactcctagcctcatgggatcctccccggctcgatctcccaaagtattgggattacaggcgtgagccacggcgccatgatccccaaatttccaagattctcagattccatactgacattctctggctctcaggaaatgccaaccctgggtgtggggctgtcgcggggacaggcggtggggacgtcggagccaccagggggcggtcacgcccggacccccgccaggagggcggactgcgcctgagctcaggcccggggaatgcgcagcgggcccgggcaggtgctgtacatcccggggcaagggagctgggccgggcggggtacaagggcggggcgcgggggtggcgcgggccgtgtgtctgttcccaggcctctgcccctgacctctgcctccgagtcctctcccatgtgctcccctctagctctagctccgagctctcccgcgggctctgggccagccgcaggtactctcccctgggctcctctctccgctccacccctggctctccttccctggcctcctctgcaccccagccaggttctttagggctaaggatcctgtggacttcctggaggagtcatcttcagtaggaaccgggtcagagagccagactgagctgggaacacccaggctggactcctacagccctgtcgggtcacactgaatctggagaggctccactgtctctgggactcggtttcctcctttgtggacgtctatggaatgggctagggcctttcttgctctaagcctctacttgggcttgttatttagcttctctgtgcctgtttcctcatgtggaccatgggaagaattaataccttcgcctcaaaggggtatgaggattgagtgacataatttataagccgtgattagaacaatgcagtgcgcgaaataaagttcacacatacaggattcataattaccagatgtccttggctgttcattataataacacagggtctggcaacagagtgaggggtccagactcaatgtaatttttttttcccctaaaagggccctttcaactctttctgagatcatacaagccctgagttttgacacccagggtctcaacttcctgagcccttgcctctcagagtcctaaatttcccctgtacattcctgagtctggccagtgatcaccctcagtcacttagggacgggagggctgggagagccctggaagattccagacagaagctggcaaaagcccagggtgtgggcaatatccactctccagcctccgtttctccactcgtaatgaggagtccttccctggggtcagcaaaccttattcaaagggagacctctcagtcacccaagattcctctagacaatgcgagctttcctacctacctacctaccagctctgagcttggtacacccagagccctgttttggcaaccacggttattatttttaatttcatttcaggttatcatcaaatgcccttcaagcccagacattgggaaacactcctctctcatcagatgctcgcctcccccattctgtttttaatcccccttcttaggacgcatgggggtggagagaacggggagatagacagagggaggtgcctggtcctgccctccccccgcctcaaggacagacagacacctccagaattagcctctgtccctcccttatctcccacaataccccaggtcagacagatgggcgtggaggtgacatttctcacctcagggtcagggcaaggagccctgaggcagaaggttagtcagaaaatctggcgggggcggatggaatcccgtcccccagagagctgcagaagaaggaggaggcagaatcctgaccctacaaactctactgcctgtgtgagctccaagcctcagtttaccccttcctctccgtgtaatggttaaatgcccggctatgcaaacctcccagaatccaatagccgctttccggaattctgccctgggttctagaactacctctgcaaacccagctgtttcccaccccataaggcaataggggagcccacctccgccagggggtgccctagggcggatgtcccttctctggttaggcaggtctgacgcccaggttaatgacatgttgggttcgctcagcggcacagaggaggttggagatctgcctcggtgttttctctcctaccccgcccccatccccgagccgaaaagtcgggggagagccgggacacagcctccggagggaccccgggtacctgtcctgctccacttcaggaacccaggctccactatccctgccccacccttaattctgctcagagacctagaagatcggtcgagacagcagcttgaggctggcagggtggtcacccattccaccttgagccccaccagtctgagcctctcatttctgaccaagactcggggattcgaacccctatactacccaaagactcggcttcctagagccccccagttcgagggactcaggaattccagctccaacgtctccccgggatgaaggggtagaatccctccattccaagaattcaggcatccgaacccgctttccttccctccagtaaaacaggcaacggagtttccttctaaggatccaggtgtcggcgcgccccaaattccgccctgggacctggcgtccgagtcccctcccaatcctcccagggacgcgggtgttgggctttttcagggcctctggtccccaggagggtgaaactcacggatccgggcagatcctggcacctgggggcttcctccagctcgggctccggcttggggagcggagaacggggcggggcaggagctgggaacaggttagacgacgtgacttgggctggagggaggcgggtcccggtggggagggggagccaaggtcgcctcgagcaccttgggacttgtagtcccggagggacaggacgtagcccaagacgatcccatttggattcacccagagtccatttcacagacaggaagggcgaggcccagaagccgagagcgaccaggccagggagatacagaagagccgagacgcctgcctcgctgtggctggagactgactcctgagcccttgccccaccccttcaggcgcactatcccctttcctgatcagtatcccccagggtctctgagcccgaatctccccgtcgataaaaagcgcgggttggatcttcaaaggatgtcccagcaagagttcaaaatcttagtttggactacaacccccagcagcctccgcgaccgccctcgggcgactctttgcctcgggtcctgtgggaattgtagtcctggagcccgcaggggctgcaccccggtgtctctctcgcccacgcgaaggaaaccgtctggagatcctggataggggaaacatttccccttccccttgaccctccctccgctctggaaagcctctcccacctggggagaaggggtgccccaattctggagtaggatcctaaatcttggcagagggggcgggaagtggcgctgacacactggccaggaatgcagtcgggtcaccctgtctagccaccgtctcgcggctccaaccgccgcccaacgcggggcggccccagtgggaagggaagtgggtgcgtcccccaaatctgtgtccacgtgccgctgtttacacgctccctggggcagggaggagtcgccgatcaggtcccttcctgaaagtcatcgaggtttcccacgcatgagactaaacccccgagggcatctacaagtcccatttgatccacaaacgctacaccgtgcccagcaccactccacgcgtgtggggctcctgggtccgaggctccgccctcgagaaccacaagctcctccccctatgtttcccgctcccccggagtccagaagccccgcccctggctggaacttcacgccctccggacggattgcccctatttctccattttcccgcttctcccagtcaagttctgaacttgtgaggcatctgggcctccccagaagacatttaacacagaaagcacagccctactaactagtattcttacctgtctcttcaagaatttcagaccaatcgaccgtcctgtctctttaaggcttaggaagagcagtgtggctgcccctttaaggaggcgttgcaacaaaccatattggacagacgatgggggcgacccatcgggacccgacgggcctctgactccagcaatacagcgaatcagcggctttcgggaatacatttttcggaaaaagacttcttcctcggttttctgctctgcacacgttgaaattttccccagtttttcctgcagatcgggagtcgagcaatgcctacccccgcgctcccgcaccagttgggcgctcccggatgatgccctacccctttggatccacgtggtctgcaacctggtgcgagcagcccgggctacagggttgcctgaggtgtgggtcccaggatggaggagccccaggccggcggtgagggtgcgggttgacggggtgcggagggtgcgttggtggaaggagaaaggggcgtccgagagggttcgggcggaaaaggaggcgtacctgcaagcaggacttgcgaagagcgtgcattcccagtgggcgaacgggaattcgaacggagagagggttatcttgtggggggctacccgtggagagcaaggcgcccccaggggttggatcggtgaaattgaggtcgcccctggggaacaggtgggcagaaaggagaaaccaggttgaggggactggagtgctcacgaggttaagaccaatggaccgataggcgcgccctgcaagattggaccggcaaggaggtgtcagtcgaccccatttccccttctgctgcagatgctgctcggttctcttgtccccccaactttaccgcgaagcccccagcctcagagtcccctcgtttctccttggaggcgctgacgggtccagatacggagctgtggcttattcaggcccctgcagactttgccccagaatggtgagtggtcttgttgacggaaaagagggtcccggtccagaccccaagagcgggttcttgaatttgtcacaggaaagaattagaggtgagtcacagagcacagtgaaagaaacaagtttattggaaactactcctttacagagtagagtgtcctcagaaagcagggggagaaacccacagccctttgttagtatttctacttataagaaactataaggaactatagttaaacttggagtgtgcagataagctcactaaaggtaggggctattggtgttatccacgaccattaatcctgcaacctaagcttgctcatttatgttatatttaagtaatgggggctgcattcttaggacatttggacattctgcaggcttggtggaacatgttctgtatggccataaatattctgtaattataattggtggtcagcctgggatgtggttattttcaggc

SEQ ID NO: 833 - DNA, 6000 bp, Homo sapiens
gcattgcttgcttattaagaaaccaaacaaaaccgcagaaacgcatgtggtgaagctccttactctccccatcccttccccctccttgcatccaaaggaaatctctcgagttggcctctctcaacccctgcaggtgttgcttttactccgtatttaccaggccagaaccagggcttagaatcatggagcattcttagcttagcgtatatgacatagtttttgtttctccccagaattcctttttccctcaatattaggcttcagattcaccatatgggcaaaagagcttccattcatctatgttcagccaggcacggtggctcactcctgtaatcccagcactttgggaggcggagatagaaggacgcttgagcccaggagttccagaccagcctgggccacataatgagatccccgttgctacaaaaaatacaaaaattagccgggtgtggtggcgcgggcctgtagtctcagctacttgggaggctgaggtgaaagggtcccttgagccaaggaagtcgaggctgcactgagccatgaagggtcactgaactccagcctgggggacagagcaagaccatctcaaaaaagaaacaacaaatacagccattttcggcctggtgcagtggcccacgcctgtaatcccagccctttgggaggcggaggcaagtggctcacttgaggttgggagtttgagaccagtctggccaacatggtgaaacctcgtctctactaaaaatacaaaaattaaggccgggcgtggtggctcatgcctgtaatcccagcactttgggaggctgaggagggcggatcacctgaggtcgggagttcgagacaagcctgaccaacatgaacaaaccccgtctctactaaaaatacaaaattagccaggcgtggtggcacatgcctgtaatctcagctactcgggaggctgaggcaggataattgcttgaaaccgggaggcagaggttgcggtgagccgagatcgtgccattgcactccagcctgggcaacaacagcgaaaatctgtctcaaaaaaaaaaaaagaaacaaaaagtagctgagcatggtggcacacgccagtaatcccagctacttgggagactgaggcaggagaatctcttgaacccaggaggtggaggttgcagtgagccgagatcaggagatcatgccactgcactccagcctggaggacagaatgaaactctgtctcaaaaaaaaaaaaaaaaaaagtcattttcactgctacatagtattctgttggataaacatagtatccttattcattttctcattgatggatatttaggatagatatgtatttttattttatgtttagagacagggtctcactgtctcccaggctggagtgccgtggttcaatcacagctccctgcagcctccaactcctgggtttaagggatcctcccgcctcagcctcccaagtagctgggaccacaggcagatccaccatgcctggctaatttttattttatttttttgtagagatcaggtctttctgtgttacccaggctggtctcaaactcctggcctcaagtgatcctcctgccttggcctcccaaattgctggaattatgggtctgagctacctcacccagactatttttaaatgtatttcagattttattttatttatttattttttgagacagagtttcgctcttgttgcccaggttggagtgcaatggtgcaatctcggcccattgcaaccttcacctcccgggttcaagtgattctcctgcctcagcctcccaagtagctgagattacagatgcctgccaccatgcccagctaatttttgtatttttagtagagacggggtttcactatgttgaccaggctgatcttgaattcccgacctcaggtgatccacccacctcggcctcccaaagtgctgggattacaggtgtaagccactgcgcccggccattatttattgccttttttcctctcccaatcatgcatatttccgggtgcgctcttgtgtttctagagtaggtacctgggtggtctgcccaccatccaccttactaggtgattgctagctttctcaccaggtggcacccacagcagtgtgacagtggtgggttttgtaacttacaccaatccgatgtgccccctttgccaccatctcctggccccaagagttgctagggagtgttgaggaggctgggctggtaccaggcgactcactaccaggtagcatgaggacgatgaggatcatttaaccttctgtaaagtgagtttctccttcccctgcacctgaagggaaggaggttaggtggtccccacttagcacagagcctgcctgtggagctacagggagtggcagaggattgcagctctctgtacacttaaaaaaaattttttttttgacacggagtcttgctctgttgcccaggctggagtgcagtggtgcaatctcggctcactgcaacctccgcctcccgggttcaagcgattctcctgccttggcctccctagtagctgggaatacaggtgtgtgccaccaggcccagctaatttttgttgttttagtagagacggggtttccccatggtggccaggctggtcttgaactcctgacctcaggtgatccacctgccttggcctcccaaagtgctgggattacaggcgtgagccaccttgcccagccatttttttttttttgagatggagtctcgctctgtcacccaggctggagtgcagtggcgccatctcggctcactgcaagctccacctaccgggttcacgccattctcctgcctcagcctccggagtagctgggactacaggcgcccgccaccacacccggctaatttttttgtatttttagtagagatggggtttcactgtgttagccaggatgatctcgatctcctgacctcataatccgcccgcctcggcctcccaaggtgctgggattacaggcgtgagccaccgcacccggcctgtatttttttttttttttttttttgagacagagttttgctcttgcccaggctggagtgcaatggcacgatctcggctcaccgcaacctccacttcccaggttcaagcgattctcctgcctcagccttcccaagtagctgggattacagacatgtgccaccaagtccggctaattttgtatttttagtagagatggggtttctccatgtaggtcaggctggtctcaaactcccgacctcaggtgatccgcctacctcggcctcccaaagtgctgagattacaggcgtgagccaccgcgcccggcctgtatttttaatagagacggggttctaccatgttggccacactggtctcaaactcctgacctcaggtgatcctcccgccttggcctctcaaagtgctgggattacagctataagtcactgcgccgggcctctgtactctttttagtattgcctttaatttttaccagtcgggagcctttcctaggacctagcctcctgcctgcccacttcctaggatgttggagctgagagggtcctagagaccaccttgttttcatcctgccactggagagggggcaggggtttcactcggcgttgcctagaggtgcttctgttgaagcctctgcaatggggggggctcttcccagttctcctccttccacagattgttctagaactgccaagactgtgggcaccctgctcctttctcctcatcttgccagccctgtagggaggggcaggataggttgcagtccatccttcagccccttgggggatgtctttctcaaatgtacaacagagacggggcagtcacagctaatgtgccacgcactcgcttggtgcccagctctctgctgaaggcattccgtgtttgtcctctgcctccaggtctcatgtcctggatgaggatgtgacctccgagacatggacattagcccaggcggggggaggagctggaatagggtgggcgagactgtcgcctcgctgcccctggagctgaccatccccactcccatcaccatactcagtcccctgctaactgccccttctctctcttttccccagagacaagaggagcagcagcggcaccgcccctcaccctggagggtcctgtacaatctcatcatgggactcctgcccttacccaggggccacagagcccccgagatggagcccaattaggtgcctgcacccgcccggtggacgtcagggactcggggggcaggcccctcccacctcctgacaccctggccagcgcgggggactttctctgcaccatgtagcatactggactcccagccctgcctgtcccgggggcgggccggggcagccactccagccccagcccagcctggggtgcactgacggagatgcggactcctgggtccctggccaagaagccaggagagggacggctgatggactcagcatcggaaggtggcggtgaccgagggggtggggactgagccgcccgcctctgccgcccaccaccatctcaggaaaggctgttgtgctggtgcccgttccagctgcaggggtgacactgggaggggggggctctcctctcggtgctccttcactctgggcctggcctcaggcccctggtgcttccccccctcctcctgggagggggcccgtgaagagcaaatgagccaaacgtgaccactagcctcctggagccagagagtggggctcgtttgccggttgctccagcccggcgcccagccatcttccctgagccagccggcgggtggtgggcatgcctgcctcaccttcatcagggggtggccaggaggggcccagactgtgaatcctgtgctctgcccgtgaccgccccccgccccatcaatcccattgcataggtttagagagagcacgtgtgaccactggcattcatttggggggtgggagattttggctgaagccgccccagccttagtccccagggccaagcgctggggggaagacggggagtcagggagggggggaaatctcggaagagggaggagtctgggagtggggagggatggcccagcctgtaagatactgtatatgcgctgctgtagataccggaatgaattttctgtacatgtttggttaattttttttgtacatgatttttgtatgtttccttttcaataaaatcagattggaacagtggatactctttctgcttgccttccctgcagcctggccttggagaggcttctgatcgggggctctgctctgtgagccctgcttgtgagtgggtgggagaggtgggccctggcagttgtggctccatcagaagaaaggctaaggggcctgggcttctccagaccgggacgctcctagccttcatcatccccattcccggtaaaagtgaagcttggcctggtgccatggctcatgcctgtaatcccagcactttgagaggccgaggtgggtagatctcttgaacccaggagttcaagaccatcctgggcaacacgatgaaactccgtctctacaaaaataaaaaaataaaaaaaattagccaggcatggtggtgtgtgtctgtagtcccagctactcaggaggctgaggcaggaggatcacttgagcccaggaattggaggctgcagtgagcgatgatcaagccactgcactcaagcttgggtgacagggtgagaccctgtctcaaaaacaaaataaaaagtgaagtccccatgaggtgttgtaggggcgcttgatatttaatggatgagtgaatgacccgtaacatattcagaggcaccactgtgacaagtgcttgggatagagtcatgagacagacctcgtttctgccgtcacagagacagaaagggacatctggccttgcactgtgatcagccgtaggctgcctctccagctggaggagcacctggagctaagatcacagtgagtctccgcacactgccctgaggcctaaccaggctggtcataagcggctgtgttgagtaaatgtagaaagggttgctcctactgccatcttctgcaaacagggccatggccacacactgcc

SEQ ID NO: 834 - DNA, 6000 bp, Homo sapiens
gctagagactgcccctctctcaacttcatcagtgtcaagcaacaggaaatactgacaataattagttatacaagtgataatagctaacacttattaggcacttactatatgtccaatactgcactaaatgacttccagtgtgatctcatttaataagtgtctaaagcagcatttctcaaacgtctttgaactcgatctatggccagaaaaataccttccttgtaacctaatatgtattcactatacatcaataaaatttccacaaaatattactttccgttgacttcataattttttaaaattatattttgttttgtttttttaagagggagtctggctcagcacccaggctggagtgcagtggtgcaatctcggctcactgcaaccaccgtctcccgggttcaagtgattctcccatctcagcctcctgagtagctgggattacaggcaccgcaatcatgcccggctaatttttgtatttttagtagagacggggtttcaccatgttggccaggctggtctcgaactcctgaccttaggtgatccacccacctcgacctcccaaagtgctaggattacaggcgtgagcccctatgcccggcctcaaaattgtattttgtagtgtgtttttttttttgacagagtcttgctccgttgccctgtttggagtgcagtggcacgatatctgctcattgcaacctctgcctcctgagttcaagtgattctcccgtctcagcctcccgagtagctgggactacaggtgtgcgccaccaatttttggctaacttttatatttttggtaaagacggggcttcaccctgttggccaggctggtgtcgaactccggaccttaagtgatccactcgcctcggcctctcaaagtgttaggattacaggcatgagccaccgtgcccagcctgtagtgtatttttgttgttggcgttttgagacggagttttgcccttgtcgcccaggctggaatggaatggcgcgatctcggctcaccgaaacctccttcccttgggttcaagcaattcttctgcctcaagctcccgagtagctgggattacaggcacccaccaccatgcccagctaatttctgtatttttagtagagatggggttttaccatgatggccaggctagtctcaaactcctgacctcaggtgatccacgtcccccggcctcccaaagtgctaggattacaggtgtgagccaccatgcccggcctgtggtgtatttttttttaactctggtcaaagcagtcatgcacacctataatcccagctactagggaggctgaggtgggaggatcgcttgagcgcaggagtttgaaaccagcctgggtaacacagccagaatctgtctcaattaaaacaacaacaaaacctcttgtctaggtcagtaaaattgcaggtagaagttgtggtaatacaaaattgtgtacttttatcaccacttacacaccatacacctaaaaagagtgaatattcttgtgtctaaatacatctcagtaaagcgcaagttggttgggatgtgaatgcatcttactgagtaaaatgcattaagtcagccgggcatggtggttcacacctgtaatcccagcactgagggaggcggaggcaggaggtttgcttgagcccataaggtcaagaccagactgggcaacatagcgagaccgcccatctctacaaaaaaataaaaattagctgggcgtggtggtttacacctgtagtcccagttacttgggaggctgaggcaggaggatctctggagcccaggagtttgaagctgcaaggctattgtaccacaaggctatccattgtgccactacactccaatctgggcgacagagtgaatcttttatctaaaaaaaaaaaaggctgggccaggtgcagtggctcacgccataatcccagcactttgggaggccgaggagggcagatcacgaggtcaggagatcgagaccatcctggctaacatggtgaaacactgtctctactaaaaaatacaaaaaattagccgggtgtggtggcagacgcctgtactccctgctactggggaggctgaggcagaaaggcctgaacctgggaggcggagcttgcagtttgctgagatcgtgccactgcactccagtctgggcaacagagtgacattccgtctcaaaaaaaaaaaaaaaaaaaagctgagtgcagtggctcacacctgtaatcccagcactttgggaggccaagacaggcggatcccgaggtcaggagtttgagaccagcctggccaatatggtgaaaccgcatctctaccaataatacaaaaattagctgggcatagtggcgcacacctgtagtcccagctactagggaggctgaggcagaagacttgcttgaacccaggaggcggaggtggcaatgagccgagatcatgccactgaactccagcctgggcgacagcgcgagactctgtctcaaaaaaaaaaaaaaaagtaagatccatgtaagtgatgtcatatgtcataatccatggtttactcatgacccacagtttggaaaacaccaggaagaaggaagggacaatgaataatcggggaaagcgaaagaggagggaaagtgaaagagggaggaaagctgaggagttcccaatgttgcaaatggggagatttcacgtgagatatagattacctgcatctcttgggggagctaagagtgtgtacttggaggcagtcaagtttgagaagtctgacatccttactcagccagccccacactaggcactggaaggtgagtcactctggtgaggcgattgcgattgggtgagacccagtaaggatggaaagtgtagaggagacaggaatccacggctttggaaaaaggaaggacaaaactcaccaaaccagagcagggcaggaagtaacaatgagaaactgaaaaagaaacggaatggaaagctatgagacaggatgaaatttggcatggggtctgcccaggcatgtccatgccaggtgcccagggctgcttccacgacgtgggtcccctgccagatttgtggtgagtgtggccaggtgtgcatgctccgacgtgtgtgcagtgggccagttagcaagaagctgtcacaggtgtgactttgtgacatgtgtgggtggtcagtttcttctatgtctgatttggtttgtgtctctgaatgtcagtttctttcctttatttttatttttaagacggagtttgctcttgttgcccaggctagagtgcaatggcactatctcggctcactgcaacctccgcctcccgggttcaagcagttctcctgcctcagcctcccaagtagctgggattacaggcatgcgccacaacgcccggctaattttgtatttttagtagagatggggtttcatcatgttggtcaggctggtctcgaattcctgacctcaggcagtccacgcaccttggcctcccaaagtgctgggattacaggcatgagccaccgtgtcgggcgaatgtcactttctgatagttttaatgtgttagctgtgaaattgtgtgagtgcatttgtgtatgtccctgtgggagtgtgatttggatttggccgtgtatccaggtatccctgtaacaggtgtctgtgtgtatgtgtgtgtcccctgtgcctatcagcaagtttgtgtttcctgataagcactccgcctatgtctgtgtggttgcaccaccgtgtgtgtggtgtgggtgcctgttcggtagggttgtttgtgaacacagtttgtgggcccaggtgtgatcatcagtgtgggtgtttctgcaactgtgtgtggccctgtcattgtgtccgtctgcttgtccaggggaccctgttagtgagtctgtgcatttccgtctgggtgtgtgtaagtgtgagccccatcagtatgtgagtgtgtgtgctcatgcccctgtccatggtgtggatttgcgagactgtggccttgtgtctgtgagtacatcctctgggctctgcctgcacgtgactttgtggaccctggaacgcccgtcggtcggtctgtgtacgcatcgctgggggtgtggatctgtgggtcccagtcagtgtgtgtgtccgactgtcccggtgtctgggcgatctccccacaccccgccgcacagcgcctgggtcctccttgccttgggctaggccctgccccgtcccccgctgcagggaaacccccggcgcggaggtaggggggggcgcggcgcgcgcctgcaagtcctgacttgtccgcggcgggcgggcggggccgtagcgtcacgcgggggcggggcgtgggacccgccgggcgggggcggggcggggcggggcggggcggctttggagcgggcccgggatccgccgggcggcctgagacgcggcgcgagccacatgcgagcgggcgcctggcggcggcggcggcggcaccagcgatcccagcagcggccacgacgcggacgcgcctgcggcccggggagcagcagcagccacagccacagcagccgccactgcagttagagcggcagcagcagcgacagccacagcagcagccgccgcggagagcggcgctcggcgggcgcgccctcctgaaggaagccgcccgccccccaccgccgccccctccggcgtgttcatgcccccggggtgagtgtgcgcgccccgaatcctctccggcggcgatcggccaggccgggtggactccctggaggaggtgacaggagtgcaggcggagagcagtgtgggcgccctgcctccccacaccgcgcctctccaaaccccgcgagggaccctgggccagggtcgccgggtgagaggcggctcggcgttggggcgccggtctgggcgcacaggtgcctcggcggtctggcgggtttgtttacaaacaatggggtgcgggctcggcagcgccccctggcggccagtgcggccccggggaagagggtcgaccccaggggtgccccagcccccaaagtccgggaggggcgggggggcggcacggaggggcggccacacccagggcgcgcgcccgctgggggcggcgacggggggcggctcgcgggccgtggagtctgcggctcctgcgggcgggggctgcgccccagcaacagccggttattggccccgcgctcgcctggcgggcggggcgggcgcacgtggcggcggtggggggggctgtgacagcggaggggggtgtctgggaccgccgtgggagcgcgcgtgtgcggggttgtggatctgcaggtgtctcgcctgggtgtgtgcgcgtgtctggctccgagtttgtgctgggttctgcagggagtggtggtgtcgatccagaggaatgttggggtttctgacccgtcggggtgtctgcgtgagtccccgcgcctgtttgtgtggggttctgtctgtgggtgccctgcttgtggggtgggtggacctgcgtgtgttgtcggtgagagttgtctgtgtgtgctgttccgggatgatactgggggtctgtggtgcctgcgtgtgctggggtgtggaggttgtagtgtgtgtgtgttgctggagtgagctgtttgtgtgtttatgtgtgtgtcttgcccgagcgtgcgatatgtgtgcttgtgtcttgcctgtgtgtttctgtcttggctgaggccgtctctgtatctccggggcatgtgtcttttgcccagcgtttgtgatgctgcgcctgctaaatgcaaatgtctgttttctgtccaggtgtctgtgtgagttgtcaggtgtgagtgtgtgtgtgtatgtatgtgtgtggtggggggttgtttcagtctgggtttggcttgtgtgtctggcatcagcgtctgggatttgaggacccaggatctgtggggtctatgcagtgtagacggtgggtgttgctggcagcctctggatggggttgtgtctgagcctgtgtgtgtgtgtgtgtgttgggtctgaggggcttgtcactgtgatcggctggctcatgtgtgtcatgtgggctgcgtgtgtgtagtgtttatgtcagtcacgtgagaccag

SEQ ID NO: 835 - DNA, 6000 bp, Homo sapiens
ataatccaggcactttgggaggccaaggagggaggatcacttgagcccaggagtttgagaccaacctgggcaacataatgagaccccatctttactaaaaaaagaaaagaaaagaaaaaagaaggagaagaaggaggaggaggaggaggaggaagaagaaaaaagaagaaggaggaggaggaggagaagaagagaacattccaggctgggcatagtggctcatacctgtaattccagcactttgggaggctgaggcaggtggatcacctgagatcagtagttcgaaaccagcctggtcaacatggtgaaaccccgtctctactaaaaatacaaaaaaaattagccaggcgtggtggtaggtgcctgtaatcccagctactcaggaggctgaggcaggagaatcacttgaacgcaggaggtggtggttgcattgagcagacattgggccaccacattccatcctgggtgacagagcgagactccgtcttaaaaaaaaaaaaaaaaagaacattccagtacatctggcctccgagtatctaccctgcaatgggcagtctggacattgatcagtgagtgagaggtgtgaggtacaggtgggaccatgagctagcagagggctagagactgcccctctctcaacttcatcagtgtcaagcaacaggaaatactgacaataattagttatacaagtgataatagctaacacttattaggcacttactatatgtccaatactgcactaaatgacttccagtgtgatctcatttaataagtgtctaaagcagcatttctcaaacgtctttgaactcgatctatggccagaaaaataccttccttgtaacctaatatgtattcactatacatcaataaaatttccacaaaatattactttccgttgacttcataattttttaaaattatattttgttttgtttttttaagagggagtctggctcagcacccaggctggagtgcagtggtgcaatctcggctcactgcaaccaccgtctcccgggttcaagtgattctcccatctcagcctcctgagtagctgggattacaggcaccgcaatcatgcccggctaatttttgtatttttagtagagacggggtttcaccatgttggccaggctggtctcgaactcctgaccttaggtgatccacccacctcgacctcccaaagtgctaggattacaggcgtgagcccctatgcccggcctcaaaattgtattttgtagtgtgtttttttttttgacagagtcttgctccgttgccctgtttggagtgcagtggcacgatatctgctcattgcaacctctgcctcctgagttcaagtgattctcccgtctcagcctcccgagtagctgggactacaggtgtgcgccaccaatttttggctaacttttatatttttggtaaagacggggcttcaccctgttggccaggctggtgtcgaactccggaccttaagtgatccactcgcctcggcctctcaaagtgttaggattacaggcatgagccaccgtgcccagcctgtagtgtatttttgttgttggcgttttgagacggagttttgcccttgtcgcccaggctggaatggaatggcgcgatctcggctcaccgaaacctccttcccttgggttcaagcaattcttctgcctcaagctcccgagtagctgggattacaggcacccaccaccatgcccagctaatttctgtatttttagtagagatggggttttaccatgatggccaggctagtctcaaactcctgacctcaggtgatccacgtcccccggcctcccaaagtgctaggattacaggtgtgagccaccatgcccggcctgtggtgtatttttttttaactctggtcaaagcagtcatgcacacctataatcccagctactagggaggctgaggtgggaggatcgcttgagcgcaggagtttgaaaccagcctgggtaacacagccagaatctgtctcaattaaaacaacaacaaaacctcttgtctaggtcagtaaaattgcaggtagaagttgtggtaatacaaaattgtgtacttttatcaccacttacacaccatacacctaaaaagagtgaatattcttgtgtctaaatacatctcagtaaagcgcaagttggttgggatgtgaatgcatcttactgagtaaaatgcattaagtcagccgggcatggtggttcacacctgtaatcccagcactgagggaggcggaggcaggaggtttgcttgagcccataaggtcaagaccagactgggcaacatagcgagaccgcccatctctacaaaaaaataaaaattagctgggcgtggtggtttacacctgtagtcccagttacttgggaggctgaggcaggaggatctctggagcccaggagtttgaagctgcaaggctattgtaccacaaggctatccattgtgccactacactccaatctgggcgacagagtgaatcttttatctaaaaaaaaaaaaggctgggccaggtgcagtggctcacgccataatcccagcactttgggaggccgaggagggcagatcacgaggtcaggagatcgagaccatcctggctaacatggtgaaacactgtctctactaaaaaatacaaaaaattagccgggtgtggtggcagacgcctgtactccctgctactggggaggctgaggcagaaaggcctgaacctgggaggcggagcttgcagtttgctgagatcgtgccactgcactccagtctgggcaacagagtgacattccgtctcaaaaaaaaaaaaaaaaaaaagctgagtgcagtggctcacacctgtaatcccagcactttgggaggccaagacaggcggatcccgaggtcaggagtttgagaccagcctggccaatatggtgaaaccgcatctctaccaataatacaaaaattagctgggcatagtggcgcacacctgtagtcccagctactagggaggctgaggcagaagacttgcttgaacccaggaggcggaggtggcaatgagccgagatcatgccactgaactccagcctgggcgacagcgcgagactctgtctcaaaaaaaaaaaaaaaagtaagatccatgtaagtgatgtcatatgtcataatccatggtttactcatgacccacagtttggaaaacaccaggaagaaggaagggacaatgaataatcggggaaagcgaaagaggagggaaagtgaaagagggaggaaagctgaggagttcccaatgttgcaaatggggagatttcacgtgagatatagattacctgcatctcttgggggagctaagagtgtgtacttggaggcagtcaagtttgagaagtctgacatccttactcagccagccccacactaggcactggaaggtgagtcactctggtgaggcgattgcgattgggtgagacccagtaaggatggaaagtgtagaggagacaggaatccacggctttggaaaaaggaaggacaaaactcaccaaaccagagcagggcaggaagtaacaatgagaaactgaaaaagaaacggaatggaaagctatgagacaggatgaaatttggcatggggtctgcccaggcatgtccatgccaggtgcccagggctgcttccacgacgtgggtcccctgccagatttgtggtgagtgtggccaggtgtgcatgctccgacgtgtgtgcagtgggccagttagcaagaagctgtcacaggtgtgactttgtgacatgtgtgggtggtcagtttcttctatgtctgatttggtttgtgtctctgaatgtcagtttctttcctttatttttatttttaagacggagtttgctcttgttgcccaggctagagtgcaatggcactatctcggctcactgcaacctccgcctcccgggttcaagcagttctcctgcctcagcctcccaagtagctgggattacaggcatgcgccacaacgcccggctaattttgtatttttagtagagatggggtttcatcatgttggtcaggctggtctcgaattcctgacctcaggcagtccacgcaccttggcctcccaaagtgctgggattacaggcatgagccaccgtgtcgggcgaatgtcactttctgatagttttaatgtgttagctgtgaaattgtgtgagtgcatttgtgtatgtccctgtgggagtgtgatttggatttggccgtgtatccaggtatccctgtaacaggtgtctgtgtgtatgtgtgtgtcccctgtgcctatcagcaagtttgtgtttcctgataagcactccgcctatgtctgtgtggttgcaccaccgtgtgtgtggtgtgggtgcctgttcggtagggttgtttgtgaacacagtttgtgggcccaggtgtgatcatcagtgtgggtgtttctgcaactgtgtgtggccctgtcattgtgtccgtctgcttgtccaggggaccctgttagtgagtctgtgcatttccgtctgggtgtgtgtaagtgtgagccccatcagtatgtgagtgtgtgtgctcatgcccctgtccatggtgtggatttgcgagactgtggccttgtgtctgtgagtacatcctctgggctctgcctgcacgtgactttgtggaccctggaacgcccgtcggtcggtctgtgtacgcatcgctgggggtgtggatctgtgggtcccagtcagtgtgtgtgtccgactgtcccggtgtctgggcgatctccccacaccccgccgcacagcgcctgggtcctccttgccttgggctaggccctgccccgtcccccgctgcagggaaacccccggcgcggaggtaggggggggcgcggcgcgcgcctgcaagtcctgacttgtccgcggcgggcgggcggggccgtagcgtcacgcgggggcggggcgtgggacccgccgggcgggggcggggcggggcggggcggggcggctttggagcgggcccgggatccgccgggcggcctgagacgcggcgcgagccacatgcgagcgggcgcctggcggcggcggcggcggcaccagcgatcccagcagcggccacgacgcggacgcgcctgcggcccggggagcagcagcagccacagccacagcagccgccactgcagttagagcggcagcagcagcgacagccacagcagcagccgccgcggagagcggcgctcggcgggcgcgccctcctgaaggaagccgcccgccccccaccgccgccccctccggcgtgttcatgcccccggggtgagtgtgcgcgccccgaatcctctccggcggcgatcggccaggccgggtggactccctggaggaggtgacaggagtgcaggcggagagcagtgtgggcgccctgcctccccacaccgcgcctctccaaaccccgcgagggaccctgggccagggtcgccgggtgagaggcggctcggcgttggggcgccggtctgggcgcacaggtgcctcggcggtctggcgggtttgtttacaaacaatggggtgcgggctcggcagcgccccctggcggccagtgcggccccggggaagagggtcgaccccaggggtgccccagcccccaaagtccgggaggggcgggggggcggcacggaggggcggccacacccagggcgcgcgcccgctgggggcggcgacggggggcggctcgcgggccgtggagtctgcggctcctgcgggcgggggctgcgccccagcaacagccggttattggccccgcgctcgcctggcgggcggggcgggcgcacgtggcggcggtggggggggctgtgacagcggaggggggtgtctgggaccgccgtgggagcgcgcgtgtgcggggttgtggatctgcaggtgtctcgcctgggtgtgtgcgcgtgtctggctccgagtttgtgctgggttctgcagggagtggtggtgtcgatccagaggaatgttggggtttctgacccgtcggggtgtctgcgtgagtccccgcgcctgtttgtgtggggttctgtctgtgggtgccc

SEQ ID NO: 836 - DNA, 6000 bp, Homo sapiens
tgggctcaagcaatcctcctgcctcagtttctcagaatgctgggattacaggcatgagccactgtgtgcctagcccaatgttttattgttattcacattctgactgcacatcctatgaggtagggacctgtgctgtctcaactcacagatgaggaaactgaggcacagagctgtgaccacttccccaacatcacccacaggtggcagaggggattctaagtcaggccatctggactcacagcccacagtctttcatgagggctgcatgcgggcttaggaaaccaaggcaggcgaatgggttcaggccaggagttggaaacatgcctgggtaggcaacacagtgagacctcatctctacagaaaatttaaaaattagccaggtgtggtggtgtgcacctgtagtcccagctactcgggaaactgaggtgggagaattgcttgagcctaggaggtggaagctgcagtgagctgtgatcatcagctgtgatcatgccactgcactccagcctgggcaacagagcaagaccctgtcaaaaaaaaaaaaaaaaaaagaggcagcccttgacccacccacaaacttctttttctttgcccacaagggttttgtgttgttgttgttttgggggtgggggtcggttttttatttttgaggcggagtcttgctctgttgcccaggctgcagtgcagtagcgcgatctcggctcactacaacctccgcctcccgggttcaatcgattcttctgcctcagcctccagagtagctgggattacaggcatgtgccaccacacccagctaatttttgtatttttagtagagacgaggctttgccatgttggccaggctggtgttttgttttgcttttgagaaagggtctcgctctgtcgcccaagctggagtgcaatggtgcgatcacagcctactgcagcctcgacctcacaggctcaagcgttcctcccaccccagcctccccagttaggtttccgcatgttgcccaggctggtctggaactcctgggctcaggtgatccacccatctcggccttccgtgatactgggattacagacgtgagccaccacgcccagctgtggggaggattttgactagtgataacgcttatggccaaatagactcttggcctctccccatcttttctacctccagccaccaagccagattcccactatccttcacactcattttcttctcaaaagaacattataggccggtgtggtggctcacacctgtaatcccagcattttgggaggtcaaggaggaacgattgcttgaggtctggaatttgagaccagcctgggcaacatagtgagaccctgtctctacaaacaaacaaacaaataaagaacattccggggctgggcatggtgcctcatgaccataatccaggcactttgggaggccaaggagggaggatcacttgagcccaggagtttgagaccaacctgggcaacataatgagaccccatctttactaaaaaaagaaaagaaaagaaaaaagaaggagaagaaggaggaggaggaggaggaggaagaagaaaaaagaagaaggaggaggaggaggagaagaagagaacattccaggctgggcatagtggctcatacctgtaattccagcactttgggaggctgaggcaggtggatcacctgagatcagtagttcgaaaccagcctggtcaacatggtgaaaccccgtctctactaaaaatacaaaaaaaattagccaggcgtggtggtaggtgcctgtaatcccagctactcaggaggctgaggcaggagaatcacttgaacgcaggaggtggtggttgcattgagcagacattgggccaccacattccatcctgggtgacagagcgagactccgtcttaaaaaaaaaaaaaaaaagaacattccagtacatctggcctccgagtatctaccctgcaatgggcagtctggacattgatcagtgagtgagaggtgtgaggtacaggtgggaccatgagctagcagagggctagagactgcccctctctcaacttcatcagtgtcaagcaacaggaaatactgacaataattagttatacaagtgataatagctaacacttattaggcacttactatatgtccaatactgcactaaatgacttccagtgtgatctcatttaataagtgtctaaagcagcatttctcaaacgtctttgaactcgatctatggccagaaaaataccttccttgtaacctaatatgtattcactatacatcaataaaatttccacaaaatattactttccgttgacttcataattttttaaaattatattttgttttgtttttttaagagggagtctggctcagcacccaggctggagtgcagtggtgcaatctcggctcactgcaaccaccgtctcccgggttcaagtgattctcccatctcagcctcctgagtagctgggattacaggcaccgcaatcatgcccggctaatttttgtatttttagtagagacggggtttcaccatgttggccaggctggtctcgaactcctgaccttaggtgatccacccacctcgacctcccaaagtgctaggattacaggcgtgagcccctatgcccggcctcaaaattgtattttgtagtgtgtttttttttttgacagagtcttgctccgttgccctgtttggagtgcagtggcacgatatctgctcattgcaacctctgcctcctgagttcaagtgattctcccgtctcagcctcccgagtagctgggactacaggtgtgcgccaccaatttttggctaacttttatatttttggtaaagacggggcttcaccctgttggccaggctggtgtcgaactccggaccttaagtgatccactcgcctcggcctctcaaagtgttaggattacaggcatgagccaccgtgcccagcctgtagtgtatttttgttgttggcgttttgagacggagttttgcccttgtcgcccaggctggaatggaatggcgcgatctcggctcaccgaaacctccttcccttgggttcaagcaattcttctgcctcaagctcccgagtagctgggattacaggcacccaccaccatgcccagctaatttctgtatttttagtagagatggggttttaccatgatggccaggctagtctcaaactcctgacctcaggtgatccacgtcccccggcctcccaaagtgctaggattacaggtgtgagccaccatgcccggcctgtggtgtatttttttttaactctggtcaaagcagtcatgcacacctataatcccagctactagggaggctgaggtgggaggatcgcttgagcgcaggagtttgaaaccagcctgggtaacacagccagaatctgtctcaattaaaacaacaacaaaacctcttgtctaggtcagtaaaattgcaggtagaagttgtggtaatacaaaattgtgtacttttatcaccacttacacaccatacacctaaaaagagtgaatattcttgtgtctaaatacatctcagtaaagcgcaagttggttgggatgtgaatgcatcttactgagtaaaatgcattaagtcagccgggcatggtggttcacacctgtaatcccagcactgagggaggcggaggcaggaggtttgcttgagcccataaggtcaagaccagactgggcaacatagcgagaccgcccatctctacaaaaaaataaaaattagctgggcgtggtggtttacacctgtagtcccagttacttgggaggctgaggcaggaggatctctggagcccaggagtttgaagctgcaaggctattgtaccacaaggctatccattgtgccactacactccaatctgggcgacagagtgaatcttttatctaaaaaaaaaaaaggctgggccaggtgcagtggctcacgccataatcccagcactttgggaggccgaggagggcagatcacgaggtcaggagatcgagaccatcctggctaacatggtgaaacactgtctctactaaaaaatacaaaaaattagccgggtgtggtggcagacgcctgtactccctgctactggggaggctgaggcagaaaggcctgaacctgggaggcggagcttgcagtttgctgagatcgtgccactgcactccagtctgggcaacagagtgacattccgtctcaaaaaaaaaaaaaaaaaaaagctgagtgcagtggctcacacctgtaatcccagcactttgggaggccaagacaggcggatcccgaggtcaggagtttgagaccagcctggccaatatggtgaaaccgcatctctaccaataatacaaaaattagctgggcatagtggcgcacacctgtagtcccagctactagggaggctgaggcagaagacttgcttgaacccaggaggcggaggtggcaatgagccgagatcatgccactgaactccagcctgggcgacagcgcgagactctgtctcaaaaaaaaaaaaaaaagtaagatccatgtaagtgatgtcatatgtcataatccatggtttactcatgacccacagtttggaaaacaccaggaagaaggaagggacaatgaataatcggggaaagcgaaagaggagggaaagtgaaagagggaggaaagctgaggagttcccaatgttgcaaatggggagatttcacgtgagatatagattacctgcatctcttgggggagctaagagtgtgtacttggaggcagtcaagtttgagaagtctgacatccttactcagccagccccacactaggcactggaaggtgagtcactctggtgaggcgattgcgattgggtgagacccagtaaggatggaaagtgtagaggagacaggaatccacggctttggaaaaaggaaggacaaaactcaccaaaccagagcagggcaggaagtaacaatgagaaactgaaaaagaaacggaatggaaagctatgagacaggatgaaatttggcatggggtctgcccaggcatgtccatgccaggtgcccagggctgcttccacgacgtgggtcccctgccagatttgtggtgagtgtggccaggtgtgcatgctccgacgtgtgtgcagtgggccagttagcaagaagctgtcacaggtgtgactttgtgacatgtgtgggtggtcagtttcttctatgtctgatttggtttgtgtctctgaatgtcagtttctttcctttatttttatttttaagacggagtttgctcttgttgcccaggctagagtgcaatggcactatctcggctcactgcaacctccgcctcccgggttcaagcagttctcctgcctcagcctcccaagtagctgggattacaggcatgcgccacaacgcccggctaattttgtatttttagtagagatggggtttcatcatgttggtcaggctggtctcgaattcctgacctcaggcagtccacgcaccttggcctcccaaagtgctgggattacaggcatgagccaccgtgtcgggcgaatgtcactttctgatagttttaatgtgttagctgtgaaattgtgtgagtgcatttgtgtatgtccctgtgggagtgtgatttggatttggccgtgtatccaggtatccctgtaacaggtgtctgtgtgtatgtgtgtgtcccctgtgcctatcagcaagtttgtgtttcctgataagcactccgcctatgtctgtgtggttgcaccaccgtgtgtgtggtgtgggtgcctgttcggtagggttgtttgtgaacacagtttgtgggcccaggtgtgatcatcagtgtgggtgtttctgcaactgtgtgtggccctgtcattgtgtccgtctgcttgtccaggggaccctgttagtgagtctgtgcatttccgtctgggtgtgtgtaagtgtgagccccatcagtatgtgagtgtgtgtgctcatgcccctgtccatggtgtggatttgcgagactgtggccttgtgtctgtgagtacatcctctgggctctgcctgcacgtgactt

SEQ ID NO: 837 - DNA, 6000 bp, Homo sapiens
aggcgcacgccgccacacccggctaattttttgtatttttagcagagacggggtttcaacgtgttagccaggatggtctcgatctcctgacctcgtgatctgcccgcctcagcctcccaaagtgctgggattacaggtgtgagccactgtgcccggcctagtatagcattcttacatgttacatatagtggacttgtcatacttaatatgtgaacagaatttattggcagtgtggcaaatattataaaacctagtgtttaatgtacttgggaagagtttccttgtagtagtaactacagagtttaatgataagtaaactccccttaacaaaaacctcaaccttattactatcccattaacgacaagcaaatacattaaaaaaaaaaaaaaaaaaaaggctgggcgcggtggctcacgcctgtaatcccagaactttgggaggttgaggcgggcggatcatgaggtcaggagatcgagaccatcctggctaacacagtggaaccccatctctagtaaaaatacaaaaaaaaaaaaattagccgggcgtggtggcgaacgcctgtagtcccagctatgtgggaggctgaggcagaagaatcgcttgaacccaggagttggaggttgcagtgagccgagatcacaccactgcactccagactgggcgacacaacgagactctttaaaaaaaaaaaaaaggccaggtgtggtggctcacacctgtaatcccagcactttgggaggccgaggcgggtgtgggtcgcctgaagtcaggagttctagaccagcctggccaacatgatgaaaccctgtctctactaaaaatacaaaaattagccgggcgtggtggcgtgcgcctgtaatcccagctactccgggggctgaggcaagagaatcactggaacagggaggcagagttgcagggagccgagatcacactccagcctgggggacagagccagactctgtctcaaaaaaaaaaaaaaagagggccaggtgcggtggcttatgcctgtaatcgcagcacgttgagaggccaaagcaggtggatcacgaggtcaggatttcaagaccaccctggccaagatggtgaaacccgtctgtagtaaaaatacaaaaaaattagccgggcatggtggcgggcgcctgtcatcccagctactcaggaggctgaggcagagaattagagaattgcttgaacttgggaggcagaggttgcagtgagccgagatcacaccactgtactccagcctgggcgacaaagcgagactgcgtttcaaaaaacaaaaaaaagagtctggagcttcaggacttcaaggctgcaatgagctctgatcgtgccactgcattccagcctgagcggcgagggagaccttgttcctaaaaaaaaaaagaattgggaggctttagagaagtgtgtaacttatgctacagcttaaacaatggtctcaagaaatcaaaaaacaaattttacaagttcaaaaataatcataaaaaatactttgtgtttatttgtggaatggagttaaattctaccgttagtacgcagtggctaagggcggacttgaagatctcccaggaaatttgataatcacgccggcggacacgtttcccactctccaccagggggcggtgcggcgcactccctgccgcttgagacaaacagacacgcatattcattcaacaaacctgaacccatgagaacctactttgtgccgggcctccttctagtttcccgatctgtgaaatgggaattagaatgtccctgccgccatggagctcactttctccagaagacagacaacaaacagctaaacaaaggaataggtagaggccaggcgcggtggttcaggcctgtagtcccagcacttcgggaggctaaggccagaggatcgcttgaggccaggaattcgagaccagcctgggtaacataatgagacctccccccccccatctctacaaaaaaatttaaaattagccaggcgtggtggtgtgcacctgtggtcccaggtacttgggaggctgaggaaggaggatcatttaagcccaggagttgggcatctgggcaacatagtaagaccctctctctaaaaataaaataaataaaatacaaaataaaatataaaatttaaaaaggcctggagtggttcgaggccagcctgagtgacatggtgagacactgtctctactaaaaatacaaaaattagccgggcatggtggtgcgggcctgtaatcccagctactcaggagactgagacacgagagtcacttgaacctaagaggcagaggtcgcagtgagctgagattgtgccactgcactccagcctgggcgacagagcaagactctgtctcaaaaataaatagaataaaatataaaagaaattaaaaagaaaaaattagcagggcatggtggcacacacctgtggtcccagctactcaggaggctgaggtgggaggctcacttgagcccaggaggttgagattacagtgagctgtgatcacaccactgctccgcttgggcaacagagcaagacactgtcttaaaaaaaataaggccatgtatagtggctcatgcctataatcccagcactttgggggggcggaggcagaaggatcacctgagcccaggagttatagaccagcctgggcaccatggggagacctcatctctacaaaataatataaaattagctggccatggtggcacaagaaggtagtcccagctattcaggagggaggctgaggtgggaggattgcttaggcctggaaggttgaggctgcagtgagccatgttcacacctctgcactccagcctgagtgacagagtgagaccctgtctaaaaaaaaagaaaaaggctggacacagtggctcatacctgtaatcccagcactttgggaggccgaggcgggtagatcacgaggtcaggagatggagaccatcctggctaactcagtgaaacccgtctccactaaaaatacaaaaaattagccaggcctggcggcgtgcgcctgtagtcccagctactcaggagattgaggcaggagaacgacgtgaacccaagaggtggagcttgcagtgagcagagatcatgccactgcactccaccctgggcaacacagcaacaagactccatctcaaaaaaaaaaaagggggccaggcgcggtggctcatgcctgtaatcccagcactttgggaggccgaggtgggtggattatgaggtcaggagtttgagaccagcctgaccaacatggtgaaaccctgtccaacatggtgaaaccccgtctctactaaaaatacaaatattagccgggcatggtggcacgtgcctgtaatcccagctactcaggaggctgaggcaggagaatcgcttgaacccaggaggcagaggttgcagtgagctgagatcgtgccgctgcactccagcctgggcaacagagcaagactccatctcaaacaaacaaacaaacctatatatatatatatatatatatatatatgtgtataaaaatcttgaatcctaccacagctcccgtctctgcttcctggatctatggatggtcataaggatgtaaccaggtcatgtatgtaaagctctgaatcggcacggagcctagcacacagtaggtgaactcagagagctgccatgatgatgatgatgacaattggtctctcagaaccttcatccttccggctgccccctaaacgcctctctgtccttcacatccacatccagtacctcagccaatcccatctgctcgctctctctttctttcttctctctccttccttccttccttccttgctttcttgctttcttgcttgcttgctttcttgacagactctcgctctgtcacccagactggagtgcaatgatgtgatctcggctcactgcaacctcccacttccaggttcaagtgattctcctgcctcagcctcccaagtagctgggattacaggcacgcaccaccacacccagctaatttttgtatttttggtagagatggggtttcgccatgttggccaggctggcctcgaactcctgtcctcaaatgatccttctgcatcggcctcccaaagtgctggaattacagatgtgagccaccgcgcccggcggcaaatagcactttttcaaagacaccatccctcaacactcctgacggcccttccctgcttcctttttctacttgaagtttcgctttgtattgttactgtgttctcctggtgtgtggtctgccacagaccagagtgtcagtcccatgaaggcaggatttgtatccattttgctcacagctgtatcctcatgcctacaactgcaccagtgcctggcacaggggagactctgtggtaattgctgaatgagtggatataagaataaatggggccaggcgtggtggctcacgcctgtaatcccagcactttgagaggccgaggcgggtggatcacgaggtcaagagatcgacaccatcctggccaacatggtgaaaccctgtttctactaaaaatacaaaaattagccgggcatggtggcaggcgcttgtagttccagctactcaggaggctgaggcaaggagaatcgcttgaacccgggaggcagaggttgcagtgagccgagatcgcgccactgcactccagcctgggcgacagagcgagactccgcctcaaaatatatatatgtatagtccatctcccctggtggttgtgaggatgaattgggtttgtatttgcaggcttcctgagctggcgacatcgtctggtgcaaaggtgggctttttgcgcggcgcctgtgcttccgccttctgccgctcgggggcagcaggcgtccggcggattcgcccgcgcggccgggccgggaaaggagcgggggcaagtccgcaggaggaagctgatgaaatcctggccaactcgcagtgagctcatcccgcccgggcgcctccggaagccacggggccgcccggcctccgcctggcccgagcgataaagctctcgtgccgaaccagggcgggaagtccttcctgaagtctgccctgcgtggggcctgctgccagaagcctgggccggaggggaggggcgaggacgaagtagcgaaccgtccgctggctgtcttagaaggatgaaaagtgaattctgagcctggctgtgggagtaagagagagggcatcggggaagggagaggggggcgggagagacagagacaagaggtgggagagacgacaggaagaagagacaaaggtggggagactgaggcagaggagggagagagagagagacagaatccaggagggacagctgagagagtcagatggagcgacagagacagagatgggggagacagagacacggagagacagagatgatggagacagagactgggagagacagagatgatggagacagagactgggagagacagagatgatggagacagagacagggagagacagagatgatggagacagagactgggagagacagagatgatggagacagagacagggagagacagagatgatagagacagatggcagagacagaggtagcggagagagactaggagagacagaggtggcggagacagagacggggagagacagcagtggtggagactgatgggagagacagatggaagaaacagagaggggatatgagagacagagacaaaggcagagagatctacagggagacagagacaggagagataaacatgggaaagagagagacagagagacccagcgagtggcagagataggggagtcaggagcgacgcaagggtgtgggagatggagtcaaagtagggggtcagaggtgccgagctggaggtgagggagacggggcgagggggccggggaggggcgctcggggcgggcctgcgaaatcggggcggggaggggcggggcgggccccggaggggcggggcgggcccctccccctccccgccctcccagcccccagcccggagccccgcggctgcggcgcgggccgagtctccaagttaccaagttacc

SEQ ID NO: 838 - DNA, 6000 bp, Homo sapiens
ctctcctgcctcagcctcccgagtagctgcgactacaggtgcccaccaccacacccagctaattgtttttgtgtttttagtagagacggggtttcactatgttggccaggctggtctcgaacccctgacttgtgatctgcccacttcggcctcccaaagtgctgggattacagggatgagccaccgcaccaggcctgcatttcttttttcaaagaattactgtggcattttttccaatgtcattgtgttctgtggttcttatctagtcttcacatttatttacataatgaactttcaatgatggatttctacagaatttttgtcactaagtggttgcctagaagtatatatcctaagattgaacatattgaaatatgagctaacttttctcattcaattattgattacttagttagtttatttattatttgggggatgggatcttgcaatgctgcccagaccagactcaaactcctgggctcaaactcctacctcagcctcccaagtaggtgggattacaggcatgtactacttcacctggctcaattatttattatttataactcattgtacatatattcagataacttaatctgtgcattaaactcttccactttgttgatagtcatttctgtgtttgctatgtggctacatatgtatgctatgtgtttcctctatgcttgagataggatgatggggattcttcaatggctgtgtgagttgttattctagggcacttaagtcaagaatatgaattgctttggtcaattttttatatctttactgatactctgttattctgttaattgctgaaagactattgaacagatttcccacaagagtggaggattattctatatctgtttatcattctacccgtgtatactatatacatattgaaagtgtgaatatgtatacacaaaattaaaattgttattcttattgaagtgatctactttatacttagtaatgctgtttaggtaaaatatattttgtctaatattattggaggtgcacctgctccccattgattacatttttacacagatagtcatcttgcattcttttattggaatcttaatataacttctttgggtttatcccctgtaagatggagggaaatgctcttgaagcctaatttgtctgacattcatattgttgctccagattctttttaataaccatgtatatggtatatcactgccactgtcatatgaggggtggggaagtggccccacttggaaacatttttgcagatgagtatttaaaatgataaatgttggccaggcacggtggctcacacctgtaattacagcactttgggaggctgaggcaggtggatcacgtgaggccaggagttcgagaccagcctggccaaattggtgaaaccccgtctctacaaaaatacaaaaattagccaggcatggtgatgcatacctgtaatcccagtcactgcagctccctgcacctgtactctcacacaccacattctcttaaccagtcctattctttttagctcctatcatgtgtacatatacgttttcctgtaccacaaacattctgtataatctcttgtgctattatgttttatctgtttagatcatggatgtatgtccaacccattaaatagtaccaagaataaggaacatgtgcaaaatgtatttgtggaatgaatacaagaagtgccatagagcagtgcagtttaacagaaatataatccaagccccaaatgtatattaaattttctagcaactgcatttaaaaaagcaaaaacaagcagatacagttagtttaaaaatacctatgtagttgtatatgtatacacatatgtgtgtgtgtgtgtgtgtgtgtgtgtgtatatactgataaggccagtgcggtggctcacacctacaatcctagcacttttggaggctgacacaggcggttcacttgaggtcaggagttctagaccagcctggccaacgtggggaaactctgtctctactaaaaaatacaaaaaaattagccaggcatggtggtgcacacctataatcctagctactcggaaggctgaagtgggaggattgcttgaatccaggaggtgggggccgcagtgagctgagatcacaccactgcatactccagcctgggtgacagagcaagactctgtctcaaaaaaaaaaaattatatatattatatatattcttacatatgttttacttacatatttgtgtatatgtattttatttaaatatgcatatatatgtaaacataacaaaacatatacatacgttttacccaaaatgtcataatttaaacttgtcagcaatgtgaaagttattaagataatatttatatactgttatttatattgacttcaaaacctgaatgctttttaaatttatgatacacctcaattcaaactagccctaattcaattgctcaataactgcatgactttttctccacaaaagtcatcatggagacttcccagctgcagaagaaagtatggggtttgagatcagccattgaatgctccctgagagctgatcattcttgtcttagagaggaagaggtaaattaggaaataattttattattttttattagcacaaaagggcagatggttgggtagcatgatgaaataattccagtgatcatctctagtcttgattttttctcagatttataaaagaaataaagagtgatgaagttgtttgagcaataaaagcacacaaagcaaccaagcagcaggaggatggtatgggtggctctgtgttcaggagatggctgggaagagaggctagggctgtgcagacgctgggctctccgccggtgtctgcagaggagactggccatgttgatgctggtccagaccatgaggaacacaaacaggacatggcgaatcaccatgacatttataaatgatccttgggggagttttatctgtttagatcacggatgtatgccaaatccattaaatagtaccaagaataaggaacatgtgcaaaatatatttgtggaatgaataaaataagtcccatagagcagtgcaatttaacagaaatataatccaagccccaaatgtatattaaattattgtatgtatggcctagtttgacaacagtcttgcaaatatccaggaccagaaatggtgaaattggtattggcctctacggtttcagtgatgtgaacgtagattagcatgttggtgatccagaggaaaatgaaagagggaacaaacctcaaggctgatatgcggatcacacaatagtttaccaaactgcccaatatcataaccagagacgttcacactacaaaccaggagaaaaagttggtgttttcacactgtataactttctgcaagatgctgaaacaagactctatatcataatgagactttcatctcacttaattcgaccttttctacttagcagaataatggtgtaacttaaattttatgatcaattccttctgcttataacttaacagaacccaacctacaaaattctttagtatccattggttaagcaagaaattgtctgtgatgttgctaatacgacatgctatacctgaataaattcctctgagaaaagttgaggctcctatacacaaaataagaaagcaggccatgtggttaccccaggtctcacctaactccctgctgtctcgaataactgtttgagttcttcaattagttgtctttaaacctaggtttatggctcaaaaccatatgcaaactgaaaatctcatattgctcttaatttgtatttccccttactttgtatttctcctttttaaactttgtatgtgttacttgttaaattttttcagaggtgcagctcctaacaaaataatactgaatcagcactttaaagggatagcaaaagactgtagaacagacaaaattgaacttactaatggactccagggagacttagcctgagagccacatccttcaaatctcttttgttgctcaaatgtgcttttgacatcgattcctagtcaccagtcactccccacaacatgggatgagaccagcaaactgggagaggtccatgctggcatcaggggacatcaaatcttaattacagaatgattgatcaataatgcttttagagaaagttcttgatcacaaggagaaatctgaaagttgtcagaacaaaatggagccactaatgttaagatgaccctgacaaataaagccaggaaagccatgaagagggggggtcttatccttgtatgcttgaaaatgaaaaagactctacaaaacccacaaccttgcataaaggtcattgcaaccttaaacaaaaaatatttctgcaaggaatgctgcccagcaactgcctgtccaacctcagactaatgtcacctttgtgcctgatcctgtggccaaggaaaatcctgtcaaaacaatatgcaatcctccccatttctgtcttcctttatcttcctgaatatatacatagtttaatatggcatatctattcccaattgcaatgctctattcccaaataaacactgtttcctttaggaagctttcatatgtttgttatttaggttaacacttgtaataattaaaggattacagttacaatgtaaaattattagtattaacaacacaaacattggtataaaaattattattacagaaattaaaacaacttgagtatggagagattaagactgtcccagccaagtcattgaagtcataaatttaagctatgactaacaggatgcaaagcttcctgagggttttgttttgttttcaacaagcggagggccccatttccctttccgacagcctcataggaacttctccctttcttctcaagtgaccaagaggaacagaacacagagcagcctggcagtgtccaagcaacaagcctccgctcctccttcctgcaccctggggctcctgaaactcacatggtaagcgctgcagaaacgcagcaggtggtgactttaggggaggacaggccaaatgggagaatccccttaagcttcggtttctctagttctcaacttcttttgaaataatgttcatagagaaggagggctgtctgagattcgagggaaacaagctctcaggacttccggtcgccatgatggctgtgggcggtaaacgcggttagtgcaagcatctgggccatcttcaatgtgagtaggaaaaaacacgactacacttacttctgcagagtttataatatccttgcccattatttacaataaaatatctaaaacataggtaataatatattttaaataaaattgaagcaatatatgaaatttctctgaaattcatccagccactctcggctgttgccactatccagaaacgtcttaatccccctgcatgatttatgtatttggtttgtattttaaatattattttctgtaatatttaaaacttgtatttgcttggtatcgtgctgtgcagtctcatgcaatttgatttttaatcaatattacttttttttttttttgagacggagtctcgttctgtcatccaggctggagtccagtggtgtgatctcggctcactgcaacctccacctctcgggttcaagcgattcttctgcctcagcctcccgagtagctggggtgacaggcgcccgccaccacgcacgactaatttttgtatttttagtagagacggagtttcactatgttgccagtctggcttcgaactcctgatctcaggtgatccgcccgcctcggcctcccaaagtgttgggattacaggcgtgagccaccgtgcccggcccaatagtacattttaaatatttatccatgtttacatgtggttttaataatttatgttaactgcgctacagtattaatgcaatgatgatattataatcaatgtatccattctttgatgatggacattcagtttgttaccctgttttctgatagcaaaccataatacaatggactttttatatgcattttcttgtccacacataatttcaagggtaggtgtgtcttgaagtctagatacagccagtttattc

(The sequence listing continues in the following parts.)

What is claimed is:

1. A library of a plurality of different expression constructs, each member of the library comprising a different nucleic acid segment from a genome, wherein the segment comprises transcription regulatory sequences operably linked with a heterologous reporter sequence in an expression vector such that expression of the reporter sequence is under transcriptional control of the transcription regulatory sequences, wherein a plurality comprising at least 20% of the transcription regulatory sequences of said expression constructs in said library are part of a common pathway.

2. The library of claim 1 wherein the transcription regulatory sequences that are part of a common pathway control the expression of genes involved in the same biological process.

3. The library of claim 1 wherein the transcription regulatory sequences that are part of a common pathway are all bound by the same transcription factor protein, complex of transcription factor proteins, other nucleic acid binding proteins, or other small molecule.

4. The library of claim 1 wherein the transcription regulatory sequences that are part of a common pathway control the expression of genes whose transcript levels or proteins levels change upon treatment or exposure to the same stimulus.

5. The library of claim 1 wherein the transcription regulatory sequences that are part of a common pathway contain the same DNA sequence motif or collection of DNA sequence motifs wherein a sequence motif is string of 2 or more nucleotides.

6. The library of claim 1 wherein the transcription regulatory sequences that are part of a common pathway control the expression of genes whose sequences, transcripts or proteins are connected via metabolic transformations and/or physical protein-protein, protein-DNA and protein-compound interactions.

7. The library of claim 1 wherein said common pathway is selected from the group consisting of oncology, membrane, vascular, neuronal, signaling and nuclear receptor pathway.

8. The library of claim 7 wherein said common pathway is an oncology pathway.

9. The library of claim 8 wherein said oncology pathway is selected from the group consisting of hypoxia pathway, DNA-damage pathway, apoptosis-pathway, cell cycle pathway, and p53 pathway,

10. The library of claim 9 wherein the regulatory elements are selected from the group consisting of SEQ ID NO: 1-3836.

11. The library of claim 8 comprising a plurality of transcription regulatory sequences differently selected from the group consisting of hypoxia pathway, DNA-damage pathway, apoptosis pathway, cell cycle pathway, and p53 pathway.

12. The library of claim 11 wherein the regulatory elements are selected from the group consisting of SEQ ID NO: 1-3836.

13. The library of claim 7 wherein said common pathway is a membrane pathway.

14. The library of claim 13 wherein said membrane pathway is selected from the group consisting of transport protein pathways, G-protein coupled receptor pathways, ion channel pathways, and cell adhesion protein pathways.

15. The library of claim 14 wherein the regulatory elements are selected from the group consisting of SEQ ID NO: 3837-12716.

16. The library of claim 13 comprising a plurality of transcription regulatory sequences differently selected from the group consisting of transport protein pathways, G-protein coupled receptor pathways, ion channel pathways, and cell adhesion protein pathways.

17. The library of claim 16 wherein the regulatory elements are selected from the group consisting of SEQ ID NO: 3837-12716.

18. The library of claim 7 wherein said common pathway is a nuclear receptor pathway.

19. The library of claim 7 wherein said nuclear receptor pathway is selected from the group consisting of glucocorticoid receptor pathway, peroxisome proliferator-activated receptor pathway, estrogen receptor pathway, androgen receptor pathway, cytochrome P450 pathway, and transporter pathways.

20. The library of claim 19 wherein the regulatory elements are selected from the group consisting of SEQ ID NO: 12717-13994.

21. The library of claim 18 comprising a plurality of transcription regulatory sequences differently selected from the group consisting of glucocorticoid receptor pathway, peroxisome proliferator-activated receptor pathway, estrogen receptor pathway, androgen receptor pathway, cytochrome P450 pathway, and transporter pathways.

22. The library of claim 21 wherein the regulatory elements are selected from the group consisting of SEQ ID NO: 12717-13994.

23. The library of claim 1 wherein said library comprises at least ten, at least 50, at least 100, at least 200, or at least 1000 expression constructs.

24. The library of claim 1 wherein the segments have an average length of at least 200 nucleotides.

25. The library of claim 1, wherein the average length of the nucleic acid segments in the library is between 200 nucleotides and 3000 nucleotides.

26. The library of claim 1, wherein each nucleic acid segment comprises at least 200 nucleotides upstream of a transcriptional start site.

27. The library of claim 1, wherein the reporter sequences encode the same reporter molecule.

28. The library of claim 1, wherein the reporter sequence encodes a light-emitting reporter molecule, a fluorescent reporter molecule or a colorimetric molecule.

29. The library of claim 1, wherein each reporter sequence comprises a pre-determined, unique nucleotide barcode and/or a reporter that reports a visible signal.

30. The library of claim 1, wherein the genome is a mammalian genome.

31. The library of claim 1, wherein the genome is a human genome.

32. The library of claim 1, wherein the genome is a mouse genome.

33. The library of claim 1 comprising at least 10 different expression constructs, wherein about 50% of the transcription regulatory sequences of said expression constructs in said library are part of said common pathway.

34. A library of isolated nucleic acid molecules, each member of the library comprising a different, pre-determined nucleic acid segment from a genome, wherein the segment comprises transcription regulatory sequences, wherein a plurality comprising at least 20% of the transcription regulatory sequences in said library are part of a common pathway.

35. The library of claim 34 comprising at least 10 different pre-determined nucleic acid segment from a genome, wherein about 50% of the transcription regulatory sequences of said library are part of said common pathway.

36. A library of cells, wherein each cell in the library of cells comprises a different member of a library of expression constructs, wherein each member of the library of expression constructs comprises a different nucleic acid segment from a genome, wherein the segment comprises transcription regulatory sequences, operably linked with a heterologous reporter sequence in an expression vector such that expression of the reporter sequence is under transcriptional control of the transcription regulatory sequences, wherein a plurality comprising at least 20% of the transcription regulatory sequences of said expression constructs in said library are part of a common pathway.

37. The library of claim 36 wherein the cells are human cells.

38. The library of claim 36 wherein the cells are non-human cells.

39. The library of claim 36 comprising at least at least 10 different expression constructs wherein about 50% of the transcription regulatory sequences of said expression constructs in said library are part of said common pathway.

40. A device comprising a plurality of receptacles, each receptacle containing a different member of a library of expression constructs, each expression construct comprising a different, nucleic acid segment from a genome, wherein the segment comprises transcription regulatory sequences, operably linked with a heterologous reporter sequence in an expression vector such that expression of the reporter sequence is under transcriptional control of the transcription regulatory sequences, wherein a plurality comprising at least 20% of the transcription regulatory sequences of said expression constructs in said library are part of a common pathway and wherein each member has a known location among the receptacles.

41. The device of claim 40, wherein the library has a diversity of at least 10 different nucleic acid segments.

42. The device of claim 40 wherein the average length of the nucleic acid segments in the library is at least 200 nucleotides.

43. The device of claim 40, wherein the constructs are in the form of a dried nucleic acid or are in solution.

44. The device of claim 42 wherein the constructs are in a stabilized transfection matrix.

45. The device of claim 42 comprising a microtiter plate such as a 96-well plate, a 384-well plate or a 1536 well plate.

46. The device of claim 40 comprising at least at least 10 different expression constructs wherein about 50% of the transcription regulatory sequences of said expression constructs in said library are part of said common pathway.

47. A device comprising a solid substrate comprising a surface and nucleic acid molecules immobilized to the surface, each at a different known location, wherein each molecule comprises a nucleotide sequence of at least 10 nucleotides from a genomic segment comprising transcription regulatory sequences and wherein a plurality comprising at least 20% of the transcription regulatory sequences in said device are part of a common pathway.

48. The device of claim 47 wherein said device comprises transcription regulatory sequences from at least 10 different genomic segments.

49. The device of claim 47 comprising at least 10 different transcription regulatory sequences from genomic segments wherein about 50% of the transcription regulatory sequences in said device are part of a common pathway.

50. The device of claim 47 wherein each genomic segment is represented by a set comprising a plurality of molecules, each molecule in the set comprising a different nucleotide sequence from the genomic segment.

51. A method comprising:
(a) providing a device comprising a plurality of receptacles, each receptacle containing a different member of a library of cells, wherein each cell in the library of cells comprises a different member of the library of expression constructs, each expression construct comprising a different nucleic acid segment from a genome, wherein the segment comprises transcription regulatory sequences, operably linked with a heterologous reporter sequence in an expression vector such that expression of the reporter sequence is under transcriptional control of the transcription regulatory sequences; wherein a plurality comprising at least 20% of the transcription regulatory sequences in said device are part of a common pathway and wherein each member of the library of cells has a known location among the receptacles;
(b) culturing the cells; and
(c) measuring the level of expression of the reporter sequence in each receptacle.

52. The method of claim 51 wherein the library has a diversity of at least 10 different nucleic acid segments.

53. The method of claim 51 wherein the average length of the nucleic acid segments in the library is at least 200 nucleotides.

54. The method of claim 51 wherein the step of providing the device comprises:
(i) providing a device comprising at least one plate comprising a plurality of receptacles, each receptacle containing a different member of the library of expression constructs, wherein each member of the library of expression constructs has a known location among the receptacles;
(ii) delivering cells to each of the receptacles; and
(iii) transfecting the cells with the expression constructs.

55. The method of claim 51 further comprising:
(d) perturbing the cells in each receptacle;
(e) measuring the level of expression of the reporter sequence in each receptacle; and
(f) determining whether the level of expression in any receptacle changed after perturbing the cells.

56. The method of claim 55 wherein perturbing comprises contacting the cells in each receptacle with a test compound, exposing the cells to different environmental conditions, or genetically modifying the cells either permanently or transiently such as by inducing mutation, overexpressing a transcript for example by transfecting with a cDNA or decreasing expression of a transcript by siRNA.

57. The method of claim 56 wherein perturbing comprises contacting the cells in each receptacle with a test compound.

58. The method of claim 57 further comprising identifying a compound that alters transcription of one or more polynucleotides.

59. The method of claim 51 wherein said cells in said library of cells comprises cells associated with a condition.

60. The method of claim 51 wherein each cell in said library of cells comprises a DNA polymorphism such as SNP, STR, VTR and RFLP, DNA mutation or DNA epigenetic change.

61. The method of claim 60 wherein said DNA epigenetic change is selected for the group consisting of chemical modifications and chromatin structure.

62. The method of claim 61 wherein said DNA epigenetic change is a chemical modification.

63. The method of claim 62 wherein said chemical modification is DNA methylation.

64. A method to determine the functional effect of a DNA polymorphism, DNA mutation or DNA epigenetic change in the transcriptional activity of a polynucleotide comprising:
(a) providing a first library of cells wherein said first library comprises cells comprising said DNA polymorphism, DNA mutation or DNA epigenetic change;
(b) providing a second library of cells wherein said second library comprises cells not comprising said DNA polymorphism, DNA mutation or DNA epigenetic change;
(c) providing a device comprising a plurality of receptacles, each receptacle containing a different member of said first library of cells or said second library of cells, wherein each cell in said first and second library of cells comprises a different member of the library of expression constructs, each expression construct comprising a different nucleic acid segment from a genome, wherein the segment comprises transcription regulatory sequences, operably linked with a heterologous reporter sequence in an expression vector such that expression of the reporter sequence is under transcriptional control of the transcription regulatory sequences; wherein a plurality comprising at least 20% of the transcription regulatory sequences in said device are part of a common pathway and wherein each member of the library of cells has a known location among the receptacles;
(d) culturing the cells;
(e) measuring the level of expression of the reporter sequence in each receptacle;
(f) comparing the level of expression of the reporter sequence to each transcription regulatory sequence between said first library of cells and said second library of cells thereby determining the effect of said DNA polymorphism, DNA mutation or DNA epigenetic change in the transcriptions of a polynucleotide.

65. The method of claim 64 wherein said DNA polymorphism is selected for the group consisting of SNP, STR, VTR, RFLP, deletions, and insertions.

66. The method of claim 64 wherein said DNA epigenetic change is selected for the group consisting of chemical modifications and chromatin structure.

67. The method of claim 66 wherein said DNA epigenetic change is a chemical modification.

68. The method of claim 67 wherein said chemical modification is DNA methylation.

69. A business method comprising commercializing the compositions, devices of methods of claim 1, 34, 36, 40, 47, 51 and 64.
